United States Patent Application Publication US 2011/0214205 A1 - sequence listing, part 4

SEQ ID NO: 10455 - DNA, 1329 bp, Setaria italica
  Peptide Sequence Number=SeqID_76429
caacaacacgcttgtgcagctcttcctccagatacagcaacttctctctgagcaggtggacaggcattccagtctctaaactaaagcaatccgacagagagaagttgctgtatctggaggaagagctgcacaagcgtgttgttggtcaagatcctgcagtaaaagcagtctcagaggctattcagagatccagagctggtctgtctgacccaaaccgtcctattgccagtttcatgttcatgggacctacaggagttggcaaaactgagctagcgaaagcccttgctgcttttatgttcaacactgaggaagctgttgtaaggatcgacatgagtgagtacatggagaagcattcagtctcaagattgattggtgctccgccaggttacgttgggtatgaagagggtggtcagctaactgaggcagttcgccggaggccatattctgttgttttgttcgatgagattgagaaagctcattcagatgtcttcaatgttttccttcaaatattagatgatggtagggttaccgactcccaaggacggaaagtgagcttcaccaacactatcattatcatgacgtccaacgttgggtcgcagtacatactaaacatggacgaagaaggtggatcatctgattcagcctacgagaacataaagaagagggtgatggatgctgcaagatcagtattccgccctgagttcatgaatcgtatagatgagtacattgttttcaagcctcttgagagagaacagatcaacagcatcgtcaaattacagctggcaagagtacaaaagaggattgcagatcgcaagatcaagcttgaagtctcacctgcagcaatcgaattcctaggaagccttgggtatgacccgaactacggtgcaaggccagtgaagcgggtgattcaacagtacgtggagaacgaacttgcaaaaggcatcctcagaggtgatttcaaggacgaggacagcatcgtggtagacacccaggtcacagtgccatctaatggccagcttccgcagcaaaagcttgttttccgaaaggtcagtgaggaatcaaaagcagctgctgaaggcgagaagttcttgccggccgtctgatggagtatgatttcggttcacagattgttagcaataaaatgtacatataagggtgacaaattgtagagttttccttctgggcatagaagagtaagaattcctatttgtcgttctacagcacactaagtgaaaatttatgctgagcagcgaattttgttatggttctgccaagcgatttccccagtgatagtgaagtatatccactagcctgtgctttctagtagaa

SEQ ID NO: 10456 - DNA, 524 bp, Setaria italica
  misc_feature (1)..(1): n is a, c, g, or t
  Peptide Sequence Number=SeqID_76430
naggatttatttagggagaagaggaagaaggtgaagatgagatttactagaaggtgagcttgaagatgatcgatggatgcaaggcgcggcgaatagggagaaggagaaggagcaggctgatgtcggcatgtctgtctccgtcaacggtgattggttttttcctccctatataattgttttaatgttctatctatctgtcactccttcaacgctacatgtgggcgggttggcttgcgctgccagttgtgaactccttccgtgacatggaacccaagatggtgagtgcaacgcattggagaagcatgaggatgtcctgttacctcatcaaggtttgcatactgcatctcgatttgctctagatttactatgatcactaggcaaattggtggttgtggtaacctaaggagctacaatgagaagaaatttggccagccctggcaaacgtcggcgttgaactggatcatcaagtccctggacgtgtttcgacttaaagtagatgcttggttggcttatcacacccaggg

SEQ ID NO: 10457 - DNA, 913 bp, Setaria italica
  Peptide Sequence Number=SeqID_76431
tttctcagctgcagagcagacgggcggcgatgcagcaccggcgcaagcccgcatccgctgcggcgccggccgtcaccaagccgccgccctctcgcaggcccaccgcgccgctgtcgctcgcgggcctcgtcgtcgccatcttcctggtggccgtcttcctctacaacgacgacgccgtcaagcccaccgagaccgtcgcagtcgcggggcgggcgaggtctccggacctgcgggtcctgcaccaacaacacgacgaggacgtggaggtggaggaccaggtcgtgagggatggggacgccaaccacaagcaagcacagacggaggacaagcaagcagagacgacggaggagaagcaccaacaacaacaggtggtggtgcggctgccggcgggttgcgatctgtaccaggggcggtggacgtacgacgcggccggggagcggtcgccgctgtaccgggagtcggagtgcgagttcctgacggagcaggtgacgtgcatgcgaaacggccgccgcgacgactcctaccagaagtggaggtggcagccccacggatgcgacctgcccaggtttgacgcgtcgctgcttctggagcggctgcggaacaagcggctcatgttcgtgggggactcgctcaaccgcaatcagtgggagtccatggtgtgcctggtgcagtccgtcgtgcccacgggccaaaagacgctgcaaaagttcgtcaacaacggatcgctcaacgtcttcaccgcgcacgagtacaacgccaccgtggagttctactgggcgcccttcctggtccagtccaactcggacgacccccaggtgcacagcgtcatggaccgtgtcatcgcctggcgcgccatcgccaagcacgccaacaactggaagggcgtcgactacctcatcttcaacacctacat

SEQ ID NO: 10458 - DNA, 428 bp, Setaria italica
  misc_feature (409)..(409): n is a, c, g, or t
  Peptide Sequence Number=SeqID_76432
aaataaggaacgaccccccgaccgggacgaccggacggacaagggcattattgccctggacgcgtgctccggctgcggcggcgtgcggttcgtgccctgcgaggagtgctccggcagctgcaaggtgttcctcgaggaggtgggcaccttcaggcggtgccccgagtgcaacgagaacgggctcgtgcggtgtcctctctgccccctgtgaaaagaaaaatctcagagctgctattggatgatttgtagtgtggtttttgcaggattgctgaggagtgcttgtcgttttagttcagggtttgtacagaagttacacgcattatgtaactttaggactgatgaagagcaacagatgactgtatttatgtttttgtttctcactggattcggattgtgtaaaagcatgacngcaatcttactagaaaaaa

SEQ ID NO: 10459 - DNA, 1350 bp, Setaria italica
  Peptide Sequence Number=SeqID_76433
tagacaaagactttagacaaatgtgtggaggcaagttctgaaattctgcgtgaggttggagatttgacagagctaagaacattcggtgtctgcaatgtgagaagtgaacactctggtaacttaagagatgctgtcaacaaaatgagtcatcttgttcatctacaaattacaactctaggggaggaggaagtgctgcagctagagggacttgtttacctccaaccgtttctaagcttgatttactaggacagctggagtcaatacctaaggttctgtcatcttggtctcgcctcagtagcctcacaatgttggacatgtcattctgcagaattgatgaggagtcgtttcccagtttgttggtgctacgtggtttatgtcaccttgaccttatcaaggcttttgatgggaagaagctgcacttcactgcagggtgtttcccaagacttcagcgtctattaatatggcacgcaccacagctcaatcaagttcaaatagaacagggtgcaatgtcaaaccttgctcagctctactttggtcactgtcctatgctgaagtttcttcctcaagatattgaacaccttaaaaaccttgtggagttagggctgaaggatgcatcagatgagctcgtagagaggctttggcggaagggaggaccagatgaatgcaaggacgatcgtatggacattagccacatcagaaaggttattgttattatgggcacccggcaatggataatgtgatcgaaagactacctgctgctaaggccttatgactgtcagaagctgcactgccttgcagcaattccactcccggacttccatactccagattgtcttctcgttagctgcataccagagttcggaagtcccaagcaagatacatttctcggaatgccagctgctgcctgtcagcatgaaggaagtcacagggccagcagaattccagtatcggcatgacgaatgacaattggtgcttggggaactcaagggaggatctttgctaattttaaatatcatagatactggtgaaggttgttggcttctgagggccttcaccatttcattatctgaactgtagtctatatctgtgaactcgtgaaatggagagctctgtttgctcttcttgaagttattttcagaagttgaaaggcgagttgtcgcttttcttgaaacctttttcgtttcaaaagttgtctcctttctcttttgtggttgtcgccttaccctctgattaacaatgtagagttctagacacaattgtattttaattcttgtcgaatccaacatttttatgacacttcgatcatatgtcccctcatatccattaaagttttaaaaaaaaaaaaaaaaa

SEQ ID NO: 10460 - DNA, 665 bp, Setaria italica
  Peptide Sequence Number=SeqID_76434
ctagtctaaggtaatgttgtttttgggactagatagaatttgagcacagcaggtttttgcctgggactccgttcattgttccctcttgcatcatccaaccaataatgtacatccatcatactgttatatcctctcgtgagcatgatacgaagataatgtacatttatatcgtttaaaatgatacgaagattgacttttctaactttgatcggcaggccttatgactgtcagaagctgcactgccttgcagcaattcctctcccggacttccatactccagattgtcttctcgttagctgcataccagagttcggaagtcccaagcaagatacatttctcggaatgccagctgctgcctgtcagcatgaaggaaatcacagggccagcagaattccagtatgcggcctccgggaccttctacagcatgccccggggcgagtcggtgtcatcatctgtcaagcttagaaattacttggaacttaatcctgtcgtctcgtaaggagtagcatatcatcgatgcccgcggatttaatttgcgtgtgtgttttcttttggagaaaataatgtttcgtccgcttctttggatggctggcgttcatgctttgcaactgcctgctgctcaattgcatcgatgatggccactagtttaacgttgtcttgcgttt

SEQ ID NO: 10461 - DNA, 2749 bp, Setaria italica
  Peptide Sequence Number=SeqID_76435
aataaagttgatgagactttgagagagacctgatgatggatgagtttgtgaatgattcagcgccccatgacacaaacaactcataacctgctaatgctaatccagcacgccagtgcgcgctggtgttgtttcggacatagtccatccagttgtaactcagctctcaaccatccacgcaacaaccaccatggctgaagcagttgtagggttgctgattggcaagctcggtgcggctttggtgaaagaggcagcaagttctggtgcatcactgctctgccacgaagcctctgccctcaagggtctctttggtgagatccatgaagccaaggatgagcttgagagtatgcaggtttacttgaaaacagcagagcggttcaaggacactgatgagaccaccggcctcttcgtcgacagaatcaggggcttcgcttttgagatcgaggatgttgttgatgagttcacctacaagctggaggacaagcacggagggtttgtttccaagatgaagaagaggatcaagtatgccagtacctggcgccggcttgcgcacaagctgaatgatatcaagggcaggcttcaaggggctaagcagcagaaccaggactacaccatgaaacaaacggatagaaatgctggaggcattgcttttcatgccaatcaagctttgaatttcacaagggatgaggaccttgtggggattaccgagcacaagaagcaactggttcaatggctagcaggtgatttagaacagagatgcaaaatattcgctgtttggggcatgcctggtgtggggaaaacaactttggttgctcatgtgtacaagaccatcaaaatggactttgatgctgctgcatgggtaaccgtgtcacagagttatgatgttcaagaggtgttgaagaaaattgctggagagtttggcatcacagctgatgttgccaacatggaaatggaaagactagctcagaccatctacgagtacctccaaggtaaaaggtacatcttagttctggatgacatttggactgcagatgtctggtcagagataaggactgttttcccatctaattgtattggtcgatttgttatcacatcaagaaagcatgaagtatcattattaggaaccagtaattcagctattcacttggaaccacttgacaaagataactcttgggagttattctgcaaatcagccttttggaacgatggtgagagaaagtgcccattgcacttgaaggttttggctttgaaatttgtcgagaaatgtgaagggttgcctattgctattgcatgcatcggtagccaattatctgcgaaaggacaaacttctgccgaatgggaaaaagcatatgatgagttagagctgcagttggttaaaaatgtgatgcctcgtgttgagactattcttaacgtcagcttggaggaccttccatgtgatttgaaaaattgtttcttacactgtgcattattcccagaagattatcccatcaagaggaggacagtaatgaggcactggattagtagtgggttcatcaagaagaaggggaaccaaacattggaggaagtggcggagcagtacttgactgagcttgtgaaccgaagcctattacaggtagtggagaggaatcatactgggcggttgaaatgttgtcaaatgcatgatgtcatacggcttgttgcgctcagaaaagcagagaaagaatgctttggtaaagtgtatgatggctctggggaattttctggagggcccacacgtcgtatatcaatccagagtagaaaccttgaccgaattagtccatcaaatgcatcacatatccgttcacttcatgtttttagaggtatatcgatattgatttgctgaggcccatcctaacatcttcgtatttgttgtcaacgttggatctgaaaggtgcttgtatcaagatgttgcctactgaggtattcaacttgtttaatctgcggtatttgggccttagatatactgctattgaaagtctacctgaaacaataggaaggttgcaaaacttggaagtgttggatgcttgtaatgctcagttgttgtatttgccaaataacattgtaaaacttcagaagttgagatacatttatgcatgtaacgtttatcaaggagaaggagatattcgccctatcattggtgtaaaggtgcctagtggcataaggcacttgacgtcactgcaagctttgcaatgtgtggaggcaagtccagaaattctgcgtgaggttggagatttgacagagctaagaacattcagtgtctgcaatgtgagaagtgaacactctggtaacttaagagatgctgtcaacaaaatgagtcatcttgttcatctagaaattacaactctaggggaggaggaagtgctgcagctagagggagtttgtttacctccaaccttgtctaagcttggtttacaaggacagctggagaaaaaatcaatacataaggttctgtcatcttggtctcacctcagtagtctcacaaggttgcagatggaattctgcagaattgatgaggagtcgtttcccagtttgttggtgctacgtggtttatgtcaccttgaccttatcaaggcttttgatgggaagaagctgcacttcactgcagggtgtttcccaagacttcagcgtctattaatatggcacgcaccacagctcaatcaagttcaaatagaacagggtgcgatgtcaaaccttagttacaaaataagaaacaagggtagacaaatagtacaaa

SEQ ID NO: 10462 - DNA, 1349 bp, Setaria italica
  misc_feature (1254)..(1349): n is a, c, g, or t
  Peptide Sequence Number=SeqID_76436
aaacttgcttcccaggagcagctgtttgtgagggaatcccaaactaggaaggttgcagagacaaaggcaaggagcatggaagaggaagtaagcaagctgcagaaatgcttacaggagaaggatgaggaactacgttcatcgacaagtagcacagaacagtacctccacgagttggatgatcttagaacacagctgtcatttacccgggctacagcagaagcaagtgctgcatcagccaagtcagctcagttgcagtgcttgtcattgctgaaagagctgaatgagaaggactgctcgctgaaagagcacgaacttcgagtgaacaaactaggtgagcagcttgatcttctccagaaggatctgcaagcaagggagctctcacagatgcaactcaaagatgaagttatacggattgaaactgacatcatggatgcagttgctaaagctggctccaagtctgacaaagataatgagcttctaaagatcttatctgatgtttcaccaaggaatgttcagaatctcaacaaccttttgaatgctaaggatacagagattgcgaggttgagagaggaaatcaggatattatctgctcattggacgaacaagaccaaggagttggaatcacagttggaaaagcaccggagaactgatcaggaactgaagaagagggttctgaagcttgaattttgtctacaagaatcacagtctcagatgcgaaaactcaagaggatgggggagaaaagggacaaggcactcaaggagctcatggaccaggtggtggccatgaagcagcccaacggtccctgccgtgacatcaaggagaatttctgggagagccagggcttcaagttcatcgcctccatgtcgatgttagccctggtgatccttgcaaaacgatgaaaatggcatcctgaactaaatcatgtataaagaagttagagattccagtggtaggtgagcagctagctcatagtttgtagtttaagaagctgtcgatgtagcggttccattagtttgtagactttaggcagttgggcatgcatactgcatgatcagatgtccaaaccgaaacttgccgacatccaaaccctagtcctgtagactgtaatagtagtagtctgtactctgcagttcagtttctgtcttgtactgacagctagttcgtgtaagctcacgagcagtcatgtagtcatggatctacatataataatttcagagtacctaccgcagttgtcgctgcggttttaatagttnnnnnnnnnnnnnnnnnnnnnnnnnnnnnnnnnnnnnnnnnnnnnnnnnnnnnnnnnnnnnnnnnnnnnnnnnnnnnnnnnnnnnnnnnnnnnnnn

SEQ ID NO: 10463 - DNA, 655 bp, Setaria italica
  Peptide Sequence Number=SeqID_76437
cacccccatcgcatcggcggcgaagaggaggagcaattgcagcagcagcagcgatggccgtgatggggaggctcaggatcttcgtggtgcaggagccggtcgtcgctgcatcctgcctcatcgccggatttggtctttttcttccagccgttgtcaggcccatcttggattcttttgagactgccaaacaagttccccaaccagctccgagcgatgtggttgctggtgtcactagcaagaaataagagttattttattttatttcttttcttttgtttgtgtgcgttggacttgtgatggttttacacctaggtgataaggctcctagactattgccacgtgcattcgatatttttcagaagttcaaaagccagcacgagtcctcatgtttgtcaaagtaatggtggcagctgtttttcccgctgcggtctgggaaaattacagaaaaaatgatgaacatcaattgtcctctgaatactgtggtgttttgtccgtttaaggtaatttgagaaaacggtcggcagtgtgatagataggtggaagagatgcttttgtccgctttgaagtttgaatcgttgaaaagtatatgttggtgttggtcctgttctacctttagacctgattgtttgaaaacccagtctctaacattgcatct

SEQ ID NO: 10464 - DNA, 707 bp, Setaria italica
  Peptide Sequence Number=SeqID_76438
aaagggagcaagatacttctgacaactcggtcacgtatggtggctgagatgttgcaatcgtcctatataatttgtttggaggccttgctagttaatgactgttggtccctgataaagtcttgtatgtttgatgagacaagccacaacatcaactcacaattggagaacatcggaaggaaaatcgctgagacactcagtggtcttcctcttgctgcaaaggttgtagctagacacctaaaacagtgctttgcatattgcagcatcttccccaggggctgggaatttgaagctgagcagctgattctccagtggatagcacaaggttgcaggagaatggaggacattgggaaggaatacataaatgatctgtgcaataagtccttcttcgcaattcagaagaaagaatttgtcagctattatgtgatgcctcctgtaatttatgagcttgcaaaagcagttgcaacagaagaatgcttcagaataggagatgatgaatggacaagaatcccatcatcagtacgccatctgtcagtgcatctagatagcctttcagcacttgatgacacaatcccatacacgaacctgcgcactctcattttcctcactagcaatacagtggctccaatcaaagcttccatccctcaagtagttctagataatgtaaaaagcctccgagtattggatttatcaccatgcatgatggacag

SEQ ID NO: 10465 - DNA, 810 bp, Setaria italica
  misc_feature (784)..(784): n is a, c, g, or t
  misc_feature (803)..(810): n is a, c, g, or t
  Peptide Sequence Number=SeqID_76439
ggcggcggcgcgctagcgatcttgaaagggcggaagcagaaggaagcaccgccggtcaggtcacttcgccgttcgcccagccatgtcgaagaggaagaccagggaacccaaggaggagactgtcactcttggacccactgtccgtgaaggggagcatgtctttggagtagctcatgtttttgcatcattcaatgatacattcatccatgtcactgatttgtctgggagggagactctcgttcgtatcactggtggcatgaaggtcaaagctgaccgtgatgaatcatcaccgtatgcagctatgcttgcttctcaggatgttgcacaacgttgcaaggagcttggtattactgctttgcacattaagctccgcgccactgggggcaacaagactaagacacctggacctggtgctcagtcagctctcagggcacttgctcgatctggcatgaaaatcggacgcattgaggatgtgaccccggttcccactgacagcacacgcaggaagggtggcaggagaggaaggaggctgtagatgtcttattttctgtcattcttgtggatgtcaccaagaatcccctatttggatagtcttacagctttaatgttatggtgaagctttggttttgttcagtgttctgaattattggctgtctgccaattcggcaatatgtttggttaagaaattttgctcacttttgtgcaagcaatctcaagaatcacgaaattttgcttggtattgttttatgatcttgccaaaaaaaaaaaaaaaaaaaaactaagngacacgcaacagggagtannnnnnnn

SEQ ID NO: 10466 - DNA, 292 bp, Setaria italica
  Peptide Sequence Number=SeqID_76440
atgagacccctcatgttatttgctgagttatccaagttctcttcactcagaaatcatcccggacaaaagtggtgtatcaaagtgaagagaacttggataactcagcaaataatatgagaccctcatgttttcctcgtttgattttgttcagatgtaggctttcctcttgcatgtaatcctcacgagggagtgataatttgacctaattttcatcacagagaaattgctttggtccaactgtgttatatggtctttgtgtttcaaaaatattggtccaaggtgcatgctgtac

SEQ ID NO: 10467 - DNA, 825 bp, Setaria italica
  misc_feature (765)..(825): n is a, c, g, or t
  Peptide Sequence Number=SeqID_76441
ttaaccttaactaaccttactaaccttttcctcacctcacctgcgaaggaaaaggagagtctgcgtctgcgagagagccgacgacacgcgaagggtgaagcgagattagcggcggcgatggctctcccggcgtcgagctccggcctcttccgcttcctctcaccccgcagccgcccccagtccaccgacatcgccgccgccgccacatggggcgtcttcgccggcgccgccggcctctacctcgtccagccgtttgactggattaagaaaactttcttcgagaaaccggaaccagaggcatgagtgtccaggcatataaaaggctgcaactttgatacaccacttttgtccgggatgatttctgagtgaagagaacttggataactcagcaaataatatgagacccctcatgttttcctcgtttgattttgttcagatgtaggctttcctcttgcatgtaatcctcacgaggggagtgataatttgacctaatttttcatcacagagaaattgctttggtccaactgtgttatatggtctttgtgtttcaaaaatattggtccaaggtgcatgctgtcaaactcgtatcctcattagtgtagtttgtacgggcacggcgtccgtgtaaattgatccaccaatatctagctgattgatattggattatgatgtcattttctcatcactatcgtcctaggatcttgtcacataatgcaaggatagcaacttatcttgctttaccgttttaaaaaaaaaaaaaaaaannnnnnnnnnnnnnnnnnnnnnnnnnnnnnnnnnnnnnnnnnnnnnnnnnnnnnnnnnnnn

SEQ ID NO: 10468 - DNA, 1056 bp, Setaria italica
  misc_feature (1)..(42): n is a, c, g, or t
  Peptide Sequence Number=SeqID_76442
nnnnnnnnnnnnnnnnnnnnnnnnnnnnnnnnnnnnnnnnnnaaatttaatcagtcacattacactgccccctataggagttcagaagaatctgataaagcccaacactgtcagtctacacaaatctataaagagatatggaaaacaacatcaaagacagaagaaaagcattgagcccaacggaacggaggatattgaggaaaccaaaactttacactaattcaaccctgaaatcagattctttccctctatttgttggaatagcagctcaaagcacacaagatgggaaccatggggagtgcatggacaaaggctcaaggtatcctaaataatagaactgtatatgtaccggcagtgttcatgcacaagtgctatgtatggatggccccgattgtctcttcctcgaaacgcttaatttccactgttagacgtttcatgttgtcatcgtagacatatggtattccctcaaacattaccttgctcccgttagtcggtttttgcacaaattccctgcagggttcccccatgatgttgatcgagttgtgatagtggtagtatcggatcaacctttccgtcttgtggcttgtcctcccaattacattttgcgacatgtgcacacctgtggagtatgcgttccgagcttggattgcgtatttgcgatctcgcctgactccagtaatagaattacggaagacaagtttctcaaaaccccattccctcgagtattccttgtttggatcctccacgcagagcttgctagacatgggattctgctcaatggtaaactgcgtgtagcgctccagctgcccgagcacctcctgcagcgtccggccgtcggggaggtagatgtactcgtcgacgtcgaagaagaaggtccaattcgcggcgtgccggtaccggtggaggcagtcatttaccaccaagaactggttgtaatagtagccgtcgtactccgcctgcgcccggatgtcctggactgtgacccggccggccctgacccatggatcgagcaccgcccggacctccgggctgacgccgccggcgtccatggagcac

SEQ ID NO: 10469 - DNA, 1616 bp, Setaria italica
  Peptide Sequence Number=SeqID_76443
tttacctagaaatttaggaataattaatctaggagtaaaaggctagaagaactataaacagatgtgagggatacagggataacaaggtaaagagaagaaattgcagcaacagcagcgactctgtagagaggtcacgccaataaagaccaaaactttacaccatttggaccacccctaacaggcccatccaccattgaccggccagatgaagttgcaacgccgcacaatagcagcagcagatcgagggtccgcatgaaccgaagcatccaaagaatgtcaatgtatatatgtaccgtcagccttcagttgccgagcttgctactatgtctgaactgatccgatggtctccttctcgaaccgcttgatctcgcccgccactcgcttcatgctatcgtcgtacacgaagggggtcttctcaaacatgatcttgctaccgttaactggcatcgggacgaactcacggcacggctctcccatgacgttgatggagttgtgatagtggtagtatctgatcaggctctccgtcttgtgcgttgtcctcccgcggacgttttgcgacatgtgcactccagttgagtaagcgtttcgagcttggatggcgtacttgcgatcccggcgaactttggtgatggagttgcggaagacgagtttctcaaatccccattctcttgagtaatttctgcttggatcctccacgcagagcttgctggacattggattctgctcgatggtgaactgagagtaccccgagagcttgccaatcacctcatcgagcttctgcccattaggcaggtaaaggtactcgtcgacgtcgaagaagaaggtccaattggcggcgtgccggtaccggtgcaggcaatcgttcaccaccaagaactggttgtagtagtatccatcgtactccgcctgcgcccggatgtcctgcacggtgacccggccggccctgacccacggatccagcaccgccttcacctccgggctgatgccgccggcgtcgtggagcacgaagtgcgacctgggcccgaagaagtgagcgtggtatgccacccactcgcgcatccggctggcgctgaggttgccgtacagcgacgagccgcagtagaggtagtcgtactggaacggcgggctgaagcgggactcgtcgtaggagcccggcgcctcctcgagagcgacgaagcgctcgtaccgacgggaggcggtggagtagtaggcgtggacgaggagcttgccgccggcgttcccggcgttggggttggacgggaacgtgcagttgacgacgacgacggtgtagacgcggccgtagccccagtccgggagcatcttgtacgccttggtccggacggggcgcggcgaggggtcgctggcggtggggttgggcagccactcgcacttgaagtagggggtgccgaacacgtgggtgggcttggacgccaggccccacgacggcgaacgtccgcggcccgccccggtacgcgcccatctgcacgaacagcgccgctgcgctgccgtacggcccggagcacccgcttgttcggatcctccggccgcgccggccgcgccagacgcacgtgggcggcattagcagcggctgtggtggtacctgaaaccgccgccgg

SEQ ID NO: 10470 - DNA, 1415 bp, Setaria italica
  misc_feature (1)..(83): n is a, c, g, or t
  Peptide Sequence Number=SeqID_76444
nnnnnnnnnnnnnnnnnnnnnnnnnnnnnnnnnnnnnnnnnnnnnnnnnnnnnnnnnnnnnnnnnnnnnnnnnnnnnnnnnnnataacctaaaacttgagaatccattggctcagaaacatcaatcgatcacagaacggcgatgtctcacgattcagcatctcacacaaccagctggttccacgacacatcaccctcgcaaacaaaaaactacgctcatcgggaccaacaacacagcaaagtatacacctacagcgaaccaacaactacaaccacacagactctgcacttcatacttcagtcgctcacctagtgcacctgtgcggtcctacacgccgacagcggggagcctgccgctactggcaacggggaagccgaactcgacaggcgtcgtggcgagggctgcgccttcatgggtgacctggggacggaacctgatgacaacgtccgctgtgtgtccacctgcggtgctgtgacgttgtacttggggtcctgcagctgctccagtttctccaggacctcagacatcgctggccgcgccttagcatcgctgccgatgcactgcagggcgatgcttgcgactgcgtgtgcacctttcttcgggtactgtccgcccagcttcgagtccatgatgcggtacagacggcgcttgtcacgcaggtagggttttgcccagtcgacaaggttctgctcagataccggtttcgatttgtctagcgctcgacgtcctgtcagcaactccagcagcaccacgccgtagctgtagacatctgcctttactgagaggcgacctgttgcaacatattctggagctgcataacctcgtgtgcccatgacttgtgtagaaacatgggttctatccccagttggacctgcttttgccaagccaaagtctgaaagcttggcattgaactccgagtcaaggagaatgtttgatgccttgaaatcacgatatatgacttggttctcagcatcatgcagaaatgataaacccctagcagccccaattgcaactttgagtcttattccccagggtaaaggatccgcacctcgtctgaatagatgattttccaaacttcctttaggcatgtactcatacaccaaaagtcggttgtcaccatctgagcaataaccaatgagcttgacaagattctggtggtgaagttggccaaggtagtcaacctctgtcagccattccttgtggccctgaaaaccttctggtttttagcttcttgatggctacaaccataccacttcccggctttgaaggggcaagagtttgctcatcaatccagcctttgaacacatagccaaatcctccttccccaagaagactgtcggaccggaagttcttagacgcagacttgagatcaccaaatgaaaatgccttcaaatttggtgatgacaagatttccc

SEQ ID NO: 10471 - DNA, 257 bp, Setaria italica
  Peptide Sequence Number=SeqID_76445
cttctcaaagaagcttacaaaagggaaacttccgataacaccacggtggtgacaaattcagtgatgttgttgggagtccctactatgtcgcaccagaggtactacagaaatgctatggtccagaagctgatgtgtggagcgcaggggtgatcctgtacattttgctttgtggtgtccccccattttgggcagaaactgaagcgggaatcttcaggcagattctgcgaggcaaacttgattttgaatctgaaccctgg

SEQ ID NO: 10472 - DNA, 268 bp, Setaria italica
  Peptide Sequence Number=SeqID_76446
tggccctcggtctggaggaactcgacggtggtgcggccgccgaggtgggccttgaggtaggcggctgaactcctgcaccgccgcgggcacgtccgcgcccaccgccagcggcgcgtaccccgtcgcccacgccgagtagttggccgccatcgcggcgaacacctgctggatctccggcagctcgaacccgccgtggtagtcgttgtcgttcaggaacctgggcgatgcgccgatgaggatgagcttggcgaagagctcggggcgtcgg

SEQ ID NO: 10473 - DNA, 264 bp, Setaria italica
  Peptide Sequence Number=SeqID_76447
ctatttggacaacttcacatcttagttatcgaatcgaatctctcagacctggctcgctacctccggaaggagttggtgagctcgacggagctgaaggaccccaggttcttgtatggccccggcgagagaccgtcgtcgacgtcgcccatctgccgcctcgcatccacggcggtccgccttgaccctgctcgcgccgctccgcccgcgcgcggctgcctcgtcctccaggctcctgaccttgaagtaacccaccttcctctcgtc

SEQ ID NO: 10474 - DNA, 238 bp, Setaria italica
  Peptide Sequence Number=SeqID_76448
attcgtggaggctgggccatacaggatgtttttttatttgctctgttcgattagtgctctgttctatgctacccctactgcagctgctggaataatggaacttcaaagaggtgctaggcaggatcttgtcaacaagtggatcaaattgctgatccagttattgatttgttctgaactacctgcatgcctttatcattttggaggcaaacaatccatatatgtctacctgcagtattaa

SEQ ID NO: 10475 - DNA, 263 bp, Setaria italica
  Peptide Sequence Number=SeqID_76449
aagcgcggaagctgacgcggcgaggaggaggcagccggaggaaggaggccgacggaggattcgtgtgcgtgtgcgtgcggacggtggtggtggtggaggcggcctgcattggcttcccaaaactgtgttcacaaatcacagaaggatcgaatttctgcaacatagaagttttctacttttctagaatgcccctgttctggcgccgtactctaccctaaccttgcacccggtaagaatcatcttgctgccctttgggcatgacc

SEQ ID NO: 10476 - DNA, 214 bp, Setaria italica
  Peptide Sequence Number=SeqID_76450
ttgcggtcgatgcgggagaacacctcagcgacgctggtggagttggagatcatgcacacagcgcgctgcacaccacatcgccacggtacatcaggcagcacgccatgtacttgccgtggcgggggtcacacttgaccatcatgttcgccggctcgaacgcgctgttggtgatctccgacaccgacagctgctcatggtaggccttctctgaaga

SEQ ID NO: 10477 - DNA, 427 bp, Setaria italica
  Peptide Sequence Number=SeqID_76451
taccgtaagagatcccattaatgaacagattgctatataaaccagcatcaacctgtgtcctgagcgttcaaccacccggaatatcaaaaaaagaacacaggctaccgccacacatgaataaacaataaaaacctggctgcgttgcaagatgccatatttccttcattgagtcaatctttctctcctttggggcatgcaaaactaaatatgatgcttagagctcctagaggagtaacaagtacagcaggggcaaatgcatatgctgcaaagttggctacctcacccagaatcatagttatcattcccagccaccataacggctcatacagatatgagaagcctccagaagctgctcgcaccccattatcgccagccttcttcagcccaactttctgatcacaaagcttgaaccaatgaatgcactaga

SEQ ID NO: 10478 - DNA, 322 bp, Setaria italica
  Peptide Sequence Number=SeqID_76452
cggaactcccggtagccatccccatttttaggcctttcttgatgtttgatgcgacagaagaattgaacgactgcagcttctttacaccttttttccagtccatagaacttggctcatatgtgcgcatttcaggaattttaaacagtgaatccaagacctgttgagggtcagctttcacttcagttgaccttgaagggaatgttggtgagcgtggtgcctccataacagcctttgcataactggcgtggacttcttttattgcctgcgggcaagttgtctaaggatagcccattccagggaacatattcagatggctggtccc

SEQ ID NO: 10479 - DNA, 444 bp, Setaria italica
  Peptide Sequence Number=SeqID_76453
ttacctaattaaccaaagaaccccaatacgaaccaatataaacctggagtcataaccgttactgccataaggaagaccagtttttattgagttcccatactgggtgtaaggccgggagctagggtacatcctatttggatatgtaggtgtcactgatccggttgtagctgtaggtcttcgattctgcatacccatctgtggagccgtggagctctttgtctgatttcttgctgaggaaccattagcattgaaagtcgaggtcggcatatgattagttgtagttgatctttgctgtccatttgcataagcagagccatcataccatgcaaagtgtgctcctgtgctgtcataaccataagttgtgtccaggtaaccagcagaaggaactccaccattaggaacaccatttgttgttgtcttggcaggatcggttttagctgctgg

SEQ ID NO: 10480 - DNA, 315 bp, Setaria italica
  Peptide Sequence Number=SeqID_76454
gtccttgcttctaagccatctctggggaatacgttttattttcttctgttatggcaactcttggcattcagatcattgatgattgatgtctgatgttttcattttttctgagatgcaattcaatgttagttgtctgaactcttgtaatcagtaacaaccaataataaggccatcaatgtatgcaattgagatggcttatttgtatccttcactcacagctaaattacctgcagcaagtaagcactcatattttttccatctattcagtagtaaattgattcttctttcttctcatgcttaatgccgtgacaccca

SEQ ID NO: 10481 - DNA, 433 bp, Setaria italica
  Peptide Sequence Number=SeqID_76455
tccaaggatgattggaagctctttgttgtggagagtatgcagttatccttctcaaagctgatggagagtattgttcaaacatgtcatgccatccttttcgagcattagggttgaaggcttgaagctgaatgattgcaaacggagtagaagtgtcaggttgtaaactaacttagcaagtgtcaggcttgaagctggatggaaagcatggacaaccaaaatatttaaagaaagctttatgtctatatgctgatgatggacagctagaagaatgaagaattacagaaaggtttattggtgactgctggtgccgatgggggcaggaatatatcaataagagaactcatatttagttttattttattatgccaaacatagttgcaaacttgtagtcagagatgatgtttttattctgttgtggtcatgtttattttag

SEQ ID NO: 10482 - DNA, 429 bp, Setaria italica
  Peptide Sequence Number=SeqID_76456
gaagcaacatgatgtgacccttgaaaattgcaaataagtttgactttcagcaatatccttaggaaaccaggctaaatttaaccaaaaatcttatgaacagtaggtattgactaggctgcatttgtcccgtcaaggatgtcatggacatgctggaagagtatgagtggctagcttaaatctaggtaagaggaaaaggctcaaggttcccaagaaaaggtaacatgaatatccagcgggtcctctcaccgcatttgcagtctcagatcaaacagatgtgatcaaaagagatgagtggaatgcttggaggcatgggcccatgagcgtgctctaagctggttggttggagtgttggaccctagcagagcacgcgtatttgttcggaggaagcccagatggtatggatgcgaaacgtggggctccaatcttctg

SEQ ID NO: 10483 - DNA, 461 bp, Setaria italica
  Peptide Sequence Number=SeqID_76457
aaaattagttttgttttagggtaatacgtttttattttcttctgttatggcaactcttggcattcagatcattgatgattgatgtctgatgtcatgccatccttttcgagcattagggttgaaggcttgaagctgaatgattgcaaacggagtagaagtgtcaggttgtaaactaacttagcaagtgtcaggcttgaagctggatggaaagcatggacaaccaaaatatttaaagaaagctttatgtctatatgctgatgatggacagctagaagaatgaagaattacagaaaggtttattggtgactgctggtgccgatgggggcaggaatatatcaataagagaactcattattttagtttttatttttattatgccaaacatagttgcaaacttgtagtcagagatgatgtttttattctgttgtggtcatgtttattttagcactaaaaaaaaaaaa

SEQ ID NO: 10484 - DNA, 409 bp, Setaria italica
  Peptide Sequence Number=SeqID_76458
ggattggatacagtatattgtactgtatacataatacatccatggttatgacatgatatattcgaagcatgcgtgcattctttgatctgtattgtatggatcgtctgcagcttcaggcaggcagcggcatattatgcagttaggggttgtttggctccctaggctaaattttaactcctgttacatcggatgtttggacactaattagaagtatcaaaaatataggctaattacaaactaattaacatccgaacatccgatatgatagggttaaagtttagcctctggtatccaaacacccccttaatcgatcggtagcatctacaatctgctgatggtagcggcggcggcgtacttcttgagggcgtcgccagcgttcttgaggttctccgggacgggcaggttgcag

SEQ ID NO: 10485 - DNA, 398 bp, Setaria italica
  misc_feature (301)..(301): n is a, c, g, or t
  Peptide Sequence Number=SeqID_76459
gtatacaagggcattcttcagagcaggaaggcgattgctgtgaagaaactttatgaggtgcaactagatgatgatcggtaccataatgaagttacttatcttatcgggttgaagcatgaaaatatagtacaactcctaggctattgtgctgaatcatggtgggaagctgtccaagcagacggaaaagtatgtcatggctgaaatacgacacgggacgggctgatctgctttgagtatctaaataacaagagccttgatgcatatatttctgctgaatcatgtggactcgagtggcacaagngatttgaaataatcaggagaatttagcttcgattttggtatgtcgagactctttaggccaacaacaatctcggatcatcacccaaaaacgtcgtggg

SEQ ID NO: 10486 - DNA, 404 bp, Setaria italica
  Peptide Sequence Number=SeqID_76460
tttttaaaatagtaatatatctctcatgattatcaaatataaataaatatctggtacagaatttatactgcctttaacaacttgcatcagagcctgtatggtaactcagaccttgatcaacatagaaagaaaatagcatttccatattatggtttggatgctgacagtaaatgaggcaaacatgtccctacaatagactggtacttaatgttttgacagctcactgatttctacaaatgaatggcgtatttccatgtctttggtttcaataacttggcaccttcgtaatgagcatccaaatctttatgaatgaggttgtccagtctcttcttcagggatgaaggaagcgactgtatacctggacatgatttaatttgaagatcacggagagatgagtatgcttg

SEQ ID NO: 10487 - DNA, 342 bp, Setaria italica
  misc_feature (128)..(128): n is a, c, g, or t
  Peptide Sequence Number=SeqID_76461
ggaaatgatcttaaatgctgtccattcatccatctagatcatcaatagtgaagaactcatttcagtaccatcaccccagcccaatagtgctaaataatttaccattgcctgaggtagatagcccatcnctttatactgcccacagatgtagctccatgacgttttgacagtttgcttttgtcaggagcgagaataagtgacacatgggcaaatgaaggcattggaaatccaagagctttataaatcagagcttgccgcagtgtgtttggtaaatgctcttcagctctgataacatgagagatttgcatggtagcatcgtcaaccgttcactactagtaagtt

SEQ ID NO: 10488 - DNA, 459 bp, Setaria italica
  Peptide Sequence Number=SeqID_76462
aatatccattctgcaaattttcgccagtaaaattttgagggtcagaaccttgtggagacaagacgtgctctacctgccaaacatcatatgctggattgagtataaacattggtgtgctgatgctttttgcaacttctcgtgggaagaagcactgccccggctccatatctgaactgcaatgagggaactttttacgcacatcctgcagccgagcaacatcgttatagaaggcccgcatataccttcttccagaaatgtcttctacgtcagaaaaaatccaccatctgcgaggcatttgacagtacgcgtctttggtagaagtgcccggaaatcatcacagtgaatgtatgtagagaggccaccagctgtttagccctggataggccctttgacagaaggtcggccataactgcttcccagatacgctggcctctgaagaagaaatctgtgccattctgg

SEQ ID NO: 10489 - DNA, 491 bp, Setaria italica
  Peptide Sequence Number=SeqID_76463
tttttttttttttttaaagaaaagaaacctaaaattaaaagtaacaaaataatttaggaataaataaattacaacaaaataacaaacgaaacaactacaatatgctacagtgctggtacagtgatttggttgtccaaaatcgggcaactaaacagggccttagtccaaggactaaaaggtccctgaactataaactttagggcctgtttggatacaggttcataactttagtacctgccacatcggatgtttgatactagttaggagtattaaatatagtctaattataaaactaattacacagatggagtctaattcacaagacgaattagtatagggtttctgcagttagttttataattagctcatgtttaattctcctaattagtatccgaacatccgatgtgacccctcctaaagtttacgtaccctgcgtaccaaaccacccccttagtctagggaccgaaggaaccaacaggcactcacacgat

SEQ ID NO: 10490 - DNA, 338 bp, Setaria italica
  Peptide Sequence Number=SeqID_76464
ttaaaaaggttttcttaatttgttttgttctagtattgtattattaggtacgtctttatatcttcaggaagtgatttaattttatagctttctgagagatcaagatacctcaggtgatgtagccatacgggttctaaacctcgcatggtccttgatgttgaacctcccatgatctttaatgctcgcacagacttgtattttgacaaatgttgcaagtctccgtatatatatttctcacatatcagtgtttgtataaccggagagcctttctcctgcgaagcattcagaaaagtttctgttttacggactgacaataataaatgacgagctgaatgtgg

SEQ ID NO: 10491 - DNA, 243 bp, Setaria italica
  Peptide Sequence Number=SeqID_76465
gccaggttgtttggagcaaggctgcgcggggcggacctctatgcgctagcctccctccagctgcatcggcttagtggcggcggcgacacacggggccaagaggaggcggggcggccgctaggccttggcgatgtggcctcttcacgcagccccttccgatgtcccctagatcctcttgctctcggcggcgctcatggcggaagggcacggccgcgcggtcggtgatgcaccaagaggatgcga

SEQ ID NO: 10492 - DNA, 253 bp, Setaria italica
  Peptide Sequence Number=SeqID_76466
attgaccggtcgtgctgtaaatatcttaataatctgatgatagggtgagtctgcgtgcgtcactgctgtagaataactaaagccccctgctaaagtttaacagtcacgtcggatgtttgatgctaatcagaattattaaacataagaactataaaactaattgcacagatggagtttaattcgcgagatgaatctattaaacttaattagttcatgatttgacaatgtggtgctacagtaaccatttgttaat

SEQ ID NO: 10493 - DNA, 264 bp, Setaria italica
  Peptide Sequence Number=SeqID_76467
ctttctgttgcccaacaaaatttatttccagtttccttctaattagaaatttctcttaggttttcattttttctgagatgcaatttaatgttagttgtctgaactcttgtaatcaataacaaccaataaagccatcaatgtatgcaattgagatggcttatttgtatccttcactcacagctaaattatcttttgcaagtaagcactcatgttttgttcagtagtaaatttattcttctttcttctcatgcttaattccatgac

SEQ ID NO: 10494 - DNA, 247 bp, Setaria italica
  Peptide Sequence Number=SeqID_76468
ttgtcatcaagctttgccctgtgcgcaagtcctcttgtccatgcaaatatcgaggcaatgctgtttgtactggtttcacctcctttctggtgaacacggtaatgacgggtaacagtaccatgggcagcttcagcttcaatcgtctttccatcagggcacaccaatactgatgtcatcaaacccaatgagccaaaacctgcagccaaagaaaaaatcatagagttaatacaacacttcttaactaaga

SEQ ID NO: 10495 - DNA, 255 bp, Setaria italica
  Peptide Sequence Number=SeqID_76469
agaagttgtcctggcgctcaacacctggacatagccacagaggcagtgcaggcggtgttcgggtcggagccggacaggtatggggcttcaaggcacattggtcgggcggtctgctcgtcgcctgcaactcgttggttggggataggcgtcggcagcaatagacaatagtggggttcacgaggaacttggaggtggagacccgtctgcacatcaccatgcgtgcccttcttcctcccgaatcgcttcatccccaag

SEQ ID NO: 10496 - DNA, 273 bp, Setaria italica
  Peptide Sequence Number=SeqID_76470
atcctcagcttcccctgttctttcgtcgccaatccgcagaaatccctgggcgaggcgcagaaatttgtagcgagggattttccgaggtgaatttctttcccctttgaccgtttcttgatcgccgtgtccccaaatttatcacttttttcggcttcttgatacaagaagagatttccttccgtgctgcggcggcctccgtacagttcttgattgggggggagcacacctgtggcgtgccaatgcagccggacccgagcgggaacgccaatgcca

SEQ ID NO: 10497 - DNA, 263 bp, Setaria italica
  Peptide Sequence Number=SeqID_76471
tcgccggtgtatgagtgtgtcgtcgtcatggttcccttcacaatcccgaactcttcgtccaagaccttgacgaatggggcgaggcagttggtcgtgcaggaagcattgctgataatgtcggccacgccgtggtcgtagtcgccctcgttgacaccgacgacataggtcgggatgtcgacggcccggcgccgggaagcacatccaggccggcgcgaagaaggtcatcatctacttgtcttccggtcgtacttgtagtactacgt

SEQ ID NO: 10498 - DNA, 251 bp, Setaria italica
  misc_feature (233)..(233): n is a, c, g, or t
  Peptide Sequence Number=SeqID_76472
gcaaaactccatgaacgccctggtaccgatgtttcagtcaactgccgatgtacacatgggcggatttcgcgaagaccgagaactcatacgcaagtgaggccagatgatagcagcctttcctgaattaagtgcttggacagtcctttgcaaatttccagacatgagcaattctaattgagatctaaggttgtctgatctggtttagttcgggtcatatgagcagagttttgacnccccttgaaatttcaagg

SEQ ID NO: 10499 - DNA, 262 bp, Setaria italica
  Peptide Sequence Number=SeqID_76473
tcgtccgggtatttccggttacaccctgtcactgtctgcatgcgggcgtctcacaatctttcacgaaaggtgttcatgacgtaattaccctttcatgtcgatttttgcagtgtcgacgaggaggagcaggctgtggcgagcactgcgggcttcgtcaaggaggccaaggccgtcctccgcctattcccgatatgggcgacgtgccttatctacgcggtggcgttctcgcagtcctcgaccttcttcacgaagcaggcggccg

SEQ ID NO: 10500 - DNA, 190 bp, Setaria italica
  Peptide Sequence Number=SeqID_76474
aaaaaacgttccagtcatttcatttattttccaaagaaaaagacatgtagcaatagtaggtctgttcgcttcagcttattcaaccggcttatcagccaccaaacagtgtttttctctcacaacaaatcagccatttcagcttttcagccagcttaagctgaagcgaacagaccaggtaacgccatttggg

SEQ ID NO: 10501 - DNA, 262 bp, Setaria italica
  Peptide Sequence Number=SeqID_76475
tagcagcctgggatcaacataacaccataagtttacgtaaactacttaacttactgcgtcagagctcctcgcctacgtcttcttcgccgtggtctacaagtacaagaacaaaggagccgtacatgcggctgttgctggttagtagctagagttgtggattggtgatacatagtaggcggcatgataccgaagggtgtaaatggcattttccctccatcatgattcgtgatggaaacccatcttcgacgttggttcctatttg

SEQ ID NO: 10502 - DNA, 241 bp, Setaria italica
  Peptide Sequence Number=SeqID_76476
ttgatgatgtacgtctgcacgccggtgatgtccaagacaaccttactagaaatactaccgaacaacccggaatcacgtcgtggtaggaggacctccgtatctggatggcgtggtgatcgcggtggtaggcgaggcactgggagcagagtgcgccgttcatgcagtcgaggcagtacatgttgcactcgctcttgtgcgcgtccgcgtgcagcttgcattgaccgaagaagctcgtccccag

SEQ ID NO: 10503 - DNA, 250 bp, Setaria italica
  Peptide Sequence Number=SeqID_76477
gttgttagtctcccaccactgcatcgctgcctgccccgtacgatcctctcgagttctcgacagtctacagtgtcgaacacgtgaaggatccgctcatttaaacgacaagcgcgtggtacaatgctctggagcatcctctgctgccggccgcaggcgtgcttcacaattcaggccttgtttagttggtcaatttgggagatgcaaaattcctgttccagcactgtaggacactgtaacgtttcgtttgtta

SEQ ID NO: 10504 - DNA, 233 bp, Setaria italica
  Peptide Sequence Number=SeqID_76478
tcacgattccacacatcatccaatacgaggaggtacctcttcccactcactgccttttgaagactgtccagtgctgatgaacttttacttgcttcgcaaccattctctttgtcctgtgccgatgaactttgacttgctttcactattctgttagctagggaatccacatcaaaatcataagagacacacacccagagccgcaactcgaaatgcttcttaatttcagtgtcatt

SEQ ID NO: 10505 - DNA, 255 bp, Setaria italica
  Peptide Sequence Number=SeqID_76479
tttcacgaggccaatccttttcttgtttttgagttgaatgctcttgactcaataatttcctttatgaaattttcatccaagcgtccaagttcataggctcctttagctgtacccatcattagttgagcaactgcttgatcacgagttgttgtcaacactgagcatccactgccaccatgttgaaggtaggacttcagtttttcccacttgtgggcctcatcacggttccagacatcatctagtacaaggaggtac

SEQ ID NO: 10506 - DNA, 276 bp, Setaria italica
  Peptide Sequence Number=SeqID_76480
tgccgaaagttttagggttcagtttggtacgactccaaacgatttaaggcccgtttggttcgcagggctaaagtttagtctctatcacatcgaatgtttagatactgattagaagtatagaagtattaaacatagactaattataaaaccaattgcacagatgaaggttaattcgcgagacgaatctattaagcctaattagtccatgatttgacaatgtgatgctacagtaacatgtgctaattatgaatttaattagggttttaatagattcgt

SEQ ID NO: 10507 - DNA, 273 bp, Setaria italica
  Peptide Sequence Number=SeqID_76481
attcttgtttttatttgcttgctcaaaccaaagaaaaaacaaacaaaggaaaggggcccgtttggttgtttagtacctcctaaaattcctgtcgcatcgaatgtttagatactaattaggagtattaaacatagactaattacaaaaccaaattgcacagatggaggctaatttgcaagacgaatctattaagcctaattagtccatgatttaacagcgtgatgctacaataacatgtgctaatgatggattaaattggcttgatagattcgt

SEQ ID NO: 10508 - DNA, 263 bp, Setaria italica
  misc_feature (202)..(202): n is a, c, g, or t
  Peptide Sequence Number=SeqID_76482
ctcaaatttataacttcgttaggctccgtttgtttctttagaagttcctaaaattcttgggacatcgaatgttagatactaattaggagtattaaatatagactaattacaaaaccaattgcacagaaggaggctaatttgcgagacgaatctattaagcctaattagttcatgatttgataatgtggtgctacaataaacntgtgctaatgatggattaattaggcttaatagattcatcttggaaattgtctccatctatg

SEQ ID NO: 10509 - DNA, 250 bp, Setaria italica
  Peptide Sequence Number=SeqID_76483
caacagcaagttaaagctgctaaaatgtcagcagcggtggtaaggaagatgctgataaggtgcaagcttctgaaaaaactcaaaaatcgcgtgcggtattgggtagaagtgtaaatggagtggttactgaccacatccagggtgtaaggcctgctgctgaggctgacagaccaggatcttctggtagtggaagcacatccttttggaattcaatatttacttccaatgaggaccgaacgcatgcttctgc

SEQ ID NO: 10510 - DNA, 179 bp, Setaria italica
  Peptide Sequence Number=SeqID_76484
tattaagcaagagaagataagcaggatgaaatatggtgaggaggtcaatgcaagtaaccatctccatccaagtattggcatgacagcccaagcaagtagagcctccaatattgttccaatgctccaaaaacaagcaaagccagccattcatgaacctctgttttcagcaggaacgaact

SEQ ID NO: 10511 - DNA, 237 bp, Setaria italica
  Peptide Sequence Number=SeqID_76485
gctgccaccatgctgaaggtaggacttcagcctttcccacttgctgggctcatcacggttccacacatcatccaataagaggaggtacctcttcccactcactgccttttgaagattgtccagtgctgatgaactttcacttgctttacaaccattctctttcactattctgttagccagggaatccacatcaaaatcatcagagacacacacccagagccgcaactcgaaatgctt

SEQ ID NO: 10512 - DNA, 273 bp, Setaria italica
  Peptide Sequence Number=SeqID_76486
gtgacaacaatcgacactattcggcctcggctgttcctcggctgttctttgcttatctttagcacccgtcacatcgaatgtaatggagactaaacgataagacgaatatattaaacctaattagttcatgatttgacaatgtgttgctacagtaaacatttgctaatgatggattaattaggcttaatagattcgtctcgccgtttaacctccatcggcgtaatgagttttgtaaatagtctacgtttaatacttctaattagtacctaaaca

SEQ ID NO: 10513 - DNA, 210 bp, Setaria italica
  Peptide Sequence Number=SeqID_76487
cagttgagtatacatacatcttgtttctgctcttgttgctgacctccactacggagtgactagagagctcccagttgagaactcctggctgaacttgcatcctagagcttcgttcatggaggcagaagacacacgcttgggaaagcttaggctggacgtcgcgtgcaggggagggagccaccgtcgtgccgtgcaggatctgcccaggtc

SEQ ID NO: 10514 - DNA, 247 bp, Setaria italica
  Peptide Sequence Number=SeqID_76488
tgtcctgaaactaggggaacgaagtgggcacagtgccatatactaccaagaagaaacatgagattatcttgacactcggcctgttcgcttcagcttattcagccggtttatcagccatcaaacagtattttcctctcacaagaaatcagccgtttcagcttttcagccggcttataagctgaagcgaacacgcccagtgattggtattgtcatccgatttcacaatcttagaccatattaaaagaag

SEQ ID NO: 10515 - DNA, 258 bp, Setaria italica
  Peptide Sequence Number=SeqID_76489
gtcgggcgtgatctcgccgttcttctccgcctggaggatgtggtcgatggcgcaccggagcttgtccttgtccccgggtgtgtccatgaccttcctcctcttctcgacgtagttgttgttgaagaaggcgagcctcctggtctgcaggtccctgcatttgttgaggtagccgcgtaggaaggggcgcaagatggggatgaagtcgccgtagttgtactcgaagctctgcgcgaggcggctgcgctcggagttgaactt

SEQ ID NO: 10516 - DNA, 256 bp, Setaria italica
  Peptide Sequence Number=SeqID_76490
tgagttaattataaaccaattgcacagatggaggttaatttgcgagatgaatctattaaacctaattagtccatgatttgataatgtgatgctacggtaaatatgtgctactcatgaattaattaggctgaatagattcgtctcgcgaattagcctcatctgtacaattaattttataattaatttatatttaattttccaaattagtatctaaccattcgccccctagtttaaccggggcgatgcatcgcagtta

SEQ ID NO: 10517 - DNA, 171 bp, Setaria italica
  Peptide Sequence Number=SeqID_76491
aagatggtcattttcaacatgttcgtcagctcatcagccggcttatcagctaccgaacagtgttttttctcacaacaaatcagccgtttcagcttttcagccggcttataagtccagccgaaccggctctttatctattctctctttatttcttatcattttataggtgcc

SEQ ID NO: 10518 - DNA, 154 bp, Setaria italica
  Peptide Sequence Number=SeqID_76492
tccatgatggattaattagccttaatagattcgtctcgcgaattagactccatttatacaattaattttataattagctcatgtttagtcctcctaattagcattcgaacatccgatgtgaccctgctaaagtttagcacctcatctccaaaca

SEQ ID NO: 10519 - DNA, 186 bp, Setaria italica
  Peptide Sequence Number=SeqID_76493
gttctctattgtgaccagaaccggatccagttctaaacaaagcttcagctgcagttccctcagtccgttctgcagaagggcctgccaacccacttgccttgccgctgaagtttgcttttatctctaaattgaggatacttcataatggtccagtcaaatacataatctagttggtacccttcgcgg

SEQ ID NO: 10520 - DNA, 287 bp, Setaria italica
  Peptide Sequence Number=SeqID_76494
agttttataattaactcatgtttagtccttctaattagcctccgaatatttgacgtgacataaattttagtccggactaaagatccaaacaccccctaagatttggaacctctaaaaagtacctttttctctatttcaaaagctacctaatcaatttcccatcccatatctcgtgatatatgtatttcacatttcaaaacaactagcagatcccttgcacagattcgtctggtggatcatttatttacttaaccgcatttgtttttccagcaacgttcatttgcacg

SEQ ID NO: 10521 - DNA, 181 bp, Setaria italica
  Peptide Sequence Number=SeqID_76495
ggcgccattgctatctcagctagctatagcttttcaagtgtgctatgagcttctctagctatagctagctcttgtgagtagtattggcttggtactatttgcatgttggttctatatggagttgaatctatcattttcaagcatgttgtatgatatagcatccaagctagaacaaagtctg

SEQ ID NO: 10522 - DNA, 143 bp, Setaria italica
  Peptide Sequence Number=SeqID_76496
gcatcgacctctgcctgcaaactgtgtagcatggtgattagcttttgctttcagttagtattcaaagctaccagctaggttgtttggtagccatgcctacttgctgcatgtagtatttagtgggtggtcggatgtgctataat

SEQ ID NO: 10523 - DNA, 166 bp, Setaria italica
  Peptide Sequence Number=SeqID_76497
caaaatagccacagttaactagctctgcctctacagcaagaaggatgatcatccatttcctggttttttttacctttggtgcctccctccaaccgtgccgccctctctgtctgcgtcttgttgacagcagcaggccatgggacaaggaggaagcggtggccgctgt

SEQ ID NO: 10524 - DNA, 167 bp, Setaria italica
  Peptide Sequence Number=SeqID_76498
gaacggcacggcgcagctgctgccgctgctgggcggggcgctcgcggactcgtgcctaggccgctaccgcaccatcgtgctcgcctcgctcgtctacatcctaggtctcggcatgctagccctctcgacccttctctcctccgggcgggcaccaccaatgcgccagc

SEQ ID NO: 10525 - DNA, 347 bp, Setaria italica
  Peptide Sequence Number=SeqID_76499
aattacacagatgaaggctaattcgcgagacgaatctattaagcctaattagtccatgatttgacaatgtagtgttacagtaaccatttgctaatgatggattaattaggcttaatagattcgtcctacgaatcagcctaggatttcagttttataattagctcatatttagccttttaattaacatccaaacattcaatatgacaaggactaaactttaacccgagtatccaaacgcgccctaattttgttcgctatctgcttcagagtcttgttcatcagttcatggttcagtccatggtgtaggcgatgtccctgagcacctcggcatgcttgtcgaacagacg

SEQ ID NO: 10526 - DNA, 432 bp, Setaria italica
  Peptide Sequence Number=SeqID_76500
cccggattgtgtagcggtagtagaaagtactgaacgaatttgttcaacgaacttaaggcttgtttggctcccacgtgctaaagtttagcacatgtcacataggatgtttggatactaattaggagtattaaacatagactaattataaaactaattgcacagatggagtctaattcgcgagataaatctattaagcctaattagtccatgatttgacaatgcggtgctacagtaaccatttgctaatgatggattaattagcctgaatagatttgtctcgcgaattaacctaggggttctgcaattagttttataattagcttatatttagtcctcctaattagcatccgaactccgatttgacacgtttagcaaccggttatcgaaacacccaatttattattagtaggtcctcggcattctttgaaaaaa

SEQ ID NO: 10527 - DNA, 394 bp, Setaria italica
  misc_feature (248)..(248): n is a, c, g, or t
  Peptide Sequence Number=SeqID_76501
gcaattaattttataattagcttatgtttaatttttctaattaggatccgaacattcgatgtgacactattaaagtttagcacctcgtatccaaacacccccttaatctagcttcacccttaagacattagacacatgaactgcaataccgtgtatcttgcaatgctgcttgtttgtgctaattgaataaaggcaaacctggaaattgaattcagttgctcattggatgttactgtcactattttcgngtaattattaccagctgtgtattgagttctcgcaactgtattgaggctcacagaagcttgttttgtgtttctgcttgcagcggcagacggcaccactgacctcgccagcgtggagcaagatcaaggccatctggcatggctaaagg

SEQ ID NO: 10528 - DNA, 504 bp, Setaria italica
  Peptide Sequence Number=SeqID_76502
ggcctatcgactttgaattggaaaacaaacacatgcatggctgacaaatgtattttagttcttgctaaagcacacagcagtataacaagatgtagtgtccttttgattctggattagagtccacgtgctcgatccaaactggctaaaataggctgcagatttgcctatcctctctctcgatcaactttttatcagttgtactacggccttgttaaccaaaattactgtagcgcaactgtagcatttggtttgtatttgtgaattattgtccaaatattgactaattaggctcaaaagattcgtctcgcaaagtacaacaaaactgtgcaattagtttttaatttcgtctacattcagtactccatgcatgtaccgcaagtttgatgtgatggagaatcttctttttgcatagtgctaaagttgggattttgggagaaactaaataaggcctacgtttggcttcctaagtactgttgcgattttgttgtgctcatgccaccagct

SEQ ID NO: 10529 - DNA, 480 bp, Setaria italica
  Peptide Sequence Number=SeqID_76503
ccaattttgtggattagaggattaaaactttagtccaaattttaagtccacctgtttggatgtttaggaactaaaagtaatactttaatccatggtgggaaaccaaacaccccctaatctgttgctgatgaacaactgatgatgctgatgcgaattgaattgtttcttcgcggcctcttgccaagtgtctagctcacttcactagctggctgaattgaagcgagtgagcgagacatcagttgatgtgctactactgtactagtaggtctggtagcttgcagcctcaatcatatacagaatccagtcatattgtcctcttggggagaacaaaaaataatatacgtaggggtgtttggttccctttacttatttttagcacctgtcacatcgaatgtttagatactaattagaagtattaaatgtagactatttacaaatcctattacacagatggaggctaaacggcgagacgaatctatt

SEQ ID NO: 10530 - DNA, 420 bp, Setaria italica
  misc_feature (405)..(405): n is a, c, g, or t
  Peptide Sequence Number=SeqID_76504
tgaggcgagggaggagaaaagaatattggtgttgttccttggcatgctcagggccggtcctgagtttcgaggggcccggggcatgttacccaccagggcacacatgacacaagtgatgttgttcagcctgttcgcttcagcttattcagccagcttatcaaccacccaacagtgttttcctctcacaacaaatcagctgtttcagcttttcagccggcttataagctgaagcgaacagacccgttgttagcaaggatactgtgcagctagcgttgctgttgttagggcatgtacaacccacagataggtgtttgtctttaagcgcctcgaattgatcttagctacatgcaaagcattaaacttgagacggaccccctgtctgtgggttgtatgacctgtctttanacatgtctgtatgat

SEQ ID NO: 10531 - DNA, 299 bp, Setaria italica
  Peptide Sequence Number=SeqID_76505
tctgaacagtgctttcacattactttcgtcctctgacaagacctgaagaataagattacagaaaaggaatcaagccaatcaaatcagtaattttacagacaaagcagggtcattttgcagtaggaacatgggattgttcaattgatcagtcatcatagaattggcacttttaaaaaaaaatgaaaaaggtgcaaaatcagctgtttgataactgtaatgcagaaccttgcatgttgatatctgaattcatttaggccacatgagcttagttgctacaagtctttacatcatttttaaac

SEQ ID NO: 10532 - DNA, 413 bp, Setaria italica
  Peptide Sequence Number=SeqID_76506
gttcaggacataacgttaaaacaaattgagtttacctccggtatcctgaagttatcaaataaaggaataccttatgttattgacatttgttttgcaatcatttaaatatttgtgaggtacagttagtgcttattggtgcctttgttgggtattcactaacatattactgcgcctttttggcctaggtcattgctggagcatgttgcagcaggggatcacgctaacctttttacaattcaagattccaattatgatcctcatcttttctgaataattgttattgtaacctgcagaagttgctttctctggatgacgatcaggaagattcagatgatctttgtttgctgatctactcaactgagaatgatcagaagtagcaaccagatcagagaagacttgagttgctatgtttt

SEQ ID NO: 10533 - DNA, 319 bp, Setaria italica
  Peptide Sequence Number=SeqID_76507
aaggtacaattagaagaagggaataagggttgtagcctatgtagctgctttcctccaagtttataattgaatgataaaattggaggaaagcagctacataggctacaaccctatccctctacagactgcaggtcattgagagacacaagtcatgtggaaaaaaagaaaaaaggagtaacttaatccttaaattcctatgcatttttgctaaataggaaagtatggacaaactaaaaatatttagagaaagctttatgcctatatgctggcgatggacttctagaagaacggagaattacagaaaggtttattggtaact

SEQ ID NO: 10534 - DNA, 370 bp, Setaria italica
  Peptide Sequence Number=SeqID_76508
actcagtgtgagtagtctgattgagatttatagctcgcttgaatcacggcttaatatatcatttgtttttgctactgttgttagaaagtcgaggtaaaatttgggagtggtaaaattggcattttgccataaatgcgcaactgtagcatttcgtttgtatttgtgaattattgtccaaacattgactaattaggtttaaaagattcgtctcgcaaagtacaacaaaattgtgcaattagtttttgatttcatctacatttagtactccatgcatgtaccgtaagtttgatgtgatggggaatcttctttttgcatagtgccaaagttgggattttggagggaagtatacaagggctaagacattgtactg

SEQ ID NO: 10535 - DNA, 300 bp, Setaria italica
  Peptide Sequence Number=SeqID_76509
gaggaccgaacgcatgcttctgcaaaagataactcagcaaacagatcttattctgtacctacacccaatctggagcattcattctccacgatacagttaagagaggtgaggtatcttatttattttctcattaatgctattcacatacactgagtgattgatgggagacccttgctgaacagccaccagctgtcctgaaaccatcagaacaccagtctgagcaggaggcactcgaaatagcaataacaaaattgctattgtaagttctattatttacttaatttattttagttttgtttt

SEQ ID NO: 10536 - DNA, 157 bp, Setaria italica
  Peptide Sequence Number=SeqID_76510
gggagtattcttcgctttcaggaaatcctccctggccgattctgtctggccaagttcagatttagctttcctcgcctgaatagtgctttcacgttacttcgtcctctgacaagacgatgctacactgcacaatagcttcattgaatctattagttga

SEQ ID NO: 10537 - DNA, 228 bp, Setaria italica
  Peptide Sequence Number=SeqID_76511
gctgcaccgcagcaactaaactttagtcatctcatcaggagctcgattaggtgctgatccagtatggcgaagaaggcgccgacggccctagcggttcttggctctcgggcgtttcgtctgctatgcgccgccagccgtccgccgcgcagaactgcggctgccagtcagactactgctgcagccagttttggctactgcggcacgaccgagccctactgtggcaagggt

SEQ ID NO: 10538 - DNA, 312 bp, Setaria italica
  Peptide Sequence Number=SeqID_76512
ggtgaataaatgaatatgtaacactaacagaatccaaggagtagtattctacaaaaactgcccagaataaatgcagtcctattgttatttgtatgtaacaaataatttgagttgctagtagtaatattgttttaacaaaataaatatatatgtaagaaattgtactttagtgttaggactggtgaatcctactgttctgcacctgaaagatagtggcctcttcgcttcagcttattcagccggcttatcagccaccaaacagtattttcctctcacaacaaatcagccgttttagcttttcagccagcttat

SEQ ID NO: 10539 - DNA, 379 bp, Setaria italica
  misc_feature (4)..(4): n is a, c, g, or t
  Peptide Sequence Number=SeqID_76513
aaanctttagcaactgtgccattttccgactccagattcttggcacggattgcaatctgctacacatgaaacgcaccatcactcagattagcaaaaagtagaagtaaaacgaaaagaaaatccccatgatgctccttcagattcttagaaagtgcattgtggctggtatacagagcttgcatgtactagaaaatattcataaattttccattagcaacacggagcagttattattccccgctaggttgatgtctctcatttgttcaaagtttaaaacatacgtaatacaagaaatacatgatctacgaagaaatacatgatccataacaatcatagtttaggtgaccagaatgtggatagccatctacgtgcagttgct

SEQ ID NO: 10540 - DNA, 409 bp, Setaria italica
  Peptide Sequence Number=SeqID_76514
cttttttgtgaggatcaagtcttattgttccatcttctaaaaaacaaaaagggatgttaaaaatattggtgggctcattcggttctaagcggacaagatgtaagctggctatatatacattattattaccctgtctaagttaacgacaagtatgatagtatgacttaggccctgtttggttccacatgactaaagtttagtcctatcacatcgaatgtttagatattaattaggagtattaaatataggttaattacaaaaccaattgcatcagtgaaggctaattcgcgagacgaatctattaagcctaattaatccatgatttgatcatgtgttgctaccgtaaatatgtgctaattatggattaattaggcttaatagattcgtcttgcgaattagctatggttta

SEQ ID NO: 10541 - DNA, 561 bp, Setaria italica
  Peptide Sequence Number=SeqID_76515
cacgaaaagaaagttgaacacaagagatcctaaaaactttggaattaaggcaataaactcagcaagcaaaaaatgaacaatgccaaaaaaaactaggccggtggggtaagatcaccccacggttttgttttaagaagaaagctgaaccttctcccggcccagaaacccccccaaaccctgactttgccagcgagggtttttttttaacctagcctgaaaattcgctcccaccgggagtcgaaaccaggaccgggtgctactaaagcattgccaccactaggctaaaagctttcccaaaaaaaaaatcgacaatgccacaatggtgatgtacaaataatcagttagggggtgtttggttctttaggaggtcctaaaaattcctgtcacatcgaatatttagataataattaggagtatttaaacatagactaattacaaaaccaattgcacagatggagactaatttgcgagacgaatctataaaagcctaattagtccatgatttgacaatgtgatgctacagtaatcatttgctaatgattgattaattaggcttaatag

SEQ ID NO: 10542 - DNA, 182 bp, Setaria italica
  Peptide Sequence Number=SeqID_76516
agtagtaaataaactagtaaaacgtagtatgaatttccagcttcagcctttggctacatgggtcgtttgactttgtaataaacacagtgccacagtggttattacaaagtcaaacgacccatgtagccaaaggcgaagatggaaatgggaaaagttgaagcctagagcacaggggaaaaaag

SEQ ID NO: 10543 - DNA, 433 bp, Setaria italica
  Peptide Sequence Number=SeqID_76517
gtttagctagactgccatggggatcaaaagtggctagtagcagtggagagagcattgattcagcaacaagcgctccaactctgcaattgtacgagtttgaggcatgccccttctgtaggagagtccgggaggccatgactgagcttgatctttccgcggaggtttatccatgtccaaaaggatcactaaggcacagggaggtggtcaagaagattggagggaaggagcagtttccactgcttgttgatgctagtactggtgtcacaatgtatgaaagtggagatattgtggagtacctgttcagacagtatggacaaggaaggagtccatcttctggactttctcgagagtacaattttcacaggatgggtgcccactctccttagagctgggagaggaatgacactgtggaacaaagctggtgtcatacctg

SEQ ID NO: 10544 - DNA, 395 bp, Setaria italica
  Peptide Sequence Number=SeqID_76518
aagtgagctactgaagtgagctactgaaagtttagatattaattatgagtattaaatatagattaataataaacaaattgtataaatgaaaactaattcgaatgactaatccgccggtacagcggattggactggtgctggaagtaggtgagcaaaattaatgcagcacaccggtgacctgccggcctgtgaaatttaggtcaaaatttggagtgctaaaattactgtgccagcactatagcacattgtagccgtttcgttcgtattgtgccttattatccaaacattgactaattaagctcaaaagattcgtctcgcaaagtacaacaaaattgtgcaattagtttttaatttcgtctacatttagtactccatgcatatactgcaagtttgat

SEQ ID NO: 10545 - DNA, 464 bp, Setaria italica
  Peptide Sequence Number=SeqID_76519
gggttgggaaacggcaggtggcagatagattatactaagggatgtttgagaggagggggctaaaaccgtcacatatttgatactaattaggagtattaaatctaaactaattacaaaactacttatacaacccctaagttaaatcgtgagacgaatctattaagtctaattagttcatgatttgacaatgtggtgctacagtaaccattcactaatgatggattaattaggtttaatagattcgtcgcaaatcatgatttagtttagggattctgcaattagttttgtaattagcttatgtttaatccttctaattagtatccgaacatccgatgtgacagggctaaagtttagcccctcctcccaaacacccccctaataccaatgtaacttgagggttgttcctgtaatgtgcacgaaatgtctccaaagccccctgtactctcttctcccttctcgcacgg

SEQ ID NO: 10546 - DNA, 461 bp, Setaria italica
  misc_feature (7)..(7): n is a, c, g, or t
  Peptide Sequence Number=SeqID_76520
ttgttgnggtggcttagaaagaatatagtataaggttttcgttctacatatactgtaatttattgttgttgatgtatatatagcttgtgatttgtgtgtacagggtaagggggtgtttggaaacaccctattaaaaatttaacacctgtcacattgaatgtttggatgctaattaggagtattaaacataagctaattacagaattgattgcacaaatggagtataattcacgagacgaatctattaagcctaattagtccatgatttgacaatgtggtgctatagtaaccatttgctaatgatggattaattagacttaatagattcgtctcgcgaattagcacagagttctgcaattagttttataattagctcatgtttagtcctcctaattagcatccgaatattcgatgtgacactattaaagtttagcaccttcgttattactagccccttaaaa

SEQ ID NO: 10547 - DNA, 417 bp, Setaria italica
  Peptide Sequence Number=SeqID_76521
gctactacccttcgtgagcgcgagcgatcagtcaggtgatgcttctagtctggagtgttctacctagcaaaaaagtctacccaaataagcaggattactgggatcttacagtagcagttggttcaaccgagtacacggagtccatgcctgcagcgacggagttattcaggacttcgctggtatcattcctttacgagagaggatggcgccaaacgttcagatggggtggtttcccgggccgaacgagagaggtcatactcttaattatattcggcctgttcgcttcagcttattcagccggcttatcagccaccaaacagtgttttcctctcacaacaaatcagccgtttcagcttttcagccggcttataagctgaagcgaacaggcccattgtatgcataaggatgttcaattcc

SEQ ID NO: 10548 - DNA, 212 bp, Setaria italica
  Peptide Sequence Number=SeqID_76522
taggaaagaaagtaactaacgggacgacggcccgctgcagatctcgtggaactacaactacgggcctgccgggagggacatcggcttcgacgggctcggcaacccggacagggtggcgcaggaccccgtgatcgcgttcaagacggcgctctggttctggatgaacaacgtgcaccaagtgatgaccgacaaggggttacggacgaccaacg

SEQ ID NO: 10549 - DNA, 254 bp, Setaria italica
  Peptide Sequence Number=SeqID_76523
aggagtcgatggaggaggacacgtcggagcacctgaagtcgacggacacgagcggctcgtcgcagacctgcagcacgcccttgagcgggccggcggcggccttgcggaacgccgcgttaacgtcgtcggccgtcatgcccttcttctccgtgttgatcaccaggtccaccacggacacgttcggggtcggcacgcggagacgcgaatagaccgttacaagacttagaaccctttaactaaagaacttaagggaa

SEQ ID NO: 10550 - DNA, 270 bp, Setaria italica
  Peptide Sequence Number=SeqID_76524
aattactctcttcttggtagctttattatgcttaccatagtaattgtcaaaaagaactgctactggaaccaaatagtgtgttggatgctttggcatatataaccctttaacatgtacttccaatatagaggcaccccaggtgcacgggagagagaattttaccttagcaaaaccactttcagattcttggagaatgcatgtttcttccaccgatcttctaaagccttgatgagttcatactaggtaggaaatagatcttaaatgctgtcc

SEQ ID NO: 10551 - DNA, 473 bp, Setaria italica
  Peptide Sequence Number=SeqID_76525
agatatttcgcaagccgatacttctgcagatgactcttcacatgataaatgtttaggccttctaccttcattagtttcagcacacccttaggagttgcttctgtagagatatgaaagtgaaccattcatcaaggatggtctgtgaaatacagaactcgaaacatgtgggagagtaaatattgacaacttgaaaccatatgggagataaagcaaaatgatcaacttactttcaggtccttcaagcttgttcacagcctccacaaaacgctcatgaagctctagtgtccacctcaatcttgacttgttagttgttgcagagacagaagatgaccgagatgagctaagctggactttaactggtgatcctagattctgtatactctggttggagcaagatgatactggaagtgatgatagttgtggtggtgtgccgtatatgtcctaaaatcattgcgtcagagaaatagtactag

SEQ ID NO: 10552 - DNA, 395 bp, Setaria italica
  Peptide Sequence Number=SeqID_76526
atcctaattacaaaactaattatacaaatggagactaattacaaaatcaattgcacagatggagactaatttgcgagacgaatctattaaacctaattagttcatgatttgacaatatgatgctatagtaaacatgtgctaatgatgaattaattaggcttaatagatttatctcgtgaattagcctccatctgtgtaattagttttataattagttcatatttagtcctcctaattagccttcaaatattcgatgtgatatgaattttaggagtttctaaaatcaaacacccccagacgtgcgccacgccacgtcgccacgatatgtctcatgtctgcctggtgcctgctctgagcgctgttataaaacgcgaggagagggggtagacggtaga

SEQ ID NO: 10553 - DNA, 220 bp, Setaria italica
  Peptide Sequence Number=SeqID_76527
ccacaagccaataaaaaatggcacatgttgctcccttagtaagcttcacacggtagaatggcattctgaaacaacagtatgtgttagttcgagtaaaagactttacaaagactaagggcctgtttggcaatcacgtgttaaagtttaacacccgtcacatcggatatttggatgctaattaggagtattaaatatagaactaaattaaacaaaaaacaaa

SEQ ID NO: 10554 - DNA, 522 bp, Setaria italica
  Peptide Sequence Number=SeqID_76528
cacgacgcaggtgacacggaccgcgaggatttgagaggcgagaggaaccgatgccgtggatgcgacggagacgtgcgggcatccaccgtccatgtcccatgggaggtaagcataagaaacttggaatttcgggagagcttagagaccctcctaaaattcttgtcgcaacgaatatttaaatactaattataagtattaaatataaattaattataaaaccaatcgcacagatgaatttgcaagacgaacctattaaacctaattagtccatgatttgacaatatgatgctacagtaaatatgtgctaatgatgaattaattaagcttaatagattcatctcgtgaattagcctccatttgtgtaattaattttataattagctcatatttaatcctcctaattaacatgtttgaacatccgaaatagtagatccacttttctagtagtgcctaatcacatgtttgaacatccaaaatcaccaaccgcaacgtcgaaaaattgttatattagaaacatggatc

SEQ ID NO: 10555 - DNA, 441 bp, Setaria italica
  Peptide Sequence Number=SeqID_76529
gtcgtacgtagattccaatttcttttcttttcttttaaaaaagattccaaattccatggcgggtttcatttccagtccacggatctctcgtaatcagcgcgcagccatacggggtgctaggctgggctaggctccaacgaactactcctacgttgctcttgcctcgtaataatcagccacctactaccgtgtcatctgtccgagaaattccagcagagcaggtcatcaattccatgcgagtttgacggcttgtttagttgccctgaatttgtatgtccaaaattactgttgtagcactgtagcacactgtagcgtttcgtttgtatttgtgaattattatccaaatattgactaattaggcttaaaagattcgtctcgcaaagtacaacaaaactgtgcaattagtttttgatttcgtctacattaatactacatgcatgt

SEQ ID NO: 10556 - DNA, 202 bp, Setaria italica
  Peptide Sequence Number=SeqID_76530
catgaaatcgtcacccatgtacgcaattgccatttcatattgctgcatggcctcctcaagctcttttttttgaaatattcattgccttcaatctttctccggtctgcagctgcaatcctctcctcaactgtcatgtcacttcgagctttcccctccttgatatcatcaaatccaataagttcaacttcataaacaaggtaca

SEQ ID NO: 10557 - DNA, 406 bp, Setaria italica
  misc_feature (380)..(380): n is a, c, g, or t
  Peptide Sequence Number=SeqID_76531
aaagaagtagtaatttttacccaatgtgtctcgatatcaaatatcgaaaccatgttttcagcagccgcggctaaaaattgtccagcattaggttgaaaccgaacttgggcagtaccaccctgtacaaggaagacaaagtcggacaaaactatgagttactaaattcatagattctttctccacacacccatagggtagaaggaatatcaacaacctttatggcacgcatacacgtaagctgggtcacattccagtaccggatttcaccattgccatcacaagagcacagaagatcagttttctttggatggaaatctaacgatgtgacctggaagctatgcccagtgaacgtgtgcagagagaatccaggctgcaaaatntattttagcataagcaatactgtacc

SEQ ID NO: 10558 - DNA, 300 bp, Setaria italica
  Peptide Sequence Number=SeqID_76532
cgacctacacgccgacccccaagccaactcccactcccagccccaagcccacgccaccgacctataagccggctcccaagcccacgccgccgtcgtacaacaagccgccggcgtcgtcctacacccccagcccgccgccgccttactacaactgaaatccgctactctgctgtcaagctcggagcatagggtacgtacaaagcacgtgcatacattttataacctttctgtcagatgccatttttgtctagttattatctgaaatgttttgcttaacaaaatgctgctcctttgtttgtt

SEQ ID NO: 10559 - DNA, 499 bp, Setaria italica
  Peptide Sequence Number=SeqID_76533
agacaatactgaagaatctgaataaaagtagtttctcaggaattaaacctaatcagatatagtttacatctctgaaagtgaacatgttgaatacctgaattctgagcagatacgcatcttcgctcttcactaataaaactcatcaatccgtttaaaaaatgaacatggtaatacttcaaagaacttgacctgaagttctggataggaggtgcagcagaatatcctccttgtatccccagaatcttgtttctgctcttgttgctgacctccactacggagtgactagagagctccccagttgagaactcctggctgaacttgcatcctagagcttcgttcatggaggcagacgacacacgcttgggaaagcttaggctggacgtcgcgtgcagggagggagccaccgtcgtgccgtgcaggatctgcccaggtcggcgtcccaaatcccatcaaccatcgcggcacgcccgcagtctacccgtcgtttgccacggtgcgg

SEQ ID NO: 10560 - DNA, 266 bp, Setaria italica
  Peptide Sequence Number=SeqID_76534
ctgctcctgaatttcttcaggcagagcctcctctgtttcctttcgtccagctcggtgatcccgctcggcagctgcagcagcgacgggaatatgacgcctgccgttccgcgcgacgccgtcagaatcgacagtgacgagcaattgtccatggcttgacggtaacgaagggggtgggctaattagttaccgtagaactccctgatgctggcctccctctcccagtcgggaggcgccgacgagccgtccgcgtacaccttgtagagcat

SEQ ID NO: 10561 - DNA, 446 bp, Setaria italica
  Peptide Sequence Number=SeqID_76535
attaggctcaaaagaattcatctcgcaaagtacaacaaaactgtgcaattagtttttaatttcgtctacatttagtactccatacatgtactgcaagtttgacgtgacagtgaaccttctttttcgcccatgttgggaaaaaggaactaaacaaggccgtgatacgatcttcagaattttttggtcttcggttcttcacctacagtatagtataccagtttgactgtttcgttgtctgagtctagtgctaatgggccttgatttccctaacagacaaaggttttgggctaggttcaaatgccagcccatagcgccttcgatagaatctgtacatttgggacttcctgcctcattgagcttgaaaatgcatgcagggtctcggcatgctagccctctcgacccttctctcctccggcgggcaccaccaatgcgccagcgccaccgcc

SEQ ID NO: 10562 - DNA, 455 bp, Setaria italica
  misc_feature (311)..(311): n is a, c, g, or t
  misc_feature (422)..(422): n is a, c, g, or t
  Peptide Sequence Number=SeqID_76536
tgtgtattttcaaggagctttatggaagtagcaaactagcatgctggcatgttttaagtccacagaagaatgtggagcaaccgcataggtaggataatatagaaaatacatgatgggaacttattttttaggatgtaggcaaactagcatgctaccattactttgagtgcaaagaagaatgtgaagcaaccaaatatgttggttaatatagaaaatgcaggatgaaagaaacaccatacacataagggattgctgttaagctcttcaacattgcaattaggaaacacgtaaaacaatgagaacttttttgngacataaatttgcaattcaggtattgatcttacagcacaagctggggatggccaacaatgaattgcagcacctgcatgcacagcatcaattgagccattcacaaaaagggngcctggatatgtcagccctcaccaatgctaatc

SEQ ID NO: 10563 - DNA, 240 bp, Setaria italica
  Peptide Sequence Number=SeqID_76537
tatccacatcaaagttgtcagagacgcacacccatagtcgcagctggaaatgcttctgaatctcaggatcattgtaaacaagctgggctaaggtgggtcttccccatccctcccatcccgacgataggaaagacagtgagctgcacattgctagctttatcaagtaacgacttaataatcttctccttgtctccagctctggatctgccggcaatgtccacagggtcaatgattttagaa

SEQ ID NO: 10564 - DNA, 230 bp, Setaria italica
  Peptide Sequence Number=SeqID_76538
ggttgctacatagtgtagctgctcgacttcagaagcatagctccaaaacgatttacagcagcataaccatgaccaccacatgcttctcgacatatgcttatagactttgctgtatatgaagttacataggctttcaacccggatgaaagaatatgcacatcagcaataagatcctcatcattggttttctcatttctgagtacttatcgaccagttgaccgtggcaaagt

SEQ ID NO: 10565 - DNA, 366 bp, Setaria italica
  Peptide Sequence Number=SeqID_76539
atcccgctcggcagctgcagcagcgacgggaatatgacgccgtagaactccctgatgctggcctccctctcccagtcgggaggcgccgacgagccgtccgcgtacacctgtcgcatcaccggagaaacggcaattcaatcaccagctcgtgcggtgaaatcgaatcgagcatggccacgacgagataggggtgggagagcagaccttgtagagcatgatcttgaggaggccgagcgcgccggcgagcttgcagtcggtccactgcacgaggaatgcgcgacggcgctgtacgccatccgcatctggatggaccgacccgtcgtacgtcccgcaggactccgacgccagcgcattggcgtgctcgat

SEQ ID NO: 10566 - DNA, 257 bp, Setaria italica
  Peptide Sequence Number=SeqID_76540
gttcttggctctgctgctgctgctgctgctgctgttggttctgctgctgttgttgaagctgctcctgcggttgctgtgaagatgtctgctttatgagatactcttggtctggtctgactttgggtgaactggattgcataggggaactaatacacccatcagttccagcaggttgtccatctttaccattcaacccactcctggtcagcgctgtaagtcgtacggggatcaatactccccattaattagttgagttg

SEQ ID NO: 10567 - DNA, 451 bp, Setaria italica
  Peptide Sequence Number=SeqID_76541
ggtatacaaggcatttccaacgttgaaccatgacacggctaagctgatccatctaattctccatgggattgcgcttgtccttggtgcggttggaatatactttgctttcaaaaatcacaatgaaagtgggatcgccaatctttacagtctgcactcttggattgggatcggaacgattattttatatggtattcaggtaatatttacacatgcttgcaaacctggattccttctgtgactatgaattgatacgctatttcccttattatgaattggctgatattttttattgaacgatatcaaccctagacatgctatttttttcgaatataaaacttggcacatattgtcagtaactggtgggcttcatggttgttctttttagttaggttaacaaccaaccatcatgaggaactgaattggttttcagagctacaagatagaaagaata

SEQ ID NO: 10568 - DNA, 669 bp, Setaria italica
  Peptide Sequence Number=SeqID_76542
cttttgatgctacctaggcggctaggtcttgatgcctgatgtcaaagcaaaaataaagggcctgtttggctcacgaggactaaactttagcccccgtcacatcgaatgtttggatactaattagaagcattaaatatagtctaattacaaaactaattacataaatggaggctaattcgtgatacgaatctattaagcctaattagtccatgatttgacaatgtggtgctacggtaaccatttgctaatgatgaattaattagccttaatagattcgtctcgcgaattagcctaggggttctgcaattagttttataattagctcatgtttagtctttctaattagcatccgaatatccgatgtaacacggctaaagtttagcacctggtatccaaacaccgacagaagagaacgatcgcttttgtcttgtaggaacttgcattggttactctcgatcgttcatgggctaaacgatcgcgcactctctgctaacatgatgactagatgagcgcagtggccagtgattttcctgttcaactcttgtaatgcatgcatggtgttcatggacgcagtggccaggggcgtactgcgagcagagcagcgccggatgctgcaagccgacgaccagcgccaagccggcgcgcgacttcttcatctcgggcttcacc

SEQ ID NO: 10569 - DNA, 243 bp, Setaria italica
  Peptide Sequence Number=SeqID_76543
ctcctccactgagaattatcttctagaaagtgcatataaagggaagggggcaaaatatgacagagcttatgacttatgtagtagaataatcgaaatcatggtccttgcttctaagccatctctggggaatacgttttattttcttctgttatggcaactcttggcattcagatcattgatgattgatgtctgattagtaaattgattcttctttcttctcatgcttaatgccgtgacacccac

SEQ ID NO: 10570 - DNA, 473 bp, Setaria italica
  Peptide Sequence Number=SeqID_76544
gctaatgtacgggcgtgcgatcctcaatatcggaatagctggcggaataacatctgctacgaatgtagaagcaacaaaaattccccctgagcgaaggactctactaatttctgcaacctatgaaaatatcataaacatagtaagaactttcaccaattgccaccaggtaggggaaaagaaaagttggataaagaacatagttgatggatggatcgctgaacttaaatgcagaaatgtaataaacgactgctccatttgacagggaaaaaaattgaagacgactaaagttggtcatgaaagcaattccttgttctctattttatcaagcttcatgaacttgtaatgactaataagtattccctacattcttgaaattatggttgtgattcttacttatttggtggctgtgctcatgcactcacatgcttttgaaacaatgggaagggggagacgagggacacaaaaataaatgc

SEQ ID NO: 10571 - DNA, 246 bp, Setaria italica
  Peptide Sequence Number=SeqID_76545
ctcccccaatccctatcctccaagaccacgccgacctcctccctgcagccagtgctagaaccacgcttccgtcttcccaacagcggacggtcaaatcttggacagagaacagcgcctgcggcctgcacgatcaggagtaatgccgtcacaccaacctaccgacagtagctccaagtgccagcctccggcaaatgctgcctctggtcttcttgtgactccaggtgatattgaagttgaagggcatag

SEQ ID NO: 10572 - DNA, 370 bp, Setaria italica
  Peptide Sequence Number=SeqID_76546
gtgtttttcttgaaaaaaataggaactggccacatatgaggtgggttgtgttaggaataatcaacgtatattcccagggggccaatagacccatataagtagagtacaggtggtagtacatatacacagaaccccttatacaatggggtaaatacataaaggaaacatatctctaacacccccctcaaactcatggtggatctacaacactgagtttggagagaaagtacctatgctgtgcacgagtttgtgccttcatgaagaagtcagcgacctggagttccgaaggtacatactgaagaacaaccacctgatcctgaacctgagaccgaacaaagaaagcatcaacaccaatatgcttggtaagctc

SEQ ID NO: 10573 - DNA, 440 bp, Setaria italica
  Peptide Sequence Number=SeqID_76547
gaaacctactcaggaactgatcgttgtgtgatccagtatggcgagctcagcaacgtcgaggatcctagctctcgggctggcgctcctctgcgccgccggcctggcagccgcgcagaacgtggccagcgtcgtcaccgactcgttcttcaacggcatcaagaaccaggccccgagctcgtgcgagggcaagaacttctacacgcggagcgcgttcctgaacgccgtcaagtcgcacccgggcttcgcgcacggcggctccccagacccagggcaagcgcgagatcgccgccttcttcgcgcacgtcacgcacgagaccagcaacctctgctacatcagcgagatcaacaagagcaacatctactgcgaccgcgacccgaaatacaagcagtggccgtgcgtctcggggaagaagtactacgggcgcgggccgctgcagctc

SEQ ID NO: 10574 - DNA, 281 bp, Setaria italica
  Peptide Sequence Number=SeqID_76548
ttggctgccatatatttctaatacacggagctttggtgcttctatcacccccggtagagttgtcaacatgggacatttctcaacacacagagtctcaaggtcagggaatctctgctccgtcatccccaggctcttaaaactacctaagtaacataaccggagcctctttaagtttggaaatgctgaccatgctgtaacatcactatggtcaaatgatactccctgagatgtagctgatggtaatgctgccagttcggggcacgtttcgattgataactctt

SEQ ID NO: 10575 - DNA, 406 bp, Setaria italica
  Peptide Sequence Number=SeqID_76549
gcggcggagtgtacgtcggcggcgtgggcttcggcgtcggcgtgtatgtgggtggagtaggcttcggcgtcggtggcgtcggcttcggcgacggtgtgtacgtcggaggagtcggcttgggcgtcggcggcgtcggcttctcaggcttggggccgtgctccttgggcggcttgccgcccttgggtggcttctccggcttgggcgtcggggtggccggcgtgggcgcgtacccgccgccgtagccgtagccggcgtcggcctggatctccacccacatacacgccgacgccgaagcccacgccgccgacgtacactccgtcgccgaagcctaccccaccgacgtacactcccacgccaaaacccactcctccgacgtacaccccgtcacccaagccaccggtgacca

SEQ ID NO: 10576 - DNA, 362 bp, Setaria italica
  Peptide Sequence Number=SeqID_76550
cgagaaagagggcaagcttggatggcgccattgctatctcagctagctatagcttttcaagtgtgctatgagcttctctagctatagctagctcttgtgagtagtattggcttgtgtgtgtgggatgggagttaatcttcagctagaataatcgccagttcgctctgtgtgtaagtttcactcactgacacaccaacacacgctcacttacacacagagcgaactggcgattatttaccttgctcagatgaagcctttgatcaaccccatcttgagcggggagtgagctttctgttgaaaggagttaaatccgacatgctgtaccattattcagtctgtgaaccttttctttatttcaggcg

SEQ ID NO: 10577 - DNA, 382 bp, Setaria italica
  Peptide Sequence Number=SeqID_76551
ccgtcggtgtgcggcgtgatgcccatcaccttctcccggtggcggcagggagggtagtagtggatcgccatgctctgccgccgcccggtgaaggcgtcgtggagcgggcggccgccaccgacgccgaagcctactccacccacatacacgccgacgccgaagcccacgccgccgacgtacactccgtcgccgaagcctaccccaccgacgtacactcccacgccaaaacccactcctccgacgtacaccccgtcacccaagccaccggtgaccaagccaccaacctacactcccacgccaaaacccactcctccgacgtacaccccgtcacccaagccaccggcgaccaagccgccgacctacatcccgactcccaagccca

SEQ ID NO: 10578 - DNA, 188 bp, Setaria italica
  Peptide Sequence Number=SeqID_76552
tcagcacatgactgaattgggagtatgaaactgaaacgatctacatggaaaagaacatgaaatgcgaatggataggagacagaccggaacgtgggtgggttggtaggccacagtttcatgttcctctcatggactggctgggtgatgaggattaggccctctgcccagtccagcttgtcacctggccc

SEQ ID NO: 10579 - DNA, 377 bp, Setaria italica
  Peptide Sequence Number=SeqID_76553
tatttaatgcacaaataactcctatgaaactttacattgagattgacctaaggtacatatagacgtgcgatgaatatgttaatccatggaattccattcacctctccctgagctctctgattcgtcaaaggcggcagagacgtgcgatgaatatgttaatccatggaattccattcacctctcgctgggatctctgattcgtcaatggcagattcacctcgtttgaacacgtgccggaaaggcgagcagctgacgactcacaagtattcccatcattttctttaataaaatatttcaccttaaacacaataatttaaaaaaattctattctatcatctaataaatgcaaacaacttttttcttaatccttgttgcct

SEQ ID NO: 10580 - DNA, 228 bp, Setaria italica
  Peptide Sequence Number=SeqID_76554
cagctgaagaaaaagttcagtaacatttacaagctctcaacctgacaaatttctaacaatccatagtaggtgataaaatcatctaactggggccataaattctagaagatgtcagcaatagaatatatggccccagttagatgattttatcacctactatggattgttagaaatttgtcaggttgagagcttgtaaatgttactgaactttttcttcagctgcacaat

SEQ ID NO: 10581 - DNA, 254 bp, Setaria italica
  Peptide Sequence Number=SeqID_76555
agtattaaacatagactaattataaaaccaattgcacagatagagactaatttgcgagatgaatctattaagcctaattagtccatgatttgacaatatattgctacagtaaacatgtgctaatgatgaattaattaggcttaatagattcgtctcctgaattagtctccatctatgtaattagttttataattagatcatgtttagtcctcctaattaacgtccgaatattcgatgtgacataaattttagcc

SEQ ID NO: 10582 - DNA, 273 bp, Setaria italica
  Peptide Sequence Number=SeqID_76556
atattcatcgaccaatgcacataagcaccactgcaccaggagtccaagggtacataaattgtactggatgctattctggcccgaactgtgcagatagcccctgttaattgggttgtaacccatattgtaaccacaccaatctattcttataagaaaataaatataacccaccctaaaccaaacctccactatcacacaccacaccaccccaaaacttaccattgcataagttatacaagttacttgccaaatatggttacaacccaataagaa

SEQ ID NO: 10583 - DNA, 381 bp, Setaria italica
  Peptide Sequence Number=SeqID_76557
tcctttccaggatggccggcaacatgtccttgaggttctcatgctgctcctccatgccctccatcaccttgtactggtccaggaggtagctggacgccttctccttcaccagggacagcagtggcccgaccaccatgctgcccacaagctcggccattggagcagtcagagctcacgagaacgcacgctgagaaatgagaagacactttggagtggagaagaggatggtctgcggaagcgctttggaggtaaatggagaccaacgccaagcactgaccttcttgggtgcctaggctgacagagcagcagtagcagaggcggggcagtagcggtcgcagcggaggggccggcggcgtacgggaagagaagatagagaagagg

SEQ ID NO: 10584 - DNA, 259 bp, Setaria italica
  Peptide Sequence Number=SeqID_76558
gaacacggaaatggcgggtaacagtgccatgagcagcctcagcttcaatggtttttccatcagggcacaccaccaccttcaaatccatctaccatgcctccaacctataaccaaccacctccatcacaatctagtcccccaaccacacctccacaacaatctagtcctcctgcaacacctccaactaaccattcacctccgccatctttgagcccacctactacacctccaacttatagccaaccacctccatcgcaat

SEQ ID NO: 10585 - DNA, 200 bp, Setaria italica
  Peptide Sequence Number=SeqID_76559
agcttataagccggctgaaaagctgaaacgaacaggtccaataagaatggtaccccgtacccttcacttttgtgccccatgttattctctgctgccataatcttatcactgtaaatacatagcaacagcctcgagatagtatgtacttgaatccatgtgtacctgatatccagttgcctaggggaaaaaaaaaaaaaaac

SEQ ID NO: 10586 - DNA, 402 bp, Setaria italica
  Peptide Sequence Number=SeqID_76560
tctttgtatattgcccagaagagttacttactttatgacgaacttcgttgtgcaatgcttggtgatttaacattttcacattagagcttcatttagttacctttgtattcaatatcaagttatctaaacttcaaacattatgaggttttttattttaatatatctctcttgggtgctctaaatcttcctacgaagtgagaaactctaagaaaatcgtgaaattccagtagttggtggatggctggatgccatcaagtagcggaacaccaccctctcatgcggctcttcaccattatatagaccgctatccgcgtagactttagctaaagcacaggtggtagcgtggaagcgacaacatcaatatagacgctaagcgaccatacatgaaacaagaaaaaataa

SEQ ID NO: 10587 - DNA, 542 bp, Setaria italica
  Peptide Sequence Number=SeqID_76561
gagagaaaggtgggttgagggaggagatcaaattttttattctgtagaacccgctcccatgcatgggagcccggtctgtgtttcgtttcgatagaaccgacctcacagcgtatggaaccagggccgtgtttagttggggaatttgggaggtgccaaattactgttacagcactgtagcacactgtagcgtttcgtttgtatttgtgaattattgtccaaatattgactaattaggctcaaaagattcgtctcgcaaagtacaacaaaactgtgcaattagtttttaatttcatctacatttagtactccatgcatgtaccgcaagtttgatgtgatggggaatcttctttttgcatagtgtcaaagttgggagttgggagtaactaaacatggcccaactcttgcgtgccatcaaatggacaagttctgttacaatctgcagcaatcaagctaacctccatggaaaaccagtgctcaacttctaattgatgaactaactgcctcagtttattctgcttgtacgtattcttggttaattcgat

SEQ ID NO: 10588 - DNA, 259 bp, Setaria italica
  Peptide Sequence Number=SeqID_76562
ccgcatgtctctatgccgatcatgggaggcaaatgcaccaaggaatagattagtgtctagcaccagcaattgctcataagccagctcagcttcttgttcagtcctctgcaatgctagtaaaacctacagaaaataaaactattttagtctggaaacttttacactcttaccaccttctttagcccatgtcacatcggatgtctggacactaattaggagtattaaacataggctaattacaaaactaattgcacaaccc

SEQ ID NO: 10589 - DNA, 372 bp, Setaria italica
  Peptide Sequence Number=SeqID_76563
ctaaatttagctcctgttacatcgaatgtttgatactaattaggagtattaaatatagactaattataaaatcaatttcacaatctctagactaaatcacgagacgaatctattaagcctaattagtccatgatttgacaatatgatgctacagtaaacattcactaatgatggattaatagattcgtctcgcgatttagcctaggagttctgcaattagttttgaattagttcatattttgttcttctgattagcactccacgatccaaacacccgccaagtcatcgcggggcactttattgttgcaccagatgaactgggataatattatttgcttttttttttgaggaaatggggtggtattatctgat

SEQ ID NO: 10590 - DNA, 609 bp, Setaria italica
  Peptide Sequence Number=SeqID_76564
tctgcaattagttttgtaattagctcatatttagtcctcctaattagcatccgaatatccaatgtgacactgctaaagtttagcacctagtatccaaacatctccagatagtctagatatttagatagaccggtacaccacgggttcacagcatgacggaccaaatatagatggtccagtaccaaataaactaagggggtgtgctaaagtttattggatacctcgtgctaaagtttagcacctgtcacatcggatgtttggatgctaattaagagtattaaatataggttaatcacaaaactattacacagatggagtctaattcgtgagacgaatctattaaacctattagtccatgatttgacaatgtggtgctacagtaaccatttactaatgatggattaattaggcttaatagattcatctcgcgaaatagcataggggttctgcaattagttttataattagatcatatttagtcctcctaattagcatccgaacatccgatgtgacactgctaaagtttagcacctagtatccaaacaccctaaacttgttcatttatttcaccattttagttcactatctatcgatacctaacaagttggt

SEQ ID NO: 10591 - DNA, 264 bp, Setaria italica
  Peptide Sequence Number=SeqID_76565
taaccattgttaatgatggattaattaagcttaataggttcgtctcgcgaattagcctaggggttctgcaattagttttataattagctcatatttaatcctactaattagcatccgaacatccaatgtgacagggctaaagtttagccctggtatcaaacagccccaaattcgttttcatgctgctagaggactgccttacttaatttatagcaaagccgttgcggcttgcgactggtgtggacttgacaatctttgctataa

SEQ ID NO: 10592 - DNA, 432 bp, Setaria italica
  Peptide Sequence Number=SeqID_76566
cccagaagctgcgacagtcttcctaaagctcatatcgatctgcagtgactgagatgtaaacggtgggcctcagctgagcacatacttcaatggcaccatggacgggatcagacatgaagttgctaatgaggtcttggttgattggtgccttcttatcaatagtaacaaaagcttgttgagtcaggatgtagtcaaaacggggcgcccacttccttgatcccaggcgagcagtagtggagcagttatcaaccatgaaggccaccccgcgagcatgcatgaatgggttcaatgagtctacagactcaatcaggctctcattaatgatggctcagattgaggtgcttagaaagaaaggccacagttactctgagatcatcaatgagagcctgattgatgatctcagagtaattgaggtgcttagaaagaaaggcc

SEQ ID NO: 10593 - DNA, 405 bp, Setaria italica
  misc_feature (365)..(365): n is a, c, g, or t
  Peptide Sequence Number=SeqID_76567
cgcttccttctttgccatagcctagctcccaaccaacatgcaacaatgcacgctccccgcttctcatgttgccaacaccaatgcctaaaccagacatttcctttttctctgttgatggagtaaaaagctttagaaagttactccataggcgattatcattgataaacactgatgtagtgttgatgatgcccatataattctcaggttatttacccatacctgtaggcttgctgagcaatgcaacataaaaggtacaaatcagaaatgagtaatgcatatttcactctttcatctcacaacacattaaccaattaatagcaggcatgacaagttactggctggataactggctattcagatccctnattaagagtcatcatcattgtactagaaaaccataacagc

SEQ ID NO: 10594 - DNA, 419 bp, Setaria italica
  Peptide Sequence Number=SeqID_76568
cgaagcacaccgggtctgtcaaaatctgaaggaaaaaagataacttccacatcgcaaagtatcgcctttccaaacttcagcgtgattcaacgacggtatgaaactagcatatcctggtgtgacaccagtaaaaagaatatagtgaaagaaaacgcatcaaatttgaatttgccaaaccctcccgttagatccttctttttgtgaggatgatcttcgggtttgggagatggtgaacgtggctgctgtcaacttcaggttccatttctttacacaaacttggatgagtctgtacctgcaaggttgagttccaatcaacactaagggcctgtttggcaaccatgtgttaaagtttaacacctgtcacatcggatgtttggatgctaattaggagtattaaacataggctaattacaaaacta

SEQ ID NO: 10595 - DNA, 424 bp, Setaria italica
  Peptide Sequence Number=SeqID_76569
tttttttttttttttaacttacttcgcaaatatgtgattttttgcgaacatgtactgcttaaaatttgtggcatgcttccaagtttcaatagttaatgatctttgtaattacaaagctataaatctttataattttctctataattttaatcaaataaaaaatagtaggagtattttcttgcttccaatcccactaggcccagcagcagagtcatggcacatggcgcatctggttccccggatcacatattgaattttcgatgcttttgccgaaggatgcattcaaactaaccggatcatgttgtggccgtagatttgttcatggacagtgcatccaccgtggtgcaagaacaccgtgccaccatggaaagaggctcgacggccatggtggcacggtgttcttgcaccacggtgttcttgcacc

SEQ ID NO: 10596 - DNA, 637 bp, Setaria italica
  Peptide Sequence Number=SeqID_76570
aatttggaagaaggatggaaagacatgactacaggacctgatccttctggttatgattcactccctccattcattaatacatgatgttttggacggtgaaagaaactaaaacaatctcattttgtttgtctcaaatgtcatatattaatgacaggaggtagtacggctcagttccttttttctcagctggatcagcatcggtgccttatctctctaacaattcacttcacttcaaggttcagtccctttcgaagtcctcgtccatctttaaaaattgggagttccttgatctaatggcaatatgttgaattggtcaatcccacttgctttactcgggccttgtttacttcccaagttgggagttgcaaaattggcattttgccataaatgcgacaccgtagcgtttcgtttgtatttgtaaattattgtccaaatattgactaattaggctcaaaagattcgtctcgcaaagtacaacaaaactgtgtaattagttttataattagctcatgtttagtccttctaattagcctccgaatatccaatgtgacatgaattttagtccggactaaagatccaaacacccctaactaaatatagattaattacaaaatcaatggtataaatgaaggctaat

SEQ ID NO: 10597 - DNA, 550 bp, Setaria italica
  Peptide Sequence Number=SeqID_76571
acacaggctaccgccacacatgaataaacaataaaacctgtaagtcaaatgatgtgtacacgtcaacatggactgaccagttaaacagaacaaatgcaggcaggaagaaggaaaagggactccatagtgacaggagcaagtgatcagttagctacctggctgcgttgcaagatgccatatttccttcattgagtcaatctttctctcctttggggcatgcaaaactataccaatcgaaccaacaacacatagtatgcaaccaacaacaccaaacatgtgcaaattctctttcagaataaagtgtgcgagcactgcactaaatatgatgcttagagctcctagaggagtaacaagtacagcaggggcaaatgcatatgctgcaaagttggctacctcacccagaatcatagttatcattcccagccaccataacggctcatacagatatgagaagcctccagaagctgctcgcaccccattatcgccagccttcttcagcccaactttcttgatcacaaagcttgaaccatgaatgcactagatgacatgg

SEQ ID NO: 10598 - DNA, 412 bp, Setaria italica
  Peptide Sequence Number=SeqID_76572
atggctcaaccgttgccgtcccatcggcattcgactttgacaccagctcgtggtgtgatcatgtcgggtgcatcgtcaagaagctcagtgactaggtagatgtattctctatgccatggtggttggagagtttatatgcttgtaggtgattagtaatgcattggtactatttgcatgttggttctatatggagttgaatctatcattttcaagcatgttgtatgatatagcatccaagctagacaaagtctgagaatgataaaccgttaaagaaatatttagtcagggcccaagagaagcaagtgctactgccttgctctacccctggccgtgattggtcaagtgcgccaaggggatttgcacagcttggtcagcagcactacatacagacatatatttcttgaggttttaa

SEQ ID NO: 10599 - DNA, 450 bp, Setaria italica
  Peptide Sequence Number=SeqID_76573
tggggtcccttggcaatagagattttgtaccgaggtcccttttctgcatcattgattcattgtcaaagcccttttgtaaatttccagtggggctacattaccagacagcagatacaccttggcctacctcggcctcaggctcagggtaggaattgaaagctagttcttgccctcgtctatacgggcccctggatgacatgtggccccgggtagttgctgtactcttcagcctaccctccagagctggtacataaacagttgcagtggatccaagtcattgtttctttagatccggtcatctaccgtgtcgactggtggatgggtcctatctgtggtatgcctgacttcaagatgagtggaaagaagagtgacgagcttgaaccaactgatgctggtgatgaagatgacggtggtgacgatggggacgaggatggtgactttggggagggt

SEQ ID NO: 10600 - DNA, 653 bp, Setaria italica
  Peptide Sequence Number=SeqID_76574
cagatgaagtctaattcgcaaagcgaaatccatgattttgacaaatgtggtgctacaataaccatttgctaatgatggattaattagacttaatagattcatctcgtgaattagcacagaggttctgcaattagtttataattagctcatagtttaagtcctaaattaacaatccaaaacaataccgaatgtgacactgccattctgatgcatggcttcaggtgtggttctgaccttgaagaagcctccaaggacgatggtagggtgtactttctgctgtaaaatcctggtttcaggataagattaattttgggtcaggtgagtcaaaaaaacaaggccttgtttagttagggaatttgggaggtgccaaattactgttacagcactgtagcacactgtagcgtttcgtttgtatttgtgaattattgtccaaatattgactaattaggctcaaaagattcgtctcgcaaagtacaacaaaactgtgcaattagtttttaatttcatctacatttagtactccatgcatgtaccgcaagtttgatgtgatggagaatcttatttttctcattgtcagctgtcgcaaacagtgattgcattttgggccatgtttagttactcccaactcccaactttgacacttattgtctaaa

SEQ ID NO: 10601 - DNA, 540 bp, Setaria italica
  Peptide Sequence Number=SeqID_76575
ctagctcccggccttacacccagtatgggaactagggtacatcctatttggatatgtaggtgtcactgatccggttgtagctgtaggtcttcgattctgcatacccatctgtggagccgtggagctctttgtctgatttcttgctgaggaaccattagcattgaaagtcgaggtcggcatatgattagttgtagttgatctttgctgtccatttgcataagcagagccatcataccatgcaaagtgtgctcctgtgctgtcataaccataagttgtgtccaggtaaccagcagaaggaactccacctagcaagggtgcctcgacttagcactggagtggatgcaatcaatcagaattccaacgaatcttcagggactgtatcaggtgctacattcctggctgggcccccggctgggtcctttgggccgtgggtggtgctgcgctggcctgttgccgtgcccaacccccttgggtctctggtagattagggtgatgtttatccagtggagtcttatgaaagcttctcagcaaatcaaattc

SEQ ID NO: 10602 - DNA, 603 bp, Setaria italica
  Peptide Sequence Number=SeqID_76576
tgccttcaatctttctcctgtctgcagctgcgatcctctcctcaactgtcatgtcacttcgggctttcccctctttgatatcatcaaatccaataagttcaacttcataaacaaggtctgccattggagggacatttgggaatgaaaagcttccttctttgccatagcctagctcccaaccaacatgcaacaacgcacgctccccacttctcatgttgctgacaccaatgcctaaaccagacatttccttttctctgttggagtaaaaagctttagaaagttactccataggcaattatcattcataaacactgctgtgctattgatggtgcccatacaattctcaggttagttacccagtacctgtaggcttgctgagcaatgccacataaagaggtacaaatcagaaatgagtaatgcatatttcactatttcatctcacaacacattaaccaattaatagcaggcatggcaagttgctgggtggggtaactggctatgagatcctcgataagagccatcatcatgtactagaaaatcaataatagcatgcaaagtaagctagttaaaatttatggagttgatggatgaaattgcatgcag

SEQ ID NO: 10603 - DNA, 370 bp, Setaria italica
  Peptide Sequence Number=SeqID_76577
aagttcttcatctttattgaaatatcaggcaattggggatatgaatgagttgcataatcaccgaatctagggcaatttctcattggtaatgatctgacattctgattaagatattcacgttcagttcaggccttcagggtggtggcaccaggaaagaaatggcgatgtatgaaaaatgactctgatcatcgggcagggaagcatcggaacatcagcaaggattttataagtttgagttggccgccagccttgatctgagctcatcagcaaccgcatcgatgaactcttcggtgttcaggtaatggctccttgtagaacaatttagaaagaataccgtagaaacaaagaaagggacaaaggtaccttagga

SEQ ID NO: 10604 - DNA, 343 bp, Setaria italica
  misc_feature (120)..(120): n is a, c, g, or t
  Peptide Sequence Number=SeqID_76578
cccataataggcaaagaaacatgcaaatttgactagccaaagaagaagagttgatacagtcaggtcgcgtggccagagagcttgaaatgcattattggtgctgtgggatttggagctaangttttcatcagttccaagaccatcttccggcataagtagaagtgttgtaacggaagcatctaagttgtcagatctctcttttgagttggaaggttagaacgccaggagggagagcctggttatttattcctgctattctttccaagacgagtgtagcttcatttattttacctcttgagcaaaggtatcttggtgattcaggtattaagcaagagaagattaa

SEQ ID NO: 10605 - DNA, 558 bp, Setaria italica
  Peptide Sequence Number=SeqID_76579
taaaatgtaaaatatgggggtgcaggaactttagtgtgctatatcatttttgttcacacttgtttatacaaatgtagagaccattgtattattatcctcaaagatgcttatattttgcatacttgattagatttttatgcattgaggaccgaggtttgcaggatgtcacttattgcatgccaactttgagtttcatgaacttcaaagaggtgctaggcaggatcttgtcaacaacaagtggatcaaagtgttgatccagttattgatttgttctaaactacctacatatgtctttatcaaacaatccatatatgtctacctccagtttaactaggacatgtagaatttgatgttatatatgagcctagctctgaatgttagctactctattgttatgacttatgagcctacatgaatgaacgagagttttgttctttgttaacgtgctactttgtgatgaatgtctgtacatgaacacttagtatttaattcttttgttatttttacttttttttaattcctattcttaaattggttccttgtttgtaacctattggt

SEQ ID NO: 10606 - DNA, 141 bp, Setaria italica
  Peptide Sequence Number=SeqID_76580
gagatgtttaccatatattgatggaattagattgtttaccatatcaaatccatcaatatacggtgatcattgaaatacatatgcaatgcatatagatatggtaaacaatctaattccatcaatatatggtaacatctcaat

SEQ ID NO: 10607 - DNA, 218 bp, Setaria italica
  Peptide Sequence Number=SeqID_76581
atcggttttagctgctggcttttcaggattgacagaagactgtaggtcgccttgagtggtagaaggaactggtgtaggaggttgaaaagccagcagctaaaaccgatcctgccaagacaacaacaaatggtgttcctaatggtactgctcacagtaacagtggaactgtaccccttgcataagcagagccatcataccatgcaaagtgtgctcctgtg

SEQ ID NO: 10608 - DNA, 286 bp, Setaria italica
  Peptide Sequence Number=SeqID_76582
cacttcagttgaccttgaagggaatccaagacctgttgagggtcagctttcacttcagttgaccttgaagggaatgttcggtgagcgtggtgcctccataacatcccttcaaggtcaactgaagtgaatccaagacctgttgagggtcagctttcacttcagttgaccttgaagggaatgttggtgagcgtggtgcctccataacagcctttgcataactaatctgaggttcgccccataggaacccatgtcctaattcagactggagactagcgttggactcttg

SEQ ID NO: 10609 - DNA, 890 bp, Setaria italica
  Peptide Sequence Number=SeqID_76583
actaattctcctaattagtatccgaacatccgatgtgacccctcctaaagtttagtaccctgcgtccaaaacacccccttagtctagggaccgaaggaaccaaacaggcactcacacgataacaggaaaggaaaaggcacatcacgcacgctggcgaacatagagtagcgcgaggaacaacacacacacccagagcgccaatacagaacgagccccgagcaaaggggaacccatcacacacaccgtcaggcacggctcagcagccgaatagacttccgggacgattgcagctctttcattagcttgctttagtagctgacaacattatatagaatccattcctgacaaattcgaaatcaaccaggccacatgctctgcagagatcttcaagctccgcttcggataagaagatattcatgccagtgattcggcttatgtactgcaagataattccaagagaaagtttgacctcccatgcgctgacttggaggtgtcaaaacactaaagaatcacttgacgtttgatgttagttgatatcttgttgtcgcgtgaaaaccattacgtgtggatgattagcagtaggacattaccgggcgtccgatcctcaatatcggaatggctagtggaatatcttctacgaaagtagaagcaacaagaactccccctggacgaagtactctactaatttctgcaacctgtggaaacatcatcaatataataagaacttgcaccaatcgtcaccaggtacgggggagagaaattggggtaaaagagggaattggccaattaatcctatggcagcatgtagttttcctacatctattcgtatggatgtaggcaaactagcatgctgccataactttgagtgcacggaagaatgtggagttgtt

SEQ ID NO: 10610 - DNA, 457 bp, Setaria italica
  Peptide Sequence Number=SeqID_76584
ataattgtgtcatgctcgacttagtgaatttttttgaacttgtgatatatagaatcctgtcaggtgttgttgacctattctgttagcttatctttaagggcagtatttagccatggaagtaggttctatcttggaacgctgtcatcttgaatcgtttgtatgacttgacaggtgtatggatttcctgttgtgttatgttaggttccgtttgttctttaggagctcctaaaattcttgtcacatcgaatgtttagatactaattaggagtattaaacatagactaattacaaaaccaattgcacagatggagactaatttgcgagacgaatctattaagtctaattagtctatgatttgacaatgtggtgctacagtaaacatgtgctaatgatgggattaattaggtttaatagattcatctcaggaattagcctgtaattagtttataattagttt

SEQ ID NO: 10611 - DNA, 592 bp, Setaria italica
  Peptide Sequence Number=SeqID_76585
acaacctcgtccgccgtccatcgccttgccgcatgctgccacctccaacgccgcggccatgaccttgccatgagcccgcgagcaccctgcaaccctcgcaaggtcaaaaggctaaggggggtgtggatacccagtttagcacttgtcacatcggatgtttgatactaattagaagtattaaataagactaattacaaaactaattacgagtctaattcgcgagacgaatctattaaacctaattagtccatgatttgaaaatgtggtgctacagtaatcatttgctaatgatggattaattaggcttaatagattcgtctcgcgaattagcacaggggttctgcaattagttttgtaactagctcatgtttagtccttctaattagcatccgaacatccgatgtgacactgctaaagtttagcatccagtatccaaacaccccctaagcctttagccactgccgcatcatcacgccaccaccgttgttgtgctgccgctgctacacacgcatgttcgcgccgttgccgccttgtgggcttttcctcgaacacctagcgcacagccctgcacagcctcacaagccgcatgatc

SEQ ID NO: 10612 - DNA, 509 bp, Setaria italica
  Peptide Sequence Number=SeqID_76586
aaaatcggggcaccagaacaagttcttctacagtcatggattagcaacacacagcaacggcgcgggtcgcgccatttttgattcttggcaaggggtaaaaccgaggcggtaaaagataccgatcgccatgagggaggggcgtgtcgctagaaccgggcgagcgcgcggcggagacgtcgcgggtggtctgcaccaccacgcagggagagcgcaccatgcccagcacgccgcggagatcggtgttgaacaccgtgcggcagacgtggagggagatgtccgggcgcatgttgaagagggtgcggctgaactcctgcaccgccgcgggcacgtccgcgcccaccgccagcggcgcgtaccccgtcgcccacgccgagtagttggccgccatcgcggcgaacacctgctggatctccggcagctcgaacccgccgtggtagtcgttgtcgttcaggaacctgggcgatgcgccttcgtcgggcactccgtctccgcgaggatgccgatcatgg

SEQ ID NO: 10613 - DNA, 560 bp, Setaria italica
  Peptide Sequence Number=SeqID_76587
tagaagtattaaatatagtctaattacaaaactaattaaacagatggagtctattaagcctaattagtccatgatttgataatgtggtgctacagtaactatttgctaatgatagattaattaggtttaatagattcatctcgtaaattagtatggaggttttgcagttagttttataatttattcctcctaattagcgtgaccctcctttgtgtccaaacaccctaagacaccatctgacactaataaggttctgaagtgacagcctaccgaccagggttgcgtcatccaaagcagcacttcacaaagcagttagatttcaccaaaaacaaactttccatggttccaaccaaaagcttcaaacagcattcatctgaatgtaagggggtgtttgggaaccacctgttaaagtttaacaccaatcctcgaagcaccgcatgcatagcgtgtgggcgcagtcgggcagcacgaccttgcggctgacctcgaggcagatgccgcactcgagctccctctccgtgtccacctccgagagcttccttcgttcccttgtcttcctt

SEQ ID NO: 10614 - DNA, 364 bp, Setaria italica
  Peptide Sequence Number=SeqID_76588
ggttttaactagatctgctgcaccgcttcctgacactggtcaatggctgcttctatcactgaacgagaagctccctcaaagcattgtcaatctactcagctcatgttatcactcttcaccattatttgatgttgtttatcatgctggggttctcagttctgtttgactgcatcaaagctcctggtcttgaccatggtgtgctgcagctcgttatcaaatacctcagcatcctcatccttgggcacaaaaatactatgttccataagcttgaacagcagcatatgccatgtcatgtgttaatagaactactaatagaaataagacaatttagaaatacaagaaagacaataataggaaacaataa

SEQ ID NO: 10615 - DNA, 444 bp, Setaria italica
  Peptide Sequence Number=SeqID_76589
tgccagatccatcacaagcacaacttctttctgatggtggttctctagcaatgcagttgtcgtgagaggagcaacaatgcttccaattcggccaatgatactagcgaacccaactccagtgttgcgacaagatgtagggtagatctcaggggaataaacatgtagaacagcaaaacatcccataacacaactgcgagcacagaagagaaggatgattgataaatcttctctcaactgtgtggcaagaggtgcaagaaaggcacagcacaacaaaatcatgcctcccattgtcactttccgaccaatcctgtccaccagtagagccgccaaaaagagaccaggaaacttcgaactagcaccagcaactgaaaatccgaaggcaacattcatcatttcatcaaatttgttcagcgcacaacattacctgaccaaaactggtcacca

SEQ ID NO: 10616 - DNA, 427 bp, Setaria italica
  Peptide Sequence Number=SeqID_76590
tgagaatttctaggatttctctctttttctagagtgtgtccacctaggaatcctaggtggcttcaccagaaggcttcaaaaggaacctccaattaataatagtaagattaaacatagactaattgcaaaaccaattgcacagatggaggctaatttgcgagacgaatctattaagcctaattagtccatgatttgataatgcgatgctacagtaaacatatgctaatgatggattaattaggcttaatagattgaattaacctccatctgtgtaattagttttataattagctcatgtttagtcctcctaattaaccttcgaatattcgatgtgacatgaactttagtccggactaaagatcaaacactcccttagtcattaaggattcgattttttcaggtttggttttctaaaaaacttagtagg

SEQ ID NO: 10617 - DNA, 447 bp, Setaria italica
  Peptide Sequence Number=SeqID_76591
cccttgatgccttgaggatcaacttcgaatcccaagttcttgtagaaatctacaactgcagccaacaagagcaaaagaccaggacaaataaaccgttactctagttgtattattcagatttcagattttccatggcccttgcattattcagatttgagaggataaacatatttacagatttagcagcacctaaacaaatgattcaaagtagagaaaaagccaaaggcacataggaaataggacaatataattcttgccagcaattcttcttagacagcctgcaaatttgttttactttacaaaagatgatgtagaagattttgaaatttgcacctttattatctgcaaacaatgtaatgttgttgatgtctctctggagcaaagtacggattactttctccataagtgctttacagaccttgaccctgaaatagtcgaagtcagggc

SEQ ID NO: 10618 - DNA, 346 bp, Setaria italica
  Peptide Sequence Number=SeqID_76592
cgaccggcgggccctctgatgggaacttgtgcttggtgtgtagtactaagcattttactccctagtccataacataggacaaaattaaataaaaggcgaagtctccaacctcggacagcaacgcagccgtggtacatgcgttttagataaccacaaggaccagcaaacatgtggcctgacagggacccgccaccgctcctccgtcgacctcatctcacccgatccgagatctaacggtggttgctcctggtctcgtcgctgtagagccagtcgtagacggtgggggagttgggcgccaacctcttcgaccgcccgcagcccaactcccccagtcgtagacggtggg

SEQ ID NO: 10619 - DNA, 221 bp, Setaria italica
  Peptide Sequence Number=SeqID_76593
gtatgatcgaatcgatcaatcagtcagaagaccaggcgtctgacaagttttgatccagctaaccaacatagctaattaagataggtacaagattgaggaagaaaaaatatatactcatgtaatgtagatacagtctgtacatatgctgataatagtatgcaggatggaatctacataggcactagtatagtgtacgactccaagagtggactatctatttt

SEQ ID NO: 10620 - DNA, 413 bp, Setaria italica
  Peptide Sequence Number=SeqID_76594
acaatcatggtttttaaagcgttaaggcgaggcgaggcgagccaccaccgccttatcacctaggcgacaccttaggcaaggcgagccaccaccgccttgtcgcctaggcaatgccttaaaaacaatggttacaataagaacttaaaagctgctcaatcaaatttgtggcttaggccccgtttggttcctccccctaaactttagcccctgtcacatcgaatatttagatactaattaggagtattaatcatagactatttacaaaacccattgcacagatggaggctaaacggcgagacgaatctattaagcctaattagtccatgatttgacaatatggtgctacagtaaccatttgctaatgatggattaattaggcttaatagatccgtctcgctatttagcctccatct

SEQ ID NO: 10621 - DNA, 261 bp, Setaria italica
  Peptide Sequence Number=SeqID_76595
gtcccactagatatctatatagctctcagaagtcagaatgccaattagtaaggagtaaattcctacctgttcaacttttctttctcttattttgtccagcatatcatgggaactaaccttcttaacattttccgttaagatgggacattttatttacatcataagatgcatgttgaagtatatgtctatatgatatctctaaacctaatggaattgtataaatgaagtgttagcaattgcagacaatttactttacccgga

SEQ ID NO: 10622 - DNA, 627 bp, Setaria italica
  Peptide Sequence Number=SeqID_76596
cagtgtcattgtaaatgagctgtgctaaggtgtctgccaccccccacttccgactatcgaaaggaccatgagatccttactgctggctccagcaagcaattgaccaacaagatcctccgtctcttttagctcttgattcgctggcaatgtccacagactcagtggggatgcaagcatccgtctgcctccatagcatgggcatttgcggctgcggtttgaatttgaacctgaatgcattcatctctgcgatgaggacatcaatttcttgcaagatcatgcagagcctttttgccatcttataacggaacacaacgcggttgtgagaagggaagagctttattacatccatgccgagcgccttgtagtggccctccgccttggctttgcggcgaagcgcctcgtacttgaactcgtcgaggacatcattcgccttgtaggccaccgtccggacctcctccagccaagctttcgccccttctctgtgtttcgccgcctgctcctcggcgtcggcgatgacgtccaggacggccggcagcttgcgcttcaggagcttgtgctgctcctccatgccctccatcaccttgtactggtccagtaggtagctggaggccttctccttcaccatgg

SEQ ID NO: 10623 - DNA, 243 bp, Setaria italica
  Peptide Sequence Number=SeqID_76597
ctggggaagcaccagggcaacggccttggcagcgccggtgctcgtcggcacgatgttcagggccgccgcacgggccctcctcaggtcgcggtgggacgcgtccagcagccgctggtcgccggtgtatgagtgtgtcgtcgtcatggttcccttcacaatcccgaactcttcgtccaagaccttgacgaatggggcgtggccgacattatcagcaatgcttcctgcacgaccaactgcctcgcc

SEQ ID NO: 10624 - DNA, 548 bp, Setaria italica
  Peptide Sequence Number=SeqID_76598
cctccctccagctgcatcggcttagtggcggcggcgtcacacggggccaagaggaggcggggcggccgctgggccttggcgatgtggcctcttcgcgccggctccttccggtgtcccctagatcctcttgttgtcggcggcgctcatggcggaagggcacggccgcgctgtcggtgatgcaccaagaggatgcgactgtggcggtgtggcccgcctcagtgcatcagcatcctcgtccccatctcatctacgatgctactactaccgcaggaggcagtcatccagttggcaacaacaacctctcctcgattaagggactgttcatatggaagaggattcatttgcaatgtttggcatgaatgtctcggtgagatatattttagtaatgcagcaagctggtagagatgtgcaggctgcaaactggtatttgattcatttacttcttgcagttaggtattgactaggctgcatttgtcctgtcaaggatgtcatggacatgctggaagagtatgagtggctagcttaaatctagagcacaacatcattgg

SEQ ID NO: 10625 - DNA, 459 bp, Setaria italica
  Peptide Sequence Number=SeqID_76599
cactgtaaaaaagaagattacccatcatatcaaacttgcggtacatgcttggagtactaaatgtagacgaaattaaaaactaattgcacaattttgttgtactttgcgagacaaatcttttgagcctaattagtcaatgtttggacaataattcacaaataggacctcgtttagttgctaaaatttggagtgctaaaattactgtgccagcactgtagcacactgtaacatttcgtttgtatttgtgaattattgtccaaacattgactaattaggctcaaaagatttgtctcgcaaagtacaacaaaattgtgcaattagtttttaattcgtctacatttagtactccaagcatgtaccgcaagtttgatatgatgggtaatcttcttttttacagtgtcaaagttggggtttgaggttgaactgaacaagggctaggagacaataacgtactagcgt

SEQ ID NO: 10626 - DNA, 441 bp, Setaria italica
  Peptide Sequence Number=SeqID_76600
ttaagccaaaggctggccgggcggcgaatcatcgtcctctcgaatcccaaaggctttaggtgctagcagttcctcccctcacgcccgcgccgccccgatcggagaggaggaaacatggacgcgaccatctcgaatccgtcgatcaagaggtacgccggcggaacccgccctcctgccccactccagtttctgccaccaggcgccgagcgagttccccccgcccgctgattccgtgagcccgtcggcgctgccgcgccgggtgcgttcagaatcgcgctggtcaccgggggaaacaagggggtcggtctcgagacgtgccggcagctggcgaccaaggggctcaaggtcgtcctgacggcgaggaacgaggcggagggggttggaagcgctcgaggccatccggcgctccagcggcgtcgccgaggttttcttccaccagct

SEQ ID NO: 10627 - DNA, 324 bp, Setaria italica
  Peptide Sequence Number=SeqID_76601
gcacatggaggctaagatcgtcgaccccaccaccggcgaggcgctcgggccggggcagcgcggggagctttgggtccgtggaccagtcattatgaaaggcaagtagactaaaccttagggggtgtttgatacccgctaaactttagcacctgtcaccatatcggaccatatgagatgtttgatactaattagaagtattaaacatagtctaattacaaaactaattgcacagatggagtctaatttgcgagacgaatctaattcacgcgacgaatctattaagcctaattagtctatgatcggatggattaacttttgcacgcg

SEQ ID NO: 10628 - DNA, 269 bp, Setaria italica
  Peptide Sequence Number=SeqID_76602
ccccctctctatgcttcgccgcctgctcctctgcgtcggtgatgacgtcgaggatggctggcagcttgcgcttgagaacctcgtgctgctcctccatgccctccatcacctggtactggtccaggaggtagctggaggccttctccttcaccatggacagcagtggcccgaccaccatggtggccagtacctcagccatggctacgccgggagctccaaaacagactcacaggtgacaggacacagggaaacacagtgcagtgttgctg

SEQ ID NO: 10629 - DNA, 157 bp, Setaria italica
  Peptide Sequence Number=SeqID_76603
cacaattagcactcttacattcttattcaatgattctgttgtgtctggtctgtgagtgaattgaatgaatcattgaataagaatgtaagagtgctaattgtgtgcaatggttacttttgtgttgatcttgttaactgataataaaaaaaaaaaaaaa

SEQ ID NO: 10630 - DNA, 454 bp, Setaria italica
  Peptide Sequence Number=SeqID_76604
catcggcatttacattgtgtctgttctacacaagacctagggtatgttcggctcttagactaaactttagtcccagtcacatcaaacatttgatactaattaggaggattaaatatagactaattacaaaactaatagcacagatggaggctaattcgcgagatgaatctattaaacctaattagtccatgatttaacagtgtggtgctgcactaaccatttgctaatgatggattaattaggcttaatagattcgtctcgcgaattagtatagtggttctgcagttagttttataattagctcatatttagtcctcctaattaacgtccgaacatccgatatgactctcctaaagtttagtcctcctaatgctggagagcactgaggcaagatcctactttgatttcatctatcgacataaaggatgcgagtgcaaccaacgtccaaatactg

SEQ ID NO: 10631 - DNA, 351 bp, Setaria italica
  Peptide Sequence Number=SeqID_76605
gtcctcctaattagcatccgaacatccgatgtgacactgttaaagtttagcacctcatatccaaacagcccctatatacatgcacatctgttacaagcaccatataccaacgatcaacacatatataagtttcaccgaaaatccaagaccaaaagggacagagaaaaaggaaataaatatcggtccagcacatacggctgaatataatgcacctaccaatcatttcaatgcctttgacacccatgatcgatcgatctcacatgctcatcagctcatgattgaattcagctttcagccggaggtggtggaggagcagtcgcagtcggcctccacctcgcgcctgtggaagct

SEQ ID NO: 10632 - DNA, 421 bp, Setaria italica
  Peptide Sequence Number=SeqID_76606
cttttcgtacagagccttgtcttgttccgcgagcaaccggagctcccgaaggatctccttgtcttctggggagtatttcttcgctttctcgaaatcctccctggcggattctgtctggccaagttcaggccttgtttagttggggaatttgggaggtgccaaattactgttacagcactgtagcacactgtagcatttcgtttgtatttgtgaattattgtccaaatattgactaattaggctcaaaagattcgtctcgcaaagtacaacaaaactgtgcaattagtttttaatttcatctacatttagtattccatgcatataccgtaagtttgatgtaacgaagaatcttctttttgcatagtgtcaaagttggaagtttgaaggaactgccttacttgatttgcttgcctgaactgac

SEQ ID NO: 10633 - DNA, 257 bp, Setaria italica
  Peptide Sequence Number=SeqID_76607
tcaaggttgaaacatttttcagcaatgaacatgctcaagaagatggcattgagggttattgctgaaagaataatgtctgaggaagagattggaggcctcaaggaactgtttaaaatgttcgatacagacaatagtggaactattacatttgataagctcaaagctggcttgaaaaggcctaggctctgcattgttgtcagagaatgaaatccagacgttaatggatgcggctgatatcgacaggaatggaaccatcg

SEQ ID NO: 10634 - DNA, 373 bp, Setaria italica
  Peptide Sequence Number=SeqID_76608
ctttcttaaactggttgactctgttttgtatgatctttagatgattcccgttatgtatgtatgtatgtgtatgtgtatgtgtatgtgtgtgcgtgtgtgtatgtatgcatgtatatacgtacgtacatttgtgtgtgtgtatgtatgtatgcatgcatgtatgtacgtggtcttattctgatttaattgcaggtcccttattgttaatattggtgatctgttggaaaggtggactaattgtgtattcagatctacattgcatcgtgttgtccctgttggcaaagagcgatattctgttgctttcttcattgatccaagcccaaatttagtgatccaatgcatggagagttgttgcaatgaggcatatccaacc

SEQ ID NO: 10635 - DNA, 201 bp, Setaria italica
  Peptide Sequence Number=SeqID_76609
agcgagatccaggcgagctaaagggcctgttcgcttcagcttattcagccggcttatcagccaccgaacagtatttttctctcacaacaaatcagccgtttcaacttttcagccggcttataagctgaagcgaacatgcccaaaaacggcaaagagaagaagagagcagggcggccgcggcgcgtttcctccgtgaaccga

SEQ ID NO: 10636 - DNA, 294 bp, Setaria italica
  Peptide Sequence Number=SeqID_76610
tcaaggtaagaatgagtgagcagtctccaaaagggtctttgcctctgaatcagttagcttgctggtgaaaacaacatctcctcgaataagcacagtgtccttggtttctgcgaactctgtgtaatgggtgactgtgtagtaagggcttgcttgagtgcctcttgctttatagtcttcgagtcctgtgaagatcatgtatggcatcttgcatgaacatagtggtgtatccacttcccttccacaaaggaataacaaagtgacgacacgtagatgatctttgttccaagagatggt

SEQ ID NO: 10637 - DNA, 390 bp, Setaria italica
  Peptide Sequence Number=SeqID_76611
cttctggtgcgtgatcctctacttcaatgaccacttcgcgctcctcttcacgtacagcgaggtcgtgctcggcgccgtgcacaaactctccgtgctgcttgccttcaccgtcctcctcaacagcgttcaacccgtcctctcaggcgtggctgtcggttcaggatggcaagcgttggtcgcctacgtgaacatcggaagctactacttggtcggagtccccctcggtgtcatactcggttggcctttgaatttcggagttgggggaatctggtccggattgattggtggaaccgccgttcagacgctggtactggcctatctcactaccagatgcgattgggatgaagaggcaaagaaagccagtacacgaatgagagtatggcccagcta

SEQ ID NO: 10638 - DNA, 447 bp, Setaria italica
  Peptide Sequence Number=SeqID_76612
ccatgatagtttttttttaatcttttgcaaagcctgaacctttatgtgcatgtttgtgaagtatttttctggcagaacggatggaagtctaacatttcaggttctcttgttgagacaagaagtaccatcttgttcatcccatgttcatctctgttttatccattttatttttgccccgaggccgccccccgtagcctccccacgtagccttctttacctgacagttgttgtccttgtgctctgcgagcaaatccaagattgggtttttgctaaaattagggtgcacaaaatctcagggctgaaggccttttgcttggccttgggaaagtaaaccgctgccagtttttaagttttccttggccgtgtttagttggggaatttgggaggtgccaaattactgttacagcactgtagcacactgtagcgtttcgtttgtattttgttgaa

SEQ ID NO: 10639 - DNA, 186 bp, Setaria italica
  Peptide Sequence Number=SeqID_76613
ttaatggacggaggaagattggcaacctctgacaagccatcgcaattaattatgtatagggattctaggcatggaaggaagggatggctgcttgatgatgacagcttcagtacagctgtagatgccctggcctcactcctggaccctggaattagtgatgacgtatccacctgctgaccgaatatg

SEQ ID NO: 10640 - DNA, 685 bp, Setaria italica
  misc_feature (170)..(170): n is a, c, g, or t
  Peptide Sequence Number=SeqID_76614
gtcatatataacaaatccagctccacccaagaacctacccagatttgctagctcctatacaggcatcacctagcaactttgggcctgtttggctccatggtgttaaagtttaacacccgtcacatcgaatgtttggatgctaattaggagtattaaatatagactaattntaaaactaattgcacagatggagtgtaattcgtgagacgaatctattaagcctaattagttcatgatttgacaatgtggtgctacagtaactatttgctaatgatggattaattaggcttaatagattcgtcacgtgaattagcacagggttctgcaattagttttataattagctcatgtttagtcctcctaattagcatctgaacatccgatgtgacactgctaaagtttagcacctcatatccaaacagcccctgaatttgctaggggcattgcatctacaatagcaaccccaaacaatgcagatgatgacaaaaacagcccaggaacagacagcaaaggaaccccgaacaaggcagtgaatgtttctgctaactaatcaatgcaaaataagtgatacccatcagtagaaaattcttgcatcatcaagtaaatttagatttactcattttataaacataaagaaaaaatgaaaagaaaaagttaatagctcatatagaaaaaaaatatcagt

SEQ ID NO: 10641 - DNA, 501 bp, Setaria italica
  Peptide Sequence Number=SeqID_76615
taaggctgtttgctctaagggtgttaaaagtttacacccatcaatattgaatatttggatgctaattaggagtatcaaatataggctaattcaaaactaattgcacagatggagtgtaattcgcgctaattagtccatgatttgacaatgtggtgttacagtaaccatgtgctaatgatggattaattaggcttaatagattcgtctcgtgaattagcacagggtttttgcaattagttttataattagctcatgtttagttctcctaattagcatccgaacatccgatgtgacactgttaaagtttagcacctcgtatcctaacaccccctaatttgcaagctgcatggtttgcgtgccatgtgtttcatgggggcctttctttgtcattttgcttaaacatttgtccatccaaatccaaatacagttggtcagtgcagtacctttatagctacagatctgcatcactggcaatgcatggctgcctgttctgctacttta

SEQ ID NO: 10642 - DNA, 782 bp, Setaria italica
  Peptide Sequence Number=SeqID_76616
tattaaatataggctaattacaaaactaattacacagatggagtctaattcgcgagacgaatctattaagcctaattagtccatgatttgacaatgtagtgctacaataaccatttgctaatgatggattaattaggcttaatagattcgtctcgcgaaatagcatatgggttctgcaattagttttataattagctcatgtttagtcctcctaattggcatccgaacatccaatgtgacactgctaaagtttagcacctagtatccaaacaccctttagttgattggaagcaatactccacttactagtcatttgatgacttggattaataaaatgggcgactctggaccaacccactatcattatggcactgcaaacctcaacacgataatcacaaagtgtgctatttgccttaacagcagcctattgtagtaaccagcattgctgaatattacatgatccaatacacgaccaaaagttcagagactcttagcaattactagtatacaaaaaaatgaacgcaactagtatcaaatttgaaaccattgaagatctggtcactcaaaagcatacaaatgtttgattaagcatacctatattatccccagtgaccaaatctagagccctttctgccataatcaagccacatttgcagaaactgaaaccacactagctacaaggacgtgaaacccgtacctctaccctgcgtaatccatacacccacactaatctaatgctgttgaccccaatccgacagagcagacaagcactctgcactccg

SEQ ID NO: 10643 - DNA, 477 bp, Setaria italica
  Peptide Sequence Number=SeqID_76617
ctttacctatgtggaaaatgtggctcatgccaatatttgtgctgagcaagccttgtgttcaaatgcagcttctgttgctgggaagccattttttgttaccaatgatgaacctatggaaacatgggagtttatgaattgcataatggaagctatgggctgtcagaggcccaggattaatcttcctgccaagatgttattgtctgcggccttgttctccaatatgattcgtcacaggcttccggcctgttcgcttcagcttattcagccggcttatcagccatcaaacagtattttcctctcacaataaatcagccgttttggcttttcagccggcttataagctgaagcgaacaggcccgaagttttcaaatgttttccactcctcttctgcatccaaatacaatatacttcttgtcatgcacaagaacttttaacacttcaaaagctagaagattgcttgggtactacccaattgta

SEQ ID NO: 10644 - DNA, 391 bp, Setaria italica
  Peptide Sequence Number=SeqID_76618
agctggtcacaactggtagaggcaaaatcaacatgagctttcactgctcatgcatccttgcttggactgtcctgatcagcggcctctgcgctgccatcactgccacaattgtcatctccaggctctttgccagtgaatagcttcttagcaacatttttgttaggggacgggcgagaccacataaggcagtgtatatggggcaggccacgcttttggaactctatagtgtacaaaactacacgagcaacagcgcacaccagacatactaaaaacaaagatatatagaagactaatttaggctgccagcctatattatgcctcacctgcacgtattgggccaaacgttctaccctccctgatatcatctatgaattcgtcgactttcatatgg

SEQ ID NO: 10645 - DNA, 474 bp, Setaria italica
  Peptide Sequence Number=SeqID_76619
ttgtaaatgtaatatggtgtcgggacaaaagaatcattttttaactactcgcaaatatgtgatttttgcgaacatgtactgcttaaaatttgtggcatgcttccaagtttcaatagttaatgatctttgtaattacaaagctataaatctttataattttctctataattttaatcaaataaaaatagtaggagtattttcttgcttccaatcccactaggcccagcagcagagtcatggcacatggcgcatctggttccccggatctgttcaaacaattcgtcaggtcgatctattcaaaggaagatgggaaacgacgtaaaacacatattgaattttttttaagacaaagatgaggaaggaaagatatctctggtggaattccgtgttgccttaccacatattgaattttcgatgcttttgccgaaggatgcattcaaactaaccggatctgtaaaagcaaaacgatgagaa

SEQ ID NO: 10646 - DNA, 363 bp, Setaria italica
  Peptide Sequence Number=SeqID_76620
tttttttaaaaatatcagtattatctgaaaaagtaaaatatcaattcaatagaatagtcacttaagggaaaattttgttttgaatatatgaaatggacataatagaagagaatggtcacagaaatggcataatatctctccaggatcagttataaatatcatagttgcagttggtatgcaaaatgcagaactctcttccaatcacagggagataactgccatgatgtagctggtacttcatgttttgacagctcactgatttctacaaatgaatggcatatttccatgtctttggtttcaataacttggcaccttctttaggttgaaatgtgaagatcacggagagaagcggctgaaatacac

SEQ ID NO: 10647 - DNA, 420 bp, Setaria italica
  misc_feature (353)..(353): n is a, c, g, or t
  Peptide Sequence Number=SeqID_76621
gggccaagtcagatcatgtgtgctctggtgatgtgtcagcctgacattagtaattggaagcaagtaatactaggctactatttgcccaaagtgaaaaacaccatcaagcaaattggccctaccatttttcatctgctgaccaaggagcgctgggccaaaaatattaacagacttaatctaaatatgccatcaggcagcagggatgttgtctccaaggatacacaatcacttgggcacttataacgaattctatctatattcaagcagaatatcccaatacagacaacagaaataaacgaaggtggcaacgaggttcattccgtcagagaacagagtttgcagagttttaaccngcgagccccagccgatcacaccgatctgtttgatccccttgaacgccgttggcagcagcgggaacag

SEQ ID NO: 10648 - DNA, 571 bp, Setaria italica
  Peptide Sequence Number=SeqID_76622
gatggatttgagatgtttaccatatattgatggaattagattgtttaccatatcgatggatttgggacatactttatttgccaagtaaataaagtatgtcccaaatccatcgatatggtacatactttatttacttggcaaattgtttattgagcaattgtagagctttagaggctttccaaattcctgtacgatggattctattgatcgtgttgagaaaagtgaacaaggagctattcttggcggctgtgatgatggaactgatgatgcttttacccaagctgaagattttggcaagtgaacaatccggttggttatattgcctggtggtgtctattgtgccccaaagtccccaggtgtttgttcacttttctcaacacgatcaatagaatccatcgtacaggaatttggaaagcctctaaagctctacaattgctcaataaacaatttgccaagtaaataaagtatgtaccatatcgatggatttgggacatactttatttacttggcaaattgtttattgagcaatttgccaagtaaataaagtatgtaccatatcgatggatttggg

SEQ ID NO: 10649 - DNA, 727 bp, Setaria italica
  Peptide Sequence Number=SeqID_76623
tacattcgcagttgccgcctaagagctttcgccctgccaggcttcagagctagtgctaatgtagagaaacaagccttgattctatcatcatttgcaaactacattagcaaagaaaaactaacaaacacataacagggcactacttgaccttgacaatgaaaaaaggtaacaaacacataacagggcactacttgaccttgacaatgaaaaaaggtaacaatggaataagtatggctcagacatccaaggaaggatttaacagcacaagctctcaagcctggcagggcgaaagctcttaggcggctactgcgaatgttgagaaacaagccttagctttatcatcatcaccatatgtagaaaattgatacaaggaaaataaggtgaaaacaaaacgtgtaccgtattaaaaaaaaaattaatgtaaatcacagaaaccggctctgtggacagatggagaagcagtccccaggttcctatcaacatgtgaaacattgaaacaactctgtattggcctaatcatagcatctccggtcaatgctcgtagctaacggagacgtggcatcaggcccgaactacttcaacaaagactacagaccaacaaaataccacacctacaaaatataacatactggcagttacgtagaatccctcagagacccgatttaaatcacacaccacagctgaatcaaacagctgcagatgggagctccatccagaccaaaccaca

SEQ ID NO: 10650 - DNA, 367 bp, Setaria italica
  Peptide Sequence Number=SeqID_76624
aaggggttacggcgaccaacgaatacaagggccaatcaacggcgccctcgagtgcaacgggaggaaccccgaccagatgaacgcccgggtgcgctactacaagcagtactgccagcagctcggcgtcgaccccgggagcaacctcacttgctaggcgccggaggtttcgtgcaatggctcgtcaagaataaagcgctgtgcgtcgcgcactcgtaaagtagtagtgataataaaacgcaggggtggacctgtgtattcgaactgaataaggaagcatttgtaatatgtggattgcctcaaaacatgttaatgtccgaagttattattaacaagcaaatgcatgcctcaaacaaaaaaaaaaaaaaaa

SEQ ID NO: 10651 - DNA, 588 bp, Setaria italica
  Peptide Sequence Number=SeqID_76625
cacgctggcgaacatagagtagcgcgaggaacaacacacacacccagagcgccaatacagaacgagccccgagcaaggggaacccatcacacacaccgtcaggcacggctcagcagccgaatagacttccgggacgattgcagctctttcattagcttgctttagtagctgagaacattatatagaatccattcctgacaaattcgaaatcaaccaggccacatgctctgcagagatcttcaagctccgcttcggataagaagatattcatgccagtgattcggcttatgtacgggcgtccgatcctcaatatcggaatggctagtggaatatcttctacgaaagtagaagcaacaagaactccccctgagcgaagtactctactaatttctgcaacctgcatgcacagcatcaattgagccattcacaaaagggagcctggatatgtcagccctcaccaatgctaatctctcatctgaaatattttcctgcttgacatattcattgcactgcttcaacatattctccgagaaatactaagttagacccaactaaaactaaaagttagtaaattaattaagttaccta

SEQ ID NO: 10652 - DNA, 546 bp, Setaria italica
  Peptide Sequence Number=SeqID_76626
tcagccaaactttagtcaacctttagtcatgtcctgaaactaggggaacggaagtagggcgacagtgccatatactaccaagaagaaacaatgagattatcttgacactcggcctgttcgcttcagcttattcagccggtttatcagccatcaaacagtgttttcctctcacaacaaatcagccgtttcagcttttcagccggcttataagctgaagcgaacagccccgctcttatccagaacagccattaccagtgcggtaagccgagggcacatatggtaacaaaaaaaacatgaggccgccgtacggccatgtacgagaagaagctgctgcggcggcagctggtgtttctcatttaccgggcgagggagaggcgcgcggcggaggagccgccgccggtggcgctgccggcgatggaatcgagctgcgcctcgacgcgcttgaggactccatggcctcgtcgatcggccgggtcaggctcctcccgggtacttccaacagcatgttgcagtaggcctccatgaactggtcgagctccgggtcgc

SEQ ID NO: 10653 - DNA, 477 bp, Setaria italica
  Peptide Sequence Number=SeqID_76627
tagttagggtaaacttaaggggggtacccttagggggtaccccccaacgttgcagtgggtgatccagaacgaattcctgatgagctccgagcgaccaccggttcggcctttacaaaaagttggaaacggatacggcggatcggatagagatttcacatttggggatcgctcttgatgggccacctcatttcggccttgtttagttgtctaactttgggtaactaaaattcctgtagcaacactgtaacgtttcgtttgtatttatgaattattgtccaaatattgactaattagactcaaaagattcgtctcgcaaagtacaacaaaactgtgcaattagtttttgatttcgtctacattcagtactccatgcatgtaccgcaagtttgatgtaatggggaatcttctttttgcatagtgccaaagttgggattttgaagtgaactaaacatagccttcgtttcgatcagccgtgcg

SEQ ID NO: 10654 - DNA, 547 bp, Setaria italica
  Peptide Sequence Number=SeqID_76628
cttatttgtttttcttttagttacggttctaaaatttgcacgtagctattcaaaattctctctatattcaagtagaatcaatggtattcctcctgaaaaatgttgagttacatatccacgagtgatatatatgttttcattcaaattgcagaccctacttatgtggtgactccagcgatgcgctcacgctcagggcgggataacctcaagaaattatttgcaggtatgtctggctaaaatcatttgtaactgtgctggtatatgcagttgcagagtagttcattattagattgcactagcgatatatgaatgaacaagcctccgaccggagatcaataatcagcagagtagcaaatgaaagtagtataactgattcagctttgtttcgatggattatttgcagcttggtatgagaggaggcaaatgaggaagatatactccccgcttctagaaggaatcctggctttctaccttgggttcgagtggatccagaccgacaacatcctggctcctatgatcacccacggcatatactaccgaccgttaa

SEQ ID NO: 10655 - DNA, 253 bp, Setaria italica
  Peptide Sequence Number=SeqID_76629
tggatagccctgttgtatcaggatatttgatgctaattaagaatattaaatataaactaattgtatgatggaggctaaatcgcgagacgaatctattaagcctaattagtccatgatttgataatgtggtgctaccgtaaccatttgctaatgatggattaattagacttaatagatttgtctcgcgaattagcctaggaattctgcaattagttttataattcattcatatttagtctatctaattagtatt

SEQ ID NO: 10656 - DNA, 403 bp, Setaria italica
  Peptide Sequence Number=SeqID_76630
gggttctgcagttagttttataattagctcatgtttagtccttctaattagcgtccgaacatccaatgtgaccctcctaaagtttagtaactcgtatccaaacaccccctctttgttagccaagcctagggaacgacattggagctcagccatgatcaagataactcccggtatagccatgagctcagccttcaactacgtacatttggcggctggcgacaagtttctcgaggtagtgtacggcacctgccaaagaggacctccgtaccacaagtccaccatatcagagtcgtcatcacataattacatttgtgttcctcttgcaaatttgtagtaacatggattatgttgcaccactatttcagttcagtgtgcaaatactgcgttccattattgagcgaat

SEQ ID NO: 10657 - DNA, 314 bp, Setaria italica
  Peptide Sequence Number=SeqID_76631
tttaatttagacaaagaaattacttcaaacaaacttggttcactccacatggtacaagtaaaaagaacacacatttatgtctataaactctttattgattcatagtggatttgacaccgacattgcctataaactttatgagaagtaagagcataacgcagaggattacacaccataagcagagcatctcaaacatactagggggtgtttggccaggaggggctaaattttagcccctgtcacatcggatgtttggacactaattaggagtattaaacatagtctaattacaaaactaattgcacaacccctag

SEQ ID NO: 10658 - DNA, 539 bp, Setaria italica
  Peptide Sequence Number=SeqID_76632
ttattagctccatactcatcaggtgcagggagcttctcttgcttcatttgcttccatcctgaagatgtttgacaaaatgccacagttaactagctctgcctttatagcaagaaggatgatcatccatttcctgggtttttttaccttggtgcctccctccaaccgtgccgcgctctccgtctgcgtctccttgacagcggcaggccatgagacaaggaggaagcggtggccactgcagctcgacgatggggcctctccgcgctggccccttcctcatctctctcagcaccatcatgttcttactgttgagcagaaatggggaattgagtactgctagaaagttgagctgcctactagggtgcaataactaaagcatgaaaagcaaagcctaggcaggagacgaggattaagagcaatcaagtatgttttcttttcttcttaaggggatattcagtaatcaattgtttaaaaaacttacatctatttttcttacctataattggtcatggagtgttgctatttgttttggtccgaggctg

SEQ ID NO: 10659 - DNA, 527 bp, Setaria italica
  Peptide Sequence Number=SeqID_76633
gttcggttcttttcggttctttgggtgacggggtgtaggttggcggggtgggcttgggagtcggggtgtaggtcggcggcttggtcaccggtggcttgggtgacgggtgtacgtcggaggagtgggttttggcgtgggagtgtacgtcggtggggtaggcttcggcgacggagtgtacgtcggcggcgtgggcttcggcgtcggcgtgtatgtgggtggagtaggcttcggcgtcggtggcgtcggcttcggcgacggtgtgtacgtcggagaagccgcccaaggggaacaagcctcccacctacaccccgtcgccgaagccgacgccgccgacgcccaagccgactcctccgacgtacacaccgtcgccgaagccgacgccaccgacgccgaagcctactccacccacatacacgccgacgccgaagcccacgccgccgacgtacaccccgtcacccaagccaccggcgaccaagccgccgacctacatcccgactcccaagcccaccccgccaacctacaacccc

SEQ ID NO: 10660 - DNA, 547 bp, Setaria italica
  Peptide Sequence Number=SeqID_76634
aggggtgtattagtttaccttcgtggacatgaagggaggggtattggtctgggtcacaagctccgtgcttacaacttgcaagacgacgggcgtgacaccgtagaagctaatgaagaactaggacttcctgttgattcacgggaatatgggattggtgcacaggtaacactgaaattatcactcagtttattgttgcaaggtcaagtataggctagagaggaagaccggtatatgtttatgctgagaagaaattatcactgaaatgcatggagaccaaagattttccctctttttgtaaaactctgcatagtggatatattaggaatgccgtggcgtatggatgaaaccatttgacatagtgctccaacttcaaatgacttcaaaaaacttccatgcttgttgcagtatcattttttaggcaggtttactgacacttcactgcttccctgtagatattacgggatctaggagttcgttccatgaagctgatgaccaataaccctgcaaagtatagcggcctcaagggttacggtttaagcatcgcggg

SEQ ID NO: 10661 - DNA, 417 bp, Setaria italica
  misc_feature (341)..(341): n is a, c, g, or t
  Peptide Sequence Number=SeqID_76635
tcatgcttaatgccgtgacacccacaaaatagcctccaaagaaggtagggatgatttccctttctaattaaaatggcttcttccgtttcattcactgtgacatcatggctgactggctgtattgcaaaaccacacatttttttgtttccaaggatgattggaagctctttgttgtggagagtatgcagttatccttctcaaagctgatggagagtattgttcaaacataatgattgctcatctgccttgtcctcttcccttccctcacttcagattcatggtcatgccatccttttcgagcattagggttgaaggcttgaagctgaatgattgcaaacggngtagaagtgtcaggttgtaaactaacttagcaagtgtcaggcttgaagctggatggaaagcatggacaaccaaaat

SEQ ID NO: 10662 - DNA, 253 bp, Setaria italica
  Peptide Sequence Number=SeqID_76636
caaaacagcctggataatccaaattatcgattccatcaaagtacttatccctatgctttttggttcctagatttatgatagaacctccccagaggctgcatcaacaagcagaccaagttagtgcaatataaagagatggaagtagctagtaaatagaatcagtaaataacttgaacagattctgctaatgtttttgtgaattcaagcatgttaagatgtgcaattgataataaaaggctgcagagtttatagc

SEQ ID NO: 10663 - DNA, 396 bp, Setaria italica
  Peptide Sequence Number=SeqID_76637
tcagcgcctactacaactgaaataccgctactctgctgtcaagctcggagcatagggtggatggaagagagttgtgctagccagccgaccaagatgagctgatgatgagaggcccctgatcctcctcttatgtttgctgccgtccatctatcctagctagagaggagaataatgcagatctgtgctgcgccctctgtttcctgttgtcccgtttaattcgtgttcgtcgatcgtttagtgtcttagcagctgtattgtgtgtgggtaatggtattgctactattggtgcgaggaggcttactgtaaaaccacaatacagctgctaagacactaaacgatcgacgaacacgaattaaacgggacaacaggaaacagagggcgcagcacagatctgca

SEQ ID NO: 10664 - DNA, 1000 bp, Setaria italica
  Peptide Sequence Number=SeqID_76638
atagcacctagtgatcattacaaggagtgaaaagagccagtaggtcttgtacatgtcgctgcactggaatactggatagacttccctgaggaatgataagcatttgaccatggaccacagagttctcactatttcaaggctagaatgccacacacaaaaaaatctcatcccttacgaataaaaaacaaataaaaagattggaaggtccattcctcatcacttgcattcagaaatacaatcaacatgcacactacgatttttccataagtccaatcaaaagaagaccgtgcgtagcgttttcagccacatgaccaaagggcatgctgcttgcaatcatttcaccaatttctatgacttttgcatcttcacctctaaatctttagcagctgtgccatttccgactccagattcttggcacggattgcaatcagctgaattctgagcagatacgcatcttcactcttcacaaataaaactcatcaatctgtttaaaaatgaacatggtaatacttcaaagaacttgacctgaagttctggataggaggtgcagcagaatatcctccttgtgtccccagactgaatccaaggagggacactacggattcagttgagcatttcagagaatgaaattcaggaacatgaagtcccaattaagtacacatacatctagtttctgctctcgttgctggcctccataatggagtgactagagagctccaagttgagaactcctggctgaacttgcatcctgatttcgaaggagaaatattggattccataggttgctggatccatctcaggcaaagaccaaacaaatgaacaggagctgaagtacagtcctggtaacaatgggaaagcacaaggaaccagtcagattctaccttagagcctggagaagtttgcaagaagttgtcctggcgctcaacacctggacatagccacaggggcgctctgtaggcggtgttcgggtcggagctggacaggtatggggcttcgaggc

SEQ ID NO: 10665 - DNA, 483 bp, Setaria italica
  Peptide Sequence Number=SeqID_76639
caacaagggcgattcagtcctgttcatagtatgtgaataaattgaagcttcaaagtgcagccttttcttaagcaagaaatggagctttccttggtagggctccaaagtgctgagaaaacatcacttgtgaatgccattgatgtggagagcagtgaaatagatgatctgccattgttgcctccaagcttgctatcccacagcttcacagaaaggtgtttgctgctgctgagtggggcttcaagttattgcagaggtcattgctggagcatgttgcagcaggggatcacgctaaccttttacaattcaagattccaattatgatcctcatcttttctgaataattgttattgtaacctgcagaagttgctttctctggatgacgatcaggaagattcagatgatcttgtttgctgatctactcaactgagaatgatcagaagtagcaaccagatcagagaagacttgagttgctatgtttccagg

SEQ ID NO: 10666 - DNA, 333 bp, Setaria italica
  Peptide Sequence Number=SeqID_76640
tattgcttcaagagaagaagccctcacagatcgagaaacgactcagaaatgctcgagctgaacttgatcagtccaattcaccaggtctcttcgatcatcttttggtaaatgatgaccttgaaacttgctatgagaatttgaagaagttgctttctttggatgatgatcaggaagatacagatctttttatcgaggatggcaaacaaaccacaagttactctattgtgtccaaaaatgactcagaagtcatgcttcaatctgaaattaatgattctgaaaatggagctacaagcttgctggcgcttgatttgctgctctctcgagcggtgcacc

SEQ ID NO: 10667 - DNA, 974 bp, Setaria italica
  Peptide Sequence Number=SeqID_76641
tgttagcaatgtgtcaaattgtgtccatgtttagctagcatttattgtctcatccaaagagaagtactaatatacacagttgtaaccctcgtcgtactttggaaaaggaaacattatatcgcactggtacagtagtactacctcattggaaaagaaaacgatgacataaggccggttattgagaagccaagcttgcattggcatcagtcctcccaatatctcttggtcttgagtgagtgtctggtgacatctaggtgggcgagagcagcctctattgtctcctttagttgcgcaccactcatctcttcaatctgcatgtcaacacttgtatatttgaggaaaacacacaaaacatggcaactaatattggcaccagtagtaatagtatctacatagcagaacacttcaatacatgtgctgtggtttggtatttccttaccttgtaatcagagagaaattgcaatcattttcatcaccagctaggagattaccgcgccattatctaaactaatctccagccagctagtagagagcctgtcctatctataagacccccatacagttcgtgaaagacaactcttctttcctcccatgcttctgtagttatgttagtccaaagtccaaactgttgttcataaaatgtcactttagtttgatctctagttcagatttttcgggcaatgcaattttttatatgaacatgcacacatatgaattacgtgggaatcaatggatgaaaaaactacttccgggcaaattagagccgtacaatttttctttagtcaaagactgaggaaagtgaatagatgcatgctacttccttgaatgagatgaacattttatttccggctagggatgatgctggatgcatgcgccagtgttcttgaactaagcgcgaggaatattccaaaaatatccgcgtcacttgttagttggaggaagtgaagtgcgatttgtcgcttgtgtttaagact

SEQ ID NO: 10668 - DNA, 407 bp, Setaria italica
  Peptide Sequence Number=SeqID_76642
aaaaaatctagatagactaatgcaaggagtaccgggtgcttggtacccctgctaaagtttagcacctgtcacatcggatgtttagatactaattagaagtattaagcatagactaattacaaaactaattgcacagatggagtctaattcgcgagacgaatctattaagcctaattagtccataatttgataatattgtgctacagtaaccatttgctaacgatggattaattagacttaataaattcatctcgcgaattagcacaggggttctgcaattaattttataattagatcatatttaattctcctaattagcatccgaacatccaatgtgatactgttaaaatttaccacctagtatcccaacgtcaccttaatttcacatgaggtggttctccagcagc

SEQ ID NO: 10669 - DNA, 513 bp, Setaria italica
  Peptide Sequence Number=SeqID_76643
catcagccaagtgtaaaggggtgcaaagaagcagtagcgagagggttccgttctcgtgttcttggagtgatccatcgagttgttcggcctgtttgcttcagattattcagccggcttatcagccaccaaacagtgttttcctctcacaacaaatcagccgcttcagcttttcagccggcttataagctaaagcgaacaggccggttgtttcttttggagacggagggagactgtgagagagcgtcaatggcgaccgccgggaaagtgatcaagtgcaaagccgcggtggcatgggaggccggcaagccgctgtcgatcgaggaggtggaggtggcgccgccgcaggccatggaggtgcgcgtcaagatcctctacaccgcgctctgccacaccgacgtctacttctgggaggccaaggggcaaactccggtgttcccgaggatcttaggacacgaagctggaggcattgtggagagcgttggagagggtgtgaccgagcttgcaccaggcgac

SEQ ID NO: 10670 - DNA, 531 bp, Setaria italica
  Peptide Sequence Number=SeqID_76644
tgatgtcatgtgttgttgatgctatgttgatgtctttaattgcagttctaggtgctgatttattagctgcatactcatcaggtgcagggagcttctcttgcttccatcctaaagatgtttgacaaaatgccacagttaactagctctgcctctacaacaagtggcaggccatgggacaaggaggaagtggtggccactgcagctcaacgatgtggaaaacaggagtacttatctttaattcccttgcatttttgctaacaggaaagcgtggacagccaaaatatttagagaaagctttaagcctatatgctggtgatggactgctagaagaatgaaaaattacagaaaggtttattggtgattgctggtgccaatagggaatgaatagatcaataagagaactcatatttaacatagttgcacttgtagttagagatgatatttttattgtcattgtgttattaatttggttgagacatatatttgaagttaatgaaggtttgagttcctataatgtgaatgaaaaaaaaa

SEQ ID NO: 10671 - DNA, 1279 bp, Setaria italica
  Peptide Sequence Number=SeqID_76645
agacaagctcggcaaatggacggctccggagagggtgtgggtgccgctagtcgcgtggccggcgaccgcgcagctggtgccggagccgctcggggtcgtcctcatcttctcctgctggaacgtcccattgggcctgtcgctggagccgctgatcggggccatcgcggccgggaacgccgtggcgctgaagccgtcggagctctcgccgtgcaaccgaccaaagttcctacgccgataacatcggcaggtacgtggacccctcggcggtgaaggtcgtccagggtggcccccgaggtcgggagcagctcatggagcaccgctgggacaaggtcctcttcaccgggagcccgcgcatcgcgcgctccgtgatggcggcggcatcgaggcacctgacgcccgtggcgctggagctgggtggcaagtgcccctgcatcttcgacgcgatgcccggcgggcgggacctgcaggtctcggtgaaccgcatcatcggcggcaagtggtcgtcctgcgccggccaggcctgcatcgccatcgactacgtgctcgtcgaggagcgcttcgcgcccgtcctggtgcggcagaattctgatgaaccaacccaacccaccaacatctgcgtcgtattacgtccgggtggatcgcatggagcctgacactcgtatctggttttgcttcctctgaagatcaagatgctcaagtcgacgctcaagaggtttttccaggaggcggaccacatggcgcggatcgtcaacgagcgcaacttcgagaggctgagcagccttctcaaggacagggccgtggcgccgtccatcctgcacggcggctccatggacgccaagaacttgtgagttctttcttgtcaacactgaatgatttcccaactgcacagggtgacctgatctcctgacgaaactgtccctgtaggtacattgagcccacgatactgctgaacccaccgctggactccgcaatcatgaccgaggagatattcggccccctgctccccatcatcacggtacgttcatgaacaacgctgtcgcagcagctgccatcttttgctccggtgaactgaaacgctgcttccccggttgtgttgactacccgcaggtgaagaagatcgaggacagcatcgcgttcgtgaaggcaaggccgaagccgctcgccatctacgccttcacccgggacgcggcgctgcggcgccggatcgtggacgagacgtcgtccgggaccgtcaccttcaacgacgccgtggtgcagtacgcgatcggacgggttgccc

SEQ ID NO: 10672 - DNA, 492 bp, Setaria italica
  Peptide Sequence Number=SeqID_76646
cttagtaatgcattggtactatttgcatgttggttctatatggagttgaatctatcattttcaagcatgttgtatgatatagcatccaagctagacaaagtctgagaatgataaaccgttaaagaaatatttagtcagggcccaagagaagcaagtgctactgccttgctctacccctggccgtgattggtcaagtgcgccaaggggatttgcacaggaaagcgtcgacagccaaaatatttagagaaagctttatgcctatatgctggtgatggactactagaagaatgaatgatggactactagaagaatgaagaattacagaaaggtttattggtgattgctggtgccaatgggacatgaatagatcaataagagaactcatatttaacatagttgcgcttgtagttagagatgatgtttttattgtcattgtgttattactttggttgagacatatatttgaagttaatgaaggtttgagttcttaaa

SEQ ID NO: 10673 - DNA, 729 bp, Setaria italica
  Peptide Sequence Number=SeqID_76647
tatggctgtgcggcagcagttcctttgcaggtcttgtggattttaatcttgtgcggcagcagatcctttgcagatcaggagtgaatatttcattcgttggtagataggttgtgcagcatccggtccaatcaatctgtgatatgggattttaagtgcatcaatatcttaccagtagcagtaccaattaccgtgtgtttcagatgttaatatgtttgctttccctgctggtaacggcctgctcgcttcagcttattcagctagcttatcagataccaaacagtattttcctctcacaacaaatcagccgtttcagcttttcagccggcttataagctgaagcaaacaagcccgaatcctagtccagtttgcctgtgctgcttgcaatcatttcaccaatttctatgacttttgcatcttcacttctaaatctttagcagctgtgcatttccgactccagattcttgacacggattgcaatctgaattctgagcagatacgcatcttcgctcttcactaataaaactcatcaatccgtttaaaaaatgaacatggtaatacttcaaagaacttgacctgaagttctggataggaggtgcagcagaatatcctccttgtatccccagaatcttgtttctgctcttgttgctgacctccactacggagtgactagagagctcccagttgagaactcctggctgaacttgcatccttagtagtctttcgtttcta

SEQ ID NO: 10674 - DNA, 487 bp, Setaria italica
  Peptide Sequence Number=SeqID_76648
gcggcggcggcgtacttcttgagggcgtcgccagcgttcttgaggttctccgggacgggcaggttgcagagcagcgtgaccctggactcggatatctgaggacccttcttccccggcgacgacgacgatggctcctgcttccatagcttcacctcccacacctataattgatttattgaagcatgcatgcataattgtggtgctgacaagaagatcagtaactgaaatctaattacacacagagtcgtgacgcaaccgatcgaggctttgttgtgtatagtagtataaaatcaacctaaagtctagatgatgcgtatagccctgttaattgggttgtaacccatgttgtaaccacaccaatctattctcataagaaaataaatataacccaccctaaaccaaacctccattatcacacaccacaccacccaaacttaccattgcataagttatacaaattacttgccaaatatggttacaacccaat

SEQ ID NO: 10675 - DNA, 500 bp, Setaria italica
  Peptide Sequence Number=SeqID_76649
tctgattccccatcaatataatcaggggtgtttgtttctttaggagcttctaaaatttctatcatatcgaatgtttagatactaattaggagtattaaacatagactaattacaaaaccaattgcacagatggaggctaatttgcgagatgaatctattaagcctaattagtccatgatttgacaatgtgatgctacagtaaacatgtgctaatgatggattaattaggcttaatagattcgtctcgcgaattagcctccatctagtaattagttttataattagctcatgtttagtcctcctaattagcctccgaatattcgatatgatatgaattttagtccggaccaaagatccaaatacctctaattcattcagcaagaaacattttctttccgtgtgcagaaccttcagctcgctctgcctgtttgcgcattaaggcagaggtggtcaccgaagcaaacccttctagttatcattgtctctccctatgctcactc

SEQ ID NO: 10676 - DNA, 766 bp, Setaria italica
  Peptide Sequence Number=SeqID_76650
aagcgtgaggcttgatgactgacggttgatgatacccgcgacagatagtacctatagttacttggagcgagcgaccccagtctgggatgaaaggctttgtgtttaaggatggatggccacaagccaacagccgcttgcaacttgcgttcactcattagttgaatataaggaggaactggtacactgctactaacagtagtagtgggtcaaaaaatgatcggtacttaagatatgggacgaaatgttatttaagctatcacacatacgcactccacctcacatttccacccacacactactaatgaacatggttgtttaaactttcaactaagggcctgtttggcttactagtgttaaagtttaacacccgtcacatcggatgtttgaatgctaattaggagtattaaacataggctaattacaaaactaattgcacagatagagtgtaattcgcgagatgaatctattaagcctaattattacatgatttgacaatgtggtgctacagtaaccatttgctaatgatggattaattaggcttaatagattcgtctcgtgaattagcatagggttctgcaattagttttataattagctcatatttagttctcctaattagcaaccgaacattcgatgtgacactgttaaagtttaacacctcgtatctaaacaccccctccagttaaaggcctgcctacttgcaacaaggttgaacactaatctgcggtagttacagatttataaaaatttatgagttcttgttgac

SEQ ID NO: 10677 - DNA, 511 bp, Setaria italica
  Peptide Sequence Number=SeqID_76651
ttagtctttgttcttattgagtctctcttttcagtactggcaagcagtaattgtgtggctgcaagccaccctgaaataaagcgttcctgttgaggaggagatgctggggagtcactgtcgcagcaacatgacatgattctatgaagttcactgcatccatagttgtgatatgttccatgactattttcagctgtggaagtttttgtacaagtggtgccaatattctatcaatgaaaaccttccacagctgaaaatagtcatggaacatatcacaactatggatgcagtgaacttcatagaatcatgtgaagaaggtcatgttgctgcgacagtgactccccagcatctcctcctcaacaggaacgctttatttcagggtggcttgcagccacacaattactgcttgccagtactgaaaagagagactcatagacaagctattctatctgctgtaacaagtgggagtaaacggtactttcttggcactgacagtgctccccatgataaacgg

SEQ ID NO: 10678 - DNA, 535 bp, Setaria italica
  Peptide Sequence Number=SeqID_76652
atttgtgaggtacagttagtgcttattggtgcctttgttgggtattcactaacatattactgcgcctttttggcctaggtcattgctggagcatgttgcagcaggggatcacgctaacctttttacaattcaagattccaattatgatcctcatcttttctgaataattgttattgtaacctgcagaagttgctttctctggatgacgatcaggaagattcagatgatctttttttaggtgaccaaaagcattcttccaagactgtagaagtgctgacatgatttttggatcaattcgcatgaatgaaagcttcagaaacacctttgttaggacaaaaaggaacaaacatggaatttatttccattttttattcatttgtgccagaactaggtgaaatcatagcgagggattgtatacttactgctgttgagatgtctgttcatcaaacgttgataactataggaacctatctatttaccttttgacaataaagggtgaagaatgttactaaaagtttaaaaaaaaaaaaaaaaa

SEQ ID NO: 10679 - DNA, 626 bp, Setaria italica
  Peptide Sequence Number=SeqID_76653
cgcggccggcaacgccaaggccgccgcctccgcccccgccgccgccgccgggggtagccggcggcagggcagcgaggctgccgctatcgcggtggtcatcggatgacgtggacaggagtgtggaggcccgcgtgccgattgttggcgggggccacaggtatgcgagctttgttccgtgaccgtcagatattttgcgatcagagaccaacggctgggcccctcacatgtatgttttgtactcctagttgcctaggtggctagggccgtgtttagtttggcgaatttgggggtgctaaattactgttacagcactgtagcacactgtagcgtttcgtttgtatttgtgaattattgtccaaatattgactaattaggctcaaaagattcgtctcgcaaagtacaacaaaactgtacaattagtttttgatttcgtctacatttagtactccatatatgtaccgcaagtttgatgtgacggggaatcttctttttgcatagtgtcaaaactggaagtttgggtggaactaaacaaggcctagctagctggccattctactagcccttaccttgtgaagaaagtatgaaaatggtgttgaatcgctgtggacaaatgcaaggaaaatgca

SEQ ID NO: 10680 - DNA, 731 bp, Setaria italica
  Peptide Sequence Number=SeqID_76654
cgagctgcaccgcacgcagcaacgtaatatttcgtcaggaactgatcactcgatcagtgatcacacagtatggcaaacgcgccaacgatgcctacggtgctggctcttgggctagcgctcctctgcgctgccggcccgaccgccgcccagaactgtggctgccaaacaggctactgctgcagcatgcacggttactgcggcacgaccagcgactactgcggcactggctgcaagtccggcccgtgcactggtggcggcagcggcggcgggggcgcgaacgtgggcaacgtcgtcactgacgcgttcttcaacggcatcaagtcccaggccgggagcgggtgcgagggcagtaacttctactcgcgaaacgcgttcatggacgcggccaacaagtactccgacttcgctcatggcggctcggaggccgatggcaagcgcgagatcgcggccttcttcgcgcacgtcacacacgagaccgggcacttgtgccacatcagcgagatcaacaagaacgagccctactgcaacccgagctacatgcagtggccgtgcgccccggggaagaagtactacgggcgcggcccgctgcagctctcgtggaactacaactacggggcagccgggagggatatcaaattcgacgggctcggcaacccggacgtggttgcgcaggacccggcgattgcgttcaaggcggcgctctggttctggatgaacaacgtgcatcaggt

SEQ ID NO: 10681 - DNA, 261 bp, Setaria italica
  Peptide Sequence Number=SeqID_76655
caagggattagagttgaaattatcccaggaattacttctgcttcaggaattgcagcagaactaggcattccactaacccatcgaggtgttgctaccaggtaagcttagtattttgcacttgcatctctacctaactaacattcatatggagcttctggtcatgccaaaaggttttgctctttatagagaactcctttctcaaaattgctcttgtgcaaacttcaccattagtgctcagtctttggtttaggagctgcagca

SEQ ID NO: 10682 - DNA, 390 bp, Setaria italica
  Peptide Sequence Number=SeqID_76656
cttgcttccaatcccactaggcccagcagcagagtcatggcacatggcgcatctggttccccggatcacatattgaattttcgtatgcttttgtccgaaggatgcattcaaactaaccggatctgtaaaagcaaaacgatgagaaactaaagaaatctcatatttcgccgaggaggtggtggcttaccatgttgtggccgtagatttgttcatggacagtgcatccaccgtggtgcaagaacaccgtgccaccatggccgtcgagcctctttccatggtgcctcttgtgagagagggagaggatccaccgtggtgcataaacacggtggccgtggagcctctttccatgtagcctcttgccgagagagtaccatggactagacctaacaa

SEQ ID NO: 10683 - DNA, 379 bp, Setaria italica
  Peptide Sequence Number=SeqID_76657
acacatcctggggtagtagtaaataaactagtaaaacgtagtatgaatttccagcttcagccgcatctgctatacacttgagcctgacatgtgacatcacgctgttcagttctctaccacgcagccgtgctgatcaaccgaacttatcatcaccaaaacgaaaattgtttctccacgttgcttcgcctgatcgcgcgccgatgttctttgttctcctttcaacctaggcagcatcggccggcgtggtgtgggattccctggggatctgcgccggcgacagcggcgactcctcgctgctctgtgaccgggagtcgccgccgccgcgccagtcgtcctgcacctgcgcggcgaactggaggttccagagcacgtcctccac

SEQ ID NO: 10684 - DNA, 596 bp, Setaria italica
  Peptide Sequence Number=SeqID_76658
aagcaacaagccatccaggcaaaccagcaagcaaacaggtaccaagaccagctctacccaagtcaattaagtcttgttgagagacagagtttgcttcacaagcttgtagcagtaggctatgccgatcgagcacaccatggtactccattaacacctgatttacaatgacatcagtagatgtgacgctatcaaaatgatcaatgagtattggcattacaatcattccttccaaaactatccaccagaatgcttccaaaagtttaccttctcaaaagctccttcaccagaaaaatttaaatagctgccccggcatacttgacttccacagaggcagatcgatgcttcgtgttcttctttgctctcagttacagaattgtaatcaaatgtgatttcctcgccttctgcaattggtcgaagagtgtaaactccaatcatgtatttgccatccacagctgtcactctatttttttagaaacataaatcaatgaacattagtctgagagaaagaaaaagaggtccaaacatttcagacatgtaaacatgctagcacatacatgtattcaaattatcaacggtacgagtatcagtttgataag

SEQ ID NO: 10685 - DNA, 487 bp, Setaria italica
  Peptide Sequence Number=SeqID_76659
acctgtactcagtcttgactccttcaaatgtttctttaacaactgatgctttcggcaatgcagctagacttttacactctttgattaacagcttctcaagcagaggaaatattggtctttctcctcgcacctcacttgtgccccaccatatctcaaagtttggcaactcaaaaatttcaaggttcttcagtttctgaaatgtgaaggctgtatcactgctgcacaagtaacgtatgttttccaatccgtacaagcaaagaatttgcagagctggtaactgccagaatgcaggaagcttctcgagtcttttgcaaccggataacttaagctccactatgccttgcaacttattcatccatgttggacaagtgtcgatactgcaggaatatatctttagaaccttcagcccatcatgaggctccagaccttccagcacctctttatcactattatgtgcctccttgtcacaatcactccatctcaatgt

SEQ ID NO: 10686 - DNA, 248 bp, Setaria italica
  Peptide Sequence Number=SeqID_76660
ccaccacgcggtcgccgctgcccaccacccgcacgttgaggatctgcagcagcttggcccctgctctccaccgccacttccgcacaccacaccccataaaagcagaggaagatccacctcgcagcgagaaccctaccgatctcgcctgaagcaatcgccttttgccgttcgtctcgcctcatcttgcgcagcagcagcagaacggagatggccaaggacgggggccccgactggaacggcctgctgaa

SEQ ID NO: 10687 - DNA, 595 bp, Setaria italica
  Peptide Sequence Number=SeqID_76661
tacagttgatgaatgagaatatggaggttcttcaaagcctgaaactggtgtctacggaaaatgagaatagcaacaagggcgattcagtcctgttcatagtatgttaataaattgaagcttcaaagtgcagccttttcttaagcaagaaatggagctttccttggtagggctccaaagtgctgagaaaacatcacttgtgaatgccattgatttgacaaggatgcttgagactgcacactactgtgagcttgtggtactaattacttttatcacacaccatcatgtgctaatgttcacactttcaactggtttttgtgtacttaatttgacatgtatccatggttgaaataagattaacgaaaaatggtattttgcaacaagctttgtgacatgggaatttccgggtttatgcatcaacagatcactcatttagctgcttcacataccaattcaggtgctctttgaaatgtgcttccaaaaatatgtctcccattattagtgttaggaaactaattatcacatttataatgcctttttcacctgttgtatgttgatgatgctgactgggatgctcctgttcaatggagatcatgat

SEQ ID NO: 10688 - DNA, 666 bp, Setaria italica
  misc_feature (645)..(645): n is a, c, g, or t
  Peptide Sequence Number=SeqID_76662
ttaaagaaactaagactagctgggtcatcagtgccaactgcacattagatggtggtgcgaagctactggacatggcaaacgggtcactggcattggcttcgaaagggttagctgcgccaaggctaccagtggtaggtcacgctggcgatctgcttcctcctcgcttcgtcctcgtagaggctgtcgagtaacagcttgtcaaagcctccagcctgttcatcagatgcggctttatatgtggatatctgaaaagcaggttatggagtaaggattgcacataccaagttagtcttaactggttggcttgtatgggtgcttggagcagtgaccagtgccaactcccacccagatgaattgacgtcgaacagattttgagatgctgaccccttgttttggtcatctacatgcaagaccagagcaactgatgacatttccttctcattgcatcacttaatatcatctggacagtttggtattcaacgtttcaacaatagcacttgtaaaattgtgatatatatacctggagctacaattgcaagtgccaatgcattgctttcttccagttctgtaaccaaagggttcacctctgcatccaggttctgcatacattgcagacccaagaacgtaaaggggttcagaaaaacntatgctagatttatttttagc

SEQ ID NO: 10689 - DNA, 757 bp, Setaria italica
  Peptide Sequence Number=SeqID_76663
aattttcttaggtttattggattaattctagttttcagaatttatggaacatgaaagaagtgcaaaatgccagtataggatctctatcatttttagcagtagtctgggaattgtttaactgagtgggaaatagatttgactgtacactgaccagggtacccgtagcgttgtaacgacggccctgttcgcttcagcttattcagccggcttatcagccaccaaacagtattttcctctcacaacaaatcagccgtttcaacttttcagccggcttataaggtgaagcgaacagcccgacgtttgttgaaaacccgtgggtcctccggtcaagagtcatcaactcatcattgaccgctactctgctgaccgctaccgacatgtaggcccgcaaagaggacgtggtacaagtcacgatttttcctgcgtggtgccttcgtggctacttaagttgacgtgtctccctcctattggccggaacgacgtggccggctgtcggcgctgcgctgactcggccgggaggacggcgttaattgctctgacgtatggacccacctctcaacgagactggggggagacgggaaccaacggcctcaggtcggtagatgtcagccgttcgttgtcgatcaaacggtctccatcgcgtcttctacctccggtttctgctgcgacgtgctttgccgtcgcggggagcaaggagaggggggcagggaggtcatgaccggggattggagcgtggcgaggtgaacttgcccttgca

SEQ ID NO: 10690 - DNA, 846 bp, Setaria italica
  Peptide Sequence Number=SeqID_76664
ctttggactgctgagacagaacttcaacagtgaagaacttaggaaggagttcgatgacatagacaatcttactgaaaagagactggaggaactgttggatttgttcctagaagatttcaaggccaacttactagaggcacatgggtggccaacaggtggatcttcagcctacaaagttgccaaagcggcccttaatgcatacacaaggattcttgctaagaagtatcctacactgcgtatcaactgtctgacacctggttatgtcaagaccgatatgtctatgcacatgggagtattgacacttgaagagggtgctcgcaaccctgtgaaggttgctctcttgcctgacgatgggccaactggtgcttattttgatctgaatggggaggcatcctttgtatgatctatcatatatgatcatatctctcttgggcctgttcgcttcagcttattcagccggcttatcagccatcaaacagtgttttcctctcacaataaatcagccgtttcagcttttcagccggcttataagctgaagcgaacagggcccttagtttcagaataaaagaaagggttagagtagttggtgcccataagtattgtagtttgacttgtgtactcaaactagcacgctgagtacatcgtagagctccacaccatgattcctcatcttctgtatgatctctctttagacgtttcacatttgcaatggatcactgatctctctggagaactttgcatattttcaatggaccacgcttttcaatggaccatcgtggagctccaaacaccatgttcggccggcggtgggctgcggcgcgggacgcggctccctcgcgggcgacg

SEQ ID NO: 10691 - DNA, 682 bp, Setaria italica
  Peptide Sequence Number=SeqID_76665
tgctggagctgcagtgggctttttctttggagtaatcttctttgctggagctgcagtggccatcatttgtggagtacttgtggttagggaagaagtgccctctcccaacaataaagcaagacggcttctagtgaccatgccaggactatcctgtagtatttgttctctagttggcctttctggggtgccgacaggtacatcgatctggaattacacgcctgtatgcttctgcattagccaaaatcttggtgctgaatgtgcggggaaagttgtgagtgacgctgacagagcacccaagctcagacatagtattcttctgccgatccggccaattcacggccggtggggctctccttgtgctgctgccgaaccatcgtgagcacctctgctataccgtggcctcctagccatttgggttcattgcacgatttactgacagcaaaactcaaacgacaggctgatttgagggttcaattgtattattaacagaaagtgaatacaatgattttgcaagagccaactcatcttagttgtggtgataaaagatcagtgaatcaaaccaaccaagtgcgacctagcaggctagtagatttggattggcaaatctgatcagtatgccttaggagtggtggcactagctctgatatttctttcaggatatcatgctaatgttaagatgaag

SEQ ID NO: 10692 - DNA, 573 bp, Setaria italica
  Peptide Sequence Number=SeqID_76666
caaaggtttggaaactaaacacggaagaaacagtacgattgacatatcccattacacgcaagcaaatatttacagatggagagaagctactacacaccaagcacaagttcccatcagagggcccgccggtcgctaccactacaagacggaccaaagctgatcgagtcagaggaactgaccaagtagtagtactaagcattttactccctagtccataacataggacaaaattaaataaaaggcgaagtctccaacctcggacagcaacgcagccgtggtacatgcgtttttagataaccacaaggaccagcaaacatgtggcctgacagggacccgccaccgctcctccgtcgacctcatctcacccgatccgagatctaacggtggttgctcctggtctcgtcgctgtagagccagtcgtagacggtgggggagttgggctgcgggcggtcgaagaggttggcgcccatgctcttggtggccaggttgctcccggggtggaacacgctgcgccacacgttgttgccgccgcgcggcggcaacaacgtgtggcgcagcgtgttccaccccggg

SEQ ID NO: 10693 - DNA, 555 bp, Setaria italica
  Peptide Sequence Number=SeqID_76667
ttaatgtgcttttgagaaggcgaacttttggaagcattctggtcttatgtgtgcatttcctttatggtgagggtatcatgatattagagcacaacatcattggtcattgcatgtttgttagcagtgctctaagctggttggttggagtgttggaccctagcagagcacgcgtatttgttcggaggaagcccagatggtatggatgcgaaacgtggggctccaatcttctggaagttgtatggggggattgagtttcgataaggcgtttgtcatttggcctgttcgcttcagcttattcagctggcttatcagccaccaaacagtattttcctctcacaacaaatcagccgtttcagcttttcagccggcttataagctgaagcgaacgggccaattgagttttgatgtacattcatacaaatgagtgcttcaaatatttttgtcttgaaatacgtgcatgtatgtgctgtggaaattgtcaccggaacgtttggctctcctacatttaacggtgaacttgatatcattaacgttctagaattctgttttcctgtt

SEQ ID NO: 10694 - DNA, 558 bp, Setaria italica
  Peptide Sequence Number=SeqID_76668
aactctcctcaattagtacctatttagtacacatcacatcggatatttgatactaattatgagtattaaatatagtctaattataaaactaattgcacatatggagtctaattcacaagacgaatctattaagcctaattagtacatgatttaataatgtggtgctacagtaactatttactttaggtttaatagattcgcctcgcgaattagtatagagttctgcagttaattttataattagctcatatttgatcctcttaattagtatccgaacatcccattacctctagatgtttcctgcagcatacaacaatgtttcggcaggacttttatttcagcgagatcctaaagcggtgtcagacccgatcgggtagctgctcgtgcgtccgatgctagggccccgaaccggacgtctggccgcgccgttcttgtaattatcactgcagcagaccgcaaaaaatccaatctccaatacctgatggggcccacgcgtcagacattcttttcctcctcgcccgtctcttcccccgcccccgcccccgactcctcgcatcc

SEQ ID NO: 10695 - DNA, 498 bp, Setaria italica
  Peptide Sequence Number=SeqID_76669
tttggaagaagtcgttaaataaagccgatgaaaagagtcgtcaaccaagcaagaaaggatgctacagtttcactctccccggtgcaagaggttcgtgcatgatcagataaatgagatgatacaaatataatgacggtaaattacacacatccaaatttccctgcagtttgggcatcacgtcacaccgcaagcagtccctccagttgcgccaagcaaagcaattgagctgtttgcttttgatacagtcaaaaaattcttgactccaaaggctgacgagccccctaaaaccttcctccctccatctcttgttgctggagcacttgctggagtcagctcaacgttgtgcatgtatcctttggaattgattaagaccagattgacgatagagaaagatgtctaacaacaacttccttcatgcttttgcagattctacgttgaggaaggcccatcagagctgtaccgtggtctgacaccgagtctgataggagtggtgccata

SEQ ID NO: 10696 - DNA, 758 bp, Setaria italica
  Peptide Sequence Number=SeqID_76670
aatttaatagaaggaatcattgatgacttcatgtcttaacttaactcgagctgtaatcatagtgccatgtcattagaccctcataccaagttgataatgaatttgtatcatggttctatcgcactcaaacagcatttagtccaggtctcaagacaatctcaccattctgatggaaggcttgaataacagcatctagcacatgcaacataagcatgccggttaagttagtaggggtaattgttacaagaattgcaattctcaaagacctgaagcagaaggttaagtgaatcatgcccatctgaaacaggaattcagtgaatcatgccataatgtcagtttggaaacactagaatttcaagttgcagcaggccaatatcctcttataattcactcagcccccctcgtttcacccaaactcaccaggctatggaattccagaagaaagaaacaaacctctttattacctgaatatttccgttgctgccggtttggactccgagtactcaatcgaaccaactgccactgtaaggtcctaataatcctgcttaatgtggtagaatttttagtctactccggctcacaagtttttagccagagatctgatgttcaaccgaagcgccagaatgcaagctcactgaatgaatcccaagaggcttcaggggtttgcatatcgatcgcacctgcgcggccttctcctgggacgggacgaggtacagcaggaaggggcaggtagtacgtaccatcccaagcctctcctt

SEQ ID NO: 10697 - DNA, 536 bp, Setaria italica
  Peptide Sequence Number=SeqID_76671
ctctgattcgtcaaaggcggcagagacgtgcgatgaatatgttaatccatggaattccattcacctctcgctgggatctctgattcgtcaatggcagattcacctcgtttgaacacgtgccggaaaggcgagcagctcggacagcaacgcagccgtggtacatgcgttttagataaccacaaggaccagcaaacatgtggcctgacagggacccgccaccgctcctccgtcgacctcatctcacccgatccgagatctaacggtggttgctcctggtctcgtcgctgtagagccagtcgtagacggtgggggagttgggctgcgggcggtcgaagaggttggcgcccatgctcttggtggccaggttgctcccggggtggaacacgctgcgccaccgtctacgactggctctacagcgacgagaccaggagcaaccaccgttagatctcggatcgggtgagatgaggtcgacggaggagcggtggcgggtccctgtcaggccacatgtttgctggtacatgcgttttagattaacc

SEQ ID NO: 10698 - DNA, 796 bp, Setaria italica
  Peptide Sequence Number=SeqID_76672
ggcaataaagcatatccctggagaagttttgcattcatcaaacctaagtcccagatagctagtcagtagctgttcttttaaggttccaaggggtagaaggatgttcacaatgacactcaaacgtttggttccaatggctaaactttagccccgtcacatcgaatgtttaaatactaattaggagtattaaacatagactatttacaaaacccattgcacggatggaggctaaacggcgagacgaatctattaagcctaattaatccatcaggcttaatagatttagcctccacatgtgcaattagttttataattaactcatatttagtcctcctaattagtctccgaatattggatgtgacacagcctaaactttagctcgaggaaccaaacgcccccgtagttcactcagactgaaaataaaccagtagcattgtacggtatatcaagcttcccaccaacttttcaagcatgtgttttcatcaaagtagttcacaatcaaccatgatctaggacaaaaatattgtcataagctgatcaattaacctaaaatcagcaatagtttgcttgtggagaggcatgttatgaatctcaccctaaagtcaagaaacctgcaattttaatccaatcacattacaagaaataagcaggttattgacggcttgaaagtacagatagagaaggaaaccactgagagcacgaattctgcaaaaggttatactgatatggggaaggtacatccacttcctgctatcgaacaaaaatccatgagacatactgagccaccaaccattcg

SEQ ID NO: 10699 - DNA, 496 bp, Setaria italica
  Peptide Sequence Number=SeqID_76673
ccaagtctatgaattatctctgagagctgcttttcttccccattcatctccagctcctccactgagaattatcttctagaaagtgcatataaagggaaggggcaaaatatgacagagcttatgacttatgtagtagaataatcgaaatcatggtccttgcttctaagccatctcgtggggaattacgttttattttcttctgttatggcaactcttggcattcagatcattgatgattgatgtctgatgtaagtctctctccctccattctcttgcattcatttaacatttcctagctttttgttgccctacaaaatttatttccagtttccttctaattagaaatttctcttaggttttcattttttctgagatgcaattcaatgttagttgtctgaactcttgtaatcagtaacaaccaataataaggccatcaatgtatgcaattgagatggcttatttgtatccttcactcacagctaaattacctgcagcc

SEQ ID NO: 10700 - DNA, 1101 bp, Setaria italica
  Peptide Sequence Number=SeqID_76674
ttaattgatctgtcattttttttggcccctctgcagcagtcagatccctatctttgatgattggcctgacagtggagtttcgtttccgaatgccaactggtaagttgaactcaattacttatgttgaatgcaacacatcaagtgatcattaatgtttaggaaatcatctgtatgcaatgttgccacaaagataagctatatgttggcacccaggacaatgagaactctattcattttgttcgaatcttcccatctacacttgagttcgaatactgtgaaaattaattttacttgggttttcagtgccaatgtttagaaatgatagctcagatttcagtatcggataaaatgccatcaggtgcagggagcttttgttgcttcatttgcttccatcctgaagatgtttgacaaaatgccacagttaactagctctgcctctacaacaaggtaacgttcctagctacaaatttcgtgaggtagctattatcagttttaggatataatatgattttttggcaagcttttagtccagtgatataaattctacatttttcaaggatgcagaaggatgatcatccatttcctggtttttgattcttgtttctatagataatagatacatggcagtcatgatatgtttttttttctttctggttcttgagtttagttatcgtaattttcttactgcagaaatgaacaagggaaaaaaacgagaacttaggaatttttaaaggggatatcactgcagtcaggtacatccaggaactccatattcttgggacaatgcctcgcaagttagcatctgctgtgaaatggagctttttcccttgcgacagtttatctacttcgttgtcccatttttcttgtgcataattaaggaaagtagaagaactaagcaatgacaacaggagtggcaccaataggtgaactagacaagccattctgctgtagctgtcaatcatgttattcgaaaaatgagctcacagctatatttcacgcaattgctgctctaaattattttgctataactgaaacctaacgtagcaatgcgtaggatatttgctttgcctgttaggaaagatttgatatgatgtttgtttg

SEQ ID NO: 10701 - DNA, 633 bp, Setaria italica
  Peptide Sequence Number=SeqID_76675
tagttaatacaagaatattttagtagtcaatcaaacctttttcctgagagttcatgttcttatcatttctgtttgttgtaggtcatgccatccttttcgagcattagggttgaaggcttgaagctgaatgattgcaaacggagtagaagtgtcaggttgtaaactaacttagcaagtgtcaggcttgaagctggatggtataatttactttatatctttactatgtcactatgatcatttagtttgcatgtgtttagttattccatgcacttaatcaccaagattcctatattaaattaataaattctatgtgtttttatgaattgtaggaaagcatggacaaccaaaatatttaaagaaagctttatgtctatatgctgatgatggacagctagaagaatgaagaattacagaaaggtttattggtgactgctggtgccgatggggggcaggaatatatcaataagagaactcatatttagttttattttattatgccaaacatagttgcaaacttgtagtcagagatgatgtttttattctgttgtggtcatgtttattttagcactatggttattgtgttattactttgcttgagacatatatttcaagttaaaggtttgagttcttaat

SEQ ID NO: 10702 - DNA, 862 bp, Setaria italica
  Peptide Sequence Number=SeqID_76676
tagaataatcgaaatcatggtccttgcttctaagccatctctagggaatacgttttattttcttctgttatggcaactcttggcattcatatcattggtgtctgatgtaagtctctctccctccattctctggcattcatttaacatttcctagctttctgttgccctacaaaatttatttccagtttccttctaattagaaatttctcttaggttttcattttttctgagatgcaattcaatgttagttgtctgaactcttgtaatcaataacaaccaataaggccatcaatgtatgcaattgagatggcttatttgtatccttcactcacagctaaattatcttttgcaagtaagcactcatgtttttttcgtctgttcagtagtaaatttattcttctttcttctcatgcttaattccgtgacacccacaaaatagcctccaaagaaggcagggatgatttccctttctaaattaaaatggcttcttccgtttcattcactgtgacatcatggctgactggctgtgttgcaaaaccacacatttttttttccaaggatgattggaagctctttgttgtggagagtatgcagttatccttctcaaagctgatggcttattgttcaaacatgtatgcttcataggttcattcctaaattcctgatcggatagtctatatcttgttcttgcgaaatctggtcctgtaatgttatgcacaaattaggttacttgaaattttcactgtttcagccaaaatactttgaatggtatgcgaaaggatgatgcttcaacttttctttttttctcatttcagaatactgggagaaaacaactgcaaaagaccatcaaggattcaccagc

SEQ ID NO: 10703 - DNA, 1132 bp, Setaria italica
  Peptide Sequence Number=SeqID_76677
cgcgctcctgtgcgctgccggcccggccgccgcgcagagctgcggctgccagccaaacttctgctgcagcaagttcggctactgcggcacgaccatcgattactgtggcgatgggtgccggtcggggccctgcatagggagcggcaccggcaccggcagcggcagcggcgtggacgtgggtagcgtcgtcaccgacgcgttcttcaacggcatcaaatcccaggccgggggcgggtgcgagggcagtaacttctactctcgggacgcgttcctgaacgccgccggcgcgtactccggcttcgcccacggcggctcggcggacgatggcaagcgtgagatcgccgccttcttcgcgcacgtcacacacgagaccggacatttctgctacatcagcgagatcaacaaggacaacagctactgcgactcgagcaagacgcagtggccgtgcgccgcggggaagaagtactacgggcgcggcccgctgcagatctcgtggaactacaactacgggccggcggggcagagcatcggcttcgacgggctcgggaacccggacgcggtggcgcaggaccccgtgatcgcgttcaagacggcgttctggttctggatgaacaacgtgcacggggtgatgccgcaggggttcggcgccaccatcagggccatcaacggcgcgctcgagtgcaacgggaacaaccccgctcagatgaacgcgagaagtgggactaactaaccagcagtactgccagcagctcggcgtcgaccccgggagcaacctcacttgctaggcgccggaggtttcgtgcaatggctcgtcaagaataaagcgcacccgggcgttcatctggtcggggttcctcccgttgcactcgagggcgccgttgatggccctgatcgtggcgccgaacccctgcggcatcacttggtgcacgttgttcatccagaaccagagcgccgtcttgaacgcgatcacggggtcctgcgccaccctgtccgggttgccgagcccgtcgaagccgatgtccctcccggcaggcccgtagttgtagttccacgagatctgacaagacgggaccgacgacccgtaagtacttctcccggagcacggccactgcctgttgttggcgtcgcagta

SEQ ID NO: 10704 - DNA, 759 bp, Setaria italica
  Peptide Sequence Number=SeqID_76678
caccaactcactcgaattttgtttcagccaccgattctgtttctgtgtcatcgccatacaactccaggctggacaatgaagtgatatatctgctagctgcgtgccagggacgatatttgttggctggctccttctacttctaatacacttagcttaggtgcttcgggtagagtagtcaactctgggcaactccgaatacttagtttctcaagccgatgaaacgctagctcttctcctggatttccttcgccatcctcccatcgctgaaacatctcaagatcttttaatttcattttcttcaatgctggaaatgcagacctgtactcaatcttgaccccttcgaatgtttctttaataactgatgcttttggcagtgcagctagacttttacactctttgattaacagcttctcaagcagaggaaatattggcctttctcctcgcacctcacttgtgccccaccatatctcaaagtttggtaacttaaaaattgcaaggttcttcagtttctgaaatgtgaaggctgtatcactgctgcacaggtaatgtatgttttccaatccgcacaagcaaagaatttgcagagctggtaactgccagaatgcaggaagcttctcgagtcttttgcaatcggataactcaagctccactatgccttgcaacttattcatccatgttggacaactgtcgatattgcaggaatatatctttagaaccttcagtccgtcatgaggcttcagaccttccagtacctctcta

SEQ ID NO: 10705 - DNA, 426 bp, Setaria italica
  Peptide Sequence Number=SeqID_76679
ttaactacctacctaccaaggaaaccgttaccgggcggaactcctcgggcttcacccaccgcttggggtcgttggcgaggaaccacgcgttgacgaggatcttggattcggctgggatgtcgtagccatggagcttgccgtcgttgaggttcatgtgcgggaccagcagcgggatggccatgcgcagccggagggtctccttcaccacggcctgcaggtagggcaggcgctccaggtccggctccgtcaccgccacgccggcgcccagcacggaggtcagctcctcccggagcttggactggatctccgggtggttcaccagctcggcgatgccccactcgatcgaccacaaggtagtctcgatggctgcaaatgtgcaaagcaacaccaacattctttagtaatcagtatactacttgctcctag

SEQ ID NO: 10706 - DNA, 537 bp, Setaria italica
  Peptide Sequence Number=SeqID_76680
tcctttctttcttttccccaatatccaggagagcagccttcagtggaacaagcagctcactctccggaatgccaggatctgctttgacatttgaaagaagacggaaaaagttggtgtagtcaaccttatcaacagccaagttgttaagcagcttactgattagctgcttattatacttggttaggcccagttttttgttcatgatagactgatactcatccatgaactttgtcccatacctgcaagacacaaaatcaaaatgttcacacaaataagtaattgatgtgtactgcaaataattaattttagatgggaggaacaaccacacctttccattacataatttgcctcgtcttggctgataagttctgcagatgacaatggtccagtaaactgtgcaatattccacaaaccaacatcaggttgatttgcaaaacagtacctcttcccaggaaggtcagtggtatttggagtatagctaggatcaaaggcatccagaaagccaaatggtccgtaatcaatagttaggcccagcac

SEQ ID NO: 10707 - DNA, 523 bp, Setaria italica
  Peptide Sequence Number=SeqID_76681
ccttttatttaattttgtcctatgttatggactagggagtaaaaggcgaagtctccaacctcggacagcaacgcagccgtggtacatgcgttttagataaccacaaggaccagcaaacatgtggcctgacagggacccgccaccgctcctccgtcgacctcatctcacccgatccgagatctaacggtggttgctcctggtctcgtcgctgtagagccagtcgtagacggtgggggagttgggctgcgggcggtcgaagaggttggcgcccatgctcttggtggccaggttgctcccggggtggaacacgctgcgccacacgttgttgccgccgcgcgcgcttcaaggtctacgacgttgacttcggcttcggacggccagagcgcgtgcgcagcggcggcaacaacaagttcgacggcatggtgtacctctacccggggcgcggcggggagggaggcatcgacgtcgagctcgcgctgcagccggagcccatgcagaggctggagaaggacgcagacttcct

SEQ ID NO: 10708 - DNA, 877 bp, Setaria italica
  Peptide Sequence Number=SeqID_76682
caaatcatggtgttgtttgggttgcttgattgcttaattgggtagttgagatgcagcgctagtcagatttatgggctggccaagataaggttagtaagattgattaaactgtaaaatttatgtttcttttcattcactagctattatctgatatagatgttagcctgtcagtacaagctctgtgcaatgacacatggatcatcactcatcagccacagatatagatggtagcttgtgcattagtaattatatgcattggttctaaagtgtgggatgtatctgcttgtgctgctctatatatatgtcagttgaatttggtgcttgaaaatgtcgcttgctgtgaacatattaaatattgctgtctattttcagggaacaaggtggctgcaaataggaaaatggaaggcttcggaagatgggagacgctatgtagggaatctttactttaaaaaaaccaaaaaggcgaaaaaaacttcgtacgtcgggcacaactgagataagtgaagccgagggcttgattactcgatgctgagattagcatcaaccatgatgttgtgcacctgacccaccgtaactctttgaattgactgtactgaaaacagggcatttcctgaatttgcaagaattacggcatggccatggggattggttatggctcaaccgttgccgtcccatcggcattcgactttgacaccagctcgtggtgtgatcatgtcgggtgcatcgtcaagaagctcagtgactagaaatatttagtcagggcccaagagaagcaagtgctactgccttgctctacccctggccgtgattggtcaagtgcgccaaggggatttgcacagcttggtcagcagcactacatacagacatatatttcttg

SEQ ID NO: 10709 - DNA, 587 bp, Setaria italica
  Peptide Sequence Number=SeqID_76683
tgacagagcttacgacttatgtagtagaataatctaaatcatggtccttgcttctaagccatctctagggaatacgttttattttcttctgttatggcaactcttggcattcatatcattggtgtctgataatactgggagaaaacaactgcaaaagaccatcaaggattcaccagcaaagctcagcaagcttattgactcgaaaatgatgatgccagcatagtagtgaaagcaggagatgctaatgatgctcatctgccttgtcctcttcccttccctcactgcaaattcatggtcatgccatccttttcgagcattagggttgaaggcttgaagctggacgattgcaaatggagcagaagtgtcaggaaagcgtggatagccaaaatatttagagaaagctttatgtctatatgctggtgatggacagctagaagaatgaagaattacaaaaaagtttattggtgactgatttagagaaagcattttccatctattaccaccaacatgatttgccataaacaatgatttgttgcattaccttttattgccaccagcaagtgaacgttgcaattgtgattcttgaa

SEQ ID NO: 10710 - DNA, 804 bp, Setaria italica
  Peptide Sequence Number=SeqID_76684
tggttagtaggcgcgaacgtggctagcgtcgtcaccgacgcgttcttcaacggcatcaagaaccaggccggggggggggggtgcgagggcaggaacttctacacgcggagcgcgttcctggaggccgccaacaagtactccggcttcgcgcacggcggctccgaggtcgagggcaagcgcgagatcgccgccttcttcgcgcacgtcacgcacgagaccggacatttctgctacatcagcgagatcaacaagaacaacaactactgcgacgcgaacaacaggcagtggccgtgcgccgcggggaagaaatactacgggcgcggcccgctgcagatctcgtggaactacaactacgggcctgccgggagggacatcggcttcgacgggctcgggaacccggacattgttgcgcagaacgccgggatcgccttcaagacggcgctctggttctggatgaacaatgtgcaccgggtgatgccgcaggggttcggcgccacgaccagggccatcaacggcgccctcgagtgcaacgggaacaaccccgcccagatgaacgcgcgggtgggatactacaggcagtactgccagcagctcggcgtcgacccggggaacaacctcacctgctagacgagccggcttcacatgcatgcttggctggtgaagaataaagaattctgggcgttgaacgcgctgaagttaaacccagagtttaacgaatatatgtactagtagtagtattaataatgcaaggcagggctttgcttatgcaacctgaataacgaagcagtttcacagtttgtaaaa

SEQ ID NO: 10711 - DNA, 579 bp, Setaria italica
  Peptide Sequence Number=SeqID_76685
accaaacagggccttataagccggctgaaaagctgaaacggctgatttgttgtgagaggaaaacactgtttggtagctgataagccagctgaagcgaacaggccctcattcgtaacggagcgatccaaatctttacgaatgaggggcctgttcgcttcagctggcttatcagctaccaaacagtgttttcctctcacaacaaatcagccgtttcagcttttcagccggcttataaggccctgtttggtaacacacccctaaactttagtacctcgtatccaaacaccccttgagctgaagcgaacatgtccgaggttgtccagtctcttcttcagggatgaaggaagcggctgtatagctggacatgatgtaatttgaagatcatggagagatgagtatgcttgtggcccatcgggcaaggatgccaggcttttgcattcacaaagactgaggcgttccagggttgaaaactctcccaagcaagattccagtgatctcaactctgggcataccgaaattagtaggcgttggagtccatccagctggcctgataggagttggagtttgccacactcccaa

SEQ ID NO: 10712 - DNA, 774 bp, Setaria italica
  Peptide Sequence Number=SeqID_76686
gggttggggtcagttagcagggagcagatggagagcaagacctggaacatccaacaaagcaacactcaaataagcaacaacactctaatttcatttcaggtgtataacatacaataacacgtcatttccaacaaaacctaattgtggaactgaatgaaaaatgaaattccatttccacatggacggttccaaaaaaaaagattaatatgttggcatacagccagcatataagggcgcgcctatgaaactcctatgatcatattcagcacactattagaggtgctgtactgcaagtatggttgacagaagtacaatgttagtctccatttaaacagctcaaaacaatggttaaagcatgatacaagaagatccaagcaccacggtatgttagtaaaatagcaaacagggttcatagaagcattcaccgaaaggacaaaggccctgatatttcacagatatatggttaaagcatgtgaaataagaaatagaaaaatatttaacaactaaatcaaacaaaagggcaaacaacattagatttcagattgagggggtgtttggataccacctgctaaagtttagcacctgtcacattggatgtttggataataattagaagtattaaatataggctaattacaaaactaattgcacagatggagtctaattcgcgagacgaatctattaagcctaattagtccatgatttgacaatgtgatgctacagtaaccatttgctaatgatagattaattaggcttagtagattcgtctcgcgt

SEQ ID NO: 10713 - DNA, 720 bp, Setaria italica
  Peptide Sequence Number=SeqID_76687
gaagttcatcacatttagtgcatttcaatcagcagcttaaaccagcttgtcgaacaacaagtatcttctgtagtcatgtagaaaaacacatccttacatccagtgttggttgtgtttcacttatgctggagcgcacacatattcaaacacgtcacacttgaaaaaaacaaagaaggattaaaaactggagcatgcatctctgtatgctaaattcttccgtttgcagtctggcatttgttttatgctcaaaatcaagtccttcagcttgacttcactggtgataatcttcagaaagggcaaatgtatctcagtcacaataatccatcatttgcagccctggcaacaatccatggtaattactttcatcaggtcttcaatctactatttcaagcatgccagccgcctcctaattgaatattcccatccttcgtaacggacatctagtgttttctcctcgagataatccagacgttgttgtaggctcgtgggaagtaactttatactaggacaagattcaatcctaagagctctaagatctgagtacgcttgaggcccattcggtaaggattgcaggcttctgcaatcactaaggcggaggtcttccagcgacggaagccttcctaagcaagattccagtgatttcaatttactgcagtccgcaatacgtaatgtttggagggcatccagctgtcctgatagggatcgaagattatcgcagcc

SEQ ID NO: 10714 - DNA, 886 bp, Setaria italica
  Peptide Sequence Number=SeqID_76688
catacgacagttacagaagctatatcttcattttgtcatgctcaattgtggttgttttaaaattcgtattgagctgcctgttatcgtactagttagaatcaacttgaaactaataatcctcatatcttgtatcaaggaaagagtgattggcaataaacatggagatggcgatgcaggtaatctgaaatgcttagcatcttgatattagcatcgaatggtactttgcttctggtctgtttataaacacgatagcttagtttaagatgaggtctgaatgagcctaatgttcttgttgtcgaacaacaccctgaaacataaattaatttaagctgagattctggaagtataataacttcctttctgaaacaagactagcagcatgaaacaagacaagccagattcaactaatgctgccattgtacaaattgtatgctaggatatgtatgattaatatacatcaaagtgctacaactgggaaattggacctaagaaatgcttagcagaaaatacaaagacataccaaggattcgtggaggctgggccatacaggatgtttttttatgtgagtactgggtggtgcctttgtgattgtattgtgcaagttactagtacctttactgcagcaggtgcttgtgcctaatttgtgctatgctctgttcgattagtgctctgttcgattagtgctctgttctatgctacccctactgcagctgctggaataatggaacttcaaagaggtgctaggcaggatcttgtcaacaagtggatcaaattgctgatccagttattgatttgttctgaactacctgcatgcctttatcattttggaggcaaacaatccatatatgtctacctgcagtataattaggacatgtagaatttgatg

SEQ ID NO: 10715 - DNA, 903 bp, Setaria italica
  Peptide Sequence Number=SeqID_76689
aaacagggcatttcctgaatttgcaagaattacggcatggccatggggattggttatggctcaaccgttgccgtcccatcggcattcgactttgacaccagctcgtggtgtgatcatgtcgggtgcatcgtcaagaagctcagtgactaggtagatgtattctctatgccatggtggttggagaggtcggctccactatcgttgttttatgtttcactaaattttttttaggaaatgatgagataaatttattgtaacccatctcaagtaggatagtacttcattttggaactctaacagaatttctctctttcagtttatatgcttgtaggtgattagtaatgcattggtactatttgcatgttggttctatatggagttgaatctatcattttcaagcatgttgtatgatatagcatccaagctagacaaagtctgagaatgataaaccgttaaagaaatatttagtcagggcccaagagaagcaagtgctactgccttgctctacccctggccgtgattggtcaagtgcgccaaggggatttgcacagcttggtcagcagcactacatacagacatatatttcttgaggttttaaatatcaaaggaaagcgtcgacagccaaaaatatttagagaaagctttatgcctatatgctggtgatggactactagaagaatgaatgatggactactagaagaatgaagaattacagaagctttattggtgattgctggtgccaatgggacatgaatagatcaataagagaactcatatttaacatagttgcgcttgtagttagagatgatgtttttattgtcattgtgttattactttggttgagacatatatttgaagttaatgaaggtttgagttcttatatgtgatgataaaaataaaaaa

SEQ ID NO: 10716 - DNA, 1082 bp, Setaria italica
  Peptide Sequence Number=SeqID_76690
taggaagggaaaatacaaaccaaccaaataacagtctcaaacccctctacatctgtcatcaccaggttctcccggtctttaacatgtacattcatcagtcccacactgctgcatatggtaaaagaggtgccatgtgagccatcagttactgtgcaattttccagtttaagtgatgatgataggtgctgtgcttttttatcacttgctgctactagcagaacctttgatgactttttagcatgactctgcagaatctgctcaagaatttccttaacctttgatgttttcagcttctccgatggacagaaatgtacatgctgcgttacaaaagcactccttgaataaaccgaatcattgatagagagctttgtaattctttcacggagtagagttttagccatagttgcaacatttttgtcagatgagtcagtgaagatagttatcggaggactgcttgatatggcgtctctaatagaaaagattttgtcactgacattgaggtccagaaaatatttcagtccgtcaatgaccagcattgatacatttgatatgtcaattgcctttagcgaaacaagttcaagaagcctctcaggggtagctataagaaactccggctcacaagtttttagtccagagatctgatgttcaaccgaagcgccaggatgcaagctcactgaatgaatcccaagaggcttcaggggtttgcatatcgatcgcacctgcgcggccttctcctgggacgggacgaggtacagcaggaagggacaagagacgaccatcccaagcctctccttcctggcgacgatgtcgcaggcagtggagacgagccacgctgtctgctccatcgtggcgcacgcgccgctggtgtcgagcacgtcggacggcgccggggaggagcaggacctccagagctccacgccccagtcgccggcgccgtggatgctgctgccgccgccgtcctcgggcgccaccgcatcccggatggcgttgaggcaaaccaccaggaacttggacgggcggtcgaagtccacgcggccctcttccgtttccgtcgctcgctcgcgtacagccttcgacttggc

SEQ ID NO: 10717 - DNA, 1074 bp, Setaria italica
  Peptide Sequence Number=SeqID_76691
gtcgaatcccctccatttcgaattccagccggagcgacacccccacccacctcacatggcggcggcggcggcggcggcggcgacggcgaaggcggcggaagagatggtggcggtgctcgacgacgagacgctggcgctgatgggggtcagcaactccgccgccgcggcgccggtggttgtgggcgccgagtgggagacgttcaaggagaacgtgcggccgctcaaacgcgggcgcgatgtgtccaaactcaaccgcgcgctcaaggcgctcgtcgaccccgcccagcgcgccgccctcctcgaagctcgcaggaggatgatcgaggcaatctacgagtatcagggcgaggatccgctccaaccgtggctggactgcatcaagtgggttcaggagtcgttcccgaccggcggcgagtgctcggggctggtggtgttgtacgagcagtgcgtgcggaccttctggcacgacgagcgctacaaggacgacctccgcttcctcaaagtgtggctggaatacgctggaaattgcgctgatgctgaggtgatatacaaaattcctggaggcaaaaccagattgggcagggccatgccatttactacatgtcctatgcgtcattgttggaggcaaagaacaagctgagaaaagctaatgagatctttgacattggtatagctagaaaagcaaagcctctggagaagttggaagctgtatacaggacatttcttcgaaggtcgaccaaaaggagcgaacattctgagcaaaatgatacagcaaatgatgatctaccaatacgtagcttcgggactagcttgaaacgcgatgaaaacagaaatcagcaagcagagaactcccagctggggaggccaagggcgctgcaaagaatcgacgttaacaggccactttcagtattcaaagatgagaattcattgccaaatcagggcattgacaaaataaggagaaaagaaaatacgagctggcgcacccttggaacacaagcagataggaacaaagaaaataacatgatgcccactaaatggacatgtcacaaggttccacaaaagttaggagcaaga

SEQ ID NO: 10718 - DNA, 729 bp, Setaria italica
  Peptide Sequence Number=SeqID_76692
caactgtatatgatgaatttcctccatcaccagtgtctgcaacaaagtcaaaccaaaggtcttccctttcattgaaggagtcatataacaggtcagcattctgagtgtcatctgttggtcctttcattgcagcctgcatcatgcgcatgtcaaatcgcccaacaaaaagagtcacagagaccataagatcaaatgctgtcttgaataaatcagctgatgtccctgaataccaaggtaccatgtccaggagcagcatccttcgattctcctcctcctgaggtggaggagcatccggcaagggttcgaggtcggcgaagcccttggccaccggcaggtggaggcacttgttgacgatctcctcccgtcatctgctctagatccttgagcaccttgtcgcggtacttgttgacgatctcctcctgcatctactccagatccttgagcagcctgttgtaggcgctctcctcctgcatctgctccagatccttgagcagcctgttgtaggcgctctcctcctgcatcacgtgaaatcgtatgcttgtgattatcctggcctgtgctcacatcctcttccttagatagaaatcttaacaccggtcttcctcagaaacgtgccggctttcaagcctgcagaaagtaaccctctgctcaaaggctatggcaaccaaagaaatgatgcctacacctgctctaagaaagctgtggaagtccgctgttgacctggtttcc

SEQ ID NO: 10719 - DNA, 933 bp, Setaria italica
  Peptide Sequence Number=SeqID_76693
ctcccagcaagtacatcttctagattacagtaaccttgacattattccatcacccagccacccgtgacaaagggcatgtttgactacatggtgttaaagtttaacacctatcacatcagatatttggatgctaattagaagtattaaacataggttaattacaaaactaattgcacagatggagtgtaatttgcgagatgaatctattaaacctaattagtccatgatttgataatgtggtgctacagtaatcatttgctaatgatggattaattaagtttaattgattcgtctcgcgaattagcatagggttctgcaattagttttataattagctcatgtttagttctcctaattagcatccgaacatccgatgtgatactgttaaattttagcacctcgtatccaaacaccttgagttcgatcgaaatatcaagcgccacatgctgcaaacataaatcaaccgccatactgggccttgtagtcttgccacagctgctggacatccttccccaggatatcttggaagaagccatcgctgtagccgtccttcatcttgccgttgagctctgccacgaacccctgcttgagcgagtcgcagtagtccaggaacctcgccgtcacgtcgtacccctgatcccacttgtcgccctgccccgccttcctccagtggtccggcgcgagccccgcccgcagccgcacgaagtcggcgatgccctcgatgaggccgccgttggcctgtccctgcccgtcccactgccacacgtgcgtcgtctcgtggtacagcacgccggtcacctccgtcttgacgtcgccctggaagccggcgacgtactgggcgttgaggctgatggcgccgccgctggtctgcgccggcgcgctgatgttgtcgacgacgttgagggcgacggagtccaccggcttgcggtcctc

SEQ ID NO: 10720 - DNA, 1247 bp, Setaria italica
  misc_feature (672)..(672): n is a, c, g, or t
  Peptide Sequence Number=SeqID_76694
ctttccagacgaagaacttgtagagctggtacactcccaagtggaggaagcttattggacttgttacagtcagaaagatgaagctccaccatttttgtcagcgtacccatccacgttgggaaactggttccttggtaatgatctatcctcagagcctctagtccaggaggagcttcgagaccctccagcaccttatgacaatgttgtttctcctcctcactacttgtccaggtccaccttaatgacaattccctgagctcctttttatttccaagagtggcctgttttgcatctgctgcttttgtcacattttcgagttgactaagcagtagtggaccaccaaggttgtttaaatgctgcagctctgcaatactactgcaatgagggcctgcacccactacaaaatttgtaagtgtttgcagggaagtgagatgtccaaccgctggtggcatgcgcttcaactcgtcacatccgtgagtgtagaggtgacggagggcagtcatgtactttattccctttggaagccggccaagtttctgacagtacgcaacattcaatgtttgcagattgtacaaaatgctgatatcttccggaagtgccactatatcactccacgagatatcaagatacctcaagagatgtagctgctttggttttcagtaggattgtgcncttatcctgccaaagttccaatgcacgcagagagctgattttgcgagatgctgcagggaactttctatgcgccgaggacagagtagtgtttgcatagctggcgaccttatattcagagaatcattcaaaacggcctctggcttgccacatgataacaatatatgacgacaagtgttctgaagaaactcatcactctgctttggcttctcagttatggtagcaacttctttgcccatgacagatagtgccacatcgtgcataagatcatggattttacatttacttgtagagaaataccaatacacggaatcaattcttgtgtcccctttgacttgcttcacatcttgaaagaatgaccttgagaccagctcactgaaaatctgtttaccaattgtttcatgatgaacatctttttgttcgggaataaagtcatttgccatccatagttggatcagcatttccacgtcaatctcatagtccttgggaaacacagcacagaaagcgaagcactgcttcatgtgtgatggcaggtcatcgtaactgagcttgagaataggcaggatttgatcgtcttg

SEQ ID NO: 10721 - DNA, 688 bp, Setaria italica
  Peptide Sequence Number=SeqID_76695
cccgttgctgcgcaccagctcgctgctaaccggcagggacgatgcacccgaacaagccccgagatgggggcagcgcgcagcggctgcagtcctgcagcacgcacagcgctagatccatccacgaagaacttctagggcagcacggcgtgcgcccggtacccatgcccaccatcgcggctgaagcccgacacatcgggtcgagcagggaggaggaggcggcagcagcttgtgccgccgtagtctgggagctcggcgtcgctcggccactcgagtcgagcgtggtgtggtggtcagctccaggtttgcgtccatgggagctgctgctgcgctgcacggcactgctgtcaatcccttgcatcaattgttgtatttggactcagataagttcactaatcaaccccaagtccttgttcttcccagttttcagtatctaccattgctctgttgtgcttcagtttttgatgctttactaaaatttagggttccatacttgaattgatgtgtggtatagctaatctggtgcatttattttgtggatcaattcccttgattacttgctggtagagttactgcatacggaaaaaagaacttcctctggtcatgaaagttttctcaatcagttttcctgaaatgaagccccaccaaccaatttgttaattgatttgctgtcggaacccatccaatactg

SEQ ID NO: 10722 - DNA, 562 bp, Setaria italica
  Peptide Sequence Number=SeqID_76696
cgttgtggctgagtgctgctggcttcgacagttactccaggagctccacatccggctgccctccgccaccgttgtcttctgcgacaacgtcagcgccgtctacatgacagccaaccccgtccaccacaagcgaacgaagcacattgagatcgacattcacttcgtccgcgaaaaggtggccctcggtgagattcgggttctccatgtgccctcctctcaccagttcgccgacatcatgactaaagggcttccgacagcactctttcgagaatttcgatccagtctttgcgtccgggagcctcccgctgcaactgcgggcgggtgttaggcaatagaatatgccgcagccccttaccatatgctgcggcatttgtagccataattagtagatgtaaatcaaggattagttgctataattagcagatgtaaatcagggattagttactatactgagtagatgtaaatcaagggaattacccttgccttgtaaagcaaggccagccggccctatataacagaaggtgccccctcctattgaggtgtggccaattgcctcccaatt

SEQ ID NO: 10723 - DNA, 1081 bp, Setaria italica
  Peptide Sequence Number=SeqID_76697
tttaattattccgaaaccgactccttatggtgcaccagatttgatccgtcattatgaaactccctcgcaggaattgtgacctcgtccagaagaaatccacatagttgttcttgtattcccctaaaaacttcggtctcgaggagtttatccttcctggtcattatcttcgtaacgagcatccaaatctttatcaatgaggttgtccagtctcttcttcagggacgaaggaagcgactgtatacctggacatgatgtaatttgaagatgacggagagatgagtatgcttgtggcccatcgggcaaggatgccagtctttcgcaatcttcaagactgaggcgttccagggttgaaaactctcccaagcaagattccagtgatctcaactctgggcagtccacaatctctagtcttcggagtccatccagctggcctgataggagttggagtttgccacagtaccgaatatctatttccctgagggatgggggaaggttgagaacctctgacaagcttttgcaccggtgcattgttagagattcaagacatggaagtagtaagtgatcccgggccgatgatgacagcttcggtgcagcgctgggcccttgatttaatgttggctcgtcctgttgctctccgaatatggacttaaggttagggcagtcgcgcaaatccatcctcttgagagatgcggggacgttgaagacctctaccagactttcacaagcccgtatgtctagagactcgagacgggcagaacttggcggctcctttctgatattggttggccaggagcagctttcgcgtacccaatcaaaccactgcaacagtcaatggtgaggcgcctcaaggataccaagctctggaactctttttccggccagtagacaagcgcatggttgataattgtcaaatcttggagctggacaaaacatgtccatagtgccagtggacttgaggggaacagaaagttgcagcctcttagctccagacctgtcagagggtatttattactggcgtccaccagctcaaaggcactatgcacagttggtaaagtagtttctgtgcctacggttattaact

SEQ ID NO: 10724 - DNA, 470 bp, Setaria italica
  Peptide Sequence Number=SeqID_76698
tgcgtgcggacggtggtggtggtggaggcggcctgcattggcttcccaaaactgtgttcacaaatcacagaaggatcgaatttctagaatgcccctgttctggcgccgtactctaccctaaccttgcacccggtaagaatcatcttgctgccctttgggcatatgccatgaagaggtgagcgtgggcagaggcgaacagatccagggagtgcttcagtgaccggaggcgcttaccttcttcagggagtgcggctccaccgggggcctgtccaccgccgctgccggcaacttgcgaacccacattgtcgccgggcacggggcaaccacagagcctgccgctcgcgaaatggcgtcatccctagacgcagggccgccatagcgccgaccacctcccctccattgcttcccgcttgcggatctgagacgcggaatgggatgggggaggcttcggaaattcgtatcgggaaagg

SEQ ID NO: 10725 - DNA, 709 bp, Setaria italica
  Peptide Sequence Number=SeqID_76699
ccttgaaatttcaggatgttcttctccttgtagcaccgggataaaatcattggctatccataactggatcaacatttccacgttaatctcataatccttgggaaacatagcacagaaagcaaagcattgccgcatatgtgatggcaagcaattgtaactaagcttgagtactggtaagattccgtttctatcatcacaaatcttttttctccttagcacatccttccattcacgcgcggtggtcttggtacttaacacagagcccaatgctgtagcagctaaaggagaaccaacacatctctttgcaacatcaccaaccatgttaactagttcacgaggccaatccttttcttgttttgagctgaatgctcttgacttgataatttcctctatgaaattttcacccaagcgtccaagttcataggctccttcagctgtacccatcattagttttgcaacttcttgatcacgagttgttgtcaacactgagctgccactgccaccatgaaggtaggacttcagtttttcccacttgtgtgcctcatcacggttccagacatcatccagtacaaggaggtacctcttcccactcactgcattttgaagcttgtccaatgctgaacttccatttgcatgacaaccattcttcttagcttctttcgtttcaaacttcttcttagcttcttccacaattcttttagccagagta

SEQ ID NO: 10726 - DNA, 877 bp, Setaria italica
  Peptide Sequence Number=SeqID_76700
cgactatagtatgtatgtatgtatgtatgtatgtatgtatgtatgtatgtatgtatgtatgtatgtatgtatgtatgtatgtatgtatgtatgtatgtatgtatgtgcaaagcgtgaccggtgactactgacgcatgatcagttgatccctgcgcactctcggtcaagacctgcgaaagcgcgtatcaaacgactcagagcaacctgttgaggtactcgtcgaccgtggtgtacttgacgtcggggtacagctcgcttgcgtccacccctgacgatgggtcgatctcgaactcgtgttcccccttgatgtgcaccgcgtgcccgattgacagtaggatgctgttcagcgggatcggatcttcttggatctgcttgagcacggcgtcctcgtcgagatgcacccgctcgaacgccctgccggtcttcctctcccagaccgccaggagctcgttgtgcgacagcgtgttggccggcggcctgatgtacagcgtcctcttctcggcgcgcgggtcgtcggcggccatcaccgtgtacgtcccgatgtccccctcgtcgacgtaggacaccttgctgccgccgtccccgaggacgacggcgggcttgtcgacggggggtgactgggacaggacctgcccgatgccgggcagcccgtagccgaagaagtagcccgtccacgcgtacgtgtaggggacgccggcggcctcgacggcgcggcggaccgccgccttggggttgatgatcagggacctgatcggctccacggcgcccgagcggtcggcgtccaggccgaactccgatgggaagaacctcttgacgttgccggtctccttgatggcgtcgatgagcctggtctggtcggcgatctgccgcaccccga

SEQ ID NO: 10727 - DNA, 1399 bp, Setaria italica
  Peptide Sequence Number=SeqID_76701
atattattaggtgaagtgcatcttgctttagcggtaaaatgtcgctgtcctgtctacaaaattaaaattcaagtagttaggtgccttctaaaattcctgtcacatcgaatgtttagatactaattagaagtattaaacatagactaattacaaaaccaattgcacaaatggagactaatttgcgagacgaatctattaagtttaattagtccatgagttgacaatgtgatgctacatgtttagtcctcctaattagcctccaaataattagcttccaaatattcaatgtgacatgaattttagtccggactaaatatccaaacatccctgcttcactccattgcttttttggtgagcgagtggtgaggtactgaaatccatcgtactacttctctagccaacgcaaccacctcttccagtttagtcccccgctggtagggcctacctgctggcctgcggcttttgctttcattacagaagctgcacttgcacaccaaggctcaatgttcagcatctcaaagttgatagcagcggtgtcctccatttctgacatttctgtcgcctcatgtaagctataagctccactagacgtactgccatgtttctgatattcaagctatgtcctgttaataatttaactagtccttggtacgaggctattagcagttgacttcagtacatgccatagatctgctagatttctatattcttgatggtagatttacaactgctcctagtgtacttgtgcgggtcgctttgtaggatttaatgtgtggaagagtttttgtgtaacagttgttgaatatatttttctgtgatatcatggagacgttgaaagcccttccagtgtcacgtgattgatttttatgcaatcgcagcttctgaaatactactttcaccatagtatgcttagaaagcccatcaagataccttgcgaactatttttgagatatatctatttatataaaaattatagaagtcagcaaatgatacgcaatagacagatttcttcataatttgaatgcacatgatacaactgttggctaattttactggagggatcaaataatacgtcttgcaatcttgccattctcaaaacggtccccttgttatgaatgcccttagcttagctgatcagttggtcatggacttgcaataaagtaaaagcaatgttagataccttgctacagctcaccatctatgccttgatatcctaaccaattaaactttagtaccgacagtttatgattatttttttgcacacttattgacttctgttaagtttttctatgtacctgtggaaccacattagttttttaataatttgtcatcaatttgtttatctgttgctcttgagatcaccatgtgacagtgacatttccgaagcaattcctaagtc

SEQ ID NO: 10728 - DNA, 699 bp, Setaria italica
  Peptide Sequence Number=SeqID_76702
atctcttatacgaacaagcttttcaactaggaccataggaatcagagataaagattcctaagtctggttatataaccttaaatattttagttatccatgtcaagtctctaaatcttttttcgcttctttgcatattgatgtcatgtgttgttgatgctatgttgatgtctttaattgcagttctaggtgctgatttattagctgcatactcatcaggtgcagggagcttctcttgcttccatcctaaagatgtttgacaaaatgccacagttaactagctctgcctctacaacaagaaggatgatcatccatttcctggtttttttaccttggtgcctccctccaaccgtgccaccctctccgtctgcgtctccttgacagtggcaggccatgggacaaggaggaagtggtggccactgcagctcaacgatgtggaaaacaggagtacttatctttaattcccttgcatttttgctaacaggaaagcgtggacagccaaaatatttagagaaagctttaagcctatatgctggtgatggactgctagaagaatgaaaaattacagaaaggtttattggtgattgctggtgccaatagggaatgaatagatcaataagagaactcatatttaacatagttgcacttgtagttagagatgatatttttattgtcattgtgttattaacttcaaatatatgt

SEQ ID NO: 10729 - DNA, 676 bp, Setaria italica
  Peptide Sequence Number=SeqID_76703
tgagttaggagatcattgcacacagcgcgctgcaccttggcgaggtcaccacccggcaccactgtcggtgcctggtagttgatgccgcacttgaaccctgttgggcaccagtccacaaactggatcgtgcgcttcgtcttgatggtggccaccgccgcgttcacatccttgggcaccacatcgccacggtacatcaggcagcacgccatgtacttgccgtggcgggggtcacacttgaccatcatgttcgccggctcgaacgcgctgttggtgatctccgacaccgaacaagactagctcatggtaggccttctctgaagagatcaccggcgcatacgaggacagcatgaagtggatccttgggtaaggaaccaggttggtctggaactcattcacatccacattgagggcaccatcaaacctcagggaagcagtcagcgatgagataacctgagacacaaggcgattcagattggagtagttgggcctctcaatgtccagagagcgcctgcagatgtcatagatggcctcgttgtcgagcaggatggagacatcagtatgctccagaagagagtgggtggagagcacgctgttgtagggctcaacaacagaggttgacacctggggagatgggtacacagtgaagcccagttggattcttgccgtagtccacaga

SEQ ID NO: 10730 - DNA, 1064 bp, Setaria italica
  Peptide Sequence Number=SeqID_76704
cgttttcagccacatgaaccaaagggcatgctgcttgcaatcatttcaccaatttctatgacttttgcatcttcacctctaaatctttagcagctgtgccatttccgactccagattcttggcacggattgcaatcagctacacatggacgcttcatcactcagattagcaaaaagtagaagtaaaacgaaaagaaaatccccatgatgctccttcagattcttagaaagtgcattgtggatggtatacagagcttgtactagaaaatattcatagattttccattagcaacatgaagcagctattattccccactgggttgatgtctctcacttgttccaagtttaaaacatacataatacaagaaatacatgatccacgaagaaatacatgatccataacaatcagagtttaggtgaccagaatgtggatagccatctacgtgcagtggctaaaagcataattcagtgaagaatctgaattattattgatctaaaaatatagtatcattatgcatctgaagaatctgaataaaagtagtttctcaggaattaaacctaatcagatatagtttacatctctgaaagtgaacaatgttgaatacctgaattctgagcagatacgcatcttcactcttcacaaataaaactcatcaatctgtttaaaaaatgaacatggtaatacttcaaagaacttgacctgaagttctggataggaggtgcagcagaatatcctccttgtgtccccagactacgcacaagtgagggagataaaattgagaacagagaaatcaagtattgaatgaatcaacaataaaagtgtccacagactgcacacgagtgataatttaggataatttatgaccgcacacgagtgagagaaactgagagcagagaaataagtagtctcgaatcatgtattaactgcagacaacaaaaagcagagattagcgaatcagcgccactgcatgttatgagaacaaaggcatgcttgtttatcccatatatttagtaagcactgatcattgtatacctttcttttagattacacattaaattctttta

SEQ ID NO: 10731 - DNA, 805 bp, Setaria italica
  Peptide Sequence Number=SeqID_76705
tagtactaagtactaaaggtaaaccttagttcactagtaagcaactgaagctgtgtgatccagtatggcgagttcagcaacgtcgaggatcctggctctcgggctggcgctcctcttcgccgccggcctggcagccgcgcagaacgtggctagcgtcgtcaccgacgcgttcttcaacagcatcaagtcccaggacagcgggtgcgagggcaagaacttctacacgcgaagcgcgttcctgaacgccgccaacgcgtacccgggcttcgcgcacggtggctccgagacccagggcaagcgcgagatcgccgccttcttcgcgaacgtcgcgcacggtggctccgagacccagggcaagcgcgagatcgccgccttcttcgcgaacgtcgcgcacgagaccggacgcctctgctacatcagcgagatcaacaagagcaacagctattgcgacccgaacaacaggcagtggccgtgcgtctcggggaagaagtactacggggcgcggccctctgcagatctcgtggaactacaactacgggccggcggggaagagcatcggctttgacgggctcgggaacccagacaaggtggcgcaggatcccacgatctcgttcaagacggcgctctggttctggatgaacaacgtgcacggggtgatgccgcaggggttcggcgccaccatcagggccatcaacggcgcgctcgagtgcaacggcaagaaccccggcgccgtgagctcgagggtgaactactacaagcagtactgccggcagctcggcgtcgaacccggggaagacaaacctta

SEQ ID NO: 10732 - DNA, 693 bp, Setaria italica
  Peptide Sequence Number=SeqID_76706
tactgactctcgatgttatgaaacagttggattcctgaataattatgctgaactaaatttctttgatttgtttccaatggttactttgtcagttgtgacaggagaagccagttcatgaatctgtgcttgccgtggtttaaatacctgtgttggtgaatgggtgcttgccgtgctttaaatacctgtgttggtgtagtgaataattagcacctgttttaggacatttcgttacgactagcacctgttggagggcaattatctcgctattctctttcatttccattgagagtctggtggagagaccaagtctatgaattatctctgagagctgcttttcttccccattcatctccagctcctccactgagaattatcttctagaaagtgcatataaagggaaggggcaaaatatgacagagcttatgacttatgtagtagaataatcgaaatcatggtccttgcttctaagccatctctggggaatacgttttattttcttctgttatggcaactcttggcattcagatcattgatgattgatgtctgatcctccaaagaaggatgattggaagctctttgttgtggagagtatgcagttatccttctcaaagctgatggagagtattgttcaaacataatgattgctcatctgccttgtcctcttcccttccctcacttcaaccctaatgctcg

SEQ ID NO: 10733 - DNA, 718 bp, Setaria italica
  Peptide Sequence Number=SeqID_76707
cttgctgtttccttgaccatacatgtatatgctgcgtagtcagagggttcaatattatttttctgcatttgattatctctttgttttgatgttctgtgactaatgatgtagcatttttttaagaaaaaaatgccttagtgaggtgaatggcactactatgccaaaaggctataatgtttggctctgtcacctctcgtattgataaatgagcagaaagacactagttcctttctgatgttgtattgtacagtttacaaaaaatttcgaagtgcttagcaggatattctttgacatacaatcctttctgtagtgtcagatttttaactgggcactctagaaatggtgggacagatcctctatatgtggcagggaatgcagctgatccagacaccactttagttgtgtacatgggtttgtcaacactgccatcccttgctccaaagttaatgaagcacggccttccaccagatacccctgctgttgccgtagagcgcggcactacccctcaacaacgaatggtactgactcatatgccctcactaactaaactgtgtttaactatacatgctcaatatttcttgttctgtaggtattcgcattgttaaaggatctcgtagatgaagtcaagttggctgatctagtttctccgactctaataattattggaaaagtggtggccttgtcacccttttgggttgaaccatctgaacatgatgca

SEQ ID NO: 10734 - DNA, 603 bp, Setaria italica
  Peptide Sequence Number=SeqID_76708
tattacaccatttttcttctcatcaaacaaaatcaaaaaccctaatcaagaaaaaagaattctggccacttggagttttgaacaaaagcgagctggagctcttccttgtggatgaggccgtcgtcgatgatggagcagctgatcttcttgtagagctcgaagagggcctccacctcgttcaccgagaagcatcgggactcgtcggcgaggtgcgcaagctgatggaggtcggggggggtccagccgtcccggcgtaggaagggtcggtggtggcggtggcggtggtagtggctccttttcttctcggcggcgacgaaggtggcgccggaggaggaagggccggtgccgtagcggcgcgcgcacgaggagtcggagccgggccggaggtcggcgaggcagtccgtgagcgcgaagaagacggcctcggcgatggcgacgaaggggaagaagaccgcgcagaggcgctcccccagcgacagagagctcgccgactgcatgtcggaggaggagaatcggaagccgaagcgcgggtccatcgcgaataggcgcccgtggttcgctcgccgcggatcggatgaactggaaagcatgcagcgtctgtgc

SEQ ID NO: 10735 - DNA, 318 bp, Setaria italica
  Peptide Sequence Number=SeqID_76709
acttaagaaatggaccatccattacaaaagtcgtggtacataccaatgcagcaaactggatcacgaaagggatcggatcttattggcgtggaattgacgggacctggccagtacaggtaccctcgatcgatcagagacacatggtactatcgcgcatgctgtgcttcagcagtacaggtgacagtaggcaaagcaccaacaaccaaccacacgtcacgcgcgccgtcttcttcaaaggaacctgttgaggtactcatcgacggtgctgtaccccgacgtcaagtacaccacctgttgaggtactcatcgacggtggtg

SEQ ID NO: 10736 - DNA, 973 bp, Setaria italica
  Peptide Sequence Number=SeqID_76710
cttttcaatccttgattcttcccaagagctaaattgataggtcaaatatcttaattttataatgcagtctggtggagagaccaagtccataaattatctctgagagctgcttttcttccctgttcatctccagctcttccactgagaattgtctcatagaaagtacatataaagggaaggggcaaaatatgacagagcttacgacttatgtagtagaataatctaaatcatggtccttgcttctaagccatctctagggaatacgttttattttcttctgttatggcaactcttggcattcatatcattggtgtctgataatactgggagaaaacaactgcaaaagaccatcaaggattcaccagcaaagctcagcaagcttattgactcgaaaatgatgatgccagcatagtagtgaaagcaggagatgctgtactgttgaagtcctaaactatttcttggagtcttaccatctccaattccaattatttctaattttctacactccttggcagaatgatgctcatctgccttgtcctcttcccttccctcactgcaaattcatggtcatgccatccttttcgagcattagggttgaaggcttgaagctggacgattgcaaatggagcagaagtgtcaggaaagcgtggatagccaaaatatttagagaaagctttatgtctatatgctggtgatggacagctagaagaatgaagaattacaaaaagtttattggtgactgatttagagaaagcattttccatctattaccaccaacatgatttgccataaacaatgatttgttgcattaccttttattgccaccagcaagtgaacgttgcaattgtgattcttgcaagtatgattctaaccaccaaatttattacgttgcaatatttatttgatgcaatggagcatattgcatggcaatatgaccatattcccatgttactagggagtgacaataaaactt

SEQ ID NO: 10737 - DNA, 1292 bp, Setaria italica
  Peptide Sequence Number=SeqID_76711
ctcgcattgacgcagccaatgtagatgtcatccaaatcaagtttctcgcctaggtagtttgatttgcattcttaggggtgtttggatcccaggctaaactttagtaccagtcacatcgaatgtttagatattaattagaagtattaaatatagactatttacaaaacctattgcacagatggaggctaaatggcgagacgaatctattaagcctaattagtccatgatttgacaatgtgctgctacagtaaccattcgttaatgatggattaattaggcttaatagattcatctcgcgatttagcctaggggttctgctattagttttataattagttcatgtttaatcctcctaattaacatctgaacatcgttcgaggaactagagaagcgccttagggcacggtatatttgtagtttatgaaatgtagtgtttggctaggctcatgtgatagattagttaattcttaaccatataactatatgacatcgatgatttattctctgcccaattggttatacaccagatccaaaaacggctcagaaatgctcgggctaaatttgatcggtctttttgatcatcttttggtaaatgatgaccttgagacttgctatggaaaatttgaagaagttgctttctctggattacgatcaggaagattcagatgatctttgtcagtttcgtgaactttgatccttacacttcctactgatgcttctgtgtgtgttttctgatagcaaatttcattattatgagttatcaaggatgacaagcaaactgcaagttactctatcgtgtccaaaaatgactcaagagattttgttgcaatctgagactaatgatgccaaaaatggagctacaagcttgagagcatttatttgtcgtctctctcgggaggtgcaccaattaactccttttgacaacagcttatatgggtgttttagatgacccaaagcattcttccaagattgcagaagtactgacatgaattttggatcaattcgcacgaatgaaaacttcagaaacaccttagttaggacaaaagggaaacacatatgaaattttcattcgtgcgaattgacccaaagcattcttccaagattgcagaagtactgacatgaattttggatcaattcgcacgaatgaaaacttcagaaacaccttagttaggacaaaagggaaacacatatgaaatttattttaatttgttattcgtttgtgccagaatgaagcgaaatcatagcgaaggattgtgtactttactaccgttgagagatgtttgttgttcgtc

SEQ ID NO: 10738 - DNA, 537 bp, Setaria italica
  Peptide Sequence Number=SeqID_76712
gaccaacattctaacaatcttttgcttctcttcatctctggatctgctgacaatctctgggtcaaccatggtggagtcattctcacgcagataatttatctgaacctgcgcttgtggctgtttgtcgaacccaaagttgcgcatatgctcgacaagggcctcagtatcgcgcacaatcttgcgaagcttgttgcccatcttgtaacggaacatgatgcggttgcccatcccgagctcgatgtagcgcccctctttcttggcttgacgacggagggcctcatagttgaattcatcgaagacttggatggcctcgtatgccgccaccttaagcttctcaagccagggtctgattgcttctctggaggttgcctgcttctctgcgtcagtgatcttttccaggatggccggcagcatgaccttgagcttctcatgctgctcctccatgccctccatcaccttgtactggtctaggaggtagctggacgccttctccttcaccaggggaccaggaaagtggccccgaccaccatgctgccc

SEQ ID NO: 10739 - DNA, 654 bp, Setaria italica
  Peptide Sequence Number=SeqID_76713
tttttttgtgtcaaattgtgtccatgtttagctagcatttattgtctcatccaaagagaagtactaatatacacagttgtaaccctcgtcgtactttggaaaaggaaacattatatcgcactggtacagtagtactacctcattggaaaagaaaaacgatgacataaggccggttattgagaagccaagcttgcattggcatcagtcctcccaatatctcttggtcttgagtgagtgtctggtgacatctaggtgggcgagagcagcctctattgtctcctttagttgcgcaccactcatctcttcaatctcgacgaacatggtgtggacgaaggcgtcgccagcggcagcgatgctcgccgtgacgacgcggaggcgcagcggctccagcgcccggcagaccttggcgacggcgtccctgcccctgctgcaccgcacgctcaccaccgccatcttctcccccgcttccgaaaccacaacctcgaggatctggactggcggtgaggcgtcgtcgacggagagtgtgacgctgccaccgtcggccgccgccgttcgcgtcctcttcgtcctccgcgggtagctgtcggcgtctccggccgccgcatgatcctccgtcttgacggtggcggcggtgtcgctggaggattcgagcgc

SEQ ID NO: 10740 - DNA, 990 bp, Setaria italica
  Peptide Sequence Number=SeqID_76714
atgaggacaaatgtggcaatgacgatccaaatcctactgaactttctagagggaaaggtgtgcagtttcctttttctgtctttgaccgcgtcataatcaagggaaacaagaggaccccggaacgatttgtgggccgtcaagcagttgtgacagcgcagtgcttaaatggatggtatgtagtgaagactttagacaatgcagagagcgtgaagttgcagtaccgttccttggaaaaggctgccgatggaaatggggcttcagctatggtctcaagcaacgcccaaagtgcaagctggttataaggtacaatgcgggtcattgtgcagtgatagacccttccaacacctgaaacacttccaatttcatctgctgtgcttccgtaatggtgccagcttccagcatgctgaattcagattagattttctttgtccctttttgtctcctggtggagacacagatcttgtgaggaatgtttctttacaccattgcaaaagcatgtgacgtcatcgattagcaagcgcctcacaggtatctgttttggtgatagcagctgagcagcatgcgttgcaaactttgtgttgggagctaccactccagtaccctaccattcaggtgacagtatcagatactgaaggagacttggccttgtttagttgcccaactttgggtgctaaaattactgtagcaacaatgtagcatttcgtttgtatttgtgaattattgtccaaatattaactaattaggctcaaaagattcgtctcgtaaagtacaacaaaactgtacaattactttttaatttcatctacatttagtactccatacatgtaccgcaagtttgatgtgatggggaatcttctttttgcatagtgtcaaagttggaagttgggagtaactaaacatggcctaaaaagaagaagaagaaaaagttactgcagcctactcttgcagatgggacaaggctcgagacggtgcaggagtttgttccagctt

SEQ ID NO: 10741 - DNA, 813 bp, Setaria italica
  Peptide Sequence Number=SeqID_76715
tgaagagccgcctgatgttctccctggtcaaggtatccatatccacaacgtcgctgtcgtcggtgaacacccacaggctgcccggcttcacctcctcaaggcaggcgcggcagaacgggcaggacttcgatttcgcgttcctgcatcgagagtgaacggacacgttatggccccaccattacgatgatcacttatgattgtttatatagttaaggataatgatagatttggcaggaaggtaaaggacagatttgtgtgcttgatgacaaggcgaagtgcaaaatatccggtgttgattagatattgacataagaaagcgaagcttatcctgacccgacccaacaatgagataagctgaatggcagaatcattggcagagcatatcacattattagacgacttcatttgttaccaaccaactatacctcaaggtaaatagtaaatcttaaacttcagggtaaaacattaatcctaaaacttaaatcacggtgtataaaacagaaacaatgcagaggttttgctgttatgacgagagtcaagcgaccaaattgaaagtgatgattcagctataaatggtcattgtggtaccaagttaccaacttggaaacagactactaatttgctagaaagcttcctaaagtttcctagcataataatggcattgtcgctgcaagtagctttggatggacggcttgaatcaagaagtttaacggactattatatagcaatctaaggggtggtttcgatacaccctcctaacctcctgaacagtttagtacctaaactttagtacatgtttgatgctaattagaa

SEQ ID NO: 10742 - DNA, 757 bp, Setaria italica
  Peptide Sequence Number=SeqID_76716
atacacttcactggtgacagaaacgtaaaacttcattcgtatatcctactactacaaaaagtcttaatagttcaatcaatggcacccaatcttcactctttcctaatatatctacagccaaaaaactccaccagaaattggcagccagtcttgatcggagctcggcagcaacagcctcaatgaactcttcagtgttcaagtaatggcttctcgtgacgttggcagatccatgaacaagaagtgccagatcttttgtcatcttcccagactccacagttccaacgcaggcagcctcgagtttgagcgcaaagtcgagtagcctagcattgtcatcgagctttgccctgtgtgcaagtcctcttgtccaagcaaagattgaagcaatgctgttcgtactggtttcacctcctttctggtgaacacggaaatggcgggtaacagtgccatgagcagcctcagcttcaatggtttttccatcagggcacacctacatacagaatggatcagcaccagaatgtaaagcatgcatttctctgaagataaataaacatgttcagctatgacactgaaccaactaaaactaataattgtgaatctatagtcagcatggataactaagtcagtacataccaacactgatgtcattaaacccagcgagccaaaaccttgagccaagaaatggcctactctaccttagcaccaaaaacacaatcctgaagaaatacgatggcaggtttaaggacagtcttccaggagg

SEQ ID NO: 10743 - DNA, 981 bp, Setaria italica
  Peptide Sequence Number=SeqID_76717
ggaagtggcaatccagccagacagccacaacgcggtctgcgacatccagacacggcacgcatcaccatgaaggaaaccaggacggaaagaacactggacacaggacgggtcatatcacgccgagctacgagccacacaggcccccatctcttcgcagtcattattgcacttgtgctagtacaactagcaggcctgaagccctgaacctgagcaagtgagcaggcaagttataactcgatcgcagtgagaacggtcatagagcaagtgactgcttaaaagttaaatcacagtacagatttggtcacagagcaagagcaacagtaacggcttgcaatggaccgaagcagcatgctgttcactgtgccggccgctttcagacgtggttttactggacgtgacagcctgtgtggtggtaaagaactgaggataatacccgtacagttgcaaagcacctttaggccgtgtttagtttggcgaatttggggtgctaaattactgttacagcactgtagcacactgtagcgtttcgtttgtatttgtgaattattgtccaaatattgactaattaggctcaaaagattcgtctcgcaaagtacaacaaaactgtgcaattagtttttaatttcatctatttagtactccatgcatgtaccgcaagtttgatgtgatggggaatcttctttttgcatagtgtcaaagttgggagttgggagtaactaaacatggcctaggtcgcattcgagtcaagattgcatgccgttccattatccgttcggcatgtactcttctctgctccgctcttgtccagttgtgctggttggcttcctcctcgcggttgcccctctttgtacatagaggagtgtcatcgaatatgatacctacacgccgtcaacaaatttgagtttgctgccgtggcatttccctcacgcctcacatccactcccgttacttttgacagacaaatgtgtctataatggccat

SEQ ID NO: 10744 - DNA, 768 bp, Setaria italica
  Peptide Sequence Number=SeqID_76718
cccactagactcgtcataagatggataagctgccttgcattcataggtggttcctgttaggcaatagaatatgccgcagccccttaccatatgctttttctgacaaagatctgcaaaaaacttgaattggtacacatcaacgtcaccatgaagagataaatcaagaccaaatatccaccaacccttgggaagctgcaatgcaaaatagctcttcttctgaggcagaaaccatccacctaaccagcttttgtgacatatatatctcataaatgtgtgcagcccgtcaaaccagtcatggtttccaggaattataaaacactgtggcccatcatattcagacatctttgatacaccgggaggaagctcaggcttatccagagctatatgttcagccctataccaaggtggaggttgcagagcatactcaaagggcctaaagaagcgcctctcatatgtaaatgatgaagggtttgggtacgcgagatctccaccgataagaagtaagttcccacgtggaagagtatgcatagagccaccaattacagtcctaatagatggttgagctaacagtcgagcaactgtatatgatgaatttcctccatcaccagtgtctgcaacaaagtcaaaccaaaggtcttccctttcattgaagtagtcatataacaggtcagcattctgcgcgtcatctgttggtcctttcattgcagcctgcatcatgcgcatgtcaaatcgcccaacaaaagagtcacagagaccataagatcaaat

SEQ ID NO: 10745 - DNA, 1060 bp, Setaria italica
  Peptide Sequence Number=SeqID_76719
gaagaatgttctagtttcctgtatggcagcatggtttcagtataagctgaacttgttcctgcaaaactattcagtatagtaaataaaacactatagcattggtactaatcatgttatattccaaaaatgtggatatcgcacaagaaagcgttaatatacaacatcttcactcagcaaagaacctcatgctgtacaggtttgctgatctactcaactgagaatgatcagaagtagcaaccagatcagagaagacttgagttgctatgttttccaggagcagccactgctacaaggtcactgaaaggatcaccaaacggatttggagctccggagggaggcgcagcgtactgatattggtggtggtacatggtcggtgttggcatcgccatgatctgttgctgctgctgaaaatgctgatgctgctgtggctggaaatactgctgttgtgcctggtagtaatgttgctgctgctgggtcatcagtgccaactgcacattagatggtggtgcgaagctactggacatggcaaacgggtcactggcattggcttcgaaagggttagctgcgccaaggctaccagtgtaggtcacgctggcgatctgcttcctcctcgcttcgtcctcgtagaggctgtcgagtaacagcttgtcaaagcctccagccaagttagtcttaactggttggcttgtatgggtgcttggagcagtgaccagtgccaactcccacccagatgaattgacgtcgaacagattttgagatgctgaccccttgttttggtcatctggagctacaattgcaagtgccaatgcattgctttcttccagttctgtaaccaaagggttcacctctgcatccaggtttaatagatctccagttgtttgctgtggttggggttctggttcaggctcaggttgaggctctggttcttgttcaggctcttctttctcctcttctgctggcttttcgggttcctctggagcttgttggtcataagtcagaagctttggctcctcactctccacactcttgattgagggcgggtgcttctctgatgtactct

SEQ ID NO: 10746 - DNA, 712 bp, Setaria italica
  Peptide Sequence Number=SeqID_76720
actttgattgaagtcctcagtctaattatttaatttcactctactaaaacatttattaaaatgttttgtttagggaatacgttttattttcttctgttatggcaactcttggcattcagatcattgatgattgatgtctgatcctccaaagaaggatgattggaagctctttgttgtggagagtatgcagttatccttctcaaagctgatggagagtattgttcaaacataatgattgctcatctgccttgtcctcttcccttccctcacttcagattcatggtcatgccatccttttcgagcattagggttgaaggcttgaagctgaatgattgcaaacggagtagaagtgtcaggttgtaaactaacttagcaagtgtcaggcttgaagctggatggaaagcatggacaaccaaaatatttaaagaaagctttatgtctatatgctgatgatggacagctagaagaatgaagaattacagaaaggtttattggtgactgctggtgccgatgggggcaggaatatatcaataagagaactcatatttagttttatttattatgccaaacatagttgcaaacttgtagtcagagatgattgtttttattctgttgtggtcatgtttattttagcactatggttattgtgttattactttgcttgagacatatatttcaagttaaaggtttgagttcttatatgtgatgatag

SEQ ID NO: 10747 - DNA, 1034 bp, Setaria italica
  Peptide Sequence Number=SeqID_76721
atgcgcttcaactccttaccatccgtgagtgtagaggtgacggagggcagtcatgcactttattccctttggaagccagccaagtttgggacagtacgcaacattcagcgtttgcagattgtacaaaatgctgatatcttccggaagtgccactatatcactaaacgagatatcaagatacctcaagagatgtagttgctttggtttcagtgggattgtgctattattctgccaaagtctcaatgcacgcagagagctgtatgttgcgagatgctgcagggaaccttctatgtgctgataacatagtagtgtttgcatagctggagaccctatattcagagaatcattcaaaacggcctctggcatgccacataataacaatatatgacgacaagtgttctgaagaaactcatcactctgctttggcttctcagttatggtagcaacttctttgcccatgacagatagtgccacatcgtgcataagatcatggattttacatgtacttgtagtgcaataccaatacacatcatcatttgcttgccatttgtcttgcttcacatcttcaaagaatgaccttgagaccagctcactgaaaatctgtttaccaattgtttcatgacgaacatctttttgttcgggaataaagtcatttgccatccatacttggatcagcctttccacgttaatctcatggtccttgggaaaacacagcacagaaagcaaagcactgcttcatgtgtgatggcaggtcatcataactgagcttgagaataggcaggatttgatcgtccttgttatgggcgatgcttttgctaagcacagcctcccattctttggttgtcttgccacgtagtacagatcctagtgccttcgctgccaatggagaccccgcacatctctcaacaacatcatcaaccaagccagctaaatcagctggttttctctcttgcgaaatgaatgctttagcctcaataatttccttgatgaatttattgtccaaacgtgcaatgccatgttcttcaactgtaccc

SEQ ID NO: 10748 - DNA, 1311 bp, Setaria italica
  Peptide Sequence Number=SeqID_76722
ttttttgcaatcaacatgcacactacgattttttcataattccaatcaaaacaataccatgcatagcatttccagccacatgaaccaaagggcaacaccacataactttctaacactaccaagaaccaatatctctacctgttcgcttcagcttattcagccggcttattagccaccaaacagtgttttactctcacaacaaatcagccgtttcagcttttcagccggcttataagctgaagcaaacaagcccgaatcctagtccagtttgcctgtgctgcttgcaatcatttcaccaatttctatgacttttgcatcttcacttctaaatctttagcagctgtgcatttccgactccagattcttgacacggattgcaatctgctacacatgaacgcaccatcactcagattagcgaaaagtagaagtaaaatgaaaagaaaatccccatgatgctccttcagattcttagaaagtgcattgtggctggtacacagagcttgtactagaaaatattcatagattttccattagcaacatggagcagctattattccccactgggttgatgtctctcatctgttccaagtttaaaacatacgtaatacaagaaatacatgatccacgaagaaatacatgatccataacaatcatagtttaggtgaccagaatgtggacaaccatctatgtgcagtggctaaaagcataattcagtgaagaatctgaattattattgatctaaaaatatagtatcattatgcatctgaagaatctgaataaaagtagtttctcaggaattaaacctaatcagatatagtttacatctctgaaagtgaacatgttgaatacctgaattctgagcagatacgcatcttcgctcttcactaataaaactcatcaatccgtttaaaaaatgaacatggtaatacttcaaagaacttgacctgaagttctggataggaggtgcagcagaatatcctccttgtatccccagactatgcacaagtgagggagataaaattgagaacagagaaatcaagtattgaatgaatcaacaatagaagtgtccacagactgcacatgagtgataatttagaataatttacgactgcacacgagtgcgagaaactgagagcagagaaataagtagtcttgaatcatgtattaactgcagacaacaaagagcagagagtagtgaataagcgccactgcatgttatgataacaaaggcatgcttgtttatcccatatatttagtaagcactgatcattgtacacctttcttttatattacacatacatcttttctaac

SEQ ID NO: 10749 - DNA, 1106 bp, Setaria italica
  Peptide Sequence Number=SeqID_76723
tccccggcgagccacgccgccgcggtcttcgttcggcaacactgaccccttgctggccgtgttgccgcgtgccacgagatacccaccctcacgcaaacacgcacgatcacacacacacacaaacgaaaacgaaaaggggaaagctctcgatcgatctccatggactccaaggatggcgccgccgcagcgtccggtgagggtagtaggctgcgccgtatcatcgcaggcgccggtccagttcctgcccgtcgccggccagcttgcgctgtcgttctacggcgtgcgcgaggagccccggcggctgcagctgctggcctccatcgccctctgctacgcggcggccgtggcgctcgcgttattcgccagacagctggatgcctatcctgctgtaaataatccattatttgcagccctggaacgatccatggtaataactttcatcaggtcttcaatctgctatttcaagcatgccagccgcctcctaattgaatattcccatccttcgtagcgggcatctagtattttctcctcgagatgatccagacgttgctgtaggctcgggggaagcaactttataccaggacaagatttaatcaaaagagatctaagatatgagtaggcttgaggcccattcggtaaggattgcaggcttctgcaattccaaaggccgaggacttccagcgatgggagccctcctaagcaagattccagtgatttcagtttactgcactccacaatttgtaatgtttggagggcatccagctgtcctgatagggatcgaagattatcgcagtcacgaatcgacaagatcttgatggacggaggaagattggcaacatctgacaagccactgcaacacattatgtctactcctagcaattctaggcatggaaggaagggatggctggttgatgatgacagcttcagtacagctgtagacgccctagcctcaccgatggaccctggaattagtgatgacgtatcctcctgctgactgaatatgatggacccaagcatatggctgttgtaaatttctaataccttgagagatgccggtagcttgggaacctgtaccaaagatggacactcttttaaggataagaaac

SEQ ID NO: 10750 - DNA, 588 bp, Setaria italica
  Peptide Sequence Number=SeqID_76724
ggaagaaatggaaaccaacgacaccctgacgcattaatacgaggaatgttcgtatcttacagtctacagaaggacaaaaagcggatcagctgtacgctttccaagatcgaaatacgcgtactgccgcgatgtacaagatcccatgcctcaaatgacacatctggtttccttctatccatcaactggctgtaatcagagccgtatgttcatcagaaagcagaacttagagcaccacgtgccgcctcacgtttcatctctgcggcttttccacttccacggaagtacatgtatacttgctgaatgacagcgatgctcagaagtgattcaaggcagaacaagccaaatccaacaaagtaaaatatcccaacaatagcactcttgcttatgacatcaattgctggcaaaattccactgatgaaacagcaaagatagttagtaccacaaaagccttgtatagttgtatgcactgtaaacaaatagaacatactgtggtcgacaagttcaagaatctgattttgattacactcaaaagcagtgttttaccccgagaaaattagacgacatcaagagtcacagtaactggaattt

SEQ ID NO: 10751 - DNA, 779 bp, Setaria italica
  misc_feature (85)..(85): n is a, c, g, or t
  Peptide Sequence Number=SeqID_76725
caattatcttgctatcctctttcatttccattgagagtctggtggagagaccaagtccataaattaatctctgagagctgctttnttccccgttcatctccagctcttccactgagaattgtcttatagaaagtacatataaagggaaggggcaaaatatgacagagcttatgacttatgtagtagaataatcgaaatcatggtccttgcttctaagccatctctagggaatacgttttattttcttctgttatggcaactcttggcattcatatcattggtgtctgataatactgggagaaaacaactgcaaaagaccatcaaggattcaccagcaaagctcagcaagcttattgactcgaaaatgatgatgccagcatagtagtgaaagcaggagatgctgtcatgccatccttttcgagcattagggttgaaggcttgaagctggacgattgcaaattgagcagaagtgtcaggaaagcgtggatagccaaaatatttagagaaagctttatgtctatatgctggtgatggacagctagaagaatgaagaattacagaaaggtttattggtgactgctggtgctgatgggggcattaatagatcaataagataactcatttagttttattttattatgccaaacatagttgcaaacttgtattcagagatagtgtttttattccgctgtagtcatgtttattttagcactactcttgttattgtgttattactttggttgaggcatgtatttgaagttaaaggtttgagttaactt

SEQ ID NO: 10752 - DNA, 804 bp, Setaria italica
  Peptide Sequence Number=SeqID_76726
aatataaaaagtagtacatgccgtgctcgtattgctgtatacgttagctaggtcactcacattattcatccataataccccacacgcattattcggcatgcacacgcacgctacaagcacccccatcacattcacgcaggtgtgggtggcgccttcttgaacacgaccacatgaggctcgtcggacacggcgagccacgcgcggtccctctcgtccctgaacacgcccagttcctcgcactcggtgggcaccccgcaccacaccagaatgtacccgtggctgtgcctctcgacgcggaacaccctctccctgccgcccgcggtcggggccagcaccgggccggtgacgacgtgccgggggccggacgcgaaaggctcgtcgccgcggccggcgacgtgccactcggtggtctgcacgcacgtcgtcaccgcggcgaagtggatggccacgtcgaaggagacgcgcacggtccggtcgccgccgtggccgtgcagcggcgtgaagcgcacggggaagcccctgcggagcgggtcgtcctcctgcgcgacgaagagcgggcaccggaacgtgtggggggccatggtgagcccgccgccacccccgccgccgctcccgcgaggggccgggaggacgtagtagtccgcgtcggcgctcagctcgtgcccgtccatgtcgtacaccggcgacggggccgcggcgacgcgcgagagggaggcggctaggacggagaggaggaggaggaggaggcgcacggcgccggccgggccgcccatggctgaaaccgttgggcgtagttttgtcttt

SEQ ID NO: 10753 - DNA, 937 bp, Setaria italica
  Peptide Sequence Number=SeqID_76727
cttaaaaatgcatctcgcaaattaacacaggattctgcaattaattttataattagctcatgtttagtcctcctaattagcatccgaacatccgatgtgacactgctaccctatatacaatgtcaccagaccctaacgtgatcatggaaccaaagcacaattcgctttattaaacatcatgccaactgcttaaaaaaaaggcgttggtggatcggagacacattgagaaatgaagagtattcgatgcagcctgtagaactagtcctagttcatgagcctcggttctggaagactcggttcaggacgccctgcacggtaccgcccatgcctgctcctatggcttcagcaaggtacgcggcctcttggaaggttttctgaagatcaagagcatccttgatacggcggttcacaaacgtccatgtatcacggaactctggagaattgtcagtcagcatatacacctcagaggttgagtatataccaccaagcacagtacgcttcacataccaatcaatatctgatccaacatctccagcagcatgccagatctcatcaactaggacagctcgctgcttcaagcttgttgagacatttgctggttgagactggatactcagtgcttgaggccactttgatatataaggtgcctgcatttccagcctcatccgaacaagttttgagagcctctcactcagtatcaagttcttcaactgttctccttctccagcatcaatgcgatccatcagttgttgaaggcagtcatccatgaaaaactcaacaagggcggcctccttccttgggaaggcaccgacgatggccggtgaaatgccgacgtccctggcccctgcgaccatggccgactcgctccaccccatgcgcggcacgtggagcagcgacgcgcggaggaccttctcctgctcctcctcgtagcccgcta

SEQ ID NO: 10754 - DNA, 1267 bp, Setaria italica
  Peptide Sequence Number=SeqID_76728
tcaaccactgaggtggagacctggggagatgggtacacagtgaacccgagcttggacttcttgccatagtcaacagacagacgctcaaggaggagagaaccaagaccagagcctgttcctccaccaacagcattgaagacaaggaagccctggagaccagtgcagttgtcggcaagcttcctgatgcggtcaaggcacaggtcgaacaagtctccttgccaatggtgtagtgaccacgggcaaagttattggcagcatcctccttgccactgatgagctgctcagggtggaagagctggcggtaagtaccagtcctcacctcatcaatcacagtgggctcaaggtcaacaaaaacagcacggggcacatgccttcccagcaccagtctcactgaagaaggtgttgaaagcatcatcacctcctccaacggtcttgtcgccgggcatctggccatcagcctgaacagagcaaaacaagcagcattagagatgcaaatcacaaatggaaacagttagattagataacacaaaggcacatcataaacaagctaataagataactgcataccacacgactgcctgtacgagcaagttaacatctaggtaatataattatgactgatcaataagatctaggaatacatgtacatgagaggcatagacacattctaagccaactagcctagtacactctagtacagcaggcagatctagatcttacaaggaataacaacacataggccatgcctttcaaaccattacatcgaattcatacatcctaatgtatcatgcttaattacagattgcaaggacattatttagcaaatgtacatgaacactgcagaaacctgaatagcaaaacacagccgtcactagcccacttctaactgagaatgattcgaatttttaacaatatctacgttaaattataataagcacatttttccacacaacaagcatctagatctaaacagatgttacgaaccggagactctactttcttaaaatagagaccaacaatgttcagatccacccaagaataagctaaatcagcatcaattaagctaacagatctactgaatcaacaacaccaggtaaaataatgagtaattccggctaattcccattcaaattccacatctgcatacccagatctataataataacaactgcaaatagccaccatttcaccagacctacggcttatgccaagcaatcgcagatctgggcagccaccatcacacacagctagatccgcactagtttct

SEQ ID NO: 10755 - DNA, 626 bp, Setaria italica
  misc_feature (586)..(586): n is a, c, g, or t
  misc_feature (620)..(620): n is a, c, g, or t
  Peptide Sequence Number=SeqID_76729
ggggggggggggggggggggtggggtcttgaaacagaaacatagtgctaacctcacggctcactagctagttgacctgcttattgtggtgtttgaaacagaaacagtaatcattcattcagctaagtcacctgctttgatgctctgctctgagccttggcagatcagcatagtactagtgtagtatgcaatcaaaccatatggtactactaagtagagatcatcctgctgctaagtactaatacggagtataaaccaaaggacggcgaggacggcagagagatgccggcgcatggagaccatggacggcgcttaccagtcgtagacggtgggggagttgggctgcgggcggtcgaagaggttggcgcccatgctcttggtggccaggttgctcccggggtggaacacgctgcgccacacgttgttgccgccgcgcggcgtcgtcgacgacgacggcgtccccggcgtcgtcggggtcgacggcatcgactgcgtccgcttgtagctcccggcagcagcaacggcatctttgtcgatgacgatcggggcgggaggtggcggccttgcggagcttctcgagccccgtntccgggtgaggccccggccaccacgtcgtcccanagcttc

SEQ ID NO: 10756 - DNA, 1347 bp, Setaria italica
  Peptide Sequence Number=SeqID_76730
cgtcgagcagtgctgactcgtgagaaggattgttggttcgcataaaaagaaaaagagttaagctagcgtttcacaatcttaggatgcatgagaaatcgacacgggcagtctcatacttttgctctgattggacttgcagcattttcatgatatgctaggaactgtttggctcccacgtctaaagtttagcacgtgtcacatcggatgtttgatactaattagaagtattaaacataggctaattacaaaactaattgcacagatgaagtctaattcgcgagacgaatctactaggcctaattaatccatgatttgacaatgtggtgctacagtaaccatttgctaatgatggattaattagccttaatagattcgtcccgcgaattaacttagggattctgcaattagttttataattagctcatgtttaatcctcctaattagcatccgaacatccgatgtgacactgctaaagtttagcacctagtatccaaacaccccctaagtagctttgcaatcctgctcagctctctagcttctaattaacttgttctgccccaaacgatagacaaggacaatccaaaatactggatggctagctccatttgcatttgtattcattgcactagtcaattagtggacagatcaactagaacttcaatttatgtcctctgtagctataagagtcccttgcatggtgtgtagagatgatcagagggaattaacaagccatttggagtatccgcactgcattgccaaaaactgaagccttaattcacatgtctcgagctggctggtctcgaccttcaattcccatatctcacatgttctctgcagaaaaattcagagatctcatctccatcagaatattactgctcgtatattgctgctcaagtcgagttcctcaagatccaaagggtgagcgtgcagtcggctcctcacctccaccgtggccgatccaaagtgttccagtgtgtacgcatgctcttgtagtggagggaggcaactcaggattggcgtttagtgtgtgagttctgctgtatttccttatgacatcacgcatcttgcagacacggataatttcttgttttcctgcctgcaacattcggttcttgagtagctaattatgctattccgctacctgattctgacaccatggtagtgaggattagtattgccagcaagattttcttttcacatagctgctggatgcatcagaactacatgcaggttgacactaccaacagatcaaaaacatatttgtcgtcatcctgacaatattttgcttccagtcagtaaaacttggtgacctaagtttaagctatacatttgaatgattttgaaggt

SEQ ID NO: 10757 - DNA, 1805 bp, Setaria italica
  misc_feature (236)..(236): n is a, c, g, or t
  Peptide Sequence Number=SeqID_76731
cttgagagatgctggtaggttgggaacctctaccaaagatggacagaaacttaactgtagagactctagacatggcaggagtccactccgttccggagcagattgctcagacgtttcttgtgtgcgtccagtcagtttgctgcattgccaaatatataacgtcctcaaggataacagggcctggaacacgttttctggccaatagacaagagcgtcgcattcacaaatttttaaanctacgagctgtgcaaaacatgtccatagtggcagtgcacttgagtgggagaacaaaaggttgtatctccgtaaaaacatacgtgtcagaggggatctatgctcccatttctccctgccatgcaccaactcactcgaattttgttcagccaccgattctgtttctgtgttatcgccaaacaacctcaggctggacgatgaagtgatatatctgctagctgcgtgcagggacaatatttgttggctggctccttgtacttctaatacacttagcttaggtgcttcgggtagagtagtcaacgctgggcaactccgaattattagtttctcaagccgatgaaatgttagctcttctcctggagttccttcgccatcctcccatcgctgaaacatctcaagattttctaattccatttccttcaatgctggaaatgcagacttgtactcagtcttgaccccttcagatgtttctttaattactgatgctttcggcaatgcagccagacttttacactcgttgattaacagcttctcaagcagaggaaacattggcatttctcctcgcacctcacttgtgccccaccatatctcaaagtttggcaacttaaaaattgcaaggttcttcagtttctgaaatgtgaaggctgtatcactgctgcacaagtaacgtatgttttccaatccgcacaagcaaagaatttgcagagctggtaactgccagaatgcaggaagattctcgagtcttttgcaatccgataactcaagctccactatgccttgcaacttattcatccatgttggacaagtgtcgataccgcaggaatatatctttagaaccttcagcccatcatgaggctccagaccttctagcacctctttatcactattatgtgcctccttgtcacaatcactccatctcaatgtcaatctggccagtttttctatttccgagttttgcctcttttgcatctgcctctttcacattttctagctgttttagctccagctgaccaccaaggtcatctaaccgcctcagttctcccaccctactgcaatcagagccggcacctgctacaaagcatgtcaacgtctgtagggaagtgaggtatctaaggtcagcaggcatgctctttaactcccaacatccgtgagtgtagaggtgacggagggcagtcatgtacttcattccctttggaagtcgttcaagattgtgacagccagaaaggttcaatgtttgcagatgatataggatgcttatatcttcaggaagtgatttaatatcatagcttcctgagagatcaagatacctcaggtgatgaagaggtccgagtaatgaagctcggttgatctttatctttagtgctcgcggagacatgtactttgacaaaagctgcaagtctacgtatacatctgcctcacatatcactgtttgtataacgtcattatctttatctttatctttaactttatctttagtgcctttctcctgggaatcattcagaaaagtttctaacaataataaatgacgaggtgaatgtggaaaatccccacttttacttagagcagcgcat

SEQ ID NO: 10758 - DNA, 940 bp, Setaria italica
  Peptide Sequence Number=SeqID_76732
tttttgtttttttttttttttaattttataacagctcaacaagcaaacatttcgccgttgctttcaatatgttattctcgctaaactagccttgaagaattcaacgtagtttgctatgctgattctaacagaaagggggaaacaaatggaattgattttcccaagtaaacaatattgtttattcttcggtctgatcagatggaagccatttaagggtgcagccggtaaacatgggcacaatctcccctgaactgtatgtataggttgcaggaaccttccaggcactctttttcaggacaatctttgaagtgttccttgggaggccataaaaatcagggccattgaagctcgtaaatgcttctaacttatctagggcaccagcctcttcaaataccttcgcgtaaagggacaaggcaacaggagcactgtatattcctgcacatccacagtaacgttctttgttccgtttatcatggggagcatatgagtctctcttttcagtactggcaagcagtaattgtgtggctgcaagccaccctgaaataaagcgttcctgttgaggaggagatgcgtggggagtcactgtcgcagcaacatgaccttcttcacatgattctatgaagttcactgcatccatagttgtgatatgttccatgactatttcagctgtggtaagttttgtacaagtggtgccaatattctatcaatgaaaaccttctcacggtcaaatgtgtcaacatgcggatccgtgacttctccatgaacctgaagaaaaatcacaaggtacccataaaagccgctgcataaggaagtgcagcaaaaaataaattaccgaatagtagaagcaagaaccattcaacagattatgtccattaaaggctagtcacgtgtatcacaactccaatcaaaaggtcagtagtgcatcaaggatgcaatgcaa

SEQ ID NO: 10759 - DNA, 704 bp, Setaria italica
  Peptide Sequence Number=SeqID_76733
aacaagaaccaaaaaagtaaagactaaatatcataaatacagtggaatagaaacaaggagtcaaccagatgaacagaacataaggaagacgactagaaaaataggtagacgcatcatcacaagtttgatttgtgctggttttgcttatgctgacttgttttttgagggtccagtgagcctggcgaatttactgagttcgcaactgatctgagcgaagtggatgggatgtttacacgggtttaggggttgtttctgtagtgcgcgagaacgcagaatttgcacggaatataagaacgtaaatagaattgcagattaaattaccgattgtaccttgtgagtttcgctgtagctccatgtctttgcagcggcgatagtagatgctagttccagactcgacgggagaacgggaagcaaaaaggcacagggacaccatgggggaagagaacccggggcaaaaaaacaagccccgtgcgatctcctcccccggacacaagaatattttttataccgtggcctgccatgcgagcgcacccaacatggcaaaggcctctctcgaagtcacatcttttctcatttttctgccctcaacgcacgccgactcgacgccgaaatcttacatgcttcaaccttacctcgcctcttcaaggcggcacggctcacatctcttagatctactaataattatcgaaattcatccaataatt

SEQ ID NO: 10760 - DNA, 672 bp, Setaria italica
  Peptide Sequence Number=SeqID_76734
agtaaatacagcgttcgcttcagcttatcagccaccgaacacgaacaatgtttttctctcgtaacaaatcacccgtttcagcttttcagccggcttataaattcagccgactaagctgagtacaggagcattgttcatcctttactttgaattgaatgttgatcgatccgcattaatgcccatgataaatgagtcgtcttgaatgaattttgcattgctggctttgtaccattccatgcattagtccatactgtactactgtgtgctgcggcgttcagtactactatagtacctttccatttactgcaattttttacatcagtatgccgctgctgtaaaaccaaaaaaaaacacaaaaaaaccctgcagtttaccaagctcaaggacggcctggctgtggggtgcgccttcaaccacgccgtgctggacggcacctccacctggcacttcatgtcctactgggccgagctcagccgcactggtggtggtaaagaggcctcctcgcagcagctaccaccgcagcccatccacgagcggtccctggcccgctccgtccgcgtgcggctggaccttcccgagtccgctgaggcccacgagaagacggaccccaacgggcccaagaaggctcttgtggcccgcgtcttctccttcccggagcccagtcgttggtct

SEQ ID NO: 10761 - DNA, 448 bp, Setaria italica
  Peptide Sequence Number=SeqID_76735
tgacgcagcaggccttcgtgacggtggacaaggacgccccgatcaaccaggacctcatcacgaaggcctgctgcgtcaggatgtagtcgaagcggggagcccacttcctggatcccaggcgagccgttgtggagcagttgtccaccatgaaggccaccccgcgggcgtgcatgaaggggttcagcgagtccaccgactcgatcacgctctcgttgatgatctccgagtaggagtgccccttcttcctcaggatctcaatctgagccatcatcagggcaatgtacactccagcagtgaagggatgcagcgggccaagatcgccctccggacgggtcgagcgcaccttctcaccaaccttccacatgcgagtttgatcaatgttgcccattggaaaagctggcagtccctctttctcataaaatctttcgtaccctaagtacctaaacta

SEQ ID NO: 10762 - DNA, 1066 bp, Setaria italica
  Peptide Sequence Number=SeqID_76736
cgccatgacggggatctccgtgggcgggcaggcgctctccatcccgacctccgccttcgccatggacgccacctcggggtccggcggcgtcatcgtcgactccggcaccgccgtcacccggctccagtccgcggcctacgcggcgctccgcgacgccttcgtccggggcacgccgtcgctgcccaggtcctccggggtgtcgctgttcgacacgtgctacgacctgtcgggccggacgagcgtggaggtgcccgcggtgtcgctgcggttcgagggcggcgggtcgctgcggctgccggcgaagaactacctgatcccagtggacggcgcgggcacctactgcctggcgttcgcgccgacgaacgccgccgtgtccatcatcgggaacgtgcagcagcagggcacccgcgtcagcttcgacaccgccaagggcgccgtcggcttcacccccaacaagtgctagcctggcactgatggcagggcgggcttaattatccggctaatcgccggcgttgttgttaatgactagtggaagagttgttaattagcagggaggcgagtaattagaggaggtaattaaggttaagcgggtcggttgtggggtcgggaggaggaggacccacctggggtctaccctggccctgcagcagctgccggtctggggagacgcgaaaggcgaaggcgaggacagctgatgccgcgccagcctgtgcggtggggtcctgtgtttttttctcggtctttgagtatggatggggtacgtgctcgcgtgtcgtcggggctggggttggggttggggtgggtgtgcatggatgtgcgtgcgtggagccgtggcatgaccaactacctcatgccatggggtgctcctgtgtctatttaaatttcatttcatgtccagaaaaatggaagtttccatccctcggaaacacacttacaagtgactttaatctccaaggccttgtttaggccttgtttagttggtgaatttgggaggtgccaaattactgttacagcactgtagcacactgtagcgtttcgtttgtatttgtgaattattgttcaaata

SEQ ID NO: 10763 - DNA, 1128 bp, Setaria italica
  Peptide Sequence Number=SeqID_76737
cttttttgtctcttgtgttgcctgagcatggatttactttgatcagggtctttgttctgcaaccaggtcataaaaaaatttctacataatttcttaattgaactgacattatttcattgcttataaaaaaattgattcatggacaacgtggagtaggatgacccttgccattggctgcataaggatgattcatggcagctagtccaaatttatacaagcttcaattctatttaattagattaaattatactttatgcaatatcataatatgaggggctttggtacagaactcatttgtttgctcaattattctagctggtttctattagaataatggcaggttgcgtctattactgaaagctagctgtttttactgaatgaggggtaattgttaactttgtattgagctgggaagaacaattgtacttgtatgcatgcgtggagctaatgttttcctatatgcagcttggtcagcagcactacatacagacatatatttcttgaggttttaaatatcaaaggtataatatgagttttggaatatagctacgctgactgcttgcagttgaattctgtgcaaagttgcagcttgtgatagatatgtagcttagctctcaaatggaaatttaggtgcctcgcctttgtttacatttctgctcattggatcctagattgggcaaattcattgcttacaattgaacttatttgagttgacatgcataggataattcatatagatagtaccaatctgctgagcataatttgaccctgtgcaaagctagggagtgctcatttctacttctctatctctatctaaaattgtataccatgctacaccatttggtgtgatataattaaattaacataacatacgtgttcattcataggtgattactgatcagtactaaaacataagcatatgtgtgcctctgaattctgtgtgttcatgaattgcaggaaagcgtcgacagccaaaatatttagagaaagctttatgcctatatgctggtgatggactactagaagaatgaatgatggactactagaagaatgaagaattacagaaaggtttattggtgattgctggtgccaatgggacatgaatagatcaataagagaactcatatt

SEQ ID NO: 10764 - DNA, 1418 bp, Setaria italica
  Peptide Sequence Number=SeqID_76738
ctctcgccgcccctccacgtgccgcccctcgcaggtcctccacccgccgcccctccacgcgccgcccctcgctggagctccacccatcacccctccacgcgagggccggcctttggcggcggggcggcgcacgcggatccagcacgcgagatgcgagatccggcgcggctcctcctctcccctcggctgcgctcctacgagtatcaaggcgaggatccgctccaaccgtggctggactgcatcaagtgggttcaagagtcgttcccgactgatggcgagtgctcagagctggtggtgttgtacgagcagtgcgtgcagaccttctggcacgacgagcgctacaaggatgacctccgcttcctcgaagtgtggctggaatacgctggaaattgcactgatgctgaggtgatatacaaattcctggaggcaaaccagattgggcagggccatgccatttactacatgtcctatgtgtcattgttggaggcaaagaacaagctgaggaaagctaatgagatctttgaccttggtatagctaggtgggatttccatgagactgtcacttgttgttcataaggctcttggatttgagattgcccagtagattgtgttgctataatctatagatattcaatacagaactagatactgagaggtaccaaaaatctagttatgggggactagatactgcagtacagaacaaggagaatgaggaaagagtgattggcaataaacatggagatggcgatgcaggatatgtatgattaatatacatcaaagtgctacaactgggaaattggacctaagaaatgcttagcagaaaatacaaaagacataccaaggattcgtggaggctgggccatacaggattgttttttatttctaggtgctgatttattagctgcatactcatcaggtgcagggagcttctcttgcttccatcctaaagatgtttgacaaaatgccacagttaactagctctgcctctacaacaaggatgcagaaggatgatcatccatttcctggttttttttaccttggtgcctccctccaaccgtgccaccctctccgtctgcgtctccttgacagtggcaggccatgggacaaggaggaagtggtggccactgcagctcaacgatgtggaaaacaggagtacttatctttaattcccttgcatttttgctaacaggtaaccactgtcgcgagtcatttacagtcatgagtcatttatagttcatatggttaatctaaaattgtataccatgctacaccattcggtgtgatataattaaattaacataacatgcgtgttcattcataggtgattactgatcagtactaaaacataagcatatgtgtgcctctaaattctatgtgttcatgaattgcaggaaagcgtggacagccaaaattattta

SEQ ID NO: 10765 - DNA, 887 bp, Setaria italica
  Peptide Sequence Number=SeqID_76739
ttttttttttttgtaaagagtttataataactatatttgatcccaactgctcaaatacatcatcaaatgatcaaaagttgaacagaaattccagttaagtacaaggtcggtcgtatggccatggaatccaaagcaccaactctaaacaatttccaggtaaactaccctactcattcttacgtttgaacatccgaatcagataatgaattaaggacaccagccactgccagaaaatagcgaggtagtttgccttctttggtttcacttcaggccttggcccaaagagacctttgtatagctctttctgcttttggtacagaaccttgtcttgttctgcgagcaaccggagctcccgaaggatctccttgtcttctggggagtatttcttcgctttcaggaaatcctccctggccgattctgtctggccaagttcagatttagcttttcctcgcctgaatagtgctttcacgttactttcgtcctctgacaagacctgaagaataagataacggaaggattggccatcaaatacagtaattttacagacaaagggtaattttgcagtaggaacatgggattgttcaattgattattgatcaatcatcataaaatcagcacttttaagaaagagctgaaaaaggtgcaaaatcagctgtttgataactctaacgcagaaccttgcatgttgatacctgaattcatgtaggccacatgaggttagttgcttaaggagacatgtttttaccaccggaacataaaatcatgtatagtttatgtgaaggtctacgcaaactagaaaaatgcactcatgaatgtaaatcatgcattgaagaatgagttttctcatgggcgtagtagaataacatacgatgctacactgcacaatt

SEQ ID NO: 10766 - DNA, 1010 bp, Setaria italica
  misc_feature (1007)..(1007): n is a, c, g, or t
  Peptide Sequence Number=SeqID_76740
tgctcggatatgctataatattgatgctccaaatgctagacagacgcctgatggatagcctggttcgcggatgtgctattgttgtaatatttatgcaaacaaagtaataccaataagactaaccaaaacaaacctaagactggtcgctttgaatactaactgaaaatgggcattgaaagcagcagctaatcaccatgctacacagtttgcaggcacaggtcgatgcagactttggaactcatgcatcaaaactcttctaaccggagacgaaggacacacaaaaagctggtcacaactggtagaggcaaaatcaacatgagctttcactgctcatgcatccttgcttggactggctcgtatcgcagagcatctgcaatctctctccatttactgttgcatgtaaaggtcacaaaaaggtcaggagggccatagactctgcatatggccattgcgtcttggtagttcatcacaaaaccttgagacgctggtgttcaagcccacgaagcctgcctgagatgctgctgttcaagcccacgaagggggtgtttgatacaccctgctaaaatttagcatatgtcacatcggatgtttggatgttaattagaagtattaaacataggataattacaagactaattgcacagatagagtctaattcgcgagctattaagcctaattagtccatgatttgacaatgtggtgttacagtaaccatttgctaatgatggattaattaatcttaatagattcatctcatagttctgcaattaattttataattaactcatgtttagtcctccttattaatatccgaacatccgaggtggcactgctaaagtttagcacatagtatccaaacacccctgaagtcctgagatcctgctgacataatccaagaagctcacttcctacaatgggcgttcctaggcctaggtcaccgtctccatggccgcctctgcacctgcaccagaagagcaagaaccggcatatcaggtcaaggcacgtanagg

SEQ ID NO: 10767 - DNA, 893 bp, Setaria italica
  Peptide Sequence Number=SeqID_76741
tttttttaaccgaacagccttccaatttgctccacactgagatcccggagcagaaaaatttagagttcttgacagccaacttctgagccgacgttttgctcatgaaacaccacaacttactacatccaacctctcacgcgatacattccacgagcacctcttctaagaggttgtttggttccatggactaaagtttaatcgctaccacaacgaatgtttagatactaattcggaggactaaatatgagctaattataaaaccaattgcacgctaatttgcgagacgaatctattaagtccaattaatccatgatttgacaatgtgatgctacagtaaattaattagtcttagtagattcgtctcgcgaattagcctccatctgtgcaattagttttataattagtctatgtttaatactcctaattagtacctaatatttcgatgtgataaggactaaactttattagtccgtggaaccaaaccccccttaaattctcttagaatctacaggcaaattacagctgagatgcgacgttagcaggctggtaaaaatgtttgttcagacccgagcctactgcatgcctacgcttcttcagacacacatcgatggagcagccaaattcagaggaaacagagcgaccagccgactgccgcctagctcaacgcgcgcgatctgcaacaacatgcggagcgcctcgtcaccttcacgtctgcttcggatgctgctgcttctgatcgccctgtgtgacgacgggaaccggcggttggtccgcttctgctcctcgccgtgcaggagcaacttccatctgctcgggcggcgcggtggccatgtgagcgaacgccgccgcggccggcggcggcatcgcctggcccgggcaccgccgaacatcgg

SEQ ID NO: 10768 - DNA, 788 bp, Setaria italica
  Peptide Sequence Number=SeqID_76742
cacatcgaatgtcacatcgaatgtttggatactaaaaatattaaatatgaactaattacaaaactaattgtacagacggatgttaatttgcgagatgctattaagtccaattaatccatgatttgacaatgtgatgctacagtaaccatttgctaacgatggattaattaaacttaatagattcgtctcgaaagcttctgcaattagttttataattaaatcgtcttaattcgacgcgacaggaatcaaacacgaccttagtcacgatcgagatcgatcgaattctccggtgtcatgactccacggcctcggggatgctctgcagcgcgggcttccagtgccagtgctcttccctgtggtggtgcacctccccggagttcatgatgtccgccagcagctgctccgtcgaccgccggctgcccagccctagcactggcagctgcaacccatggccgccgctggccctcttctccatcagctcgtgcagctgcctcttggtgatcctgatggtcacctccgacgcgtgctcctccggcctctcgtggtgacgatggtcatggtggtggtggtggtggtcgccctcctccgaggacgaggcctcctcctcccactcgccgtcgtcggcccacgactccactgcgcgctgcgacgccgtgcagttccccatgaagaaaactatctgcttggaggcggaccggcttgatgaactgcctggcttgagctaagaagctccttccttgtttgctggattctctctctcttgtagcattaggctgctttgagatgaa

SEQ ID NO: 10769 - DNA, 1151 bp, Setaria italica
  misc_feature (1143)..(1143): n is a, c, g, or t
  Peptide Sequence Number=SeqID_76743
gcgtgccaatcaaatggacaagttctgttacaatctgcagcaatcaagctaacctccatggaaaaccagtgctcaacttctaattgatgaactcactgcctgattcgtaatttaacctaagtaattacgttacaagcagaataaactgaggcagttaacaaccagcaaagagattaagtacagaacaacaaacacctggggactttggggcacaatagacaccaccaggcaatataaccaaccggattgttcacttgccaaaatcttcagcttgggtaaaagcatcatcagttccatcatcacagccgccaagaatagctccttgttcacttttctcaacacgatcaatagaatccatcgtacaggaatttggaaagcctctaaagctctacaattgctcaataacaatttgccaagtaaataaagtatgtcccaaatccatcgatatggtaaacaatctaattccatcaatatatggtaaacatctcaaatccatcaatatacggtgatcattgaaatacatatgcaatgcatatagatatggtaagagagaaatgacatcgtaagagaaactcgagttgattacagaccaaaagtaagctaatatcataaatacagtggaatagaaacaaggagtcaaccagatgaacagaacataggagcgctgaaaaatggtagacgcatcatcacaagtttgatttgtgctggttttgcttatgctgacttgtttttgagggtccagtgagcctggcgaatttactgagttcgcaactgatctgagcgaagtggatgggatgtttacacgggtttaggggttgtttctgtagtgcgcgagaacgcagaatttgcacggaatataagaacgtaaatagaattgcagattaaattaccgattgtaccttgtgagtttcgctgtagctccatgtctttgcagcggcgatagtagatgctagttccagactcgacgggagaacgggaagcaaaaggcacagggacaccatggggggaagagaaccccggggccaaaaaaacagccccgtgcgatctcctcccccggacaccaagaatattttttataccgtggcctgccatgcgagcgcacccaacatggcaaaggcctctctcgaagtcacatctttttcnctattttt

SEQ ID NO: 10770 - DNA, 1705 bp, Setaria italica
  Peptide Sequence Number=SeqID_76744
ctgaagagatagagagctactatataattaagacagccaagagatggaacagagcattcccactccggagcatcgatcacacacggccagctcttcgaagctagaacgctctcggcttgcacacgatggtggagtgcttcaagatgtggaggctgaactggcctcccttctcggtggtgtcgatcttgtcctggccaggcggcggcagcagctcgaagttctggacgaggcgtccgatggtgatgccgaggatggggagggcgaggatgatgccggggcagctcctgcggccgacgccgaagggcaggtacctgaagtcgttgccgttggcctcgacgtgcctctcctcctccaggaagcgctccggccggaactcctcgggccgcctccagctgtcagggttgttggcgaggtaccaggcgttgacgaggatcttgctctcggcggggacgtcgtagccgccgagcttggcgtcgtggaggttcatgtgcggcaccagcaacgggatagccatgcgcaggcgcagcgtctccttgatcacggcctgcaggtaggggagcctgtgcgtgtccggctccgtgatctggtggccggggcccagcgccgcgtccagctcctgccgaagcttccgctggatctccgggtggttcaccagctccgcgatcgcccactcgatcgaccacagcgtcgtctcgatcgctgcaacgttaatgttctcgacgatgtagagcacgttgtcctcgttgatctcccccttctgctgcgcctccaggatgtgatcaatggcgcacttgagcccgttgttcgtccatggccttggtgctcgctagcttcttcctctcctcgaggaagaaatccttgaagagcttgagacgtgtctccttgacctccttgcagatcctgaggtagccgcggaggaacgggcggaggatggggatgaagtcgccgtagttgtactcgaagctctgcgcgaggcggctgcgctcgccgttgagcgccctgaggcggaggaagagcgggtcgtccatgctctcgaaccgccggtcgaacatgatgcggtacatgttgttgtacatcatgagctgcaggcgtcgccggagcacgacgccctcggtggcggcgctggggtcggcgcgcacgtcgtccaccacggcggcggcctcagcctcccacccggcgcggtactgctgcacgaccttgttggtgaagaagggcacggtcatgatgcgccgcatcttgcgccagtggtcgccgtacacggtgaacaccatgtcctggcccttgccggtgaagatgtcgaagacgacgttgcgggtgcgggagccgaactcgacgccctgggtgtggagcacctcccgcgccagcggcggggaggagaccaccaccaggttgcgctggcccatccggaggaggaagatgtcgccgaacctgcgggccagcgcggcgaggttgcggtggttgaggtcgtccccgacctgcagccagttgccgaagatgggcacggggacggggccgggaggcaggcggagcttgcggccgcggagcttggacaccgctatggcgaccacgacggacgcgaacaggccgatcaggagcttctccgcgaagcggaggtccatggcgacgaagccgggatggatggcgggcacgctgccctcttcactgttcttgtgtgtctctgttgtgttggcgcgctggaacggcg

SEQ ID NO: 10771 - DNA, 945 bp, Setaria italica
  Peptide Sequence Number=SeqID_76745
cacaatttggaccgccaccacaatctagccctcctgccttacctccaaccaattattcaccttcaccaactttgagtccacctgctacacctccaacctatagccaatcacctccatcagtatctagcccccctgcaacaccaccacaacaatctagttctcctccaccatcctcaaataccccaacaacgcctccaacatatcagccaaataacccaccacctcaaccaccctcaacccctcctaccttgtctcctccacaatttggaccgccaccacaatctagccctcctgccttacctccaaccaattattcaccttcaccaactttgagtccacctgctacacctccaacctatagccaaccacctccatcaccaactagtccgtctgcttcacctccaaccaatcaagctaataaccaaccatcgccatcgccaccaatgagctccatcacacctgcaacttcaccagggtacaaccagccaccaccatcaccatcacctagttcccctggtgcacccccaacaggccaaactcaagggcaagcaccaccatcatatagtgtcccagattggactaaagggtggcaacaaatatacaatttccatgatgccttgtactggcagattgggaaatctgttgtgcagcagttgacaaaaaataaccaataccttaatctcgttgatgtgctttgggcaagcatgatgcctgctggcattggaaacaactacttcctggtgctgaaaatggcagatgaatacaagaaggttggcaagtaccacacatttgtgtggggtgtgccccaacaacaagaatttcaatggaaagtgttgtccttccaatacataggaaactaaggtgtcgcatccatgattgccattgcacacttaggaggacacattatatgagttgtgctagtcattgtgttgtagcttcgtttga

SEQ ID NO: 10772 - DNA, 1010 bp, Setaria italica
  Peptide Sequence Number=SeqID_76746
tttttttaactatcgatctgcaatgagttttaaatcctatgtaagattttgctgttttcatacacttcactggtgcagaaaacgtaaaacttcattcgtatatcctactactacaaaagtcttaatagttcaatcaatggcacccaatcttcactctttcctaatatatctacagccaaaaactccaccagagtctaaagaggttgagacaaatttcatgtttagtacatgttatgttttcagctagagctgttcattgatcgtggagcacattctctagcttcttccaggcaaacttggtcaggcggtggtggattccccatatccctagtcttgtggagtagaaaggtcccagcaacaatggtcacaaacccacatagctgcgtcgcaatctgtgttgcggtttgtgaggcccagtccttatacataatcatgttagcaaaaatggtaagaatggtgaacatcacatagtatacaggagaaaccacagccgtgttgaacgagtccaaagccttgtttaggtagttcaactgcaccaaacagcaaatagtgacaactactatgaagaaccatgtctgaacgtagatgaattgatttgatccactaaatgatagctttaaagcaatggcaactgcttttacactgataaccgtaagagatcccattaatgaacagattgctatataaaccagcatcaacctgtgtcctgagcgttcaaccacccggaatatacaaaaaaagaacacaggctaccgccacacatgaataaacaataaaacctggctgcgttgcaagatgccatatttccttcattgagtcaatctttctctcctttggggcatgcaaaactataccaatcgaaccaacaacacatagtatgcaaccaacaacaccaaacatgtgcaaattctctttcagaataaagtgtgcgagcactgcactaaatatgatgcttagagctcctagaggagtaacaagtacagcaggggcaaatgcatatgctgcaaagg

SEQ ID NO: 10773 - DNA, 1192 bp, Setaria italica
  Peptide Sequence Number=SeqID_76747
ccagttgctacaggagtacataaatcagtcatagatgacatgaaatgcagcatatgccaggaagagtacaaggagggtgaagaagttgggcggttgccatgcgaacaccggtaccatgtgtgctgcatcggccagtggcttaggcagaagaattggtgtccagtgtgtaaagcgtcggcagtaccttctatggggtaatccaaggtgttcaagcttgtaaattaccagtatgtgtctcgagtccatgcatgactgttcatcagttcatgtgaacttgtaaataacatgggccatgtccgctcaggtttctggacatggcccatgttatttacaagttcacatgaactgatgaacagtcatgcatggactcgagacacatactggtaatttacaagcttgaacaccttggattaccccatagaaggtactgccgacgctttacacactggacaccaattcttctgcctaagccactggccgatgcagcacacatggtaccggtgttcgcatggcaaccgcccaacttcttcaccctccttgtactcttcctggcatatgctgcatttcatgtcatctatgactgatttatgtactcctgtagcaactggacaatatatgcttcttcttaggcatttcgcgaactgctcatcagaaagggctgtgcttacagaacctattctctcttctaatgccaataattcctcataggacatattgtcaatatccatccgcatgtctctatgccgatcatgggaggcaaatgcaccaaggaatagattagtgtctagcaccagcaattgctcataagccagctcagcttcttgttcagtcctctgcaatgctagtaaaacctcagcaattcctcccatggttatgcgtctatgatcatttctctcgcccatgagaccatggaacatttgtggaggactttcttcaaaaagggagcttggtctccccctttcagctcgagtattcgagctatgatgacgactagatgagtaaatgtcatgaggtaattccacaaagaatggtcttattgaactctcggcagagacttcttccaatgaaagatgctcctgagctgacagcccattccttgtggatgactcatgcaaagaaagcatgccatctgctctttcatcaggagccctcagtgtagtggcatgagaaggtcgtcttgtcctaactgaaa

SEQ ID NO: 10774 - DNA, 665 bp, Setaria italica
  Peptide Sequence Number=SeqID_76748
tatttaatttgtaaatgtaaatatggtgtcgggacaaaagaatcattttttaacactcgcaaatatgtgatttttgcgaacatgtactgcttaaaatttgtggcatgcttccaagtttcaatagttaatgatctttgtaattacaaagctataaatctttataattttctctataattttaatcaaataaaaaatagtaggagtattttcttgcttccaatcccactaggcccagcagcagagtcatggcacatggcgcatctggttccccggatcacatattgaattttcgatgcttttgccgaaggatgcattcaaactaaccggatcatgttgtggccgtagatttgttcatggacagtgcatccaccgtggtgcaagaacaccgtgccaccatggccgtcgagcctctttccatggtgcctcttgtgagagagggagaggatccaccgtggtgcataaacacggtggccgtggagcctctttccatgtagcctcttgccgagagagtaccatggctgcctcctcttgcgaaagaggaagaagagagggtctcctcctctatcgttcttctcgacgggaacgagttgtaggtagaccgagagagagagtggggaggggaaaggacctgcctaccccggtgaccctatctatgaggggatggg

SEQ ID NO: 10775 - DNA, 1141 bp, Setaria italica
  Peptide Sequence Number=SeqID_76749
ttttttttttttttaaagttcaacaacagtatatatatatatgaggattgaggattggatacagtatattgtactgtatacataatacatccatggttatgacatgatatattcgaagcatgcgtgcattctttgatctgtattgtatggatcgtctgcagcttcaggcaggcagcggcatattatgcagttaggggttgtttggctccctaggctaaattttaactcctgttacatcggatgtttggacactaattagaagtatcaaaaatataggctaattacaaaactaattgcataacccttaggctaaattgcgagacgaatctattaagcctaattagtccatggtttgataatgtagtgctacagtaaccattcactaatgatgaattaattaagcttaatagattcatctcgcgatttagcctagggattctgcaattagttttgtaattagctcatgtttaatcttcctaattaacatccgaacatccgatatgatagggttaaagtttagcctctggtatccaaacacccccttaatcgatcggtagcatctacaatctgctgatggtagcggcggcggcgtacttcttgagggcgtcgccagcgttcttgaggttctccgggacgggcaggttgcagagcagcgtgaccctggactcggatatctgaggacccttcttccccggcgacgacgacgatggctcctgcttccatagcttcacctcccacacctgggttgagcggccgacgtggacgggggcggcgcgggcgaggacgacgtcccccacggcggcgctgcggaagtggttgatgctcaggctgacgccggccacgcgccggtaccccgacgccatgtgggcgcccatgctggccaggccctcggcgatgagcgccgagacgccgccgtggagcaccttgaagggctggcagcacctggcggtgacggggagccgccccgtcagctgcgacggcgaaacctcctcgatctcgaaacccagcgagtggagcaccgggtcgagctccgccgtcttgtcgtccttgctgctgatctgctggcgctgctgatccatggtccggtggtgggcgacggggaggaagaggaggtggtttggtagtaggtggattattattg

SEQ ID NO: 10776 - DNA, 886 bp, Setaria italica
  Peptide Sequence Number=SeqID_76750
cgtaatgggaaacgccgctacataagcagctttattgtgttctgatccaaatccaataagaatccaagtcccagttattcagaattcatcagatagttgtctttctaactcaatgattccactttataggtgtgtaacttacaaccagatttcaacagaactcaccgctaatatcaaaatgcaacataaacactaacagaacacttgcagaaacatcctcaactctcaagatttatcagacttgggaggaggctgcgcagcacctggcagtggtggtgacatcaacacaagatgcttatacatcctccaccagttctctgacgcttcatcgactgtccggaaggtccagatgtgtggcttggccttctcccgcgcgatgaggatctcctccgcctctgcagcccgcttcgtcttgagagcgaggcagtccacaaggtcaccccacttgccgaagcagttgtcaaactccccataccggtagtagttctgcatctggtggaatggcgagtagcaaaaccacagagcatcaaagcactttatgcagtccggccgccgctgcggcatgctgctggttgtctctggcttctctttcgcgtccataatcctatcgtaggtcaccagccaactgctgattctccaccttgagtgtagcagagtcgcggatcttcttcgtgggcacgtcgaagctggagaggatcctcgggcggaggtccttccccggtggggagtggcactgatgcgtcctccggcgggcggcggcggcgctttgcgtgtaggcatcggggtttggttgggatggggcggtagggcaagcagggggtgacggggtggggacaggtgtgttgttggactgggccgtatcgcaaagttggcctgatacgtatca

SEQ ID NO: 10777 - DNA, 1068 bp, Setaria italica
  Peptide Sequence Number=SeqID_76751
ttcgtctcgcgatttagcctaggggttctgctattagttttataattagctcatatttaatcctcctaattagcattcgaacgtgtgatgtgacagggctaaagtttagcccgtggcatccaaacgccccccgtactggttctacaacgtgaccagcattcaaaattcactgtagacctatgaattatctgagaagctagttgcaacgaaagccttgtttttcttgtccccctgagaactgaacacggcttccactgtatcatgaggccactgcaggtgttgctgcacgaggagcatccactaaccgctcaagcatttccaattggtcgtaaggtgctatctgactaaatccatcgggccaagttatagaaacagcgtagtttcccatcggcctaatctcttcaggctcaatgtcgtctggtacgtcgtcgtactgaattttctgctctcctgtccactcatccacgctttgagcagatcggtcattccgtctgactgttgctggatgcaacaagaactcttcatctgaatctggcactttcactctgattgctctaattgatctatcataggacactgctgttgagacttgttgcctaattttagcacattgttgaacaacacaaactccaagattttgaaatgtcttagcaacatctccttggggatcagccactacttcaggaattccagtatctccagaagctgaaagagttggccgtattggcaaatcgaagaggttaggtattccaaactgctgcacaacctgagttccagagccttgtccgaatgggtaataccgctttccatcagcatcaaagtagcacatgttctcaacaactgcaacacaaggaaccttcagcttagagaacatccttactccctttgcaacatcaatgaaagctagcttctgaggcgtggtaacaataacagctgcagtcaatggagctacctgacagagtgttaagtgtatgtcgcctgttccaggaggcatgtcaatgacaaggtagtcaagctcgccccagtcagtagtggtcagcaactgattaatgactcctgaaaccattg

SEQ ID NO: 10778 - DNA, 1290 bp, Setaria italica
  Peptide Sequence Number=SeqID_76752
taggtttacctagaaatactacaaggaatggttatctgatggggtttttttttaagtacttggtgctgtatttcctttgggtcacaattctaatttcctatcttaagattaatttttttttgaggacatcttgagattaactaattagtcaatagtagcttaccttacaccggcctccgttgttacttggccaaattgggaggtgccaatagcaacactgtagcgtttcgtttgtatttgtgaattattgtccaaacattgactaattaggctcaaaagattcatctcgcaaagtacaacaaaactgtgcaattagtttttaatttcatatacatttagtactccatgcatgtaccgcaagtttgatgtgatggggaatcttctttttgcatagtgccaaagttgggagttgggagtgaagtaaacaaggggttagtcaaaacgacctaactgacagagtcacagagcacactttttttggtggggaaagtgaaagctgacagaatgcattaggttagcattatggcacaattaatattaaagcaagtactatcatgttaggtctccgaagaggcggcaccagcatgtgatgtgatgcttacccgaggacagcgaggaccgaagctacggccaacagaacccattgatagggcaggtacttcttgctggtgtacttgacgtcggagggccggacatagcgctgcatccaaccgtaatgcgggcgcatcaggaagatgaatcccaggaggaaaccggtgaggaatcctccgatgtgggcaaagttgtcgacgtgcgggaggatgccgatggcgaggttgatggctatgacgaccaagagggtcagcaaggctgcagccttgtttgagtagatggtccagttggtgaagagctcggatagcattgctccaaggagtccaaacagagctccggaagcgccaacagagatgttgttcctgatgaacagagatgaaagcacgctgcctccaacgccggaaacaatgtagataatagcaattctcacgtatccaaattgttgctcgagtctgagtccgacgagcacgaggctgagcatattggctagcaggtggacaactccagcgtgcagccagatgcacgtcaggagcctccatccctggtgctcgtgcacgactttgtcccacacaagtgctcccagcttctgcagcgtcgccgacgatgggccgaggagcgggttctcgctgagcggctggaaggcgaagcggtggaggaacccgcgggcgacgcaggcgccgcctcggcgagtcggggcgg

SEQ ID NO: 10779 - DNA, 1746 bp, Setaria italica
  Peptide Sequence Number=SeqID_76753
cttaaatttggcttacattccataataattcatagtgcattagttagtaggtaattaaggtaaccacatatatgaacagtagagaagttgatggattacataattgcaagatgtctccggctatatacaaagaattgatatattctattccataatgaggtcactcaagtaaaacatgtgtattcacaattcacatgacacgccccttgagcaaaactagcagccctaagagcaaaggatcccatgagcagaaagaaacctgtagcaacaaattgcaatatttatcatgaccacatcgatgataactatcagtatagtccaccaatcacaattataagacatttttgaagtataaactgagtctcgttataaacttctggatgattgcagctcttcaattagcttgctttagtagcagagaacattatataaaatccacttctgacaaatttgaaatcaaccagcccacatgctttgcacagatcttcaagctccacttcggataagaaggtattattgccaccaatttggctaatgtactgcaagataattccaagataaagtgtaaggcaacacagctgtgcaaagtaaatccacagatagaagcaccagattatccaaagtttaatctcccgttgctgcgttggatgtgtcaaaaaacactaaaagatttacttgggtttaactagttgatctgttgttgtcacatggccaaaaaccattaaggcgtggatgattaggagaaggccattaccgggcgtgcgatcctcaatatcggaatagctggcggaataacatctgctacgaatgtagaagcaacaaaaattccccctgagcgaaggactctactaatttctgcaacagcacaagctggggatggccaacaatgaattgcagcacctgcatgcacagcatcaattgagccattcacaaaagggagcctggatatgtcagccctcaccaatgctaatctcctgaaacaaaaacagagtggcattagagtctgcatttgacattacaataaactaataaccacggctccaaaactagaaagcacgaatactgacatgatggaataaatgacaacttcaactcaataaataaaacatgacaagtagttacagaaagaaacctaatgatcaaagccatactcatctgaaatattttcctgcttgacatattcattgcactgcttcaacatattctccgagaaatctagtgccacaacaagtgaatatagtccgctcttaacaaataatcttgaaaacaggccacttccacaacttgcatcaacaatagtccctccaattgttgggttcaaataagtttttgccatttcaaactgcaggtacagtaatgttcttcagacagtccgaaaatttatatgcccatacaaatgatacataaatgcttaaatgtagatctaagctgttaaagaaattgaacttggctcaagcttgattgtaattttacattagaggcttggttactaagggacaaggctgcagcctagccaaaacccaacgcacatgaaactgaaggtggctcagcatcaacaacccaacaaatgcagcgggcacagcctggataccacaaggccacttttttttagcctggcccaaccaagaaacttctcaggtctaagtaaaatacagtgatcatatgtttttcaacacttaattgcagcttaccaccaagaattaaaagttaacctaaattacgtaactaagtaccctaactttagta

SEQ ID NO: 10780 - DNA, 1432 bp, Setaria italica
  Peptide Sequence Number=SeqID_76754
gtctcccaagaacgaagtctttttgccagttttcgaaacagtctgcagaactgcatccggtgttacgttacccttcactgtgaccttctgctccttgatgtctacttcgtaagactcaacacctgatacaaccacatgaccaatgcatatgtttagattgcaacatactgctataaattaaaatgaccgaggagtttaaaccgtaagacattggtcctgttcgcttcagcttattcggccggcttatcagccaccaaacaatatttttctctcacaataaatcagccgtttcagcttttcagccggcttataagctgaagcgaacaggcccattgtaagaagtagatacaagcatattaaattgcgcaatatgttaagcgttaaactgcaaaaggttcaatcgaactagatacaagcatatttaattgtgcaatatgctcagcgttaaactgcttcttccacttaagtcggtcatttaaggctagaaagcaactggcttacaagttggaccaataacatatgataatgctatagcattgtgattccattacaattattcacagacagatatattcagagtagcactagccagcaggttagaagttgaagttcagagtagcattggcgataaaattgcattgcagaaactgtagaaactactcccttcgttccaaattatgagttgttttaactttctcctaagtttaagttcttacttttgaccaagttatagaaaaatgtataaatatctaaaacatcaaactagtttcattagatggaccatgtcatgtattttcatagtgcatttatttgatattgtagatgttaattttttttgataaacttagtcaaaattagataagtttgatttaggatacagtcaaacgacttataatttggaacagagcgagtaaatgtttccatcctttgaaacaggaagttcaaggaaaactgaacaacatcctaccttctctaaccacatacaagttgttaacgacagattcactgaattggctcatctacttggtacgtgtaatgaagaacttttgcaaaagcatgccaagtttgttctaaagattctataggccattttaccagagcctaatccagcaccagctgcatagcagggtggcaggattgctagaggcagttgggatttagtataagttcagaacaagcgcaacagaatgttgtatccaattccagacttacacttacaaattgaaataactaacaatcagaaaacatagaaaatattaagcaagagaaaccgatcaaccttccattttgcctagaacccgcttaacagctccaacacagccttcacaggacatgccaaccctgagtacaacagtctgggccatcgcgcgaggggaaaagtgggctgatctctccggagaggggggagcggagggaacacggcgggatcggg

SEQ ID NO: 10781 - DNA, 1247 bp, Setaria italica
  misc_feature (549)..(549): n is a, c, g, or t
  Peptide Sequence Number=SeqID_76755
acggttagcaaacacatcatcaacatgctaacatttgtgcaatgtggattataatatccatcataggtgtttgtccggcaattgtaattttatggacattacagcacatctgatcaccagactactctattcatcaggtctatccgacatttggagcatcaaatattatagcacattcgagcaacatggctatcctagcaatcagaggtacctatcagtcataaatattacaacagtagcacatccgcgaacaatcagaggtatctatgtcataaatattacaacaatagcacatccgcgaaccaggctatccatcaggcgtctgtctagcatttggagcatcaatattatagcatatccgagcaccctaaatctatatgcaacaagtatccatagctaccaaacaacctagctggtcgctttgaatactaactgaaatgggcattgaaagcagcagctaatcaccatgctacacagtttgcaggcacaggtcgatgcagactttggaactcatgcatcaaactcttctaaccggagacgaaggacacncaaaagctggtcacaactggtagaggcaaaatcaacatgagctttcactgctcatgcatccttgcttggactggctcgtatcgcagagcatctgcaatctctctccatttactgttgcatgtaaaggtcacaaaaaggtcaggagggccatagactctgcatatggccattgcgtcttggtagttcatcacaaaaccttgagacgctggtgttcaagcccacgaagccctgagatgctgctgttcaagcccacgaagggggtgtttgatacaccctgctaaaatttagcatatgtcacatcggatgtttggatgttaattagaagtattaaacataggataattacaagactaattgcacagatagagtctaattcgcgagctattaagcctaattagtccatgatttgacaatgtggtgttacagtaaccatttgctaatgatggattaattaatcttaatagattcatctcatagttctgcaattaattttataattaactcatgtttagtcctccttattaatatccgaacatccgaggtggcactgctaaagtttagcacatagtatccaaacacccctgaagtctgcctgagatcctgctgacataatccaagaagctcacttcctacaatgggcgttcctaggcctaggtcaccgtctccatggccgcctctgcacctgcaccagaagagca

SEQ ID NO: 10782 - DNA, 1210 bp, Setaria italica
  Peptide Sequence Number=SeqID_76756
actcctttgaaaagcatccccatcccaatggcgaatctgcgcaggttacgcagcacaaacatgagttcaaatttacgccttgtttacttggcaaaattgggaggcgccaaattactgttacaacactgtagcacactgtagcgtttcgtttgtatttgtgaattattatccaaatattgactaattaggctcaaaagattcgtctcgcaaagtacaacaaaactgtgcaattagtttttaatttcgtctacatttagtacttcatgcatgtaccacaagtttgatgtgatggggaatcttctttttgcatagtgtcaaagttgggagttgggaggtaactaaacatggctcatccacacaaagatacatagaagtacgcagcaaagcgccgtcagcgacgtcagcacgcccttgtgcccctgcagataacgtccagaggagcctgtcggcagcaacctgtcgaggtactcgctgacagtggtgtactcgacgtccgggtagagctcgccggcggccgcccccagcgacggctcgatcttgaagtttgtctcccccaggatgtacgccgcgtgcccgatcgagagcgcgatgcccagcgcgtgagaagcctctcggatcatcttgaggacggcgtcctcggcgacgtacacccgcaggaacgtccggccggtcttcttctcccacatcgacagcagctcgttgtgcgacagcgtgttggccggcggcttgacgtacagcatccggcccgccgcgcgggggtcggcggcggcccggaccgtgtaggcaccgacgtcctcctcggccacgtacgacaccttggtgtcgccgccgccgaggacgacggcctcgtcggcggggggcgccggggacagcacctgcccgacgctgggcagcgcggcgccggcgaggtacccgcacagcacgtaggtgtgcgggacgcccgcggcctccacggcgcgccggacggacgccttgctggcgtagacggtggacctcgccggctccacggcggcggtgtggtccacgtccgtccagaactccgacggcaagaacctcttgacgccgccggcgtccttgatggcggcgatgagccgggtctggtcggcgatctgccgcgtcccgagcgcggagatgacgacgtcggcggccttcatggggcgcaccaggctggtgtggtcgtagaggtcgcccttgacgagcgtcacgccgg

SEQ ID NO: 10783 - DNA, 1108 bp, Setaria italica
  Peptide Sequence Number=SeqID_76757
aaatcatacacataggcgactgccgaattaattaccagggtacttgcatggacattcgagttcaaaatacacctaaattacaagccgtcatgcggaaattaacaatattacaggagaactacaagccataaacactagagcgagccattgggaatcagcagaaacggtaacaaaaaattccataacaatgtccttgcattgcaacgcatcctgatcaaatggtccactgcataactcacgaaccgaggcggtacatgccatcagccatgaacgtgccatccatgtagagcgcagcggcgttctgtgggtggaagccttccatcatcacaaaaggcatgtcctccgacggcttccagtgtcgtttcctctggttgatgaaccagttgttgatctgcttctggtctaggcctgtcgactccgccagcgcaatcttctccgtctctgatgggtaaggccacttgtagtgcagctcccaccagtggagcaacttctgcctggcctcctttgggagcttccctttcttcttttcttagaaaattcttgcctgaggctgctcaagtaaccactgtacttcttcaggagctggtacttgagctccttatcctccgcgcgtgggtcaatctcaggtggctcgttctcacggccgcttggatccatgtcatcttcagaagagccaaccccttctgatttgccatcggcgagggagaggcgcgcggcggaggagccgccgccggtggcgctgccggcgatggaatcgagctgcgcctcgacgcgcttgaggaactccatggcctcgtcgatcggccgggtcagctcctcccggtacttcaacagcatgttgcagtaggcctccatgaactggtcgagctccgggtcgcgcggctcgtggcggcccggcggccgcgcgtcgagcttcgccgccatggccgtcagcctttccatcacgtccggcggcgcgcccactttttggcagtcgaggtaggcggcgaggagcgccgagtactgcgggtgcgccacgatcttggccttgatggcctcggcctccgccggcgagatctccgccgcgtgcctcccgtacggcgactgcgacgacgatgacggcccagcg

SEQ ID NO: 10784 - DNA, 986 bp, Setaria italica
  Peptide Sequence Number=SeqID_76758
ataacctgagcaaccgaaagagctgagtccgctgacatccagtatgggaaattcatcacggcagacgacgatgaccctgacggccttggctcttgggctagcactcctctgcgccgccggcccatgcttggggagcggcgtcgcgtccgtgtccagcgtcgtctccgaggcgttcttcaacggcatcaagaaccaggccgggaacgggtgcgagggcaagaacttctacacgcggggcgcgttcctgaccgcggcggactcattcccaggcttcgcgcacggcggatcggaggccgacggcaagcgcgaggtcgccgccttcttcgcgcacgtcacgttcgagaccggatatttttgctacatcagcgagatcaacagggcgaacagcttctgcgactccaacaacaagcagtggccgtgcgtcccggggaagaattactacgggcgcggcccgctgcagatctcgtggaacttcaactacgggccggcgggtaagagcatcggcgtcgacttgctcgcggacccggacagggtggcgaaggaccccgtgatctcgttcaagacggcgctctggatctggatgaacagcgtgcaccaggccatgccgaaggggttcggcgccaccatcagggccataaacggcaacctcgtgtgcaacgggaaaaaccccgatcaaatgaagatgctggtggtctactacaagcagtactgccaacagctcggcgtcgacccggggaagaacgtcacctgctagacttgtcgggtatggggtgatggggatgtgcttggctcgtgaagaataaacccacggatccacgagtgcgtatggacgtatagtggcaataaaattctagcgtgcattgctggtacttgtaagcgtccacataacaaagaataaggtccgaatttgttatttcttctatttaaaagttaacctaaaaatttagtttagttttactttaatttttactttttaagttttttaa

SEQ ID NO: 10785 - DNA, 1319 bp, Setaria italica
  Peptide Sequence Number=SeqID_76759
gcctgctgtttaacttgtgagcacgatgcattcccttcaagctgtggatttgatttgatggagctggctcaagctctggcttggcttgcaagggtgccgatgacggctcgtaatcagcaggcaaattttgcgcaaaggtcgcttttgaaaagtcgaggggtcgttccaaagtctttcctgtcaaagcccctcgcactgttagagtgtcgtaggctcatcgcatcgcagtaaacttattaaagcctgtaaagccctctgaatcccccctgcacatgcacacagccggcaatcgttacccaatgaacaggtccggacaggtggcgagacacgacaaaattaaagcagggcgcggacgccaaggccgcgcacgaatccacaaagaatacaatccacaaaacaacacttgctactagggccgtgtttagttggggaatttgggaggtgccaaattactgttacagtactgtagcacactgtagcgtttcgtttgtatttgtgaattattgtctaaatattgactaattaggctcaaaagattcgtctcgcaaagtacaacaaaactgtgcaattagtttttaatttcatctacatttagtactccatgcatgtaccgcaagtttgatgtgatggggaatcttctttttgcatagtgtcaaagttgggagttgggagtaactaaacatggcccatgtaaaaaaacaagcaaacagtactgcagtaatcagtgatgctcttgcagcggctacacgagtctcgtgatctgtcacggcaacagtatgtacagtctgtacactactgtacgtactgcagactgtataaatgtatttcggtgacttctgaattctgatcacatgcgtggcttccctaccatttagtaaatggcactcttgatttgttgttagtgaatgaataatgaacgattactagtgaagacaggcttcgagaatgcacggttgttttagtaatggtactgtaaaaaaaaacactctgcaaattgcattttaatacatacgtacagtacagtacgtgatggaatgctaaatggcggacagctaatcgtgtctcaacattcaaacggaccctcattaacaatgtccgtgacacggctggaagcacatgcgtgcctggccgacatgtcggtgccgtttggatctaaccggttcccactcattatggtcacggtgtaggtgttactaaacaatcaattgtcaaatcgatgagcatgacctttatctcgcaagaatattagagcgtggccatagattagctgtcagatgtgatcgctatcactacttgattctaaacgcattgttaatttt

SEQ ID NO: 10786 - DNA, 723 bp, Setaria italica
  Peptide Sequence Number=SeqID_76760
cggggggcggccggggacagcacctgcccgacgctgggcagcgcggcgccggcgaggtacccgcacagcacgtaggtgtgcgggacgcccgcggcctccacggcgcgccggacggacgccttgctggcgtagacggtggacctcgccggctccacggcggcggtgtggtccacgtccgtccagaactccgacggcaagaacctctgcacgtaagcatttacaagcacgccggcggcgagcgagcttgcggtcaacgaatcactgaatcgaagcatcgaaggcagtgcagtgatgcgagtaaacaaaggttgctaccttgacgccgccggcgtccttgatggcggcgatgagccgggtctggtcggcgatctgccgcgtcccgagcgcggagatgacgacgtcggcggccttcatggggcggcaccaggctggtgtggtcgtagaggtcgcccttgacgagcgtcacgccggcgtcacggaagctccggagcagcgccgccttggccgggtcggagggggcggtgtccctgacgagcgcggtggtggggtggcccagccgcgcgctcgccgccacgatgtgcctgcccaggcggcccgtgccgccgatcaccaggatcctagtctcctcattaggggacatcttggttcctttgcttgtgagtagtgaccgatcgatcgattcgcggctcaccgagaagagtgagtgagttcgctagactcgac

SEQ ID NO: 10787 - DNA, 1662 bp, Setaria italica
  Peptide Sequence Number=SeqID_76761
ttttaagtttacccttatttggttcgtcgtcgtccgccgcgtccatcgacgcgtggaagggcgtctcccagatgctgccgctgccgctcgcctgcgtcgccgacgcctggatcggccgctacagggccatcgtcctcgcctccctcatcttcgtcgtggtcagtccgtcactccgtctcgcgcatgcttccgaccgttagccgcggagtcttgttttcaactgttcgtcgcagagcatgggcgcgctgtcggtgtcgtcggcgttcccggccttccggggcggccacgtggccatcttctacgtcgcgctgtacctggtggcgctgggggagggcgcgcacaagccgtgcgcgcaggcgttcgcggcggaccagttcgacgagaaggaccccgaggagagcgtggcgcggagctccttcttcaactggtggtacttcggcatgtgcgccggcaccgccgccacgaccatgatctccagctacgtgcaggataacgtcggctggggcctcggcttcggcatcccctgcatcgtcatcgccgcctcgctcgccgtgttcctgctcgggagccggtcgtaccggtactacaccaccagcgaggccagacccttctcccgcgtcggcaaggcgttcttggcgttggtcgagagctggacgccaaatcgtcgcgtcagaagcaaaggagaaggcaacgccgccgccgtcgaggaggtcaagagcgtgctccggctgctcccgatatgggcgtcgtgcataatctacgcgatcatcttctcccagacgtcgacattcttcacgaagcaggccgcgacgctggaccgccggatcggcgcgcggttcaaggtgccgccggcggcgctgcagacgttcatcagcctcagcatcgtcgtcttcatcccggcgtacgaccggctcttcgtgcccctcgcgcggcgctacacggggaggccgacgggcatcaccatgctgcagaggatcggcgccggcctggccctctccctcgccgccgtggccctgtccgcgctcatcgagatgagacggctcggcgtcgcgagggacgccggcctggtgagcaccccgaaggcccagctccccatgagcctctggtggatggtcccgcagtacgtcctcatcggcgtcgccgacgtgttcgccatgatcgggctgcaggagttcttctacgaccaggtccccgacgcggcgcgcagccttgggctagccctgttcctgagcatcttcggggtcgggcacctcctcagcagcctcctcatctccgtcattgacaaggcgacggcgaagagcgggacgagctggttctcgaacaacctgaaccgcgctcacctcgactacttctactggctgctcaccgggctctgcgccgtggatctcgtcgcctttgtgttcttcgcgcgagtgtatgtttacaagagaaagggtggcgatggcgatggcgatggtgatgccgtgtagcatgctgagtttgagccgcgttgatttcttgggggtgcttgtattgtagttgtttgtagggagattctgtcggttctgaaaagcatgcctcacggagtcactattgagttctcaggttttgttgtgcaacgattttattcttcttggagtgtgaagatattctctgggattcgagggcttgagcttagtagtc

SEQ ID NO: 10788 - DNA, 913 bp, Setaria italica
  Peptide Sequence Number=SeqID_76762
attagccaaggctgcaaaaaggaaggcgtactacgctgcaccattgcttgctgcagcaggagtcaaagctgcagtagaggcacagcggcagtataaagaaaggatgaaaggggcgcaaagattccaacatcctctcctctctctagactttcgccctcgagatagctgctggccttgaatcctcgccactgcttgctcgagtttcttcagaccgtcgatgggaggtcgcacttgcccatctctgtaaacaatgcagagaaatcaccagtgagatcgcaggttacagcacaatcaacctttaaaaaacagcacattctctgatctaacagcagattatcgctctcccatcccatcatgtgagcatgaagactcctgagacgaccactggtccaaggagacacgtacgctcaggatacgtaatgagtggagtaaagaatgcagtagggtacagagtaggcgatgcaaaaggcaccggaagtggcaatccagccagacagccacaacgcggtctgcgacatccagacacggcacgcatcaccatgaaggaaaccaggacggaaagaacactggacacaggacgggtcatatcacgccgagctacgagccacacaggcccccatctcttcgcagtcattattgcacttgtgctagtacaactagcaggcctgaagccctgaacttggtgcctggttgacgacgtatgcggcgccggcgaagtcgcaggtgccgatggtccggcccttgcgctggaagtagtcgttgaaggcgtaggaggcgtgcgccaccatggtgttgggctcgaagcacgctgcgccgggctggatgtccttgcagttcgcaccgccctcgccgcaggcgtagttcagcgccgccagcagccgctgcctcccccgaccgccgcgttcgccacgca

SEQ ID NO: 10789 - DNA, 1924 bp, Setaria italica
  misc_feature (1662)..(1662): n is a, c, g, or t
  Peptide Sequence Number=SeqID_76763
tcgcgaattagactccatccatgcaattagttttgtaattacctcatgtttaatccttctaattagcatccgaacatccgatgtgactctgctaaagtttagcgcctcatatccaaacaccccctcagtaaattgtttcctttcagaaatagcagattttgggaaaaaaaacattgagtgttgttccttctggaaatcaagtgcatacagatcaaggaattgttcttcattgctgccattcagcgtgtgctgaagactttcttgtgtaagcagtgttctgaactttgtgtctttgttggcagtctacgaaatattttcttggttacacataaatagttaatttgctgcacattaatatttttttatttttgttgagtaatattctcacatttcagattgtgtgttattttgcagctaattgtaggttgcaggttgttttactaatttcaataatttgcaacctgttgccttggagcaactctgaatctgaagtaaacaaactaaacctatgttgctaggtttcttttttctataagaatgtgtattgtaaatttttaagaaaccaatattttaccaaagtattttgtcttctgccgaaagttttgagaagctgcacaattttcattcgaaaacaaacaacgttttatatataattttttggttttctcatgggatgatgatttttaacactacaaaaggtatgatttctgtacttgccaattctatgctactaatcattctcctctgtcttatttcattcattccgtatgtttgcgtattactcaagagagtttgtgcaattcttggtgatttaacattttcacattatagcttcatttagttacctttgtattcaatatcaagttatctaaacttcaaacatcatgaggtttttattttaatatatctcttttgggtgctctaaatcttcctacgaaatgagaaactctaaggaaatcacgaaattccagtagttggtggatggctggacgccatcaagtagcggaacaccaccctctcatgcggctcttcactgtcatatagatcgcaatctgcagtggtggcgtgcgtggaagcgacaacatcaatatagatgctaagcggccatacatgaaacaagggaataataagctgagaacatgtaaagacccatagcaacgcacgggcatttcaactatttgaataataaatttggaagaaagcagctacataggctacaaccatgttcctctgtagactacacgtcattgaggttcgttcagttttaagtttccgtttcaaataagaggttttttcagttttcagtaatgatttttgtccagtgtttagttacagaaggtatcatctatggcatactatatgctagcttttttccttagttagcactttttatttgttaacacctgagataagaatatttttctaatcctgtagagatgatacctgaagcaaactataggtttattagtcaatcttaccttctaaattgtctagtcacttactgagggtgactttttcagtgatcatgttgcctattcaatttgttgctgtccctctgatatattttcccctgcaaatttttagctctattggcttcatatttcatatactttgcttatatatttgttttgtgcagagactcaagtcatgtggaaaaaaggngtacttatctttaatgcccttacatttttgctaacaggaaagcgtggacaaccaaaatatttagagaaaactttatgcctatatgctggtgatggactactagaagaatgaagaattacagaaaggtttattggtgactgccagtgccgttaggaatgaatagatcaataagagaactcatatttagtttatttattatgcaacatagttgcacttgtagtcagagatgatgttttattgtcattgtgttattactttggtt

SEQ ID NO: 10790 - DNA, 1566 bp, Setaria italica
  Peptide Sequence Number=SeqID_76764
tgggcggcgctggcgctggcgctggcggcggccgcgcgcgccccgttctatcgccacttgtccgccgagctgcgcgccgcgctgcccttcctgggatccatcgccttcatgctcgccgccttcctctgcgaagccatctccgtccgcttcgtctccgccgtaatggcgctccagtggcacaggggttataaactggcttcttcgataaacgctggttcttcgataaagttttgaatggctttctagtcagataagagctccactcaagaggaccccaagaggacagagcttggcttcccactgataaggagacagtagcaatactgcctttttcaacttcgaccttctctatgtagtttagttgtgtgcactcactcctggtccacatatacatacttgaattctaaatctacagaaattcttgtaaactaaagtctgctggttttaacagatctgctgcaccgcttcctgacactggtcaatggctgcttctatcactgaacgagaagctccctcaaagcattgtcaatctactcagctcatgttatcactcttcaccattatttgatgttgtttatcatgctggggttctcagttctgtttgactgcatcaaagctcctggtcttggtatagccacaagatatatgttcactatggcaattggtcgttttcttcggacaataacattcattgctactattcttccatctgcaagaccatggtgtgctgcagctcgttatcaaatacctcagcatcctcatccttgggcacaaaaatactatgttccatatgcttctgattcaaatgctattcatagagtcataacacatgacatggcatatgctgctgttcaagcttatccagatgaatataggcctgactggggacggatgagcttcctggtagatattttgagaccgattcctggagaaggtccatcatggtaccatctgttgaagaaagctagtggtggttgcaatgaccttatgtacagtggacacatgcttgttgctgttcttactgcaatggcatggacggaagcatatgggggctggatctccgtcgcgatatggctcctcgtcctgcacagcgcgcagagggagatacgtgagcgacaccactacagcgtggactgcatcgtggcgatctacgtaggcgtcctgctgtggaggatgacgggcttcatctggtccgtctgagatgccagccgagccagatggctggccaagcttgatgaggtccagagcaggctggtcaatgccgccaaggactcggacaagcaggggcctgctaaaagacgttgagctggctggtcaggaaaagcagggtctctgttcgcttcggcttatcagccaccgaacagtatttttctctcacaacaaatcagccgtttcagcttttcagccggcttataagtccagattcgccgcagggacgatcatcttcaccttgtcctgcgttctcattgctttcacaatgaccagcgacggttgatttgaagttttgttggaagcccctgaatctgaagtaagctgaattcctgtgctgtaccgttggtttctgta

SEQ ID NO: 10791 - DNA, 1239 bp, Setaria italica
  Peptide Sequence Number=SeqID_76765
cgccgccgtctcccagtggcggcacccgcaggcgccgccgcccgtccagctccgccagaggaggaagaacttatgaaagttgaggaacaaacagtgaagctggagatggaactttttgttaaggaaaaagaaacatttaaggtcttgaaagaactacaggaaacaaagcaggttattgatggcttgaaagtacaaatagagaaggaaaccacctacagcacaaattctgcagaaggtcatactgatatggggaaggtacatccacttcctgctatcgaacaaaaatccatgagacatactgagccaccaatccagagcacaaaaggtacacagtccccactatccacattgatcaagcttaaccaggcaaaagcatttcttaacacggatactgtcaacatgttaaagagccaaatggagaaggagaaaggttcacttgaaaaaacccgtgaaaagttacaattgaacctagggaaggcttcatcattagaagcagacctgaccaaaaccgttgcacagctgcaagcagtaaaagctccacagcctgtccttgagccttctgaaatctggctgcagatgaagcacttgaattcagagaaagcaaaacacaggaaggtgtcggatgatttgaagaatgagatttgtgaattaacagctgcgatcgagcacacaaattctaagacgaagaccctgcagttcaggatcatcatggctgagaaattgaaggaagcttcgcaacgtggagaagctattgctctagcagagatgaaaaacctgagcaacaggcaggacctgaacgctactacatccgatgtcacactctctgctgaggagcactctatgtttgtgctcaaagcacaagaaggcggacagcacttctaggaagaaaattgacgcagcaatgcaagagctagatcaggcaaaccagtgtaagctagaactcctggaaagagtagaggaggcaatggcggctgtcgaaacaagccggaaggctctagaggaagcccagaagagggaagaatctgcaaacaaggcaaagctagcagctgaagagacactccgaaaactgcggtcagatcaaataatgcagaactggcgcccgatcaacaacaattccatgaaattcaagaacacggcagtgacaccccggcgagcaggctctgggatatacgacgtgaacggcctgagcctggtgaccaccggaccgaagaacatgaagacggtgtccatcggacagat

SEQ ID NO: 10792 - DNA, 1394 bp, Setaria italica
  Peptide Sequence Number=SeqID_76766
cctgggctacaaaactgggccaatcttgggctgcacggcccacaactcgtaagctgatgccggcgcaccggtcggtcgccggcaggacgacaacgacgacggcggctctctcggcagcctgcgcgcaggccgacagcgacaggcacaggcagaagccgttcccgaaggaaaggtgcgtgtccggctggccgggcggcgaatcatcgtcctctcgaatcccgaaggcttaggcgctagcagttcctcccctcacgcccgcgccgccccgatcggagaggaggaaacatggacgcggccgtctcgaatccgtcgatcaagagaatcgcgctggtcaccgggggaaacaagggggtcggtctcgagacgtgccggcagctggcgaccaaggggctcaaggtcgtcctgacggcgaggaacgaggcgagggggttggaagcggtcgaggccatccggcgctccagcggcgccgccgaggttttcttccaccagctcgacgtcaccgacccctccagcgccgcccggctggcggatttcgtcaggggccagttcgggaggcttgacatcctgatcaataatgctgggatttcaggtgttgacagagatccagttttggttgccaaagtcaaggatcaggttgaaagcatggatgtgaaccagagagttgaatggatgagagaaaattcaaaagagacatacgaggaagctaaacaatgtatgaggacgaactactatggtgctaagattgtcacagaggcactacttccccttcttcagttatcctcctctggaagaattgtcaatgtttcgtcaggctttggactgctgagaaacttcaacagtgaagaacttaggaaggagttcgatgacatagacaatcttactgaaaagagactggaggaactgttggatttgttcctagaagatttcaaggccaacttactagaggcacatgggtggccaacaggtggatcttcagcctacaaagttgccaaagcggcccttaatgcatacacaaggattcttgctaagaagtatcctacactgcgtatcaactgtctgacacctggttatgtcaagaccgatatgtctatgcacatgggagtattgacacttgaagagggtgctcgcaaccctgtgaaggttgctctcttgcctgatgatgggccaactggtgcttattttgatctgaatggggaggcatcctttgtgtgatcatattatatatgatcatatctctcttagtttcagaataaaagaaagagttatagagtagttggtgcccataagtattgtagtttgacttgtgtactcaaactagcacgctgagtacattgtagagctccacaccatgattcctcatcttctgtatgatctctctcgtttcatatttgcaa

SEQ ID NO: 10793 - DNA, 1273 bp, Setaria italica
  Peptide Sequence Number=SeqID_76767
tctaaattcaagtttacagcactataaattatggataagtttgcaagaacataaccaagtgaatctacaacacctcacgtacctcagccacaacaatctagttctcctccaccgtcttcaagtgtccctactacatctccaacatatccggcgaataaccagccacctccatcaccttctagcccgactaccactcctccaccccaatttgtaccaccaccacaatcaagccctcctagtgcaccaaccgaccattcacctccacccactttgagtccacctgctacacctccaacctatagtcaaccaccttcgtcgccaccaagtcctgttgccgcacctccacaccaatctccaccaccacaacaatcaggtccacctccatcaccttcaagcacccctgccacaccaccaacatatcagcaaaataaccagtcacctccaccatcatctaatactcctaccacaccaccacaacaatctccaatgcaaccacagtcaccctctacaccaccgacgccctcaaatccatctgccatgcctccaacctatagccaaccaccttcatcgcaatctagtcccccagctacaccgccaatgcaatcgccaccaccacaatcaagccctcctagcataccacccaaccattcgcctccaccaactttgagtccacctactacacctccaacctatagtcaaccaccttcatcaccaccaagtcccgttgctgcacctccacaacaatctccaccaccacagcaatcaagtccacgtccatcaccaacaagcacccctgccgcagcaccaccatctagtactcctgccacaccaacacagcagtctccgccgctagcacaatcaccctctatgccaccaccaccttcaaatccatctaccatgcctccaacctataaccaaccacctccatcacaatctagtcccccaaccacacctccacaacaatctagtcctcctgcaacacctccaactaaccattcacctccgccatctttgagcccacctactacacctccaacttatagccaaccacctccatcgcaatctagcccccctgcaacaccaccacaacaatctatttctcctgcaccatattcaattacccctatcacaccgccaaccaactattcacctccaccatctttgagtccacctgctacacctccaaccagcagccaatcacctccatcagtatctagcccccctgcaacaccaccacaacaatctagttctcctccaccatcctcaaataccc

SEQ ID NO: 10794 - DNA, 1372 bp, Setaria italica
  misc_feature (1318)..(1318): n is a, c, g, or t
  Peptide Sequence Number=SeqID_76768
gccgccatcctcgttacagacagtcttcttctacatctcgctctacctggtggccatcgctcagagcggccacaagccctgcgtccaggcctttcggcgccgaccaattcgacgccacggaccccgacgagtcctcgtcccgggcctccttctttaactggtggtacttcgggatctgcgtgagcggcaccatgaccgttgcgatcatgagctacgtgcaggacaacgtcagctgggccctcggcttcggcgtgccgtccatggtcatgctcctcgcgctcgccatcttcctgctcggcacgaggacctaccggttctacggcggctcgcgaggcggcagcaacgttggcgccggcacgttctccctcgtcggcaaggccttcgtcgcctggaggaagaggtccaaggaagccttgccggcggagctggagcacggtgacggcgagctcgccgtcaccgagaacgcggcgctcgcagaagaggtgagcgggcttacgaggctgttcccgatctgggcgacgtgcctcctctacggcgtggtgtttgcgcagccgcccacgctcttcaccaagcaggcggggacgctggaccgccgggtggggtcgtcgttccagatacctcccgcggcgctgcagtgcttcctcggagtcagcatcgtgtcctgcatcgtgctgtacgaccgcgtcctggtgcccgtggcgcgccgggtctccggcgtagcctcggggatcaccatgctgcagcggatcggcacggggatcgccctgtccctggtcacccttgccgtcgccgcgctggtagagatgaggcggctgcgggcggcgagggacgccggcctggtggacggtggcggttccggcgggacggcggtccccatgagcctgtggtggatcgtgccgcagtacgtgctcctcggcgccgcggacgtgttcaccatggtcgggatgcaggagttcttctacgatcaggtccctggcgcgctcaagagcctcgggctcgcgctctacctgagcgtcctcggcgtcggcagcttcatcagcagcttcctcatcacggtcatcgacggcctgacgaagaggaacggcggcacgagctggttcgccgacgacctgaaccggggacacctcgactacttctacctgcttcttgctgcgctcactgcgttagagcttgtcgctttcacttacttttcagcgtcttacgtttacaggagaaaggcaggcaatagccattgactaatgagcagaggcatgcatatgtatagttcacctatggactatggagtcaagatcgtgtatgccatcacattagatggacngcagcaaaaaataaataaagtaaaataaatccatcaatcttcagtgttctggtg

SEQ ID NO: 10795 - DNA, 2139 bp, Setaria italica
  Peptide Sequence Number=SeqID_76769
attacatatgcaggcagcaggtccgtctccagagcaggggctatacaatcctgacaaagtctttttgaagccaagcctgacaaagttgatagtgtaagaaatgtaacaatgctgccaatgggatgatatatacattactttaagcctgaaatatcaatgaatttcacggcccttggtctcaagaggaaagagggtacaggccactccggcaagaaagagtgccagatccatcacaagcacaacttctttctgatggtggttctctagcaatgcagttgtcgtgagaggagcaaccatgcttccaattcggccaatgatactagcgaacccaactccagtgttgcgacaagatgtagggtagatctcagaggaataaacatgtagaacagcaaaacaccccataacacaactgcgagcacagaagagaaggatgattgataaatcttctctcaactgtgtagcaagaggtgcaagaaaggcacagcacaacaaaatcatgcctcccagcatcactttccgaccaatcctgtccaccagtagagccgccaaaagaagaccaggaaactctgcaaaactggtcaccagcacatttatgtaaaggctggaatcctttggttgactcctaccactgcttagttcagagattagatatactagtccataataggcaaaatgacttgcaaagtggaccagccaaagaagaagagttgatctgatcagatcacgtgaccaaaaagctttaaatatacttttgtctattggatttggtgcttgtgtcatcgtcaagtctgtcttctgtcatcagtagaactgttgtaacagacggatcatagttatcgtcaatcctttttggttcagaggttacagtgccaggagggagagccttgttattcattcttgctattctctccaggacaagcatagcttcatttattttacctcttgagcaaaggtatcttggtgattcaggtattacactagagaaataaatgaagctatgcttgtcctggagagaatagcaagaatgaataacaaggctctccctcctggcactgtaacctctgaaccaaaaaggattgacgataactacgatccgtctgttacaacagttctactgatgacagaagacagacttgacgatgacacaagcaccaaatccaatagcaaaagtatatttaaagctttttggtcacgtgatctgatcagatcaactcttcttctttggctggtctattttgcaagttattttgcctattatggactagtatatctaatctctgaactaagcagtggtaggagtcaaccaaaggattccagcctttacataaatgtgctggtgaccagttttgcaggtaatgttgtgcgctgaacaaaatttgatgaaaatgatgaatgttgccttcggattttcagttgctggtgctagttcgagttaagatacgatcactatcgtggaagaatcttctgatttgcatgttgtacatattatacctcttattttcttggcaaaccatcgttgctctcatcgtaatttagatttagtgttgtgggagcctgatcaataaattcatatccttgaatcaaatagcagataaagcaaacaactaaactgttgcacatttagtaactacaaaacatggttctagacacatttatttcctgtttttctatcttattctgaataatgtttgcaacttgccaaagaaaataaaaaggatgcgcaattattaattttatttaaaattgtgttttatgcaatgcattatggacagggggctgtagggccctggaacacgtaaaataaaattgttgttctgttaaaaagcattgaaatgctacttttcaagaagagtccattggagtactttaatagctaaagccttgctttatttatggcagagtttcctggtcttcttttggcggctctactggtggacaggattggtcggaaagtgacaatgggaggcatgattttgttgtgctgtgcctttcttgcacctcttgccacacagttgagagaagatttatcaatcatccttctcttctgtgctcgcagttgtgttatgggatgttttgctgttctacatgtttattcccctgagatctaccctacatcttgtcgcaacactggagttgggt

SEQ ID NO: 10796 - DNA, 1117 bp, Setaria italica
  Peptide Sequence Number=SeqID_76770
aaacaatacgattgacatatcccattacacgcaagcaatatttacagatgtagagaagctactacacaccaagcacaagggttcccatcacagggcccgccggtcgctaccactcagcggccaagctgatcgagtcagaggaactgacagtagtagtaagcattttactccctagtccataacataggacaaaattaaataaaaggcaaagtctttagcctcggacagcaacgcagccgtggtacatgcgttttagataaccacaaggaccagcaaacatgtggcctgacagggaccggccaccgctcctccgtcgatctcatctaacccgatccgagatctaacggtggttgctcctggtctcgtcgctgtagagcctgaaataaaaagaacaatcccaggtcatgactcgtgatgataacgctgaagctcaaatgacatgaccgatcattttcgcaggttagttttatattggagaaacggagaccagagtggcctatccgttccagcaaacaccaagcagtagcactagtcgatggtgcttctggattagcatgccacgtgagcaaatcatggtgcgctattagtggctcctgagctgcctttgtttagtgctaactgaatacctagttcatctgcttagggtggggtggggggggggggggttcggttgaaacagaaacagtaaccattcagtttagtgctaacctcatggctcactagctagttgacctgcttattctggtgtttgaaacagaaacagtaataattcattcagctaagtctcagagggcacctgctttgatgctctgctcgatctgagccttggcagatcagcatagtactactatagtaagcaatcaaaccatatagtactactaagtagagatcatcctactgctaagtactaatacggagtataaaccaaaggacggcgaggacggcagagagatgccggggcattgagaccatggacggcgcttaccagtcgtagacggtgggggagttgggctgcgggcggtcgaagaggttggcgcccatgctcttggtggccaggttgctcccggggtggaacacgctgcgccacacgttgttgccgccgcgcggcgtcgtcgac

SEQ ID NO: 10797 - DNA, 937 bp, Setaria italica
  Peptide Sequence Number=SeqID_76771
ggttcacgtcaagtcacatctgcttagcacaatcaaaattttctaatgacgttgtcagtctgacaaagtccacacagaattctcagtcagcaagatcaggcgcctccatcttaccgcattcaatacaaaaaaaagcaatctacagtgccaaattgaggtgacaaaaagcaatctacaagtccacatctgctttttcacttcagcttattcagccggcttatcagccaccaaacagtgttttcctctcacaacaaatcagccgtttcagcttttcagccggcttataagctgaagcgaacaggccccactgggaatatttgctattggttgggaattaaactggtcacatggttggcatatcaagaacttgaagaacatctttgaattcaaactcgtgggtctctttgttgaagcgctccacgagtctgtacctcacatcattcaggtagaatgagtgagcagtctccaaaagggtctttgcctctgaatcagttagcttgctggtgaaaacaacatctcctcgaataagcacagtgtccttggtttctgcgaactctgtgtaatgggtgactgtgtagtaagggcttgcttgagtgcctcttgctttatagtcttcgagtcctgtgaagatcatgtatggcatctggacttgcatgaacatagtggtgtatccacttcccttccacaaaggaataacaaagtgacgacacgtagatgatctttgttccaagagatggtaaagctttgttttcatagatgcacctatatgacctcttcccaaatgatagtcatcccaggcggcgacgaggtgctcaggcgagaggcccttggcgcgctcgacgtcgatgatggattccagcggcttcggcttcagcggggtgaacccgctcgcgaactgggagtaacccctccgctgcggccaccgggagaggtcggc

SEQ ID NO: 10798 - DNA, 1240 bp, Setaria italica
  Peptide Sequence Number=SeqID_76772
tttccctttatttgtcctaattattttgttgcttgagcaagccttgtgttcaaatgcagcttctgttgctgggaagccattttttgttaccaatgatgaacctatggaaacatgggagtttatgaattgcataatggaagctatgggctgtcagaggcccaggattaatcttcctgccaagatgttattgtctgcggccttgttctccaatatgattcgtcacaggcttggttttcaaatgttttccactcctcttctgcatccagatacaatatacttcttgtcatgcacaagaacttttaacacttcaaaagctagaagattacttgggtactacccaattgtatcattggaggatggaattatgagaactgtcaggtcattttcagaactatcagataatttgggtttctcgaggaaacagcgctcctgtggatcatcgaaagcagataagctgttaggaagtggaacagctgctgatattcttctttggagggatgaaaaagagaaccttttcatttgtgacagtattgtttctgcttttctactggttcctgctttcagacagaacttttgtttcgtcagctgccaaatttcttctagtgacctcccttgctcttttcatccatggtgtgctgccgtcacaagtgtttggttttacagttgagaaagttacttctgatcattttgaagtatcacactcagcattgaggaattcactgatgtgcctggcttctgcatggaatgggggcattcataaactgagggttctagcagaaggcgaagactggagtacccttttaaaggtatttgcatttttgtacagcatcaagctattgttgaactttcaattcagatttctgatgggtcttgtattggcatccttgttcattgtcttcatagtctatgaacaatgcgaggaagaaattgacagcttggtgtcaaatgcttctttcaaaatcaagtggctaatggacagagtagtcgaacgcatgccggcgtctttgaaggcatatatatcctagagcagacatccatgaacatgacctagttatgctttgttgctagaacacatttcacatacttgaagctgttgttaccattgcgcttctgtctgtaaattggccttagttcctttatgctaacatgctttgtacaatttacccgaatttgcttactgctgtttagaatctgtgagttgacatacagcaagattctatgcaaagtttatggctggtgg

SEQ ID NO: 10799 - DNA, 1289 bp, Setaria italica
  Peptide Sequence Number=SeqID_76773
ccgagaagattcaaattattctagattaaaagctgctcaggacataaaaaaaagaggactgaaatactctaaagacggagttactctaaaggtcgataagatcttattacaacgggcacttccaagttcatcgccaagtagcttcctgaatactctgaagtagataagatctttagttacaacgagcacttcacgcatcgcgtggccacacgatcccgaggtcaagcattgcctccttcagggcgccagggagctcgaaagcctccacgcctcccagctcagcttcatcaaggtatccctgcatctcttcaaggaggatgtagatgacttgaaccatttctgtaacaaaaccaagacagcgccagtcacaacttgtaatgatatggtgaactgctataaaaatccatgccatgccagactactggaggtgttgtgttgttacgaaaattaaaggttaattatttgttgacatcagactacctgcaacggcgcctgcaatgtccacgcctgcatcgcgctcttctctctggtaggtcagaaccacgttgatgctctccccgagtcggccgaacactccagccaaggcatggttcacagcaacatcaggcttggatgcaggaaccttgtactgtagatagattcagagtcagaaacagcgtaatgtagacttataattcactaaacaataatttatttttacagaaaataatctaataaacaataattttataattaagggggtttttggttcctatgacttatttttagcgcgtcacatcctatgtttagtgtttagatagtaattaggagtaagtaaacgtagactatttacaaaaccgattacataggcgagacgaatctattaaccctaattagtccatgatttcacaatgtattgctacagtaaacatttgctaatgatgaattaattaggcttaatatattcgtctcgccgtttatatcctccacttaattaggcagcatacatgaaatgcatcatgggtaattggatggaaggggtaaaagctatgcatccaagaacgccctagaacagatgacagggcaaaaaaaaccgagatctcacctcctcatccacgttggcccgaatctcgaacgcgaacacgacctcagactccatctcgtgcgggctggcggcgagacctgcgctcgacgggggctcgcgggagaagaggcgaaggagcggcggagaggggcggcggcgtgctagaggacggggagtgcgagagggtaaatatatacgacggcggatggtaaccctagggcagggc

SEQ ID NO: 10800 - DNA, 536 bp, Setaria italica
  Peptide Sequence Number=SeqID_76774
ttgtccgcttcctagagggaacgacccctggcgataaatccgaagagaaagagaaagagactgccaatgaccaaaactcctcctagctgctcatgtagaatcatgcgtgcgttcctgtggctgttgtatctgatgcttgaagtagatgcggcgcgtgtgcccgtgcagctgtcccacgcagctgttccgcaaggaaactgactcgccccaaccgtcatgctgctgctgctcatgctcttgactctggcctaggggctcctgactctggtctgggtggggcattgctggagcagaaacgacgatagggctggtgttgctactgtacgatccaacttgaacttttcctctttttttcattaagctttgtaatgtagcttttctgtgatgttgattcatgaatcgtattagaggttttcttcgcagcaagtgcatgtaaaactgccggacgatttgaaccaagttgtacactgcagtatgtaacagttaattccccctacatttgctctggttgccttctgaacgtaaccaaaaaaaaa

SEQ ID NO: 10801 - DNA, 696 bp, Setaria italica
  Peptide Sequence Number=SeqID_76775
tgggattacgtacaaagttgtaacattgccaaggcaactcctccgagaaccagtaaagttgtacacctccagctcaacttgctcttcttttccctcataaactaatttaagcttgccaggtcccttgataactgcatcagttgcccggtactgatcgccgaatgcatgcctcccaatgcaaatgggctttgtccaccctggaacaagccgtgggatgtttttgcagatgattggttctctgaacacagtgccattcagaatgttcctaattgtgccattcgggctcttccacatggccttcaagctgaactcctttacccttgcttcgtccggtgtgatggtggcacacttgatagccacattgtacttgagtgtggcctccgcagcctctactgtgactttgtcatcagtagcatcacggtgtggaagtccaaggtcgaagtattttatgtccaagtccaagaacgggaagatcagcttgtccttgatagatttccagaagatcctggtcatctcatcgccgtccatctcgacgacggggttggcgaccttgatcttgttgaacgccatggccggcctggagggaggggacggggggcggcgagccggcgagagacaggcggcgcgaccggattggtgtacaactttactggttctggaggagttgccttggcaatgtacaacactgacgagtcc

SEQ ID NO: 10802 - DNA, 1448 bp, Setaria italica
  Peptide Sequence Number=SeqID_76776
tatatctgtcatcaccaggttctcccggtctttaatatgtaggttcatcagcccacactgctgcatatggtaaagagttgccatgtgagccatcagttactgtgcaattttccagtttaagtgatgatgataggtgctgtgcttttttatcgcttgctgctactagcagaacctttgatgactgtttagcatgactccgcataatctgctcaagaatttccttgacctttgatgttttcagcttctccgatggacagaaatgcacatgctgcgttacaaaagcactccttgaagaaaccgaatcattgatagagagctttgtaattcttccacggagtagatttttagccatagttgcaacatttttgtcagatgagtcagtgaagatagttatctgaggattgcttgatatggcatctctaatagaaaagattttgtcactaacattgaggtccaggaaatatttcagtccatcaatgaccagcattgatacatttgatatgtcaattgcctttagtgaaacaagttcaagaagcctctcaggggtagctataagaaactccggctcacaagtttttagtccagagatctgatgttcaaccaaagcaccaggatgcaagctcactgaatgaatcccaagaggcttcaggggtttgcatatagatcgcacctgcgcggccttctcctgggacgggacgaggtacagcaggaaggggcaggagacgaccatcccaagcctctccttcctggcgacgatgtcgcaggccgtggagacgagccacgccgtctgctccatcgtggcgcacgcgccgcttgtgtcgagcacgtcggacggcgccggggcggagcaggatctccagagctccacgccccagtcgccggcgccgtggacgctgctgccgccgccgtcctcgggcgccaccgcatcccggatggcgttgaggcaaaccaccaggaacttggacggccggtcgaagtccacgcggccctcttccgtttccgtcgctcgctcgcgtacatccttcgacttggccttggccccggccttcgccggcggctgttttttagtcgcgtccttcttcttgggtttgtcgtccttggctacggtggcggcggcggcggccgcgtcttctgtgtcgtcggtcggctcctcacccttgcgcttcttcccgtggcgctcgttgaaggggtcgtcgggcgtggggagcgagaagcacatgccctcgcagccacggcgcttcccggacttgcggcggcgcttggaggcgatgattgccgcgacccgcgcggagacggcgttctcgctgctgcgcaggcgcttgcggcgcacccggttgcgcttccgcgccaacgcgtcgtcgcccttcgccatctcggcttcgtcggctggtcagctccggcgcggcaaacggacacggcagccgccgggagggggagaacgcgagcgg

SEQ ID NO: 10803 - DNA, 1137 bp, Setaria italica
  Peptide Sequence Number=SeqID_76777
cgcacagcagcgccgtttgatggcaagcgagagaagaaaagtgccccagtaaacgaaccgcttcttcaccgggaggtccaactccggcgtcagtacatcaccacatcagagattcgtgaacttggaatcaacgccacctttgccagttgcagcgccaccaccacggtcaccgccaagtgcagcatgttggccggaatccatagttggcagccacggagggaacaaggtggctgcaaataggaaaatggaaggcttcggaagatgggagacgctatgtagggaatctttactttaaaaccaaaaggcgaaaaaacttcgtacgtcgggcacaactgagataagtgaagccgagggcttgattactcgatgctgagattagcatcaaccatgatgttgtgcacctgacccaccgtaactctttgaattgactgtactgaaaacagggcatttcctgaatttgcaagaattacggcatggccatggggattggttatggctcaaccgttgccgtcccatcggcattcgactttgacaccagctcgtggtgtgatcatgtcgggtgcatcgtcaagaagctcagtgactagtttatatgcttgtaggtgattagtaatgcattggtactatttgcatgttggttctatatggagttgaatctatcattttcaagcatgttgtatgatatagcatccaagctagacaaagtctgagaatgataaaccgttaaagaaatatttagtcagggcccaagagaagcaagtgctactgccttgctctacccctggccgtgattggtcaagtgcgccaaggggatttgcacagcttggtcagcagcactacatacagacatatatttcttgaggttttaaatatcaaaggaaagcgtcgacagccaaaatatttagagaaagctttatgcctatatgctggtgatggactactagaagaatgaatgatggactactagaagaatgaagaattacagaaaggtttattggtgattgctggtgccaatgggacatgaatagatcaataagagaactcatatttaacatagttgcgcttgtagttagagatgatgttttatgtcattgtgttattactttggttgagacatatatttgaagttaatgaagg

SEQ ID NO: 10804 - DNA, 852 bp, Setaria italica
  Peptide Sequence Number=SeqID_76778
ttggtctagttctctttttagtttttttttttttttcttctcgtaacaaatcagtcgtttcagcttttcagccggatacgtttccaaagctgaagttacttcagctagaattcttcacacttgacaaattaatctcaggtcaatacatcgcttccgaaaatcacacgaaactaatgaaccccaacacactcggcactaccgcatactactacgactccacctccacttcagagccaaagcacactacgaaaaagaaaagaccagatgaaaagaaaagaaaaggaaaaagatcttcaaattgaaggaaagaactcgaacgaaggggctggcccatccagagtttccatacactagaccatcctgaggagcgcggcgagcacggcgacggctgcgtagaggaccacggcgtgggacctggcgaatgcggcggcggcggacctgtggctggcggacggcggcggggacggcggcggcagcttctccgccttgatggcgaggcgcatcccgccgaagcagtagccgtagctgcagatgaagtagtaggtcttggtctcgttgagctggaacgcgaagttgcggcccttgctgtagttgtagatggcgttgctggagtcgcacttgttgtaccccgtctcgtccacctgcaccacgtccgcctgccccgccgtgtagtagaacacgagccagtcgtccttgtagaaggggctgtgctgcgtcacccagtcggagtagttggtgttgggcttccagttgatgctgatcttgttcgccgccgtcctcgacggcagcgccgcgcacgccgccaccaccagccagcgccgccgccgccgccacccgcactccgtcccatcc

SEQ ID NO: 10805 - DNA, 1315 bp, Setaria italica
  Peptide Sequence Number=SeqID_76779
agcttactttttggttctgtaatcaactcgagtttctcttacgatgtcatttctctcttaccatatctatatgcattgcatatgtatttcaatgatcaccgtatattgatggatttgtagatgtttaccatatattgatggaattagattgtttaccatatcgatggatttgggacatactttatttacttggcaaattgtttattgagcaattgtagagctttagaggctttccaaattcctgtacgatggattctattgatcgtgttgagaaaagtgaacaaggagctattcttggggcacaatagacaccaccaggcaatataaccaaccggattgttcacttgccaaaatcttcagcttgggtaaaagcatcatcagttccatcatcacagccgccaagaatggctccttgttcacttttctcaacacgatcaatagaatccatcgtacaggaatttggaaagcctctaaagctctacaattgctcaataaacaatttgccaagtaaataaagtatgtcccaaatccatcgatatggtaaacaatctaattccatcaatatatggtaaacatctcaaatccatcaatatacggtgatcattgaaatacatatgcaatgcatatagatatggtaagagagaaatgacatcgtaagagaaactcgagttgattacagaccaaaagtaagctaatatcataaatacagtggaatagaaacaaggagtcaaccagatgaacagaacataggagcgctgaaaaatggtagacgcatcatcacaagtttgatttgtgctggttttgcttatgctgacttgttttttgagggtccagtgagcctggcgaatttactgagttcgcaactgatctgagacgaaagtaggaatgggatgtttacacgggtttaggggttgtttctgtaagtgcgcgagaacgcagaatttgcacggaatataagaacgtaaatagaattgcagattaaattaccgattgtaccttgtgagtttcgctgtagctccatgtctttgcagcggcgatagtagatgctagttccagactcgacgggagaacgggaagcaaaaggcacagggacaccatgggggaagagaacccggggccaaaaaaacaagccccgtgcgatctcctcccccggacacaagaatatttttttattaccgtggcctgccatgcgagcgcacccaacatggcaaaggcctctctcgaagtcacatctttttctcatttttctgccctcaacgcacgccgactcgacgccgaaatcttacatgctttctaacctttaccttcgtcctct

SEQ ID NO: 10806 - DNA, 1967 bp, Setaria italica
  Peptide Sequence Number=SeqID_76780
gtaatgcagcaagctggtagagatgtgcaggctgcaaactggtatttgattcatttacctcttgcaggtttgataagtgctaaatcatatgtagagtactttaaattctagagctgtcagcaatagaatatatggccccagttagatgattttagcacctactatggattgttagaaatttgtcaggttgagagcttgtaaatgttactgaactttctcttcagctgcacaattataggaaaaaaagatgtatggaaagttcctcaagtaaataactggcatgttcctgattaggatggacctctaaattgttcttgttctagcgttctgcctacctgtgctattcttctatacatcatctttgttgctgccctgtctgatcattccatctttgcaactgcaattaagatacaaggataaactagcatggcaaataatcatggcaggatgctgaaagtgggggttcttctatagatatgcatttgagtgacatagtttacttggcttgcaattattgctcttgaacatttatccttttctctgagtggtgtgaaatgccgtggcttgggctgtaggcatcgatttgggcagcatttctgacaacacatgagaacagtccttgaaactttcctggtaattgtcgaattggcatgatgcttttacctgttcgatgtgtacttgatgagtgcaattcaaggttggttttagtcttggtcagggttagttgagaactagaaagaagaaattgttggtgagtaatacttcctctgattttgcatgctttctgtttgtacttgtcatttcaggcaccatcatatgtgtccaacttgcttgaaaggtcttggtgctttgagtttcttttagtaatctctagctcatcaggaattattgtgcatgcatgtgttggaaacttcaacctgaaccgatgatcttggcaatcaactgaagcttctttaatttatttggtaatcaattgaagcttcttgattggtttggaatataataatggctgcagagttaacttggaatagtaaagctacggatcaatctatgtttgagtgttactgtttgccatagattgcctgcaaggctgcaagttctagcgctaaaagcatgatacattctgctgcatttctgtgatagtgccttgctagcgctaaaagcatgatacattctgctcctcacacatttgaagagatgatgcaagtttcagaagcaacatgatgtgcccttgaaaattgcaaataagttttgactttcagcaatatccttaggaaaccaggctaaatttaaccaaaaatcttatgaacagtaggtattgactaggctgcatttgtcccgtcaaggatgtcatggacatgctggaagagtatgagtggctagcttaaatctaggtaagaggaaaaggctcaaggttcccaagaaaaggtaacatgaatatccagcgggtcctctcaccgcatttgcagtctcagatcaaacagatgtgatcaaaagagatgagtggaatgcttggaggcatgggcccatgagcggtaattttacatgttcaagtcttgttttagtgcatactccatgtgactctgttaatgtgcttttgagaaggcgaacttttggaagcattctggtcttatgtgtgcatttcctttatggtgagggtatcatgatattagagcacaacatcattggtcattgcatgtttgttagcagtgctctaagctggttggttggagtgttggaccctagcagagcacgcgtatttgttcggaggttagtcatagcttatcttggtggactttttttttgtttttgaatgcaatatgtatcttttgaactgaaattgtaccatccctcattttcagaaagtcaagctctccctttttcatgtcttgcaagtttcagttgcttacatttccttttttgaactttgcatagcaggaagcccagatggtatggatgcgaaacgt

SEQ ID NO: 10807 - DNA, 1039 bp, Setaria italica
  Peptide Sequence Number=SeqID_76781
aacatttttgaagtataaactgagtctcgttataaacttctggatgattgcagctcttcaattagcttgctttagtagcagagaacattatataaaatccacttctgacaaatttgaaatcaaccagcccacatgctttgcacagatcttcaagctccacttcggataagaaggtattattgccaccaatttggctaatgtacgggcgtgcgatcctcaatatcggaatagctggcggaataacatctgctacgaatgtagaagcaacaaaaattccccctgagcgaaggactctactaatttctgcaacagcacaagctgggggatggccaacaatgaattgcagcacctgcatgcacagcatcaattgagccattcacaaaagggagcctggatatgtcagccctcaccaatgctaatctctcatctgaaatattttcctgcttgacatattcattgcactgcttcaacatattctccgagaaatctagtgccacaacaagtgaatatagtccgctcttaacaaataatcttgaaaacaggccacttccacaacttgcatcaacaatagtccctccaattgttgggttcaaataagtttttgccatttcaaactctctttctaggcccggaaaaccaccccatatgaaattttggcgccatcctctctcataaagaaatgataccagtggagtcctgaatatttccgttgctgccggtttggactccgagtactcggtcgaaccaactgccactgtaaggtcccagtaatcctgcttattggggtagacttttttgcaggtagaacactcgaggctcgaagcatctcctgacggatcgctcgcgctcacgaaggggtagtagcagattggacacgccagcttgctcagcttcgtctccggcgccggttcgaccagaggttccgcggccgcctcgtcgggcgcgtcggccgtgacggcgggtgagacgctcgcgtgcagttcgagcctcctcgccggggcgccgccccggctacggcgcgccggcgccgcgacgcggt

SEQ ID NO: 10808 - DNA, 1351 bp, Setaria italica
  Peptide Sequence Number=SeqID_76782
tctaattagggtaacaataaaggttaattacctttaatactacaaatacaaagcaagtcgctgtcagattttcacaaatcacaacagtgccgaatgccgatagcgatagaatgaaattggtgctttggacagcccccgtcacgtcgaatgtttggacactaattaggagcattaaatctagactaattataaaattaattacacaacctctagactaaatcgcgagatgaatctattaagcctaattagttcatgatttgacaatgtggtgctacagtaaccattcgctaatgatggattaattaggctcaatagattcgtctcgtgatttaacctatgggttctgctattagttttgtaattagctcatatttagtcctcctaattagcatctaaatatccgatgtgacagggctaaagtttagctcccatctcccagacacttacgcatgcccctaaatcaaaccgcaaacacagaggttgactcttccagcagcagcttgcttgcgcatcatccactcgactgggagacgggggccaggtcagcaggagcagcaggttccggtgctatctaatatccaccaattttttcagagctcccatttctttcttcgtcgactgtccatctccgtcttttgctctgaatttagcagccataataataatactgtacaaccaactgtgtatcaccctagtcttcaacttgcgtattgaaaacgaagctggggaatgccgctgtggtgtccttcaggtgcggcagtgtcatcttcttataacagaagggtgccgcaccacaaaagctttccactcttctctgctaatcctgccgtccttatcagtatcagcatccttgaatgtcttgtctattatcccttctacaagatcatcagacagctccacctctgactccatcaaagtagcaatgaccatctgtttcacctcttcacactcaatgaaaccagtttgcctcaagtcatacaatctgaatgaaaaatcaattttatcttcaataggagcatatggatgaaacacactaattgcatggataaactcttcgaattcaataacagaatttttcttttcatcaaaaatatcaaaaaccttatggatcaggccgtcgtcgatgatggagcagctgatcttcttgtacagctcgtacagcgcctccacctcgttcacctagaagcagtgggactcgtcggcgagctcggcgagctcacggaaggtgaggcgtctgccggcacggatcctccccgcgcgcgcgtcgaccgcggacagcagcctgggtgggctcttctggaagcatctcgatgccccgagcaggaccgcgtccaccacggcgagcacgggg

SEQ ID NO: 10809 - DNA, 1875 bp, Setaria italica
  Peptide Sequence Number=SeqID_76783
gatcaccgccgtcaccgcgggcgccgcgctcgccgtccacgtcgtcgtcacctaccttctcgtgcagtacttccagctcgggatcgtcggggccgtcgccgccgccgacatgtcgtggtggctcgtcgtgctggggcagctcgtctacgtcgtcggcggctggtgcccgctgtcgtggaagggcttctcgatggaggcgttcaacgacttctgggatttcatcaagctctcctcggcctccggcgtgatgctctgcttggagaactggtactacagagtgctagtgttgctgacaggttacctgaagaacgctgaaatcgctgtggatgcactctccatatgccagacgatcaacggatgggagatgatgattccgttcggcttcttagcagcaacaggggtgcgagtgtcgaatgagctcggcgccgggagcggcaaaggcgctcgcttcgccatcatcgtctccatcacgacgtccgtggtcatcggcctcgtcttctggttcttgatcctctacttcgacgaccggatcgcgctcctcttcacttccagcgaggtcgtgctcgccgccgtgcacaagctctccgtgctgctcgccttcaccatcctcctcaacagcgtgcagcccgtcctctcaggggtcgccattggttcaggatggcaagcgttggtcgcctacgtgaacgtcgggacgtactacctgatcggagtccccttgggtatcatactcggttggccgctgcatctcggagtcgggggaatctggtcggggatgattggcgggaccgccgttcaaacggtgatcctggcctacctcaccgtcaaatgtgattgggatgaagaggcgaagatagccagtacgagaatgcagaaatgggcggccgacttaaaataaactgaagctgctcgggggtgtttcctaataaactttagaacatatcacatcggatgtttgatactaattaggagtattaaatatattctaattataaaactaattgcacagatggagtctaattcgcgagacgaatctattaagcctaattagtccatgatttgacaatatgatgctccagtaactatttactaatgatgaattaattaagcttaatagatcatgtgccaattaaactagagctttcgctaaactttggctcggatcaaacacgctctaaatgagaccgtggctaaaaaatatagaaatcgattcacgttgggtctttgcttgccttctccgttctctgatagccgccgtggccattctcgccgtcccgcacatctggccggctgcgccttctcccttcacggtggagagatcccggcggccgcacgatctatttggacaacttcacatcttagttatcgaatcgaatctctcagacctggctcgctacctccggaaggagttggtgagctcgacggagctgaaggaccccaggttcttgtatggccccggcgagagaccgtcgtcgacgtcgcccatctgccgcctcgcatccacggcggtccgccgcctgctgtcccacaccttgtacgccccgaacgcagccgcgccaaccaccgcggcgacgccgacggcgagcagcaccgccttgaccctgctcgcgccgctccgcccgcgcgcggctgcctcgtcctccaggctcctgaccttgaagtaacccaccttcctctcgtcgccctccaccagcagctgcgccgggtagtccatgaggtagcagtaccctgtcccgttgctgtacaccgcgccccagcagctgcagttgcgctcgcaccacgcctcgcagtccgccgccgacgccgcgcgctcgaaccccagcagctccttgttcaccggctccacgccctgccgccgcaccgcccggtacagcccgc

SEQ ID NO: 10810 - DNA, 1061 bp, Setaria italica
  Peptide Sequence Number=SeqID_76784
tagcatcaggcatcgttagcaacgtaaacagctcgtcctccggctgctgtcctgagaaacaggcagccagagagacacgtccacacatcactcgcgtctcgttcttcagaggaacctgtcgaggtactcgtcgacggtggtgtacttgacgtccgggtacagctcgctcgcgtccacccccttcgccgggtcgatctcgaagccggcctgctcccccatcacgtacgacgcgtgcccgatcgccaggatgatgttcagcggcatcgccgactcttggatctgcttgagcacggcttcctcggggatgtacacccgctcgaacgccttgccggtcttcttctcccacagcgacaggagctcgttgtgcgacagcgtgttggccggcggcctgacgtacagcgtccggttctcggcgcgcgggtcgccggcggccagcaccgtgtacgtcccgatgtcgccttcctccacgaacacggccttggcgttgccgtcgccgaggacgatcgccttgtccgtaggcgccgccggggagaggagctgcccgatggtcgggagcgcgtaccccgcgaagtacccggccacggcgtaggtgtaggggatccccgcggcctcggtggcgcggcggatcgccgccttgccggacaggatggtcttggccggttccacgacgcccgtccggtccacgtccaggccgaactccgatgggaagaacctcttgacgttgccggcctccttgatggcgtcgatgagcctggtctggtcggcgatctgctgcgacccgacggtggagatgaccacgtcggcggacttgacggcgctcaccaggctggcgtggtcgtagaggtcgcccttgaggagcgtcacgccggcgtcctggaagctcttgagcagcgccgccttggccggattggacggcgccgtgtccctgacgagcgcgaaggtcgggtggcccagccgcgcgctcgccgccacgacgtgcctgcccaggtacccggtggcgccgaccaccaggatcttgctcttctccgacgccatcctgtgttactacacgacagaacctc

SEQ ID NO: 10811 - DNA, 1869 bp, Setaria italica
  Peptide Sequence Number=SeqID_76785
ttactcaaacacggcttcattggtgaattagtgtactcaaacacagcattacccgtcagtaactaggaaaggatttttttttcatcaccatcaaaaaagtaaccaaaaatgccgaacgaattaaatacaatttattacgaatgcgacaacagccaccgatacaattacaacagctaaataatacagccaacatttacaagactacaaagcatatcatttgacaagtaccaccccttagctcccagttgccaatccactgatctgccctgaaacacttgtacataaggcctgaaacatgattagcgcaaaaaaaatagtttttcataatcccaagaaaatgcagcatgccctcagacatccaaggaaggaattagcagcattagctctcaagcctggcaaggcgaaagctcttaggcggctactgcgaatgttgagaaacaagcctttggtctatcatcatagggcatacaaaattttctggtgacaaactcatgccctgttcaattcagcttattcagtcggcttatcagccaccgaacagtgttttcctctcacaacaaatcagccgtttcagcttttcagtcggcagtcggcttataagctgaagcgaacagggccacagtcttaagaaaaagaaacaaatagaacatcatcagcaaacacaaaacattgcacaacattgccattgcattgcatcagacatccaaggaaggatttagcagcactagctctgaagcctggcagggcgaaagctcttaggcggcaactgcgaatgtagagaaacaagccttgattctatcatcatttgcaaactacattagcaaagaaaaactaacaaacacataacagggcactacttgaccttgacaatgaaaaaaggtaacaatggaataagtatggctcagacatccaaggaaggaattagcagcattagctctcaagcctggcagggcgaaagctcttaggcggctactgcgaatgttgagaaacaagccttagctttatcatcatcgccacatacaatgtaaacctatagaaaatcaactttaaacagaatgtacaagttaaatcagtaaatgtaatcacagaaaccggctctgtggaccaatagagaagcagtccccaggttcctatcaacatgtgaaatgttgaaacaactttgttttggcctgatcatagcatctccggtcaatgctcttggctaccggagacgtggcatcaagcccaagtttcattctattacagtaaagggttagataaatcaacacagttctgtataatccctcagagacccgatttaaatcacgcaccacagctgaatcaaaaagactgcagatgggagctccagcattaaccaaaccacaaaggttatggtctaaggatggacacctgcagcagaaagaagcagctgctgtttacagtgtcaaacggcacttcctatcggtaggtcttgagatcctcactgggactaataacaaactacctctagcagacacaactgacatgacagatacaggagatctaaaacagaaggaatatctaagtaaatgtataagcctcagcaagccagacaattttcgtcacgagtaaatctgacggtaattccagatgtatagctaatcatcattggcttactatcgcgtcgtatacaaaaccatagatgaaggacctgcctacagaaccactgctaagattcctggttcaaacatgtcaacaccgaaaacagaatcagaagacaagaggcgacgtggaagagataaattgcagtatcatcagataagaattgccttctcactcacagggcagggtaatagcactgtgtcagaaggtgtcctaagattgtttcgtggtttcatcatctgatactac

SEQ ID NO: 10812 - DNA, 1306 bp, Setaria italica
  Peptide Sequence Number=SeqID_76786
cggcggagctgacgggtcgtggccaccagcgggatctcttcctctgtctccaccgcgcgggatgatctctctgtgctgataattattggatgaatttcgataattattagtagatctaagagatgtgagccgtgccgccttgaagaggcgaggtaaggttgaagcatgtaagatttcggcgtcgagtcggcgtgcgttgagggcagaaaaatagagaaaaagaatgtgacttcgagagaggcctttgccatgttgggtgcgctcgcatggcaggccacggtaataaaaaatattcttgtgtccgggggaggagatcgcacggggcttgttttttggccccgggttctcttcccccatggtgtccctgtgccttttgcttcccgttctcccgtcgagtctggaactagcatctactatcgccgctgcaaagacatggagctacagcgaaactcacaagagctttagaggctttccaaattcctgtacgatggattctattgatcgtgttgagattaagtacagaacaacaaacacctggggactttggggcacaatagacaccaccaggcaatataaccaaccggattgttcacttgccaaaatcttcagcttgggtaaaagcatcatcagttccatcatcacagccgccaagaatagctccttgttcacttttctcaacacgatcaatagaatccatcgtacaggaatttggaaagcctctaaagctcttgtgagtttcgctgtagctccatgtctttgcagcggcgatagtagatgctagttccagactcgacgggagaacgggaagcaaaaggcacagggacaccatggggaagagaacccggggccaaaaaacaagccccgtgcgatctcctccccggacacaagaatattttttatttaccgtggcctgccatgcgagcgcacccaacatggcaaaggcctctctcgaagtcacatctttttcttcatttttcttgccctcaacgcacgccgactcgacgccgaaatcttacatgcttcaaccttacctcgcctcttcaaggcggcacggctcacatctcttagatctactaataattatcgaaattcatccaataattatcagcacagagagatcatcccgcgcggtggagacagaggaagagatcccgctggtggtgtctattgtgccccaaagtccccaggtgtttgttgttctgtacttaatctctttgctggttgttaactgcctcagtttattctgcttgtacgtattcttggttaattcgatcaggcagtgagtgcagcaatcaagctaacctcc

SEQ ID NO: 10813 - DNA, 1511 bp, Setaria italica
  misc_feature (1505)..(1505): n is a, c, g, or t
  Peptide Sequence Number=SeqID_76787
gtggcacgaccggctgcagccggcgctctgggcggcgctggcgctcgcggcggccgcgcgcgccccgttctaccgccactggtccgccgagctgcgcgccgcgctgcccttcctgggatctatcgccttcatgctcgccgccttcctctgcgaggccatctccgtccgcttcgtctccgccgtcatggggctccagtggcacagatcggctgcaccgcttcctgacacgggtcaatggcttcttctatcactgaacgagaagctccctcaaagcatcgtcaatctactcagagctcatgtgatcactcttcaccattatttgatgttgtttatcatgctggggttctcagttctgtttgactgcatcaaagctcctggtcttggtatagccacaagatatatgttcactatggcaattggtcgtttgcttcggacaataacattcattgctactattcttccatctgcaagaccttggtgtgctgcagctcgttatcgaatacctcagcatcctcatccttggacacagaaatattacgttccatatgcttctgattcaaatgctattcgtagagtcataacacatgatatggcctatgcttctgttcaagcttacccagatgaatataggcttgactggggacgtatgagcttcctggtagacattctgaggccaactcctggagaagggccttcatggtaccatctgttgaagaaagctagtggtggttgcaatgaccttatgtacagtggacacatgcttgttgctgttcttactgcaatggcatggacggaagcatatgggggctggatctccgtcgtgatatggctcctcgtccttcatagtgcgcagagggagatacgtgagcgacaccactacagtgtggactgcattgtggcaatctacgtaggcgtcctactgtggaggatgacgggcttcatctggtccgtccgagatgccaaccgagccagacagctggccaagcttgatgaggtccagagcaggctggtccatgctgccaaggactcggacatcgacaagatcaggggcctgctgaaagaggtcgagctggctggccaggaaaagcagggcttctcccagagggctatcctggccttcgctgcagggacgatcatcttcaccttgtcctgcgttctcattgccttcacaatgaccagcgacggttgatttgaagttttgttcgaagcccctgaatctcaaagttggctgattttttcctaagctatactgttgctttctgtaggttgagattgcacgtctttgttgatggaaacttatttaaacagaaatgtaacatgagtttagtcttaccagaattcatggatattttgcagctgcacgaaaagctgaccattctctgtacatttcggtgcctgtaatccccagccaagcgaattttacttacagaaatgttcaagcctccattgcctgcaagagcattgtaacaaagctcacactttgtaatgacacagttccaaattcncagtgt

SEQ ID NO: 10814 - DNA, 1991 bp, Setaria italica
  Peptide Sequence Number=SeqID_76788
atcctccaagaccacgccgacctcctccctgcagccagtgctagaaccacgcttccgtcttcccaacagcggacggtcaaatcttggacagagaacagcgcctgcggcctgcacgatcaggagtaatgccgtcacaccaacctaccgagtaacttgtccttggccacttcaaagttcaagatgctagctattgtttcctgtaattgatttggatctgggaagtctgcgtgctagcttggtgatttgtgcaccgatggttgcaatagaatggactagagaattccttggcttgcttagaatcctaatttatccccaatttattttttcaatttattcctttcttcctagattttgggctagattcagtcgagatcctgacaatatgttaaatttcttgacatgcagcagtagctccaagtgccagcctccggcaaatgctgcctctggtcttcttgtgactccaggtgatattgaagttgaagggcatagatgtatcttgtttgtgtgtgaaatgacgaatgtactatgatgaactatgaagtgatgatggactatgcttcatatttttgctgtgaactacaagttcctgtatgtcaatatgtgatgtttgatgcctcgtgcctgtgtattggttggaagctggagggcacacgggcatgcccgtgggtaacacatgcccgcggatggtgggtgacgggtgcgggcgcgggcgagcagcgtgggatggggtcgcctccctcggcggcctcctagcggcacaacgtggggcaggcctacctccctcggccggcgtgctaggggcggcagggacgggcggccacggtggaggctgcctccctagtaggctcgtgccggagtcgcgcggggcgcttccatggccggcagcgatgcacctccacacccgttgcccccttttgtcttcctgctcctgcaccaaactcagcactgccaggggagatttttaaccttctgatttcagattcaagcacagttactgaactcgatctttagtgagacttgtatagttccaaagcattgtttcagatcctgtgatgtttttgtgcggctaaatttattcaaaggattgtgcttcagctcttaatatatacaagaagaatgaatctcagtcacacctaggaatgcttaaaaaatatctgaattaatgttctattagtgagttctgtagatgcctgattaatcattagtacatctgtgacatgtatccatagatatgttgtgattttcttctgattccatgggcagttcatgccattttattttctgaattgatctacaaccagtatttctgaatttctagtagctcggataagtttattttattaacttttttatttgctggttgctgcgtttagttgtctaatatttgggtaatgatccatgtttactttgcttctgttcagagtattggtccagtggcttcataggaagtgttttttgcttcggagtgaggcttcaaattgttgctgtgaagttagtttataattgaatgataaaattggaggaaagcagctacataggctacaaccctatccctctacagactgcaggtcattgagagacacaagtcatgtggaaaaaagaaaaaaggagtacttatccttaattcctatgcatttttgctaataggaaagtatggacaactaaaatatttagagaaagctttatgcctatatgctggcgatggacttctagaagaacggagaattacagaaaggtttattggtaactgctggtgtcgatggggaatgaatagatcaataagagaactcatatttagttttattttattatgccaaacatagttgcaaacttatagtcagagatgatgtttttattctgctgtggtcatgtttattttagcagtactctagtcattgtgttattactttggttgagacatatattagaagttaatgaaggtttgagttcttatatgtgatgatgaattatatgtgatgatgaagtataaa

SEQ ID NO: 10815 - DNA, 2429 bp, Setaria italica
  Peptide Sequence Number=SeqID_76789
ttttttttaaggaaataaatacaagacgtaataatgcccagagggccaatagacccatataagtagagtacaggtggtagtacatatacacagaaccccttatacaatggggtaaatacacaaaggaaacatatctctaacacatcgatctgcaagcatcaggcagaattaagaatgttaatgaagtcaccgcatgcacaaaataaggggattagttgctgttgcaggctcgtttctggccctgttgacctgttagtgacgaatcgacagcttcatacctggaattacacacctatatgcttctgcatcagccaaaatcttggtgctgaatgtgcggggaaagttgtgagtgacgctgacagagcacccaagctcagacagagtattcttctgccgatccggccaattcacggctggtgggactctccttgtgctgctgccgaactgtcgtgagcacctctgctataccgtgacctcctagccatttgggttcattgcacgatttactgacagcaaaactcaaatgacaggctgatttgagggttcaattgtattattaacagaaagggaatacaatgattttgcaagagccaactcatcttagttgtggtgataaaagatcagtgaatgaaaccaaccaagtgcgacctagcagctagtagatttggattggcaaatctgatcagtatgccttaggagcggtggcactagctctgatatttctttcaggataccatgctaatgttaagatgaagataacatttgttcaagtacagggaaacaaaagataagcaacccctggttctagcaaattacattattattctaatttacaatgatattcaacggattcatctgtattattgtacacactatcaaaattattgatctaaaaatatagtatcattatgcatcttaagaatctaaataaaagtagtttctcaggaattaaacctaatcatatatagtttacatctctgaaattgaacatgttgaatacctgaattctgaacagatacgcatcttcactcttcacaaataaaactcatgaatccgtttaaaaaatgaacatggtaatacttcaaagaacttgacctgaagttctggataggaggtgcagcagaatatcctccttgtgtccccagactatgcacaagtgagggagataaaattgagaacagagaaatcaagtattgaatgaatcaacaataaaagtgtccacagactgcacacgagtgagagaaattgagagcagagaaataagtagtctggaataatggattaactgcagacaacaaagagcagagagtagagaatcagcgccactgcatgttatgagaacaaaggcatgcttgtagtcccatatatttagtaagcactgatcattgtacacctttcttttatattacacatacatcttttctaacatattggacagttgtaaataaggcaacatgcaaaaaagtattctaaatcacatgggccgagcaaggcagaaacctgaactctacttagtacaatatactctgaatatctgacagaaccctggttgaagtccaccctaaccttttgtaagtacactctatcagttaactgcatagtacagactcttatctaaaatgactggtctccattgtggttgtgaaataattctcaaatggatattaacccacatctacatcaagcttttttctgcctccatcagtgtgttttctgattagcacatctataattcagaataagagaaagacataacaatcctgaatacacatgagaggatcatggtgatcacctcacctgaatccaaggagggacactacggattcagttgagcatttcagagaatgaaattcaggaacatgaagtcccagttgagtacacatacatctcgtttctgctctcgttgctgacctccactatggagtgactagagagctcccagttgagaactcctggctgaacttgcatcctgatttcgaaggagaaatattggattccataggttgcttagagcctggagaagtttgcaagaagttgtcctggcgctcaacacctggacatagccacaggggcgctctgtaggcggtgttcgggtcggagctggacaggtatggggcttcgaggcacattgtcgggcgtctgttcgtcgcctgcaactcgttggttggggataggcgtcggcagcgatagacaatggtgggggttcacgaggaacttggaggtggagacccgtctgcacatcaccacgcgtgcccttcttcctcccgaatcgcttcatccccaagctgatctgagcggacaggaccacgcctgccgatcagaacccaccgtccagtcccgcgaggccacattcttcctttatggtgttcaggtgccatctcacctgtaaggtgtcccaagacaaaagtaaacaagaaccaagaaacctc

SEQ ID NO: 10816 - DNA, 1108 bp, Setaria italica
  Peptide Sequence Number=SeqID_76790
cggcgggggtgaggcggcccggggtggcgcggcgcgggaggaggaggcgggtgcaggcggacgcggccgccgtgcagcgcctcttccaggcctgccgcgacgtcttcagggggcccggcaccgtgcccaggcccgacgaggtccgactgctccgcgacatgctcgacaggatgaagccggaagatgtcggcctaagcccagatctcaagttcttcagggctagagatgccgctcaaggaacccccaccattacgcacacgacaatatacaaatgcccaaatttttcgatggttatcttatttttgccgcagaatgcagtcatccctctccacaatcaccctggaatgacggtattcagcaagctgctcctcggatccatgcatatcaagtcatatgactgggttgatgctgattctgatccgtcagcgagcagctgttcatcttcagctgatgatcaattgagattggcaaaactggtggtggatggtgtttttacagcgccgtgtgacacctcagtcctgtatccgacgacgggaggaaacatgcatcgatttaccgccattgcgccttgtgcaatcctcgacattcttggccccccgtactccatagaagaggatagggattgcacatactacactgatattccatatacacaccattcgacggcagacggcaccactgacctcgccagcgtggagcaagatcaaggccatctggcatggctaaaggagatcgacatgccgagggagctgaagatgtgcagcgtccactacggcggcccgccgatctctgacaagtgaccgacgcccgctctctccggttgtagctgtactgtacctaactgatgtccaactgatcatggcaggatcatcctgagttcctgaccttgtgaatagcactagcagcaagccatgagccttcgcagacagactcccaccagttggcgagaaacagaatgcttgcttgcctctgtgcacgcggcgttgttgttgttagatgttttcctggcctatgcttcgttttcttctttttaaatggatgtttcctgttcttggttcttagttaatacatagatcatccacagattaaatttcgtttctaaaaaaaa

SEQ ID NO: 10817 - DNA, 1522 bp, Setaria italica
  Peptide Sequence Number=SeqID_76791
ttatttcaggttatgcacattctctaatccatctgctccaaactagtagccccttagtggcttagtgcgccagtcaacttgggcactgacttgaaagctacatgtgaaatgtgtgatccaggaggttcagataatcatttgtgtttatgtcagtgactcagtggccgcatgtttctgtcggactgattgagccgctagcgactcgagcagcgcaagcatggcgaccgaagccgccggcgaggtgcggcaatggaccgcggacatcaacggcatctccctccacgttgccgagagcggcccctccaccgggccggcggtcctcctcgtccacggcttcccggagatgtggctctcatggcgccaccagatggccgcgctcgccgcccgtggcttccgcgcgctggcccccgacctccgcggctacggcgactcctccgtccccgccgatccagccgcctactccatcttccacattgtcggcgacttggtcgcgctcctcgaccacctccgcctccaaaaggtgttcgtggtcgggcacgattggggcgcgcaggtggcgtggcacctctgcctgttccggccggacagggtgcgcgccgccgtcatcctgggggattccctactttccccgcgggcctcgcccgatgacggagtcatttgccaagctcggcgatagcttttacatcaatcagtttcaggaacctggaagagcagaaagggcatttggtcgctacgatgttgcgactgtcctaaaaaagttctacgcccttgaaatcgatgaactcattgcacctcctggagtagagatcatagactttcttcaggcaccttcgtcgccacttccctggatgacggacgaagaactgggccagtacgccgaaaagtttcagaagaagaatgggttcacaggacccttgaactactaccgcatgttggaaacaaactggaggcttactgcaccttggagtggagcgaagatcatagtgcctgcaaagttcattcttggtgagaatgacgtcggtctccagtccttcgggactgagaagtacgtcaagagcgggggtttaaagtccaatgttccaaatcttgaggtttcgatcatcgaaggtcaccatttcctgcagcaagagaaggccgaaagagtgaattctgagatacttgccttcctagacaagtttgccaacgaggaagcatcagcatgatgttgttattttcagtcgtgcctctgagaagatggtctcgtatctgtgagtaactggagcctttccgaactgaaattggtgaagctgatatgtatctctgttcttgaataagtgggttagccatctgctggctcgcatttaggagtaaaaagagcatgtaaaacagttgatatatgccaaacttttcgtccatgaatgatgtcatacgaggtcctgtaatttttccagtccagctgttcttttgtgcaggtggagattcaattgggaatgaacttgtatgatccaggagggtgatcgacagttcctttcacttcaaaaaa

SEQ ID NO: 10818 - DNA, 1748 bp, Setaria italica
  Peptide Sequence Number=SeqID_76792
atcgacccaccataccagtccgaaaccaattcgctcgatcgagaagccatgttgaggggtccctgcaacggatacggtggcgccggcgccgcgaagcaccaccgcagagctgggggcggcgacggggacttcgaccgctgccgccgccgcaactccgacggacatcattacccgccgccaaagcgctaggcgggtgccctgacgtgactgctacgggcgtaacgtacgtggttgttcgctttagcttattgagccggcttatcagtcaccaaacagtattttcctctcacaataaatcagccgtttcagcttttcagctggcttataagctgaagcgaacagcctaccatctactcgtacttggcgagctcatcggcgaacgcggcggcgtgtggctcctcgacgcatcggagcatgagccggatgccgcgcttgggcgtcggcggcttgaggtagatcaccgacgcgacgatgttgacgtggtcgttgaccgtgaacacgtaccccggctcgccgaagccgtagtccacctcgttgaagccgacgcggctccagtccgacaccgtcaccgtgccgtagtccagcggcacgttgtagtggtcctccttggcgccgccgtgcatccagtccgtgaaccgcgcggtgagcgcctccttcgccccccgcatcacgccgatcacctccggcagcggcgcctcgcggatggccttgctggtccgggtgatgcccacggggtacacgcagttgccgtagtagccttccaccgacggcagcacgccctggaggaggtgccgcgtgctggcggcgaagccgagccggacctcggcgtcgtcggggagccccgccgccagcgcgcggcacttgaacaccacggccgtgacggcgtcgaaggtggagcaggtctgccccgtcgcggcgccgaactcgtccttgatgcgcgcgatgctctccggcgggatatcgaccacctgggtcacgaagctgaacgccgtgaacgacggcggggggccgcgcggcagcttgggcgggtccgggatcgcgtcgcggtcccagaccggcgccaccgacggcgccggcagcccacgcgccatctcgccggccgccttgaggaactgcgccgcgccctgcccgtcgaacaccaggtggctgaagcagatcccgaccgcgaacccgccgcaggtgaacttggtcacctgagccatgacgatgagatcctcgagcttctcctcggggggcgggcgcgggaggagttcatccttggggatgagcagcggccgctcgaggttgttcacgtcggcgagcgcgcagctcgcggcggcctccacgaaccagacgccctggccggtgcactccacgacgggctccccggggctcgcgtccgcgatgcggccggccaccgggtagtacggcaccagcgccctcgcgaagccgtcgcgcatcgcggccaccgcggcgccctggtccccgacggcggctcctgctgccggggggaacacctgcacgaagtcgaccgagacgcgcaccgccgcggtcttgtcgatggaggacagcgggagggtgccgcccggggtaggccccgccggcgggacgagctccggcgccgatctcgcgacggtgggggcagcggaggcagtcatggcggcgtcgggtgggggggcggggcggagcagagcagtcagcggcagtaagcggagttggtccttgccgcgtgcaccgtgcagcgtggttacggggttgggctcaccagc

SEQ ID NO: 10819 - DNA, 701 bp, Setaria italica
  Peptide Sequence Number=SeqID_76793
actagacgactaggtaacagtaaagagacaacgccaacaacaccaagaagagagggagagagaaagggaagaaaaaaataaaagaaagatctctagtgtgtgtgaaaaagtctcctcctttcctctgctccaccctcccgttgcagccatggagtttgcctagttgtgcccgttgagtactagtagcctcctcgagaccttcagatctgcgcctcctagttccagttcttcgacacaaagccgtccagatggacaccgtgacgcccgcgcccctgcaagctgccgccggagccggcgacgccgccgtcttggagaagctgctcgccgccgccgtcgccgagggtcctatctgtggtatgcctgacttcaagatgagtggaaagaagagtgacgagcttgaaccaactgatgctggtgatgaagatgacggtggtgacgatggggacgaggatggtgactttggggagggtgaagaggacatctcagaaggagagggatatgataacccaaaggccaatgagaacaagaagaaacaaagaggtgatgctgaggaaaatggtgaggaagctgaggaagagccagaagaccaggagggtggtggtggcgatgatgatgatgatgacgacgacgacgatgacgatgatggcggtgaagatgatgacgacgatgacggtggtgaagatgacgacgatgctgtagat

SEQ ID NO: 10820 - DNA, 1048 bp, Setaria italica
  Peptide Sequence Number=SeqID_76794
ctgcccgcggcgcccccggtgctggtggccatgatcaagtccgaggaggcgcgccgccgcgacctctcctccctcctcgtcatcggcatcggcggcgcgccgctcggccgcgaggtcgctgagcgcttcgccgccatcttccccgacatagaacttgttcagggctatggtctgacggaatcgtctggatcggtggctgccacggttggtccggaggagtccaaggcctacggttcggttggaaagctgtcatcgcacatggaggctaagatcgtcgaccccaccaccggcgaggcgctcgggccggggcagcgcggggagctttgggtccgtggaccagtcattatgaaaggttatgtgggtgatgacgaggcaactgcagcaacaatggattcagaaggctggttgaaaactggtgatctatgctacttcaatgaagatggtttcctctacattgttgatcgattaaaggagttgataaaatacaagggatatcaggtgccctccagctgaactggagcatatcctgaattctcattctgatatcatggatgctgcagttatcccatatccagatgaagatgtcgggcaattaccaatggctttcatagtgaggaaaccaggctcaaacctcaccgagcaacaagtcatggattacgtggctaaacaagtcgcaccgtacaagaaagtccgccgagtggcctttgtctctgcaataccaaaatcgcctgccgggaagatcttgcggcgcgagcttgtacagcaggccgtgtccatgggtgcctccaagctttgaggtttatgctgacttggaaatctaggaggaaagttcttgtgtagtataccatattaccagacccgggatttgtactgttagaataattaggttgttggcccattatttaattgatcaaataaatcccaaggctcattagtggtggtagttacacttggaagttgagagggtctctaaccaatcaatttataaggtggagctatgctgcatctgttgagaagttgagggagggatagcaggacgtgctcgccg

SEQ ID NO: 10821 - DNA, 1643 bp, Setaria italica
  Peptide Sequence Number=SeqID_76795
ccacggagctgggactgccgccacgccaggctccgggtccctgccgccctcgtaggcctcccgccagctcgcgcaccgtctcgcccagccgcgccccggcctcggtgcccatgccctccacctccttctccttgagcagccggaggaggccacggagctgggactgccgccacgccaggctccgtgtgcgccaccaccggtcgagctctatctttggagtgagctcgtcgagccgagcagccgctggaggggagggcatgggcaccgaggccggggcgcggctgggcgagacggtgcgcgagctgcgggaggcctacgagggcggcaggacccggagcctggcgtggcggcagtcccagctccgtggcctcctccggctgctcaaggagaaggaggtggaggcgttccaggcgctccacaaggacctcggcaagcaccacgccgaggcgtacagggacgaggtcgggctgctcaacaagtccgccaacggcgcgctgcagcagctcggcaaatggacggctccggagagggtgtgggtgccgctagtcgcgtggccggcgaccgcgcagctggtgccggagccgctcggggtcgtcctcatcttctcctgctggaacgtcccattgggcctgtcgctggagccgctgatcggggccatcgcggccgggaacgccgtggcgctgaagccgtcggagctctcgccgtgcaccgccaagttcctcgccgataacatcggcaggtacgtggacccctcggcggtgaaggtcgtccagggtggccccgaggtcggggagcagctcatggagcaccgctgggacaaggtcctcttcaccgggagcccgcgcatcgcgcgctccgtgatggcggcggcatcgaggcacctgacgcccgtggcgctggagctgggtggcaagtgcccctgcatcttcgacgcgatgcccggcgggcgggacctgcaggtctcggtgaaccgcatcatcggcggcaagtggtcgtcctgcgccggccaggcctgcatcgccatcgactacgtgctcgtcgaggagcgcttcgcgcccgtcctgatcaagatgctcaagtcgacgctcaagaggtttttccaggaggcggaccacatggcgcggatcgtcaacgagcgcaacttcgagaggctgagcagccttctcaaggacagggccgtggcgccgtccatcctgcacggcggctccatggacgccaagaacttgtgagttctttcttgtcaacactgaatgatttcccaactgcacagggtgacctgatctcctgacgaaactgtccctgtaggtacattgagcccacgatactgctgaacccaccgctggactccgcaatcatgaccgaggagatattcggccccctgctccccatcatcacggtgaagaagatcgaggacagcatcgcgttcgtgaaggcaaggccgaagccgctcgccatctacgcctttcacccgggacgcggcgctgcggcgccggatcgtggacgagacgtcgtccgggaccgtcaccttcaacgacgccgtggtgcagtacgcgatcgacgggttgcccttcggcggcgtgggcagagcgggttcgggcagtaccacggcaagtactcgttcgagatgttcagccacaagaagg

SEQ ID NO: 10822 - DNA, 2462 bp, Setaria italica
  Peptide Sequence Number=SeqID_76796
cctacgcgcctcccgatccgccgccaccaccttcccaccgcggatccaccggccgcttccgccgcggcctccgctcagcccaggcctctccctcggcggccgcttcggcaccgaggccaagcgccagtgcctatcgcgctcctcatccatcgcctccatctactccgtctcctccctcgacggggaagccgacgccgacccgtccccggctgcgttgctcccgctgctgcgcaccagctcgctgctaaccggcagggacgatgcacccgaacaagcccgagatgggggcagcgcgcagcggctgcagtcctgtagcgcgcagcggctgcagtcctgcagcacgcacagcgctagatccatccacgaagaacttctacggcagcacggcgtgcgcccggtacccatgcccaccatcgcggctgaagcccgacacatcgggtcaagcagggaggaggaggcggcagcagcttgtgccgccgtagtctgggagctcggcgtcgctcggccactcgagtcgagcgtggtgtggtggtcagctccaggtcaagtacctcctactactctttcatgcatcaaatctatcttctccatcctttctctgatttccctctgattgaattgattcccgatctagggtttcgtccatgggagctgctgctgcgctgcacggcactgctgtcaatcccttgcatcaattgttgtatttggactcagataagttcactaatcaaccccaagtccttgttcttcccagttttcagtatctaccattgctctgttgtgcttcagtttttgatgcttcactgaaatttagggttccctacttgaattgatgtgtggtatagctaatctggtgcatttattttgtggatcaattcccttgattacttgctggtagagttactacatacggaaaaaagaacttcctctggtcatgaaagttttctcaatcagttttcctgaaatgaagccccagcaaccaatttgttaattgatttgctgtcggaacccatccaatactgactctcgatgttatgaaacagttggattcctgaataattatgctgaactaaatttctttgatttatttccaatggttactttgtcagttgtgacacgagaagccagttcatgaatctgcgcttgccgtgctttaaatacctgtgttggtgaatctgtgcttgccgtgctttaaatacctgtgttggtgtagtgaataattagcacctgttttaggacatttcgttacgactagcacctgttggagggcaattatcttgctatcctctttcatttccattgagaggtgattcagctctatgaaccccttttcaatccttgattcttcccaagagctaaattgataggtcaaatatcttaatttttataatgcagtctggtggagagaccaagtccataaattatctctgagagctgcttttcttccccgttcatctccagctcttccactgagaattgtcttatagaaagtacatataaagggaaggggcaaaatatgacagagcttatgacttatgtagtagaataatcgaaatcatggtccttgcttctaagccatctctaggtattaatccaatgctaaatttaaaactttgattgaagtcctcagtctaattatttaatttcactctactaaaacatttattaaaatgttttgtttagggaatacgttttattttcttctgttatggcaactcttggcattcatatcattggtgtctgataatactgggagaaaacaactgcaaaagaccatcaaggattcaccagcaaagctcagcaagcttattgactcgaaaatgatgatgccagcatagtagtgaaagcaggagatgctgtactgttgaagtcctaaactatttcttggagtcttaccatctccaattccaattatttctaattttctaaactccttggcagaatgatgctcatctgccttgtcctcttcccttccctcactgcaaattcatgggatttgcatcagaatatttttagtagtcaatcaaaccttttcctgagagttcatgttcttatcattactatttgttgtaggtcatgccatccttttcgagcattagggttgaaggcttgaagctggacgattgcaaattgagcagaagtgtcaggaaagcgtggatagccaaaatatttagagaaagctttatgtctatatgctggtgatggacagctagaagaatgaagaattacagaaaggtttattggtgactgctggtgccgatgggggcaggaattattattctaattaagtagtaactcatatttagttttattttattatgccaaacatagttgcaaacttgtagtcagagatgatgtttttattctgttgtggtcatgtttattttagcactatggttattgtgttattactttgcttgagacatatatttcaagttaaaggtttgagttcttaaaaaaaa

SEQ ID NO: 10823 - DNA, 1168 bp, Setaria italica
  Peptide Sequence Number=SeqID_76797
cggaggcagcaccaacgggtccgccgacggcggcaagtgcatggccaccgggtgcctcgtcgacctcaacggcgcgtgcccggccgatctgagggtcatggccaccgccgcggccacgggcgccggcgggcccgtggcgtgccgcagcgcgtgcgaggcgttcgggacgccgcagtactgctgcagtggcgcctacgggaaccccaacacgtgcaagccgtcgacctactcgcagttcttcaagacggcgtgcccgcgcgcctacagctacgcctacgacgactccacctccaccttcacgtgcgccgccggcaccagctacgccatcaccttctgcccgagcaccaccagcggcaagtactccggcgagaacccgcaggccgcgggcgtgcagcccacgaacggcagcatggtatacctcggcggcgagcagctcgccaccggcgacgcccacgtcggcgccgcccgttcctcgctgctcatcttcgcggccgccaccctcgccgccgtcgccctgctctgagctacccagccgggcagcgcgtgtgaaatggaggcggcaagagtcgtcgttgtaaagcagcgagcagagcacgctcgctacccgccgccggtgtggtcttgtccttgtccgggtgcgccgcttccggcgtgacggaggcagagataagattcgagaaaggaaatgcggggtcgccgtcgccctgcccatggcaggctgacgacactgctactacggctaactcgagaaaacaacgatatctctccacaccggatcgcatctatcgcagctttaatttctactggtagcttagcttatgtcgtagggtttaggataactggtagcatgtgatgacctctgcattcttcatttcttctccacgcttcctcgatttcttgggccgagacgatgtacccgatcgttgtccctcgcgctatacattacgtgatgatgattagtttaccttttaactgttggactgtggggaaaagacgaaagggttgaaatgttatcgatgttccttgaaagttaggccgtgtttagttggggaatttgggaggtgccaaattactgttacagcactgtagcacactgtagcgtttcgtttgtatttgtgaattattgtccaaaatattgactaattaggctcaaaaagattcgtctcgc

SEQ ID NO: 10824 - DNA, 1531 bp, Setaria italica
  Peptide Sequence Number=SeqID_76798
ctgaaggaaaaaaaaagataacttccacatcgcaaagtatcgcctttccaaacttcagcgtgattcaacgacggtatgaaactagcatatcctggtgtgacaccagtaaaaaagaatatagtgaaagaaaacgcatcaaatttgaatttgccaaaccctcccgttagatccttctttttgttgaggatgatcttcgggtttgggagatggtgaacgtggctgctgtcaacttcaggttccatttctttacacaaacttggatgagtctgtacctcatagttgcggagcagactggcaatcaacattgatattgcaataattgcaaacttctggccaacacatgctcgacttccagaaccaaatggaagaaatgactcagccttagcacactcggtgaaaagattcatcccatttgagcctctgggtgctgctaatatatctccaagatccacatcctttttgaggaaccgatgaggattgaactggccagcatcattgccccacacagaagcatccatatgcacaagatgcaaaggaactaccaatattgctccagctggcacagtgatgcccaagccaagagtcaaatcatgtttcaaagaacatctctgcagaagaggtccagcaggcaaaaggcgagcagattcatatacagtagcaagtagtaattgcatcctaagcacatcatcaacctccagctcagatgattcatcgcagactgcaacaatctccgcatgtatctgatcttgcaactttgggaacaagataaaccttgtcaaaatgttaccaatcaagttagcagaagcggaaataccatgtaacatcaaaccgatgatgtttccacagatttcctcttctgaactaagtgatccttcagcagccccatggagacaatgacctgccatcatttcacctaaaacacctctatttagaccttttatcatcccttcactttttagatatgacctctgatcaaagtggtgaagtgaactattttgatctcttgattttctgatgattccctctgttaacgtcttcagcttagcacaaagggtccggtacctcctatagctaggcttccaaaacgggcaaactgcataagaagcccagaagcaaccatcctttgcaaccatcataagaagttcctcataagtaacagcatcagaccaattgaagaaggcatcaccaaaaagagttccaccaatgatgttaaaggacatgtgctgggagaaagatctacagtccagaaaatccttggacataatagagtcaattctatccatgacagcatcaataactttgaatgaacttcgaccgacaccaattgtaagtttttcattcaaaaatattttcagagattctcttgtacttttgaccttctcggatgaggatacgaatagaccaagtcttccgcaagctaaattatatgttctaccagtcaatggtaacttatcttcagcctttgttagaacctctttgactagagtaggatctctaactgatacaagtagctgagagggtcctgcccaca

SEQ ID NO: 10825 - DNA, 1945 bp, Setaria italica
  Peptide Sequence Number=SeqID_76799
aagaaaactgccagaagtaaaaataagagacaatttgacaaatgcttgtttcaagttgctaatacatttcaacaaattacatcaatataaactcgtgaaacatacatactggatccctgaacaggataaaaccacccaacaatacatactagcgatccaacttgatccatcttttccattgtccagcccttctgctctccggttcccagctttccataatcttatgatatcttcagcagtagatacgctacattggactaattattagttacatgataattattagttgctaaacaagaacaaagagaaggaaaactaacagatacagcatattcaacaatgtagcagcattagctctcaagcctggcagggcgaaagctcttaggcggcaactgcgaatgtagagaaacaagccttgattctatcatcatagggcacggattactcacaaaacaaaaagaaatgaaacaattgtaggaaattattttgactacatgagacagtattgaatttgtatgattgcatcagacatccaaggaaggatttagcagcactagctctcaagcctggcaaggcgaaagctcttaggcggcaactgcgaatgtagagaaacaagccttgattctttcatcatttgcaatgctcaaataccaaatataaactgatttaaatacaaaatttagagcttattttaaagaatgaaggtggacaaaaaaactaagtgtatatttgtaagagtagatgtaatcacagaaaccggctctgtggacagatagaggtgcagtccccaggttcctatcaacatgtgaaacgttgaaacaactcttttttggcctaatcatagcatctccggtcaatgctcatagctaccggagacgtggcatcaggcccaaaagaatgacaaccaatgcagaaagtacaatatataacatcatagtagaaaattaatacaatccctcagagacccaatttaaatcacacaccacagctgaatcaagcaatggcagatgggagccccacccccagaccaaaccacaaaggttatggtataaggatgaacacctgcagctgagagaagcagctgctgctaacagtgtcaaacggcacttcctatcggtaggtcttgagatcttcactgggactagacctagagcaggatgacaggtacaggtatagcaaaaatcacttatggacactagacctagagcaggatgacaggtacagttatatgagaaaaatagaatgtatagtctcagttgagcctcaggaagccaggcaattgtcgtcacaagtaaatctgacggtaattccagatatatagctaatcttcataggcttctgttggagttgtcatctaatatgtaaaggttaaaagcataacagaccggagtctaaactaatgatgaaacatgttgaaaagagaactctgaaagaaatttctagaagatacatcaaattaaacattaagtatcatcagaaaataattgccttctcattcacagtgcaagcactgtgtcagaaggtgtcctaagattgtgtcaaggtttcatcctttgatacaggatacgagacacaaacatcaccaatcgaacagcagagtgtgcctcagatcaagagttaggctatcctaatcctcactacctaaaatttatgaaatagagaaactgcaaacaataaactattggaaacaataagtagctcagtggtggcaatagatttattggttcgattctgccagcaagcgtcctcaatgtcttcagaagagggagcttatttgtcctcattgcatcaaacttctccaataataattaaaaaaaatctggcaaaaggtctcagatggctcagttcagcgggataatcggcatacagattcatctcaatttagagataaacatgtgatttggtctgttgagcttgaatattactgagtcgtcacagccatctc

SEQ ID NO: 10826 - DNA, 1561 bp, Setaria italica
  Peptide Sequence Number=SeqID_76800
aagttaaataatctcttttatttcgaaaaagaatattttcagcatacaatcctggggctgcctgctcataagtcattacaccaccccagcactccgtcctcatcttccagcgtcaagactcgagaccctagcccatttcgcaagttcttattttctcctgtcaacgccgattgagagcagctcgaagttcctgacagcgtcatcatgtgaagacctaccgatttttgataaagacgaggacctgatctcagctcctcccaaatggtgcgccctttgggcagtagctgatgggcggctgctgctactcgagactatgcggcccgtgcggtttgggtcacttggatctccagaggagcttggcttgcttgatgaaaggatggctcttcttgatgtgcttccattgcgtgatgatgatgctggccttgttttatcagaatcaacagccgccttggatggcatcaaggactctagaagacttttgtgcttggtgtgttctctattgtgaccagaaccggatccagttctaaacaaagcttcagctgcagttccctcagtccgttctgcagaagggcctgcccaacccacttgccttgccgctagactgaagtttgcttttatctctaaattgaggatacttcataatggtccagtcaaatacataatctagttggtacccttcgcggataaataagtcacggaagactctcctcaaataggaataatccggtttatcttcaaatcgtagggatcgacagtaatggaagtatgcagtaaactctgttggatatgatttacagaggacctcaactggcgttagcattttcttttcactgattctatcatatttttgcttctttgtgccagctttcagaccttgccaaggaagacttcctcttaagaaatacatcagcacataaccaagagattccagatcatctctcctgctttgttctactccaagatgggtatttacactggcatatcgcgcagtccctgtgagatttttgttttccctgtatggtatgtgcttatgactttggaggtctcggtactttttcgcaaggccatagtcgatgacaaatacctggtttgctttacgtcctaaacccatgaggaaattatcaggcttgatatcacgatgtagaaacccctttgtgtgcatatactcaactctactgatcatctgatcagcaagcattagtacagttttgagggagaactttctgctgcagtaattaaataagtcctccaaacttggaccaagcaggtcaatcaccatgacattgtactccccctctaccccaaaccacttcagatgtgggatcccagttccaccctgcaaaagcatgtacagttttgattcatagtgaagctgcggatgccgtgatttcactgattccagtttgacggccacctcttcaccattctgcacgttcacggcgaggtagagctccccgaaggagccgctcccgatcttcttcccgagcttgaacttccccccgaccacctgctccatcccgccagtcaaacgagcgctacactacacccaccaccagagctc

SEQ ID NO: 10827 - DNA, 1828 bp, Setaria italica
  Peptide Sequence Number=SeqID_76801
aatgcgcacgcccggctgccgccgccggtgacgacgggtcggcgggcggccggcgtcggtgctgccgcacaagacggacaacgtgcgcgaccactaccgcatcgggaagaagctggggcaggggcagttcggcaccacgtaccagtgcgtgggcaaggcggacggcgccgagtacgcctgcaaatccatccccaagcgcaaactgctgtgccgcgaggactacgaggacgtgtggcgcgagatccagatcatgcaccacctttccgagcaccccaacgtcgtccgcatccgcggcgcctacgaggacgcgctcttcgtgcatctcgtcatggagctctgcgccggcggcgagctcttcgaccgcatcgtcgccaagggacactacaggcgagcgcgccgccgcgcagctcatcaggacgatcgtcggggtggtggagggatgccactcgctcggcgtcatgcaccgggatctcaagccggagaacttcctcttcgcgagcactgcagaggatgccccgctcaaggccactgattttgggctatcggtgttctacaagcccggtgacaaatttgctgacgttgttggtagcccctattatgttgcccctgaggtgctccagaaatgctatggcccagaagctgatgtctggagtgctggagttattctgtatattttgctatgtggtgtacccccattctgggcagaaagtgaagctggaatcttcaggcagattttgcgaggcaaacttgacttggaatctgaaccatggccaagtatctctgatagtgctaaagatctagtccgtaagatgcttatccgggatcctacgaagagattgactgctcatgaggttctatgtcatccatggattgttgatgatgctgtcgcacctgataagcctattgattctgctgttttgtcaaggctgaaaaacttttctgcaatgaacaagcttaagaagatggcattgagggtgattgctgaaagcctatctgaggaggagatcgggggcttaaaggagttgttcaaaatgatcgatactgacaacagtgggacgataacttatgatgaactgaagaacggtctgaaaagggtggggtcggatctgatggaacctgaaatccaggctttaatggatgcagctgatattgacaacagtggaaccattgactatggagagttcttggcagctacattgcacatgaataaactggagagggaggaaagcttggtgtcagcgtttgcattctttgacaaggatgggagtggcttcataacaattgatgagctctcacaagcatgccaacagtttggtctttctgatgttcatcttgaggatatgatcaaagatgtggatcaaaacaatgatggacaaattgattatagcgagtttgcggcaatgatgagaaagggcaatgctggtggagcaggaaggcggaccatgaggaacagcttgcatgtggatcttggtgaacttttgaagcccgctgagagctaattggtatcagaggattctgctttccagatgctcccatatgccaattgagcagttgatctattaccaatgccaccaaaaagctgttaaatttctgcagtggtactagtagttagtggaaagagcatactatggtacaagtgtaacaaaatttaggtgctatgatgctacttaggagtcctgttgtcttgtcatgaatgttgttgataattctcaggtttgtaccattactgatttttgtttccagtgtacactgccgttgtcccataaggtaggcatctagatctgtccatttgaattaccaatccatttgtaaacatgttctcatcaac

SEQ ID NO: 10828 - DNA, 3270 bp, Setaria italica
  Peptide Sequence Number=SeqID_76802
ctggtagaggtcttcaacgtcccgcatctctcaagacgatggatttgctcgactgccctaagcttaagtccatcgtcttgagagatgcggggacgttgaagacctctaccagactttcacaatcctctatgtgtagagactcgagacggggcagaacttggctcctttctgatattggttggccaggagcagctttcgcgtacccaatcagaccacggcacttcttaatggaaaggtgcctcaaggataccaagctatggaactctttttccggccagtagacaagcgcatggttgatcttcttaattttcaaacgttggagctggacaaaacatgtccatagtgccagtggacttgaggggaacagaaagttgcagccacttagcttcagacttgtcagagggtatttattactggcgtccagcagctcaaaggcactatgcccagttggtaaagtagtttctgtgaattcgactgataacaccagttcggacaatgagttaataaatgtaggcactattattgctgccagttggctgccatgtatttgtaatacaccgagctttggtgcttctatcacccccggtagagttgtcaacttgggacatttctttacagacagggtctcaaggtcagggaatctctgctcttccatcatccccaagctcttaaaactatctaagtcttctaacaagagcttctttaagtttggaaatgctgaccatgctgtaacatcactatggtcaaatgattctccctgagatgtagctgatggtaatgctgccagttcggggcacttttcgattgataactcttcaagatatggaaatattatctgctgcccttgagttgcttcagcagcgcccccccacctctgaaactttgctaagcattctaattcgagtaccttcaggactggaaatgccgaccaaagcttcctctcgtcttgctccttgtaatctccacagcacgatcctccgagaagtgctggccctggtaatgctgtaacctttccacaattgctaataaacaacctctcaagttgaggaaacattatctgttctccttggacccagtcaaattccggcagtttgtccagcgtaagcttcttcagattaggaaagtgaaagaatgtaccaccactgcacaagctttccagttttttcaatctttccagacgaagaacttgtagagctggtacactcccaagtggaggaagcttatgggacttgttacagttagaaagatgaagctccaccatttttgtcagcgtacccatccacgttgggaaactggttccttggtaatgctctatcctcagagcctctagtccaggaggagcttcgagaccctccagcaccttatgacaatgtagtttctcctcctgactacctgtccacgtccagtttaatgacaattccctgagctccttttatttccaagattggcctgttttgcatctgctgcatttgtcacattttcgagttgactaagcagtagtggaccaccaaggttgtttaaatgctgcagctctgcaatactactgcaatcagggcctgcacccactacaaaatttgtaagtgtttgcagggaagtgagatgtccaacctctggcggcatgcgcttcaactcccaacattcgtgagtgtagaggtgacggagggcagtcatgtactttattccctttggaagccggccaagtttgtgacagtgcgccacattcaacgtttgcagattgtacaaaatgctgatatcttccggaagtgccactatatgactccacgagatatcaagatacctcaagagatgtagctgctttggtttcagtaggattgtgctattattctgacaaagttgcaatgcacgcagagagctgtattttgcgagatgctgcagggaactttctatgcgctgaccacatagtagtgtttgcatagctggagaccttatattcagagaatcattcaaaacggcctctggcttgccacatgataacaatatatgacgacaagtgttctgaagaaactcatcactctgctttggcttctcagttatggtagcaacttctttgcccatgacagatagtgccacatcgtgcataagatcatggattttacatgtacttgtagacaaataccaatacacatcttcccatgctttcccattgacttgcttcacatcttgaaagaatgaccttgagaccagctcactgaaaatctgtttaccaattgtttcatgacgaacatctttttgttcaggaataaagtcatttgccatccatagttggatcagcatttccacgttaatctcatggtccttgggaaacacagcacagaaagcaaagcactgcttcatgtgtgatggcaggtcatcgtaactgagcttgagaataggcaggatttgatcatccttgttatgggcgatgcttttgctaagcacagccttccattcttccgttatcttgccacgtagtacagatcctagtgccttcgctgccaatggagaccctgcacatctctcaacaacgtcatcaaccaagccagctaaatcagttggttttctctcttgcgaaatgaatgctttagcctcaataatttccttgatgaatttattgtccaaatgtgcaatgtcatgtcctttaactgtacccatgagttgagctatttctttatcacgggttgtcgttagtatggcgctaccaacatcaccatgtttaagacaggcattcagcttgttccacttgttaacatccctattccagacgtcgtccaatacaagaaggtacctctttccagcgagttctctctgaaggttctgcaaggcattctccaggttgctctcagaagcgttgcagatcttgttggcaaggttacaaacatcgaaatcatctgacacgcagacccacttcagcagttggtggaaatgcttcttcacttcagggtcattatagatgagctgagctagggtggtcttacccaacccacccattccaacaatgggaacgaccatcggatgcttattgttagcttgttctttgaccaacattctaacaatcttttgcttctcttcatctctggatctgctgacaatctctggatcaaccatggtggagtcattctcacgcagataatttatctgaacctgcgcttgtggctgtttgtcgaaccgaaagtcgcgcatatgcttgacaagggcctcaatatcacgcacaatcttgcaaagcttgttgcccatcctgtaacggaacatgatgcggttgcccatcccgag

SEQ ID NO: 10829 - DNA, 1230 bp, Setaria italica
  Peptide Sequence Number=SeqID_76803
atatatatatatacatctagcatactgagagtactggtatattacaatgtacaaggctgcaaaacttagtcgcggttacgaggccgtaagtagcagctatcttactggtaccaccgctagtaactagcaactgtaaatgtaaactaacaaaacctgaaaagaagcaaactataacactatagcagcactactaggtgtgttcttaccgctctcgcccttcgccggcatttgcgccgccggccggccggcctccacgactccacgtccagaggcgcacggttattccttccgggctaggctatgtcacgtatacagtacagagtacattgtcacagtgctgatggagtctggagagtgctactagaactcgacgatgaggctgccgaagggcgaccggtgcgggacgcccttgcggcgcttgttccaggggcggcagctggcggaggtcggcggcggggtcgacggcgagaagcactgcacgacgctgctcttgtcactgctcccgccgctgctgccggtgcacgagtcctccgagtcgcagcgcacgtccttgagcgccgccctcttcttcttcttgctatcgccgccgccgtgcttcttcttggggcggtatcctcgggccgttcccacaatcttgcatccgagggagcagaagcggaagcagtcgaggaggctgcgctcgcagacgtcgcaggtgttggtgacgcccttcccggggcggggctgcggccgctcgttgaggaacaccacgcgcgcgctgttgatgatgtacgtctgcacgccggtgatgtccagcaccttctgtatctccgacacccggatcacgtcgtggtacgacgacctccgaatctggatggcgtggtggtcgcggtggtgcccgaggcagagggagcagagcgcgccgttcatgcagtcgaggcagtacatgttgcactcgctcttgtgcgcgtcggcgtggaccctgcattggacgaagaagctcgtggacagcagcggcttcagccacggcggccaccgctggttctccgcgtcgtcgtcgcactcgtcccctcccatggcgtatctgctcttcagtcccagaggggtcgcgtgatcgatggccatctcgtcgccggcgaaccgaggcggtcgaatgcgggtggaagggagaagggagagggagacgaagccttcgcgacgaagcactgagccggggctgcgagtgtgaaggtctttgtagacagacggggg

SEQ ID NO: 10830 - DNA, 2052 bp, Setaria italica
  Peptide Sequence Number=SeqID_76804
agaacaaggaaataggagaaaagcaggctagttcagatcatgcaggtgatagagaagaccctgcacaaaccaagcgcaagactctgacatttgctagaagaaaaactcttagtagtaaaaaagaaggaccaaccacagatgaaaaacgagatgtcactactaggcgctcgactccaaagaaggatgtgtttacactttcatctggttctgatgcttcccctggaaacagcccttcaagggctggtgatgctaatcatgaagaggactcacatagcactcccaggagaaaaggggttcaagaaactaagcataaaaaaccaaaggttgtgggagcaaaatctgatccagaccaaataggtgacgcattggaacatcaagagggagttgctgaggatgaaatgcaagataaacttacaggaaactctgtctcccagaggttaccattaatgtttcctgataaagttcaacgttcaaaggcattgattgaatgtgatggtgactcgatagatttgagtggagatattggtgctgttgggaggatagtagtttcaaacggtcctactggaagtcaggatttgttattggatctgaaaggaacgatatacaaaacaaccatagttccatccaggacattttgtgttgtgggtgtgggacaatcagaagcaaagatagaggctataatgaatgacttcattcaactggaaccaccgtccaatttatttgaatcggagactatgatggaaggtacccttgatggattcacatttgattcagatgaggagggtgataagcttcctgaatcacaggcctatcaaaatgatccgaataatgaagatgatggtcaacctaaggcgaaaaccaaaagaaaagctgagaaacaagtggggaaggcaccgaagaaggcaaaggttgcagggaaggcccctaaaaagggcgcgaggaaaacccaacctgcgaagagaactaggaaagcgaagaaatgatgcacgtctatttgtttggttgttgaggacttgagatagctggcggctgataattcactctgaacagacatctattgttaagcccatatgtgatctgtgttcatcggtgtaacatcatgcagtgattgttttatagaggaaatatgtaaaattgcaaagacgatactgtgttacattgttctactctagaagctttgtagtttggaggtgctaaattactgttacaacactgtagcacactgtagcgtttcgtttgtatttgtgaattattgtccaaacattgactaattaggctcaaaagattcgtctcgcaaagtacaacaaaactgtgcaattagtttttaatttcatctacatttactactccatgtatataccgcaagtttaacgtgatggggaatcttctttttgcatagtgtcaaagttgggagtttgaagctaactaaacatggtcataattaacttgtactctaccagagtaccagtgacaggctgattagtacccgatggacagttcgactgttgacggggacgtgcgtgtacgtgcgcgtgatttctcagccattggacggaggccaggctgggagaaatggccccactacagcgcccagggcatcaaaactgatacagcgagatactgcatcatcagtcgatgtcggcagggcccgtgatccccactctcggacgtgtctgtgactgtgcgagcgctttgaacgccaccaaacctattgactccaagtctccaaacaaaacaaagacaggtagagcagcagtaggatgagtacatgactacagcgcagagagcagtagttggagcacaactacgatagtacgtagcggtaggcgacatacaggctgcaaaaggcgatgtaacgtgtcggaggcgtgccatactatactaggtgaagccggtgacatctcgattgcaaggtttgctatcacgaatgcaagtctgcgatttttgtacgaacagatggagagagcgaaatcaaagaggtgtggatgttgttgatacccaatgggacgttccagcaggagaagtattgtaggtacgtaccccgtagtcgta

SEQ ID NO: 10831 - DNA, 1246 bp, Setaria italica
  Peptide Sequence Number=SeqID_76805
gccgcccccttccctcccccgatcccgccgccgccgccgccctcgccccgtccctcctcgccgttgaccgcctcccgccgcggcattctccgcgccgcgcctcggtccagatccagggcctgagagggagggagggcggaacgagcctgcctccgttgcggcgcatctcatgggtgaagaggctgttgagttcagcgtggagaaggtcgcggtggatgccaaacagagtgccgtggacgtcggtggtaagacgtatgttatcggcagatcagatgatgactccaagccatccattattgttaaaattctggacaaactaactcagacatgggttgtacccacagtacttgggacacagcctactctgaccaagtcacagtctgctattccagtaaatgatgagaagatattgattattgagaagggtgttcccttgaatgagtccatctggttccttgagatagacaccccctttgttaagcagcaacggaaaatcaagggtacagaagttgtttcttggaacaagggagtaattggtgtgggccaaaaaccggttgttattagcgggccttctggtgttggtaaagggacattgattgcaaagttgatgaaagactatccatcaaagtttggattctctgttagccacaccacaaggtctccaagggagaaagaaatagatgggattcactaccactttacagaacggagcaaaatagacaaggatataagtgagggcaaatttctggagtttgctcatgttcatggaaatgtttatggcacaagtattgaagcagttgaatctgttactgatgaggggaagaggtgtattctcgacattgatgtccaaggagctcgatctgtgagggcttcttctcttgaagcaatattcatctttgtatgccctccatcgttcgaggaactagagaagcgccttcgggcacggggtacagaaacagaggagcagatccagaaacgactcagaaatgctcgagctgaacttgatcagtccaattcaccaggtctcttcgatcatcttttggtaaatgatgaccttgaaacttgctatgagaatttgaagaagttgctttctttggatgatgatcaggaagatacagatctttttatcgaggatggcaaacaaaccacaagttactctattgtgtccaaaaatgactcagaagtcatgcttcaatctgaaattatgattctgaaaaatggaagctacaagcttgctggcgcttga

SEQ ID NO: 10832 - DNA, 1149 bp, Setaria italica
  Peptide Sequence Number=SeqID_76806
ttcacataacaatgttaatcaatggccttctgaagaatgttttccatcttggagaaagacaatgatgtcataccatgcaaatgcactggttactggcaaaagaatattgtctcttattgctttgagtttggaccttgatgctgaattctttcaaaagaatggtgcttttgaaatcccaacagcagttcttcgattattacactatgcaggtaacgtaaatgcttctgatgatcgaaatattggtgcagcagctcattcagattatggaatgctgacccttttagcaacagatggtacacctggcctgcagatatgcagagagaaagataggcatcctcagctttgggaagatgttcaccacattaatgggtcccttattgttaatattggtgatctgttggaaaggtggactaattgtgtattcagatctacattgcatcgtgttgtccctgttggcaaagagcgatattctgttgctttcttcattgatccaagcccaaatttagtgatccaatgcatggagagttgttgcaatgaggcatatccaccaaggtttccacctatcaagagtggcgactatttggaagagagattgagttctacgtataaattggcgactgcctaatctagcaaccaataagtagtactacatacgaatcagtagtactgcactatgaacttatgacttccagtgtcaataagatttttgtttctctatgcaaaaatatttcctattggtatggtcagggggtgtttgtttctttagtgcctcctaaaatttctgtcacatcgaatgtttatatactaattaggagtattaaacatagactaattacaaaaacccattatacagacgaaggctaaacaacgagacaaatctattaagcctaattagtccatgatttgacagtgtgctgctacagtaaatatttgctaatgatggattaattaggcttaatagattcgtctcgccgtttagcctccacttatgtaatgggttttgtaaatagtctacgtttaatacttctaattagtatctaaacatttgatgtgacgggtgctaaaaataaacaggagaaaccaaaccagacccaaaacgcactagagtcaacggtgctcatcagctactcctctgcctacctctgaatc

SEQ ID NO: 10833 - DNA, 1263 bp, Setaria italica
  Peptide Sequence Number=SeqID_76807
cggacgactcagttagtcaaattacagagacgttgatggagagcaatttctttcccaaatacagtacagtacagactgatgtcgtctacatggacatctgtatgtaggaaatgctacatacagatggacagagcccagagtgcatgtatgaaacccgggtattgcaaatagcgtgttttgctccgattatggttacaggggtgagccgagctgagccgaccgaccaatcacttcagcattggagaaaattgtggtttctcaccaggatgaaatgtgaagggcgatccatgatccgggcgtggagccctgacctctcactttgacatggcattaccctttcggattgggggatacctcaggaacgatctatctggctgctggcactaaaatctggggtaccagaacatgcccttgatgccttgaggatcaacttcgaatcccaagttcttgtagaaatctacaactttattatctgcaaacaatgtaatgttgttgatgtctctctggagcaaagtacggattactttctccataagtgctttaccaagaccttgaccctgatatgaaggatcaacaagaacatcccaaattgtagcattgaaggcatggtctgaggttgcacgtgccatcccaatgagctgtttcttctctcctccctctgtcaaataacttctgtatttgaagacttaattatcgaatgtaaagtagcaaccaagtagctgtttcttaaggatgctgctatttttgatagaggtctgcgtggccatcctaccttatcgcataaggcttgaagatcatatacatcaacatctccagctgaagaaaatagaatctgttctgtgctaccatcaggtagtgttctttccaggagtactaattcttcaggtaaaggttcttcgacttcaagtggtgctggtggtggctctactgtctctgtactgttattatttttcaagaatccggatctgagagaatcccacaggccagccttcaaggaccaagttgcaccagaccgtgttttagctgccacccgattacgcagaaatctaggcttgggaaccgtactctgcgcttcgaaatggcacgcctttgggatgcgaacgccgcatatggaggaggaaggtgcggcggcgaaggcgggagccatctttagcgagtgctcccgggagcggggcgctcgcgcgtctccggtgagggacgggggatgtcgcgtgagcgtcggtggcggagaggactgaggagcagtggatgactgaatgttac

SEQ ID NO: 10834 - DNA, 1951 bp, Setaria italica
  Peptide Sequence Number=SeqID_76808
aggttaagttgagagatggtgcgtagtgtatagggtctgtgcctcgtattctactagctagtagcataaatttccatggtaattgggttgtgatgagcctatatatgcagaatttgttcccagggataagaaatcacaaaaaaaaaaaggttgtcaaattgccagtagtcctccttttctcttgtaattcttggtcctctttttgttggtgttggcctctggaacttggatttcagtctgtgtaggtaaactagttgaagtttcactgtttcatcagatggtccaaaaatgatccggcctgttcgctttagcttattcagtcggcttatcagccaccaaacagtatttttctctcacaacaaatcagccgtttcagcttttcagccggcttataagctgaagcgaacaggctctacagttacaagacgttacacttggtcctaaaagatcccaccaagggacagagcaaacacagtgccacagtggttattacaaagtcaaacgacccatgtagccaaaggcgaagatggaaatgggaaaagttgaagcctagagcacaggggaaaaaaggccgagaaggctctgtacacatcctggggtagtagtaaataaactagtaaaacgtagtatgaatttccagcttcagccgcatctgctatacacttgagcctgacatgtgacatcacgctgttcagttctctaccacgcagccgtgctgatcaaccgaacttatcatcaccaaaacgaaaattgtttctccacgttgcttcgcctgatcgcgcgccgatgttctttgttctcctttcaacctgcatctaggcagcatcggccggcgtggtgtgggattccctggggatctgcgccggcgacagcggcgactcctcgctgctctgtgaccgggagtcgccgccgaccgacgccagtcgtcctgcacctgcgcggcgaactggaggttccagagcacgtcctccacggacggccgctgcaccgcctccttggccaggcaccgcaggcagatctccatcaccgtccgcgccgactcgtcggagcacgcccgccccaccgacgggtccaccagcacccgccgccgcgccgggctctccgacgtcagcgccgactgcagctgctcccgcatgatctccacctcgtggatcgacgtgatcggacgccccgacaccacctccagcaggatcacgccgaagtcgtagatgtccatcttgtcgccgttgggcaccctgtcagatggatacttgcctcctcctcctccctctgattttgcggtttcggcgaggatggggatgttgtagctgccgatcttggcgacgaggttctggtccaggaggatgttggtgatcttgaggttgttggcgaagaggccgggcatgatccctccgtgcaggaactggatgcccttggccacgccaatggcggtcgatatcctctgcgcccaggggagcttcctcccttctgttccttgcgagatcctgctcctgaggtttccgttatgcacgtactcgaagacgaggtagagctgagtgacggtggcgtcgtcgaggttgtactcgaagcagtggcccagcgcgctgaccaggtgccggtgccgcagcttggagatcatctcgatgtgccggttcaagctctgcgacgtctggctccgcttcacccgcagcgaccggatcgtcaccgccgtcccgttgctcagcgtcccccggtacatctggccgtgagcatcctgtcctaggaggcaggacacctcgaagttgttggtcgccgcctcgagctccaccaaggagaacgatctgtacgccgggatgcccagagctcccagcttcaccgtctgcgatatgtaacgcgcgtcggcgaagaactgcgaagggtacgcgctggaggcgtgctccaccagccgcccggggcggcctggccttggcgcgacctacaataggtacaacca

SEQ ID NO: 10835 - DNA, 2782 bp, Setaria italica
  Peptide Sequence Number=SeqID_76809
tggctaggtgtcaactgactatctttttgcatgttgatagcatgaaatcagtaacaatttaattggctgcaccatgaagttattggtcctttggcatgtatgaacaattgatcagtagcaattagtcaaaacgctaattggtcaccgaagaagtaatgcactaaaggaaggcacatttgaaaatttaggcatggtcttcaacttccaatcatgttaagggaaagtaaagcaagttaaaaatatcagtattatctgaaaaagcaaaaatagcaattcaatagaatagtcaattaagggaaaattttgttttgaatatgtgaaatggacataatagaagagaatggtcacagaaatggcataatatctctccaggctcagttataaacatcatagttgcagttggtatgcaaaatgcagaactctcttccaatcacagggagataactgccatgatgtagctgtattaatgggagaaagtattaatatcccagcctccacatccatttgatgcaaaaataaaatagtaatatatctctcatgattatcaaatataaataaatatctggtacagaatttatactgcctttaacaacttgcatcagagcctgtatggtaactcagaccttgatcaacatagaaagaaaatagcatttccatattatggtttggatgctgacagtaaatgaggcaaacatgtccctacaatagactggatatggaatcaacactagattaattgaaatggttctaataaaaacccaaactttttatgctactaacctggtacttaatgttttgacagctcactgatttctacaaatgaatggcgtatttccatgtctttggtttcaataacttggcaccttcgtaatgagcatccaaatctttatgaatgaggttgtccagtctcttcttcagggatgaaggaagcgactgtatacctggacatgatttaatttgaagatcacggagagatgagtatgcttgtggcccatcgggcaaggatgccaggcttttgcaatcttcaagactgaggcgttccagggttgaaaactctcccaagcaagattccagtgatctcaactctgggcatccccaaatatctagtgttcggagtccatccagctggcctgataggagttggagtttgccacactcccaaatatgtattcccctgagggatgggggaaggttgagaacctctgacaagctttcgcaccgccatatatttagagattcaagacatggaagtagtaagtgatcccgggccgatgatgacagcttcggtgcagcgctgggcccttgatttaatgttggctcgtcctgttgctctccgaatatggacttaagcttagggcagtcgagcaaatccatcgtcttgagagatgcggggacgttgaagacctctaccagactttcacaatcctctatgtatagagacttgagacggggcagaacttggctcctttctgatattggttggccaggagcagctttcgcgtacccaatcagaccactgcacttcttaatggaaaggcgcctcaaggataccaagctatggaactctttttccggccagtagacaagcgcatggttgatcctcgcaattgccaaatgttggagctggacaaaacatgtccatagtgccagtggacttgaggggaacagaaagatgcagcctcttagctccagacgtgtcagaggggatttattactggcgtccaccagctcaaaggcactatgcacagttggtaaagtagtttctgtgtcttcgactgataacaccagttcggacaatgagttaataattctaggcaccattattgctgtcagttggctgccatttatttctaatacaccgagctttggtgcttctatcacccccggtagagttgtcaacttgggacatttctcaacatgcagagtctcaaggtcagggaatatctgctgttcaccatgagttgcttccgtcatccccaggctcttaaaactatctaagtcttctaacaagagcttctttaagtttggaaatgctgaccatgctgtaacatcactatggtcaaatgatactccctgagatgtagctgatggtaatgctgccagttcggggcactttgcgattgataacacttcaagatatggaaatattatctggtgcccttgagttgcttcagtagcgcccccccacctctgaaactttgctaagcaatgtaatacgagtaccttcaggactggaaatggcgaccaaagcttcctctcgtcttgctccttgtaaactccacagcatgatcctccgagaagtgctggccctggtaatgctgtaaccttttccacaatttgtaataaacaacttctcaagttgaggaaacattatctgttctccttggacccagtttacttcacaccatctatcaaattccggcaattcgcccagcgtaagctccttcagattaggaaagtgaaagaatgtaccaccactgcacaagctttccaattttttcaatctttccagacgaagaacttgtagagctggtacactcccaagtggaggaagcttattggacttgttacagtcagaaagatgaagctccaccattttttggcagcgtacccacccatgttgggaaactggttccttggtaatgctctatcctcagagcctctagtccagtaggagcttcgagaccctccagcaccttatgacaatgttgtttctcctcctcactacgtgtccacgttaatgacaattccctgagctcctctttatttccaagattggcct

SEQ ID NO: 10836 - DNA, 1824 bp, Setaria italica
  Peptide Sequence Number=SeqID_76810
ggccatcaacgcgtggaacggggtggcgcagctgctgccgctgctgggtggggccctcgcggacaagtggctcggccgctaccgcaccatcgtcatcgcgtcgctgctctacgtcctcggtctcggcatgctagccctctcgacccttctctcctccggcgggcaccaccaatgcgccagcgccaccgccggcggccaggcctgcgcgccgtcgaccctccaggtgtccttcttctacgtctccctctacattgtggccctggcgcagggaggccacaagccgtgcgtgcaggcgttcggcgccgaccagttcgaccagagcgaccccaaggagtccgtctcccggagctccttcttcaactggtggtacttcggcatgtgtgccggcaccgccgtcacgctcgtgttcctcagctacgtccaggacaacatcgggtgggggctcggcttcggcatcccctgcgccgtcatggccgccgcgctcgccgtgttcctgctcggcacgcggacctaccgctactacgtcaccagcggcaagggaagcctgtttgctcgcgccgccgaggctttcgctgagtggcggagcaggcggatcaaggcaggcctcctgcatcaggctgcgcaagaacacaatccagcttcagcagaggcgccgggattccgtgtcgacgaggaggagcaggctgtggcgagcactgcgggcttcgtcaaggaggccaaggccgtcctccgcctattcccgatatgggcgacgtgccttatctacgcggtggcgttctcgcagtcctcgaccttcttcacgaagcaggcggcgaccctggaccggcgcatcggtgaccggttcaaggtgccgccggccgcgctgcagagcttcatcagcattacaatcgtggtcttcatcccgatctacgaccgcgtcgtcgtgcccgtgtcgcgccagtactccggcaagccgtcgggcatcaccatgctgcagcgcatcggcgcgggcatgttcctctcgctcctgtccatggtaatcgcggcgctcgtcgagacgcgccggctccgcgtggcgcgggacgccggcgtcgtcgacgagcccaagatccccgtgccgatgagcctgtggtggatggtgccgcagtacgtgctgttcggcgccgcggacgtgttcaccatggtcgggctgcaggagttcttctacgaccaggtgcccgacaagctgcgctccctcgggctcgcgctctacctcagcatcttcggcgtcggcagcttcatcagcagcgcgctcgtgtcggtcatcgacaaggtgacggcggcgaggggccggagctggttctccaacaacctgaaccgcggccacgtcgactacttctactggctgctcgccgcgctcagcgcactcgagctcctcgcctacgtcttcttcgccgtggtctacaagtacaagaacaaaggagccgtacatgcggctgttgctggttagtagctagagttgtggattggtgatacatagtaggcggcatgataccgaagggtgtaaatggcattttccctccatcatgattcgtgatggaaacccatcttcgacgttggttcctatttgtatcagccgggtgggctagtctctcattcttaaaccagattcaaatagtaatcggcaaattggccgttcaattggtccgtggaatatataggcagttcattggagtcgattgaggttgttggagtcgattaagggcgtgtttggttggttgtatcatttgattcatgtatgaaatgattacaaaataataatgatccttttgtttggttgggcgaattggaccaactcaattaaac

SEQ ID NO: 10837 - DNA, 979 bp, Setaria italica
  Peptide Sequence Number=SeqID_76811
ctaggtcactcacattattcatccataatacccccacacgcattattcggcatgcacacgcacgctacaagcacccccatcacattcacgcaggtgtgggtggcgccttcttgaacacgaccacatgaggcttttttttttgagagataaacgaaaagttttggggacggaggggtacacatcaaaggtttggaaactaaacacggaagaaacagtacgattgacatatcccattacacgcaagcaaatatttacagatggagagaagctactacacaccaagcacaagttcccatcagagggcccgccggtcgctaccactcagcggccaagctgatcgagtcagaggaactgaccaagtagtagtactaagcattttactccctagtccataacataggacaaaattaaataaaaggcgaagtctccaacctcggacagcaacgcagccgtggtacatgcgttttagataaccacaaggaccagcaaacatgtggcctgacagggacccgccaccgctcctccgtcgacctcatctcacccgatccgagatctaacggtggttgctcctggtctcgtcgctgtagagccagtcgtagacggtgggggagttgggctgcgggcggtcgaagaggttggcgcccatgctcttggtggccaggttgctcccggggtggaacacgctgcgccacacgttgttgccgccgcgcggcgtcgtcgacgacgacggcgtccccggcgtcgtcggggtcacggcatcgactgcgtccgcttgtagctcccggcagcagcaacggcatctttgtcgatgacgatcgggcgggaggtggcggccttgcggagcttctcgagccccgtctccgggtgaggcccggccaccacgtcgtcccacagcttctccagcatcttcgccttcctccaacaaaggttactgctggccactggcttactgcactactatgctaacgagaggaagagc

SEQ ID NO: 10838 - DNA, 694 bp, Setaria italica
  Peptide Sequence Number=SeqID_76812
tccagcccctccggtggctggatgttgaagcggcccatgacaagggtgtgcctgagccggcagaccggcattcgacccacggtccacggtagatccggcagatccgggcttcggcatttctccacaggcccacggtcgcagggaattcgacccggttgaatgacacggtggatgtattcatggtctaggaacgcgattccagacaacctccagtgtctccaaatcgtgttgtgcccgtagatttgttcatggacacggcatccaccgtgttgcaaaagcaccgttgccacacaccgtggccgaggaggctctttccatggtgcctcttgtgagagaggaagatgatccaccgtggtgcataaacaaggtggccgtggagcctcttgccgtggatgacacggtggtttgacccatgttgcacggaacgaactagttccccggatttgttcaaacaacccgtcaggtcgatctgttcaaagcatcatgttgtggccgtagatttgttcatggacagtggatccaccgtggtgaaagaacaccgtgccaccgtgcccgtggagcctcgttccatgtagactcttgccgagagagttccatggctgacctcctcgtccaccgttcgtctctcgacgggagcgaggtgcaggtagaccgagagagagggggtaggggaaaggagaagagagaggaggcg

SEQ ID NO: 10839 - DNA, 1096 bp, Setaria italica
  Peptide Sequence Number=SeqID_76813
cgttcctcggttccttcctcccctcccgtcgcgcatctgaagcgtgcggggtagggagaccgatcttgttcgcggaggtgtttgacggttttgactcggatcatgatgcgcagctagatagtggagagcttgacctgaggtgggggacgcggatcgcagggtagaggcaggagaccgagaggaaggagaggggtaaaggcggagggagaggaagaaggcgggaaggatggtgctggtgcttgcgctgggggatctgcacatcccgcaccgggcgcccgacctgcccgccaagttcaagtccatgctcgtgcccggcaagatccagcacatcatctgcaccggaaacctctgcatcaaggaagtccatgactacctgaaaagcctttgtccggatctccacattaccagaggagaatatgatgaggatgctcgatacccagagactaagacactcacaattggtcagtttaagcttgggctgtgccatggtcatcaggtcgttccatggggcgacctggactccctggcgatgctgcagcggcagctggacgtagacatcctggtgacggggcacacccaccagttcaaggcgtacaagcacgagggcggcgtggtgatcaaccccgggtcggccacgggcgcctacagcagcatcacctacgacgtgaacccgagcttcgtgctgatggacatcgacggcctgcgcgtggtggtgtacgtctacgagctgatcgacggcgaggtgaaggtggacaagatcgacttcaagaagacggcgacgacgatgcacgcgtagcttggttcggtgcgggcgtggaaaacactgaaaacggatatgtctagttcctgttgctttcccctagagctccctggactctcttcttcttctctccctaccggctgtgctcgcctgttcatgtgcaagaaagtggagctgttttcacggattagttgaccagattgtcagggtgggtgggtggtgttaaatgttaagctagctatgacttgggtcgtgttttaaactttttatcaggcgaaccttgatttgtcatttgtgtttatatatgcaaaatggaggaaataattgcaaaaaaaa

SEQ ID NO: 10840 - DNA, 1805 bp, Setaria italica
  Peptide Sequence Number=SeqID_76814
tgaagcagtatgttgtcgctgatccagaaatcaaggaggtggtggttgacagctcccttgaattcatcatccttgctagtaatggactctggcaggttgtcactaacgaggaagctgttgccatagccaagagacatatttgggaccccgaggaatcagcaaaagagcttctcaaagaagcttacaaaagggaaacttccgataacaccacggtggtgatcgtccggttcctgcatgagaactccgagttgccctcgatctgaccgacttttttttattttagcccttttcgagaaaaattttcatgtgtttggtacaatggtatttgcattctaaattgtacgcagattggctaaggatgttttctgtgtctgttgggccaagtttattgattatgcaagctgttcttttccatttcttcaggtgacaaattcagtgatgttgttgggagtccctactatgtcgcaccagaggtactacagaaatgctatggtccagaagctgatgtgtggagcgcaggggtgatcctgtacattttgctttgtggtgtccccccattttgggcagaaactgaagcgggaatcttcaggcagattctgcgaggcaaacttgattttgaatctgaaccctggccaagtatctctgatagtgctaaggatctggtccgtaatatgcttactcgggatcctaagaagagatttagtgctcatgaggttctttgtcacccttggattgttgatgatgccgtggcacctgatacgcctattgattctgctgttttgtcaaggctgaagcatttttcggcaatgaacaagctcaagaagatggcattgagggttattgctgaaagcctgtctgaggaagagattggaggcctcaaggagctgtttaaaatgattgatacagacaatagtggtactattacatttgatgagctgaaagatggcttgaaaagggtaggctcagaattgacagaatgaaatccaggctctaatggaagcagctgatattgacaacagcggaaccatcgactatggtgaattcattgcagctacgttgcacatgaataagctggagagggaggaaaacttggtttcagcattctcatttttcgacaaagatggaagtggctttataaccattgatgagctgtcacaagcatgccgtgaatttggtcttgatgatgttcaccttgaggatatgattaaagacgttgaccagaacaatgatggacaaatcgactacagcgagtttacagcaatgatgaggaagggcaatgctggtgaacaagacaaggaaaggaaagaaaccaatagaggaacagcttgcacttgaatcttggcgagctcctgaaccccagcaaaacctagttagtgcataacagaaggccttgccgctacattctcatggcgtctgaagttttggatgcgttgttgatcagctggtctcatatgagatgttgagtggttgtcctgtggtattactgaggtgctggagaattttcgtagtactggtggtatcggctagagaagagaggtgctaccctgtggttactatgatcaactgcttatatgtattcctgtcgatgtagattgaacattatcgaaaatattccccagaagtacaactttgctgttagtgtcaatttaggttgatattaaatggcaccgtctagctctaatttcctcacgatctatattttctttactacttttttcccttttctgaatacaattgagatatatctgtcttggtcaaggaaattagtgaatggtataaattgtggtttggaacggaaaaaaaaa

SEQ ID NO: 10841 - DNA, 1780 bp, Setaria italica
  Peptide Sequence Number=SeqID_76815
agcgaaggggattgggcgccccctcctccctcacgcaaaggcggcaccgcggcagcacctcctctcctgtcgagttcaaggagcagcgcgaggcgggggaggaagacgccgccggccgcgcccccctcctccggcctccaccagcccgcctccgttccacgcggggccgaaggaaaggggagaggcgccctatccggctcccggagcggctgcaacctcgaggttgagcagaaactatatcttctaggcgatggcggcgaccatggttgcgatgacggcgaagagcaagaacagcgtgctagccgtggagaagaagcagggctggtctattcagctcccggagctgcggttcccatgggattcgcacgaagacaagggcttctctctaagcctgcaaggctctgggcctgctcatggcgggctgtttgccagcgttggtcttaaggtgtcggcgggtgcgccagcagtggctcccagtccgggggagaaggatattaagattcccttcgctgatcattgtataaagtatgtctccgaggcagttgggtaccaagttattagcaccgaggctgagccggtcgaggaggaggtggtcgatggtaaggcaaagaagaaggcgaagaagcacgggctgaagctcaaaatcaagattgggaatccacatttgaggcggctggtcagtggtgctgttgcgggggctgtctccaggacttgtgtggcgccgttggagacgattaggactcacttgatggttgggagcaatggggactcgatgacagaggtgttccagtcgatcatgaacactgaggggtggactgggctgttccgtgggaatcttgtcaacgttatccgtgttgcgccaagcaaagcaattgagctgtttgcttttgatacagtcaaaaaattcttgactccaaaggctgacgagcccccctaaaaccttcctccctccatctcttgttgctggagcacttgctggagtcagctcaacgttgtgcatgtatcctttggaattgattaagaccagattgacgatagagaaagatgtctacaacaacttccttcatgcttttgtcaagattctacgtgaggaaggcccatcagagctgtaccgtggtctgacaccgagtctgataggagtggtgccatatgccgcgactaactactacgcgtacgacaccctgaagaagctctacaggaagacgttcaagcaggaggagatcagcaacatagcaaccctcctcatcggctcagctgctggtgccatctcaagcaccgccactttcccgctcgaggtggcccgcaagcaaatgcaggttggagcagttggtgggaggcaaatctacaagaatgtgttccatgccctgtactgcataatggagaaggaagggattggcggcctgtacaaggggcttggacccagctgtatcaagctgatgcctgcggcgggcatctccttcatgtgctacgaggcctgtaagaagatcctggtcgaagatgatgcagagagcgagtgaagcatttgcccctgaagagtcctggaagaaggcggcggaggattataccatcgtttttatttctaccgagaattggattatcgactcatggaaaatttaggtctgatacttgaagtatctgttaggtcacattttggcttaagctagctttgtgttgagatccatccataaacaatattctcagttgacggtgcatgttgcgaaagcagttttgtcatgaccatgtttagtactctcgctgctacttctgtggtccaactttt

SEQ ID NO: 10842 - DNA, 2105 bp, Setaria italica
  Peptide Sequence Number=SeqID_76816
tgcgagcgcgcccgcatcgccgccctaggcccgagggacggaggagaggaaggagagggagccccagaagagcagccatggcgccggcggagctccgcatcctggccgtgctctcctccccgcttccgctccgtgtcctgctgctactttcgctcctctcagccgtcgacgttgtatcggcggcggcgccgccactcaagttcgggatcaactacggccagatcgcgaacaacctcccgcacccgacgcaggtgtcgggcctcctgcagtcgctcaacgtcaaccgcgtcaagctctacgacgccgacccggccgtgctcacggccttcgccggcacgggcgtggagttcatcgtcgggaacgaggacctccagaacctgaccgacgcacgcaaggcccgcgcctgggtggcgcagcacgtgcagccgttcctccccaacacgcgcatcacctgcatcaccgtcggcaacgaggtgctctccggcaaggacacggtcgccatgcagaacctcctcccggccatgcaggccgtgtaccaggccgtggtcgccctgggcctcgcgtcgcaggtgaacgtctccacggcgcactccgtcaacatcctcgccagcagctacccgccgtcgtcgggcgtgttccgggaggagctcgggcagtacatccagcccatcctcaacttccacgccgaggtcggctcgccgttcctcatcaacgcttacccgttcttcgcctacaaggccagccccggcagcgtgtccctgccgtacgtgctgttcgagcccaaccccggcgtggtcgaccccaacaccaacctcacctacgacaacatgctctacgcccagatcgacgccatgtatgcggccatgaaggccatgggccacacggacctcaccgtgaggatctccgagaccgggtggccgtccaagggggacgaagacgaggtgggcgccaccgtggccaacgccgcggcgtacaacgggaacctgatgaagaggatcgccatgggccaggggacgccgctcagaccggacgtgcctatcgatgtgttcgtgttcgcgctcttcaacgaggacatgaagccaggcccggcgtcggagaggaactacgggctgttttaccccaacggcacgccagtgtacaacctcgggttcaacggagcgtccttcagtccgtcgccgacgctctcttcttcttccaagccgacgattacatttctgatggcggttgttgtcctactctccggctttttcctatgacctacatcagttttgtggcgataagatttgctattttctgactaacccatttgtgcttgcatcggacatcatactacctgccagagcccataatctgactttgaggttagcaagatttttgttaccttcatcagttgattggattgtaaggttgtagtcctatatatataccagtcgagccgctgtgaaattttgacagtatgagctgaattgggatagaactgtggaagtgccaaaggctggtggttataccgcagcgagcatgtgactgagctcatagagtggtcgtttcgttccgttctttcactgtattatacattcaccttcataggggtgtttgtttctttagttcctcctaaaattcttgtcacatcaaatatttagatactaattaggagtattaaatatagactaattacaaaaccaattgcatagatggagactaatttgcgagatgaatctattaagcctaattagttcatgatttgacaatgtattgctacagtaaacatatgctaatgatgaattaattaggcttaataggttctcgtaaattagagatataattagttttataattagcttatgtttaatctttctaattagcctccgaatacttgatgtgacattaattttaatccgaactaaaaatcaaaagaccccaaagataagcacgtggatcaaagaagcgttggcaggtagatattttggtgggatcctctgttaccatttcaaaccttatccggtactagcatagtatcgtgttcaaatgcacccagtaccggatgacaggttattttttagtagtgacaaaagtctttagataaattgttacccaaacagaaggcg

SEQ ID NO: 10843 - DNA, 1032 bp, Setaria italica
  Peptide Sequence Number=SeqID_76817
tttttggtacgaacaaggatcagttcaattacttgatacggtactcgtaaatgtcaaggtcagctacatgtaggactacgagcggcagcttgtttatgtacatgaagagccgcctgatgttctccctggtcaaggtatccatatccacaacgtcgctgtcgtcggtgaacacccacaggctgcccggcttcacctcctcaaggcaggcgcggcagaacgggcaggacttcgatttcgcgttccaatcctcgaagcaccgcatgcatagcgtgtgggcgcagtcgggcagcacgaccttgcggctgacctcgaggcagatgccgcactcgagctccctctccgtgtccacctccgagagctcctcgtccctgctcctgaatttcttcaggcagagcctcctctgtttcctttcgtccagctcggtgatcccgctcggcagctgcagcagcgacgggaatatgacgccgtagaactccctgatgctggcctccctctcccagtcgggaggcgccgacgagccgtccgcgtacaccttgtagagcatgatcttgaggaggccgagcgcgccggcgagcttgcagtcggtccactgcacgaggaaatgcgcgacggcgctgtacgccatccgcatctggatgaccgacccgtcgtagtcccgcaggaactccgacgccagcgcattggcgtgctcgatgtcggcctcgagggccttgacggagtcctggaacttccgcatcggcgtgtcccaccgccggcaacccctcctccttctcctcctattccaccgcccgccccctctctcccacggcgagagctgaatcgcacgggagacggccgggacaaaccctgcctaaacctcgccgcgtcgtccctccccgcgactcggcgatcagaccggactggattggattgggcaggaacggcttgccttccctgagctccctccccctcgcgctccggcttggattcgattcgtccccccttttctctcggtcgctggattgttcttgccgagtacgactacaacgctcc

SEQ ID NO: 10844 - DNA, 809 bp, Setaria italica
  Peptide Sequence Number=SeqID_76818
ttttagtttttttttttttttttttttagttaaccccaaggatttataacttcagatacttcggcatacagatagcagcgaaattaacaaccaggaatcagagaacatgttcccaaaccccaatttttactaagacataaacgcagtggtaaacaatattagtttaccacaactatgacgacacagacactgaaattaacacgacacgatacagacggtaaactgcagggactgtagtcaggcagacaggcaagaacacatgttcacgcgcgcacggttgccccctccttcactccttcgcggtcttgttgatgagggacttgtggatgtgggggatgacgccaccgccggcgatggtccccttgatgagcgtgtccagctcctcgtccccgcggatggcgagctggaggtggcgcggggtgatgcgcttgaccttgaggtccttgctggcgttgccggccagctccaggacctccgcggtcaggtactccaggattgcggcggagtacacggcggcggtggcgccgacgcggccgtgggcggaggcgcgggacttgagctggcggtggatgcggcccaccgggaactggaggccggcgcgggaggagcgggagacgggagccttcttcttgtccttgtccttgtcggtgctcttcgccgccgtcgtcttcgccgccagcagacccttacctcccttgcccgccatcgccgccggaaaacctggagagaccgctcgggcttggtcgcttggagatgcgctgcgagggtgaggccggccggatgcgggaggggatttgctgggtctcgag

SEQ ID NO: 10845 - DNA, 1341 bp, Setaria italica
  Peptide Sequence Number=SeqID_76819
tttttttttacttctgcaatctggattttatttaatttaatcttccaagagtacattaattgaaccggttacaggacagaagcaagcggctctctgtttcaatttcacggcttggccgcgtatacatcgcgtggcagatcacagactctctagatcctgaggctgtcgatgaaccgtgtcccttccatcagcgcgttgaagttccccttgatgtactcctcgacctcgatggacttgtagcgcgcctcgccgccgccctccgccaccagccccgacagcggcgccaccatcccccccgacggccgcctcctggaatatcacgacggtggtgcgcgccctctcggcgtccgggatcacccggtgctcgacgctcctgtacgcgccgttgctgaggacctcgaggatgtcggcgacgttgacgacgaaggcgcccggcagcggccgcaccgggaaccaccgcccgcccttcctgatctgtaggccgggggtgtcatccacgtgcagcagcagcgtcaggcccagcccgtcggtgtgcggcgtgatgcccatcaccttctcccggtggcggcagggagggtagtagtggatcgccatgctctgccgccgcccggtgaaggcgtcgaggagcgccgcccgctccaccccgaggtcggccgccatgaaacccaggagcctctccgcgagaccgatcatctccaccgagtaaacctcaagcgcctccctgaatgtgggtgggttcgtaggccacatctccatcttcctatcttggggtggctgcgtgatgaggatcacgctctctgcccagtccaacttgtggccactcgatgctctgctgtagtggtgcccgaatccctcgaagcctttctctcggactgccactttcttcttgctctccagcggcgtgctgaagaactgcacagtactgtccttcatccgctgcaccactccttcgtcagctccatggtttgtcagctggaagaacccccagttcctgcaagcgtcgccgagcttcgcaatctccagcgccgacgactccggatcaagaagcctggccatgtcgacgaccggcagctcgtagctctcatcgtcgccgacgacgacgccgtcgaggacctcctcggtccggatgtacttctccgggatctggccgccgtcggcgaacgcggacgcggtggcgtccgtgatctcatccctgttgacgaccttgtcgtagttacgagcctccattgctctgcctgcatgtgcacctccgagtccggcacagaaaggtgccaatttatgactgttgtttacccccagcgatcgagtgtacgtttagtactaagtttaagttttaactaa

SEQ ID NO: 10846 - DNA, 1910 bp, Setaria italica
  Peptide Sequence Number=SeqID_76820
cggggtcacgctgccgtagcgctcgtcctccctccctccctccccgccctccgctgctgctctcccgcaggccgcagacccgcaccgtatcgcgtcctccgccggccacggaagggtcggcgccattggcggctcgctccgaccaccccggccggaacccaccagcaggtgtaaacatgcttcatcattcaaatagccggaaccaaaggaacagggggtcaagaatcaaaacattactccaagctaccttacttgtaggtgttattttttggcttctgtatcaggtgaagcattcctattataagaaaaatgagtacttggatgatgctgaggaccagcttgcccataatgatagaagcatgttccaggggaggaaagaaaaggcaggtagttacagcgatagcaacgtggaagtggttggtaaaccagaggaaggttctgtagatcataattcagatacttctgatcataatggggagaagagtggagaaactgtattcgataaagacagttctgatttgcatgaagatgacaagaggaatactgagagctcagaagctgaggaaggacaagtcaacagtgcagatggcaatgcagaagctcatagtaataacagtgaagatgaaaccactggtcatgcagaagaaaacaagcatgatactgaatccaactctgatactgagggtaaaagtgaagtccattcaactggagatgatatgtcccaaaacaatcaagcacaagaggaaagcactggtgagacaagtggaacatctcatgatgaagtggtgcaaggtgatgaatccactggtgccagcggcaatggttcagatggggaagagggtgagaaaaaggaggcactgggtactcaaactggctctgaatcccttcctgatgatgccaagaccgaaacaagtaatgaccatggtatgggcagtcttcctgatgaaacagggaatataccatcggttcatactgataattcacaaaatgatgccaatgaaaaccaaggtgatgcagctttcactacctctggttcttctgagcacggcaccggtgcagctgaacatattgagaccgggctagaagatgaaagcgcatcatcatcatctggggctggatctggtgatgataagaacaacttatctgacagcacctctgcagaagaaaagactgggactgcatctgatggtgatgagaagggggcagaaacaggtacatccaatgagatgtcaaattctgagaacaacagcgctgtaactgaccaggccacaaatactgaggcagagaactccaaaggagattcagattcttctggtgaaggagtgaatggttcctcagatgagacggctaacaaaagcaatggagctactgaaacatctaacaatggtgggcaggtggatcccaagattgaaaccagcacatctaccaatgacgagcacaacgaatctcaaggcggtgatggtggctcaggatccagtgactcaaatggcagtggccctgaacaaaccggtaaaactgaaagccagtgatactgataccaccatttggacacggaacattgttttagtatacagatttgttcctggataatgaagaggagctagtgcacatagaaaaactgttcagattgtggcttatcgtgattttagttgatgccgccaaagtacaattgtggcaattttgcagattgcgtgatcggttgtctgcaatgctgttgcttatttcttgtcaggttgtactcaattgcgtcctttgtctaattgtctgcacgattattaatctctatgtggtactttgttcattgttagatattatgacaagtcatatgaaattgtgaatgtaactgggggcgaaacgtcctttacctggtttcaataccgctggcaatgcactgctgttgttttcccaaa

SEQ ID NO: 10847 - DNA, 1554 bp, Setaria italica
  Peptide Sequence Number=SeqID_76821
aaatcctgcaacgtagaagttgagttaggcccggtgggccttccggtgccaaatcagcgtagcatcctagacaaattggaccgggctgtgtccgaatcgtgttcttttgaaggtgcaacccacccagttgggaaagataatgcgacccggatggttccgtccgtggtgtgtactgtggtgtacacaagccagagccaggtggcgctgcatgcagcttgacaccgctgccacgtaccagcggctatcgctcgcgctacgcgacaccgtccttgttcgaacagctgaaggcatggtcgaccggagcaaaagaacaaaaagccgagtgcaaaaggtctctgaatgctcgcgggctgtctttttaaggccgtgtttagttggggaatttgggaggtgccaaattactgttacagcactgtagcacactgtagcgtttcgtttgtatttgtgaattattgtccaaatattgactaattaggcttaaaagattcgtctcgcaaagtacaacaaaactgtgcaattagtttttaatttcatctacatttagtactccatgcatgtaccgcaagtttgatgtgatagggaatcttctttttgcatagtgtcaaagttgggagttgggagtaactaaacatggcccttgttcgcctccaacggtatactgtcccatctgacgggccttgttccctgtgcatgtccacgtggcctcctctgcagccgtccagatggacaccgtgacgcccgcgcccctgcaagctgccgccggagccgagggtcctatctgtggtatgcctgacttcaagatgagtggaaagaagagtgacgagcttgaaccaactgatgctggtgatgaagatgacggtggtgacgatggggacgaggatggtgactttggggagggtgaggaggacatctcagaaggagagggatatgataacccaaaggccaatgagaacaagaagaaacaaagaggtgatgctgaggaaaatggtgaggaagctgaggaagagccagaagaccaggagggtggtggtggcgatgatgatgatgatgacgacgacgacgatgacgatgatggcggtgaagatgatgacgacgatgacggtggtgaagatgacgacgatgctgtagatggggaagatgaggaccaagacgaggatgaggaggaagatgatgacgaagactcactccagcccccaaagaagaggaagaagtgaagatcttcgatccggcagtagttaccatgcgctgagtcctggctctctttcggtcctgtcctcgcattcgcattcgaactttcctttagagttaagaaggctccacacgttctgcggcacgtgtgggcgtgtaggtgctttatgatttgaggcaattagggagaactctgtgtcgttgttgcttgcttctgtggaggtgaaacaagaatagtttcgctaacataattcaacctgcgtgatgaaagcctcaagattgaatatgccatctcttttacctcgtacagaatcaatcatgaaggctcggattatcactttcctgcaatcatgaattcgcgtggca

SEQ ID NO: 10848 - DNA, 1149 bp, Setaria italica
  Peptide Sequence Number=SeqID_76822
tttaattcaatacgaaaccacccatacggtagcaaacacatcatcaacatgctaacatttgtgcaatgtggatataatatccatcataggtgtttgtccggcaattgaattatggacattacagcacatctgatcaccagactactctattcatcaggtctatccgacatttggagcatcaaatattatagcacattcgagcaacatggctatcctagcaatcagaggtacctatcagcataaatattacaacagtagcacatccgcgaacaatcagaggtatctatgtcataaatattacaacaatagctacttatccgcgaaccaggctatccatcaggcgtctgtctagcatttggagcatcaatattatagcatatccgagcaccctaaatctatatgcaacaagtatccatagctaccaaacaacctagctggtcgctttgaatactaactgaaatgggcattgaaagcagcagctaatcaccatgctacacagtttgcaggcacaggtcgatgcagactttggaactcatgcatcaaactcttctaaccggagacgaaggacacacaaaagctggtcacaactggtagaggcaaaatcaacatgagctttcactgctcatgcatccttgcttggactggctcgtatcgcagagcatctgcaatctctctccatttactgttgcatgtaaaggtcacaaaaaggtcaggagggccatagactctgcatatggccattgcgtcttggtagttcatcacaaaaccttgagacgctggtgttcaagcccacgaagcctgctgcagcctgagatgctgctgttcaagcccacgaagggggtgtttgatacaccctgctaaaatttagcatatgtcacatcggatgtttggatgttaattagaagtattaaacataggataattacaagactaattgcacagatagagtctaattcgcgagctattaagcctaattagtccatgatttgacaatgtggtgttacagtaaccatttgctaatgatggattaattaatcttaatagattcatctcatagttcggatattaataaggaggactaaacatgagttaattataaaattaattgcagaactatgagatggattaattaatcttaatagattcatc

SEQ ID NO: 10849 - DNA, 2228 bp, Setaria italica
  Peptide Sequence Number=SeqID_76823
atgctccctgttctagtcttgtcaaaagctatatactaatactcttacatctgaaacaatttatgttgatctttaatacatagtagctctattggttcaagacatacgacagttacagaagctatatcttcattttgtcatgctcaattgtggttgttttaaaattcgtattgagctgcctgttatcgtactagttagaatcaacttgaaactaataatcctcatatcttgtatcaaggaaagagtgattggcaataaacatggagatggcgatgcaggatatgtatgattaatatacatcaaagtgctacaactgggaaattggacctaagaaatgcttagcagaaaatacaaaagaacataccaaggattcgtggaggctgggccatacaggatgttttttatgtgagtactgggtggtgcctttgtgattgtattgtgcaagttactagtacctttactgcagcaggtgcttgtgcctaatttgtgctatgctctgttcgattagtgctctgttcgattagtgctctgttctatgctacccctactgcagctgctggaataatggtatgattctgtgttctctgatccttggatatactgtgtgctgctgctagtaatgctaagaaattaccaagtgacttattgcatgccaactttgagtttcaggaacttcaaagaggtgctaggcaggatcttgtcaacaagtggatcaaattgctgatccagttattgatttgttctgaactacctgcatgcctttatcattttggaggcaaacaatccatatatgtctacctgcagtataattaggacatgtagaatttgatgttatatatgagcctagctccgaatgttagctacactattgttatgacgtatgaacctacatgaatgaatgaaagtttgtctttgttaacgtgctactttgtgatgaatgtctggagctatcctaccaatatactgactggcttacaagattgattttgatcaatgtcgtgtttaataaaatttattcagatgcatcttttcattctaatctcttttctatggccaaactaattcaaaagcttatggtggggttaactagatattatggttcttagaccaatctgcatgttccgtaaaaaaattaggtttctactcagtatagataatcatataggatgataagcatgttgcaatgcagatgtattcatattattcaattatctggtgtccactttgctcaagctttctattgaattttctaactatctgttgtggaaatattgtaaatattaaggcataacaaaattgtccaacattatcaggaaactgtgtcctactgaatattgtccttacactgtactttgcaatagttataagtatgtatgactaccaatttgtgctttgcagtaattttagctatattttccctctgcaattatctcttatacgaacaagcttttcaactaggaccataggaatcagagataaagattccaagctggttatataacccttaaatattttagttatccatgtcaagtctctaaatcttttttcgcttctttgcatattgatgtcatgtgttgttgatgctatgttgatgtctttaattgcagttctaggtgctgatttattagctgcatactcatcaggtgcagggagcttctcttgcttccatcctaaagatgtttgacaaaatgccacagttaactagctctgcctctacaacaaggatgcagaaggatgatcatccatttcctggttttttttaccttggtgcctccctccaaccgtgccaccctctccgtctgcgtctccttgacagtggcaggtccatgggacaaggaggaagtggtggccactgcagctcaacgatgtggaaaacaggagtacttatctttaattcccttgcatttttgctaacaggaaagcgtggacagccaaaatatttagagaaagctttaagcctatatgctggtgatggactgctagaagaatgaaaaattacagaaaggtttattggtgattgctggtgccaatagggaatgaatagatcaataagagaactcatatttaacatagttgcacttgtagttagagatgatatttttattgtcattgtgttattaatttggttgagacatatatttgaagttaatgaaggtttgagttcctatatgtgatgatgaaatatatacttatggcacaattatttgtaacaataattaaattctagc

SEQ ID NO: 10850 - DNA, 2982 bp, Setaria italica
  Peptide Sequence Number=SeqID_76824
acagagacgtgggcgctgttcgcggcggcgcgcctctcgcctcctcccgcgcgcaacggcctccctcctcaaaaaccctagcgactcggccgccgcgcgatttggatcgtgcccggggccgctcgcctctcccgccgtccagtccaggattgttgataccggctttgttccttctgttatttgaagttgttgaacctgaatagagccctgctttatttgcaggattattagagttcatttggcctgaatgccacaactgggacttttcacctagaaactgaggctaagttcacaacttcatcagaccctttcatacatagaaagtggcgagacatggatcgtgatgatgtagctggttttgtcagtggaggttgctcggagtcctgactttctaacccagtacatggtagtagggtcatgagttgtgatacccagaagacaattggttcttttcattttctagttggtttgcatttgatgttcctcaattggaatggacaaaactactcgagaccttgagtttggtagtgatatcaactccttgaagtcttactgctattggagcacagctgaagatacggctctgcacaaagatagcacaccagattccacagcatattccagcttttctatttctaactcaaaagcgtcgaaaaggaagcaaggtgccatggctggagtgaaaggtactggaaaccctttacttactctgggtctaggctgctcaccaagttcctctgataacagcaagctaagttctggcactgcttgtgtaatgtcttcatctttgttgaaggatattgatgatgagtcatcagtagaccttggtcttaaccttgggttttatgttagcaatgatatcgcaccctgccaacagaaatcccatggtgttaaaaatgcgccattgacaaactcgtctaaactggatcttcagttgagtttatctactggttcgcctgaatcagttgtcattgatgcaaatatgatgtcaccaaattgcttggagatgccaatgaccaactcctccccagccattgtaggagaaggatcggtaccgcataattggatttttgatcattcagttgtttcgtcatcatatgcttctgaagcaacatgttcctttccatttccgaagaaaactgatgaaggcaatccctctgcaccttctcctgttatatcatcagctatgtttacaagtgtgaaaagtccgggtgcctctacttctgagacaactaatccccaattgcgcagcagtaacactaaaagctgtcagttcccaggatgtatgaaaggagcaagaggggcatcagggcgttgcatagcccatggtggtggtaggcgttgccagaaacctggttgccagaagggcgctgaagggaggacgatctattgcaaggcccatggtggaggcaggagatgccaatttcttgggtgtacaaagagtgctgaagggcgcacagaccactgcatagctcatggtggtggtcaccgctgcagtcatgaaggttgctcccgagctgctcgtggaaaatctggcttgtgcatcaagcatggtggtggcaaaaggtgtcagaaggagaactgcaccaaaagtgcagaaggtcattctggtctctgcatcgcgcatggtggtggaaggcggtgtcagtttccagattgcacaaaaggtgctcagggaagcacaaagttctgcaaggcgcatggtggaggaaagcgctgcacattcttgggatgcaccagaggggctgaaggtagcactgcattttgcaagggccacggcggaggcaagcgctgcgcctttcagggtggcggtgtgtgcccaaagagtgtgcatggtggtactcagtattgtgttgcccacggtggtgggaaaaggtgtgctagctctggctgcactaagagtgctagagggcgcacagattactgtgtgcgccatggaggtggcaagagatgcaagtctgagggctgcaccaagagtgcgcaggggagcactgatttctgtaaggctcatggaggaggtaaacgctgctcatggggtcaggcagacgcgacctttggtattggcgtacagcaatgcgataggtttgttcggagcaagactggtctctgctcagctcacagcgctttagtccaggaccactgtgttcatggtggtggtacattaggtcctgctatccaccagtttgcgatgaatgccaaacctactgagatgaaagttgctgcagtgaagggagatccacatgagaagacgatccttggtggtcctcttcgaaatggtgctgttcatccttctgccccggcccagcctatgaccaatgatccgctgccagagggcagagtccatggtggcgggctgttggctttgctttcgcgaggcggaagcaatacaagcgctggtggctcagagaattgtgctttaggcaagattgcgtggatgtgatggtatcaggttctccaagaaattggctgcctgcagttttgatcagttcccagagtttgtgctgtggtggattgagtcagcctttcagattcctccagttgtgttgctcttgttcgggtttgataggatctacccaggacgtgtactatgaaaataagagggtagctcttagaccatggggttgatgtattgtctgttattgtaattacttgttgctgaaatgttgttctttgtgtttatgcaatccggtattttagtagccttgtttggactagattttaccattgggattttttttggttcggtctgaataatttgtgtttttagctgctttttctgctgcgaagcttttattttggtgctttggcctatcatctcaaatccagtaggaagagatgtagcgcccgctgctcgtgacgattgttgattgcaatcgaggcattttccagactcttcactggaaaatacatgacacttcttgcttggctttgctttattgatcccctattgtgtaagtgttcagcttagtactgaaattttgt

SEQ ID NO: 10851 - DNA, 2677 bp, Setaria italica
  Peptide Sequence Number=SeqID_76825
ttttttttgtacaccaaacaagacctctgtaagtcacaaacttcatcaagatgcatggaccaccacttgatattgttgtccaatttatgcatgagtgtatgcatattgtcagatgatataaaaaataggcaggcaataatcactgcagtcattatatgcctagagtgttcatgaggatatggatatgtatgtgtgaggataatcaaagaaatccacacaaaagcatgcagatacagccaaaacagttacgttgtagacttgtaacaggctagcttgtagctatatttgactgtcaatgttgagactcgccatcagcagcagcatccttcgattctcctcctcctgaggtggaggagcatccggcaagggttcgaggtcggcgaagcccttggccaccggcaggtggaggcacttgttgacgatctcctcccgtcatctgctccagatccttgagcaccttgtcgcggtacttgttgacgatctcctcctgcatctgctccagatccttgagcagcctgttgtaggcgctctcctcctgcatctgctccagatcctcgtcacatcgaatatttagatactaattaggagtattaaacgtaaactatttacaaaatccattacataagcggaggctaaacggcgagacgaatctattaagcctaattagtccatgatttgacaatgtgttgcaacagtaaacattccatacatttactagacaggtgaatatctatacaggtaaggccagtaaagtggatgcaaggcagataacctatgtcaacctaagtcacctagacccagttttttttaaaataaaagcaaaaagaaaagaagaaacaacagttattgttaatttctctagctagcaacccctcacaacaaaaacggcgtgcagaattaacaagagggctccatatctggggttcttgttcgttcaatggtgaaatggtcaacaacccgtacagatctgacagggtccggtgatgaggctgacctccacttgcttgggtgtttccgttcatggctgagctgatgaggccctcttacatctgattcccatcttggatccaacttccagtcctttgggaccttgtcaactgcaagagtaaatatttccagatcaccatccttcttaatatgaaacctcgtgaaagatttgtagttcgcgatgcgcagtgatgagaaggcttcatcgaaatgaatgtggaaccagttgatgcaaatgtataggtagctaccaaatatgagggaaacaactggagtcgagaaaatccagaaatagatgaacacagaggtgtagtacatgatcagaacgcttcgtgaaagggacatcatcccattcttgcagatatttatccttgtcactgccatgacctcagggacatcaaaggccgacataaggtattttatacatgctgggtacagtcccagcgtccattgttccaaacgagaacgaagaccagtaggatctggaaaatgctcactttccatggaccgataccattcatatagagtgtgataacctgaagttgctaataaatgattccggatacaaatttcaatgcccaactccagcagcaacattaaaagtagagctgcagttaaatgggccaaaacatggaggccgcctataatagctcttttcctccgtgagagtttcgatggtacaaatgaatatgatgccatcaataaagttagacttgctactgaagagacataagagtgttcaaaaatataaagcaaagcactccatattgtacttgagaagcttttcacacgcccagaccaagtttcttcattgaagatgtgaacaagattacactgtgggaacattgaaaacaccaatataaagtagataaaaccaccaatagtatcaaactgccaattcttcttgcggaacttcagtatgttacccagtgcaatcccactagactcgtcataagatggataagctgccttgcattcataggtggttcctgttaggcaatagaatatgccgcagccccttaccatatgctgcggcatttgtagccataattagtagatgtaaatcaaggattagttgctataattagcagatgtaaatcagggattagttactatactgagtagatgtaaatcaagggaattacccttgccttgtaaagcaaggccagccggccctatataacagaaggtgccccctcctattgaggtgtggccaattgcctcccaattctatctttctacagttccagagaacctctcaaagtttctaaaaacatgtgttgggtgcaaaaaggcgccaccacatccattgacaagcaagtgttgcacaaaattaggcttttctgatcgagtggcagaatgcctcataaaatggtgtaaatcccccgccatgcgaagtctacatcttccattcaggtattcctgaattaaatgtgagacattcttgcctgtagtctccttccagtaccaatcaagaagccagtttggctcatgtgtcactacaatcacagagtcattctccccaacctgcagaactttagtattatagcggatcaatcaaatctggaaattaaaatattagccacaacttccaagagatattctggaaacatacatgagtatctttccaactagaatgcaaaagggcctaagactgcaaagaatcttttgcaacattttttttgtttac

SEQ ID NO: 10852 - DNA, 1877 bp, Setaria italica
  Peptide Sequence Number=SeqID_76826
tttttttttttgtattaaagttggtttcattatagctctgttcgcttcagcttattcagctggcttatcagccaccaaacagtgttttcctctcacaacaaatcagccgtttcagcttttcagccggcttataagctgaagcgaacagaccgtcaatccgtcgtggcccagactagttctcataccatgtttaggaacagcacgccaaaaaagggcggcccttatgaacatctagaaaacaagatcctcgtctcacctaatcattcaacattgtccattacagaatcaacctaagatcaaaattccgcattattaaccactgaactgccactgggtggagctccagtcagccaaatgcaggaaaaatgggcaaaactcctcaggctcaacattgcccgtaacaaactcaccactgactgatacaatcacctacaagcacgatccatcttctatgaagcagcggggacagctgattcagcaggggactcatgctccttcaccagcgattcccagtcaacctccttgagaatcctgaaccgctcatctagagttacaaaattcgactgagtcaccgctccacagatgccagctttgtgtataagggcgatgctgccacccatatcaggcccatgaagcttcccggttaacagtactcggagcggcataaagagccctttgccctttctttttagagatttgccaaaacctttcacccacttttgccaaccatcacggccttcagctagtgcttgagtgagttcaccgctatcgtatgcagaaataagacccgaagcaacctcggaaatcttgtcttgcaccacaggtttagcttcatcactgcttaaagtagcatgaaggggatatgacaacaaatttgtaagagctgcatcagcctctgttatcagatcaataccatccttcaaaagctcggcagcttccttagcaaaaccactttcagattcttggagaatgcatgttttcttccaccgatcttctaaagccttgatgagttcatctggtggaaatgatcttaaatgctgtccattcatccattttaattttgttgcatcaaatactgctccacttttattgacacgattgatagtgaatttttcaactagatcatcaatagtgaagaactcattttcagtaccatcaccccagcccaatagtgctaaataatttaccattgcctgaggtagatagcccatctctttatactgccccacagatgtagctccatgacgttttgacagtttgcttttgtcaggagcgagaataagtgacacatgggcaaatgaaggcattggaaatccaagagctttataaatcagagcttgccgcagtgtgtttggtaaatgctcttcagctctgataacatgagagatttgcatggtagcatcgtcaaccgtcacacagaagttatacacaggttgtccattgcttctcataatcacaaaatcacccagcgtgtctaagttccaactgacctttatgaaactctccacgaataaggtcattaattttcaatgacccttcctttggcacacggaaccgataagtgtaaggtgtccccttctctagctcctgctcaacttcgacgtctgaagcagttgcccacttgcccatgtatacaggaggaagctgcctctgcttcgcgacttccttcatttgctcaagttcctcattggagcaaaagcagcggtaaaccgcaccagagtccaaaagcttctcagcatactgcttgtacagcgaattccgctctgattggcgataaggcccaaactccccgccaacatccggaccttcgtcccactggagtccgagccacgcgaggtcggcgagtacggcctcctcggacttcctggtggatcgct

SEQ ID NO: 10853 - DNA, 1704 bp, Setaria italica
  Peptide Sequence Number=SeqID_76827
ctgtcttctctctttccacattcatcctgctctgcagctagctgctttggttgaggatcggaaatggcaatcgaagatgaatcgccgcagctcagagtcaacaccaccagaggcggcgccatgggaggaggggagtgcgacggggcggagaaccagcggtggccgccgtggctcaagccgctgctggggacgagcttcttcggtcaatgcaagctgcacgcggacgcgcacaagagcgagtgcaacatgtactgcctcgactgcatgaacggcgcactctgctcccagtgcctcgcctaccaccgcgatcaccacgccatccagatacggaggtcctcctaccacgacgtgatccgggtgtcggagattcagaaggtgctggacatcaccggcgtgcagacgtacatcatcaacagcgcgcgcgtggtgttcctgaacgagcgcccgccagccgaggcccggcaagggcgtcaccaacacctgcgaggtctgcgagcgcagcctcctcgacaccttccgcttctgctccctcggctgcaagatcgtgggcacctccggcgagttccgcatccggaagaagcacgccgccatcaagaagaagaagaagctgccgcacaagggcggcgccgcggcggcggcggcgtcggactcggaggacgactcgtcgacgagcacgagcggcgggagcgacaagagcagcgtggtgcagagcttcaccccgtcgaccccgccggccaccgccaacagcttccgcaccgggaagcggcgcaagggcgtgccgcaccggtcgccgttcggcagcctcatggtggagttctagaacgcggccacgcggccgcccctcgccaaggaagaaaccagcggtacaccacaccactgtagcatacgcacccctacataccatactactctatagctgttggatcgaccgatctgcataccatagccagccaaaaaggaggtaatgcaagcaataacgaagggccccattgcacgcctgcgcttctggtaggtttcaaaaaaagaggaggccggtgcagtgcggcacggttacttcacatagtagtcttactgtgctagtaaggccttgtttagttggccaatttgggagatgcaaaattcctgttccagcactgtagcacactgtagcgtttcgtttgtatttgtgaattattgtccaaatattgactaattaggctcaaaagattcgtctcgcaaagtacaacaaaactgtgcaattagtttttaatttcatctacatttagtactccatgcatgtaccgcaagtttgatgtgatggggaatcttctttttgcatagtgtcaaagttgggagttgggagtaactaaacatggcccaagttgctcccgagtccccagcttatcgcattccatcctgtggagctttcaccgggatgcgcgccccacccccgccgtcgcattcgcgtcgcccgtcgcgcaacggtgcaagcgcgacgccggggccttgtcttgttcctttgcattttgctggtggatccgtcgtggcaccacgcccccattgtcccgccgcgcgcccggtggatgcggatggcatgagttgctccgggcggcgcctagatgaccagctggtggacgcgcggcgccatggccgccggctcggccgcggcggtagggaaccatggctgcgccggccggttgagctgggagggcgggggtctaccta

SEQ ID NO: 10854 - DNA, 1688 bp, Setaria italica
  Peptide Sequence Number=SeqID_76828
tccggcaccggccggtggttccgttccgttcgttatgttcgtgctcggggtggagatagcggagaggttcgcgtaccacggcgtgtcggcgaacctgatcagctacctgacggggccgcttggggagtccgacggcgggcgccgcggcggcgatcaacgcgtggagcggggtggcgaccatgctgcccctgctgatggcgtgcgtggccgacgcctggctcggccggtaccgcaccatcgtgctcgcctccctcctcttcgtcgtgagcatgggcatgctgaccgtctccgcgctcccggtgttccaccaagacggctgcagctacagctccagctcgctcgcgtgctccccgtcccccgtgcaggtggccatcttctacgtgtccctgtacctggtggcgctggccgaggctgggcacaagccctgcgcgcaggcgttcggcgcggaccagttcgaccagcacgaccccaaggagtccgtgtcgagaagctccttcttcaactggtggtacttcggcatgtgctccggcaccgccgccaccaccatggtgtccagctacatccaggacaacgtcggctggggcctcggcttcggcatcccctgcctcgtcatggtcttcgcgctcctcgccttcttgctcggcaccaggaactaccgctattacacgtccaccgaatcaagcccctttgctcgcctcgccagagcgttcgtggcgatgatcagaggctccaaatcgagccaatgcgacagtcttgcgaccgacgacgccgcgcaccgggaagaagtgaagggcgtgctgcgcctgttccccatctgggcgacgtgcatcatctacgccgtgatcttctcgcagtcgtcgacgttcttcacgaagcaggcagcgacgctggaccgccggatcggctcgacactccgcgtgccgccggcggcgctgcagacgttcatcagcctcaccatcatggcattcatcccggtctacgaccgcgcgttcgtgcccctggcgcggccgttcacgcgcctgtcttccggcatcaccatgctgcagcggatcggcacggggctcgtcctcgccatggtcgccatggccgtggcggcgctggtagagatgaggcggctcggcgtggcgagggacgccgggctcgtggaccagccgaaggcggcgctgccgatgaccctgtggtggatgctgccgcagtacgtgctgttcgggctgtcggacgtgttcgccatgatcgggctgcaggagttcttctacgaccaggtccccgacgcgctgcgcagcctcgggctggccttcttcctcagcatcttcggcgtgggacacttcctcagcagcttcctcatctccgccatcgacggcgccaccaagaagagcggtgcgagctggttctccaacaacctcaaccgcgcgcacctcgactacttctactggctgctcgccgggctctgcgccgtggagctcgcggctttcgtcatcgtgtcccgcgtctatgtttataagaaaagggtgtcccacgacaatggtgctgtcatgtagatgtgccctgtatgcttactttctgtgaattgtgatatagtataggatcgaggcgtagagaatgaataaaaaaattgtaggctaaagctaaaccttgtttatgatagtcttatggaatgaatccttgaaccgagttcaacagcttaaagc

SEQ ID NO: 10855 - DNA, 1572 bp, Setaria italica
  Peptide Sequence Number=SeqID_76829
ttaagtttagtactaaagtaaaaaacttaggtaagtaaagtctaaaagtcttgttagcactccaaaattgtactattactatatgataatactctgattaacatacacttatggtaatggtgcccaacaaacagtctaaacatcgaccaatcatcgatggatgtcgcagtaattttacatcttgtatcttctccgttcatgtgtgtatcgcttgaggtcctgtttagttgcccgattttggacaaaatcattgtaccagcactgtaacgtactataacgtttcgtttgtatttgtgaattattgttcaaatattgactaatcaggctcaaaacattcgtctcgcaaagtacaaccaaactgtgcaattagtttttgatttcgtctgcattcggtactccatgcatgtactgtaagtttgatgtgatggagaatcttctttttgcatagtgctaaagttggaattttggggtaactaaacaagacctgaattttcctttcctttgtttcattgctggtgctgaatgagctaggacgctagcttcagtaggtaaccctgacgccgttgtatctgaggatctcgccgacgagctcgcccttgccggagccgacgtagcggccgacgatcttgccgtccctgatgaagacgaaggtgggcacctcgacgatgtccatgtcgctgaggaactgcatgcagctgtcgttctcgtcgccgttcatgcgcgcgaacacggtggtctcggccatggagcgcgacagcttcaccacggtgggggtacaccttgacgcatggcccgcagtgcttgagcccgacgtcgagcacgacgagcttgcccttgtcgccgcggtgctcgtcgatgagcgcctcgacgtcctcccgcgagtgcagctgcaccaccgccgagtggctgtcgccgtagtagagcacgtcgccggcgagccgctcggggccgatggcctcctcctcgtgcaccttctcggcgcccttgtagaagctgaagtggggcacctgcgtgatcccctcccggcggcacagctcctttgtcgcctccgactcgtcctccatcaccagcaggaagttccacgtcgccgcaggtccggctcagctgcaccatcgtcgggtagatctggctgctgctctcgttgtcgctcgccgcgaactccaccaccaccagccggttcttggccgccttgagcgcgccgtcgaactcctcggcgttgttcaccttcaccacgcgctcgtccttgctctggcccttgtcggacggcggcggcggcgccttctcggtgcccgagaccgccgccctcggcgcggacagcacggcgcgccgccgcccctggccggcctgcgcggcgggcaagaaccggacgaccttggcgctgctgcttaggctggcggtggccctggcgagggtggagaggaacgtggcggcggcggcggtggaggccatcgctgctgtgctcagctaagcaggcagtgaggtactgaggtgatcttggtgctgctgaggagtgaggaagagagcaggggagggagcagaggagaatggggagcaacaataggatagagagag

SEQ ID NO: 10856 - DNA, 3015 bp, Setaria italica
  Peptide Sequence Number=SeqID_76830
gcacaccaaaccaatccccccactctcctcgctctatctctcatccccccgccctgccgcgcccgcgcgcagccgccgcatccctccgactccgacctcctcacgggctcgccgcctcccccgcctccgccgccgcaggtctgttggcctttctagaaactgaagctcagctcaaaacttcatcattctcctctcagtcttgaaagtggcgaaaaatggatcgtgatgatgtagccggctttgttagtggaggttgcaaaaatttctgccgagacttctaagttctaacccagtagatgactatagagttttgatttccggaagtcaggcagcgggttcttttcatttcatatttggttatgtttcttgattggaatggacagggcctccccaaacccttggatctggtggtaatattaactccttgaacaatctttgtcactggagcacagttcagctagcagctgaatacaaagatactgccactggcacgcttgtgtattccaacttctctaaggacaatccaagagcactgaaaaggaagtggattgatatggctggagttgaaggtcctgaaaatccactgcccacccttggtttgggccgttcaccaagttcctctgaaaatagcaagggtagctcccccacagcttgcataatgtctccatcttcagtgaaagagactgatgaggagtcatcaatggatcttggtctaaatttcgatctttgtcttggtcatgatgtggtacatcatcacaagaaaccacatgctggtgctgaaaacattccatcagcaagtgctccaaaattggatcttcagttaagtttgtccacatgttctcctgaatcagctgtgaccaatgcaagtactgcatcattagatgttcatgatggcttagagacagtggtgcctaattcggtgacagatactatcgggagaaaatcagaaccctctagttgggtttttgggcattacatggcttcatcatcatatgcttctgaagcaacctacagcttttctttggcaaagataccccaaaaggttgatgatgctgtgccttccccagatgtctcatcagccattacagtgagtgtgaaaagcccagctgcctgtacttccggggcaactaaccccctaaaacgcaacacaaatactaaatgctgtcagttcccaggatgtgaaaagggagcaagaggagcctctgggtattgtatagcccatggtggtgggaggcgatgccaaaaacctggttgtcagaagggagctgagggaaggaccatctattgcaaagctcatggtggtggtaggagatgccagtaccttggttgcacaaagagtgctgaaggtcgcactgaccactgcatagctcatggtggtggtcgccgttgtagtcaggaaggctgttcacgtgccgcacgtggaaagtctggcttgtgcatcaagcatggaggtggcaagaggtgccagagggagaactgcaagagaagtgcagaaggatatacaggcctttgcatctcacatggtggtggaaggcgttgtcagtttccggattgtacaaagggtgcccagggaagcacaaagttctgcaaggcgcatggtggagggaagcgctgcacattcccaggttgtgccaagggagctgaaggtagcacttctttctgcaaggggcacggtggaggtaagcgctgctcctaccagggtggtggtgtatgtccgaagagtgtccatggtgggacgcagtactgtgttgctcacggtggtgggaagaggtgctcagtttcaggatgtaccaagagtgctagaggtaggacggaatactgtgtgcgccatggtggtggtaagagatgcaagtttgagggttgtgcaaaaagtgcgcaagggagcactgatttctgcaaggcacatggaggaggcaagcgctgctcgtggggccaggaggggtcaagcttcggtgttggtgggccgccgtgtgataagtttgctcgcagcaagattggtctgtgtgcagctcacagcgctttgattgaggaccattgtgtccatggtggtggctcattggatcctgcaatcaaacagtttacaactgatgccaaatctgatgagatgaatgtgactgcaacaaaaggcgatgtggacatggcgaacagtgacaatgaagccgtcatggtatggagcgaccatggcattcctacggaccccggtacaaccccgtttccagagggcagggtccacggcagtggtctgttagctctactctccggaagaagtcatgcatgcgccagcagctctgagaatgacgcctcaacttctgcttccatgcgctcctggatgtgatgcgagggaggcacaattttcatcgaggaccgcctcctgtgttccgtttggtggcaaggcgagggtaataccgttgcctcacgtttaccgagattgatgtcaggatgctcacataagcggctatcccatgtagcagaaataaggggtagccaacttgtattgtgaaggggctgtttggctatcgggtgttaaaatttaacacccgtcacatcggatgtttggatgctaattaggagtattaaatatagactaattacaaaactaattgcatagatggagtgtaattcgtgagacgaatctattaagcctaattagtccatgatttgacaacgtggtgctacagtaaccatttgttaatgatggattaattaggcttaatagattcgtcacgtgaattagcacaggattatgcaattagttttataattagctcatgtttagttctcctaattagcatccgaacatccgatgtgacactgttaaagtttagcacctcgtatccaaacaccccctcaagcaatgctaatgctaatgctagtagcagcacaagtcctgtggcgatgactaacatcagtactttattacaggtaggttgccgaatggcactcggcccacacagcttccttcgatttgctctctaatccctcctctacccacttacttaccctctccttccttcg

SEQ ID NO: 10857 - DNA, 1367 bp, Setaria italica
  Peptide Sequence Number=SeqID_76831
tttttttttttttcctagtgggacaaagaatcactcatcaagataaaatgaacaatgatggtcacgcaagtagttaagagtacatatcaggcaggcaaacgtattcccctagaaacttaatagttacctataagcacatctgaacctaggtaagagataaagctacatctgaacctaggtaagagataaagctctggtaatgtatgcggtatatattacatggaaggcaagaaggctataagctataagtaatctcagagacgcactgcatatgtatagcgatgtacaagacagcggtaccaactgccacaccctgtttctcttccactcagcaaggcagctctatcaaaaggcatttcgcagtgcaccacgggccgcctcgcgtttcatctctgcttcttttccacttccacggaagtacatgtatacttgctgaatgacagcaatgctgagcagtgattcaaggcagaacaatccaaatccaatgaagtaaaatatccccacaatagcactcctgcctatgacatcaattgccggcaaaattccagccaaagattttcctttgaaaggaaatggaggagccacagcagaccagacacaaaatagtatatggagcaagtaaaacaagaaaaaccacccaaacttcaaagcactttcagtcctcatcgcattataaagtggacgataccatagcacataggccccagggacaccagagatgaagtaaatgatggctagcaaccagatcatcacaccttctcctttaatccatgctgctgtggttgcaatgatgttccaaaaaagacaggctgtcaatcccagcagtgaagaaaatgccaggtactgcatcctttgtaggtgaactggtatctcattcgaaatgtcatgatgaataatgggcataaagggtggccagttcttatcttcaatgacaataccagctctggctgcagcttcctcctttcttttcagttccctttcccgtttgtttagctcagcctcctttgcctgcagttctttctcctttttattcatgtccttagttgaatcaagaggtatgtctactgtggcaccacgatcattgtagaagcccgctggttcatgaggaagaggtggcatccgagaattggaagcaggaggtacacttcctcccgcaaaggggttgacgtcgtcctcatcgaacgggttgcggtcgtacctccccgccatggccgcctcctcctgctgcggcggcggggtctccggcgaggtaagggaaggggaagagcagcacggggcgggggcgggaggagtccaacctcccaacgtggcggtggcgaccaactgctacgcggctgccgctttcacttttagccggggttgtttac

SEQ ID NO: 10858 - DNA, 2343 bp, Setaria italica
  Peptide Sequence Number=SeqID_76832
ttctcgcagcggcccgggtgcagggtcacgctgtaccaggacgcgcacgtccccgacgcgttcgcgccccggatcccgctcgccggcggccgcctctaccagcagggccggtgctgggaggacgtgttcgacgccatcagcaacgcgcgccacctcatctacatcacgggctggtcggtgtacacagagatcacgctgctgcgggacggcgcgcgcccgcaccgccccggtggggacgccaccctcggcgagctcctcaagcgcaaggcctccgagggcgtgcgtgtgctcatgctggtgtgggacgaccgcacctccgtcgagtccctcggcatgacgtgggggttcatgagcacgcacgacgccgagacggccgagtacttccgcggcaccgacgtgcgctgcgtcctctgcccccgcaaccccgacgtcggcagcagcgccgtcaagggcgcgcagatcgcctacatgatcacccaccaccagaagaccgtcgtcgtcgaccacgagatgccggtgaggcgcagcgaccgccgccgcatcgtcagcttcgtcggcggcctcgacctctgcgacggccgctacgacacgcagttccactccctgttccggactctggacacggcgcaccacaaggatttccaccagcccaacctcgcgggcgcgtccattgacaatggcgggcccagggagccatggcatgacatccattccaagatcgaaggccctgccgcgtgggacgtgctctacaactttgagcagcggtggaggaagcaaggaggtggcaatgatctcctcgtcgacctcaacgctatggcagacctgatcataccgccatcaccagtgatgtacccggacgaccaggagacatggaacgtgcagctcttccgttccattgacggtggggcgtgctttggcttccctagcacccccgaggcggcagcccaatctggccttgtcagtggcaagaacaatgttcttgacaggagcatccaggacgcctacatccacgccatacgccgtgccaagcacttcatctacatcgagaaccagtacttcctcggcagttcattcgggtggaaagccgacggcataaggccagaggagattgaagcactgcatctgatccccaaagagctttcgctgaagattgtgagcaagattgaagctggtgagcattttgcggtatatgtggtgctgccaatgtggccagaaggccctcctgctggtggatctgtgcaggcaatactggactggcagaggaggacgacggagatgatgtactatgacatttctattgcacttgaggcgaagaggatcgatgcaaacccaagggattaccttacattcttctgcttggggaacagggaggtgaaaatgagtggcgagtatgaacctgcaggtcgtccattggatgggtcagactatgctagggcgcagaatgcacggcgcttcatgatctatgttcactccaagatgatgatagtcgacgacgaatacatcattgttggatcagctaacatcaaccagcgctcaatggatgggggcagggactctgagatcgccatgggcgcattccagccatgccacctgaacaccaaaggccaggtcgcccgagggcaggtccacggcttccggatgtcgctgtggtacgagcaccttggcatgctgcacgacgacttcctgaacccgggcaacctggagtgcgttcagagggtgaacaagatggctgacaagtactgggacctctacgccagcgactacctcgacgccgacctccctgggcacctgctcaggtacccgatcaacgtcacaaaggaaggcacggtgacagagctccctggagccaaatacttccccgacacgcaggcgacggtgcttgggatgaaatctaataagctgcctcctattcttaccacatagagaagtaattttgtttcttctggtgaggtgcaagtttgccatcttctgaattgttcactgctgccttctgggcatagttccagcagtgcgagctactcggattctgttgcctttgagattagtttataggctgaattgactgtttagctcatcagaagtctgaacatttccggtcctcgcatgatgcattctagattgctgaagttctgaaggattaggaatgcaacttgagttggctgacgcattagctgcagtgatttcagacttggttggctagcttttgaaatttgacctcattctggtccttctggacatgtttcggaaggtcttgtcaggccttgtttagttggggaatttgggaggtgccaaattactgttacagcactgtagcacactgtagcgtttcgtttgtatttgtga

SEQ ID NO: 10859 - DNA, 1317 bp, Setaria italica
  Peptide Sequence Number=SeqID_76833
ttttttttttttgccaggaaataaccaagcgatttcactcacatcaagcgtatacaaatacatcatatcctactattccaccaacaatccaccgttatgcctatcaaccacatctaaaccgtggcaagaaatggaaaccaacgacaccctgacgcattaatacgaggaatgttcgtatcttacagtctacagaaggacaaaaagcggatcagctgtacgctttccaagatcgaaatacgcgtactgccgcgatgtacaagatcccatgcctcaaatgacacatctggtttccttctatccatcaactggctgtaatcagagccgtatgttcatcagaaagcagaacttagagcaccacgtgccgcctcacgtttcatctctgcggcttttccacttccacggaagtacatgtatacttgctgaatgacagcgatgctcagaagtgattcaaggcagaacaagccaaatccaacaaagtaaaatatcccaacaatagcactacttagacttaatgacatcaattgctggcaaaattccagccaaggattttcctttgaaaggaaatggaggagccacagctgcccaaacacagaagatgatatgaatcatgtaaaacagaaaaaaccacccaaacttcaaagcactctcagttctcattgcattataaagagggcgataccataacacataagccccaggtgcaccagatatgaagtagataatggcaagcaaccagatgataacaccttcccctttaatccatgctgttgtagttgctatgacattaaaaaagaggcatcctatcaatcccaaaaatgacgaaaatgcaaggtactgcgtcctttgtagatggataggtatctcattggaaatgttatggtggatgagaggaaaaaggggaggccaattcttctcttctatcacaatgccagctcgggatgctgcctcttccttccttttcaattccctttctcttttgtttagctcagcctccatagcctggagctctttctcctttttcttcagatcctttgttgaatcaagaggaatgtctacattgtagaaatcagccggttcatgcgatagaggtgagagccgagaattggtggctggtggaacacttcctcccgcgaaggggttgacgttgtcgtcgtcgtagccgttgcgcttccccgccatcgcggcgccgccgcctcctcctccggcgtcgggtcgggtggtggccaaccgctgctgcgctagtggtgtactgctggctgctgctgcctgccgcgctgccttcgagtacgcggaaagagaaccgagggggttgctgtg

SEQ ID NO: 10860 - DNA, 4906 bp, Setaria italica
  Peptide Sequence Number=SeqID_76834
gtcatgtcccatccctttcaagttgcagacttgcttgaccgtaatgattgcttgggtctggctgggaatttctcagatctttttgaaacgagtgccgattatattaaaaagaagagagattccaaactgggaacaacaacatagtcacaaaagtagctcccaacgaatagtgccgactcaactcaactcaaaacaaaaagaaaagccttcatcgatcacctttgccgccgtcggaagcgttgcaaccgattatttcaacgtagaactaggaagaatgctttatccccgaattctgtggattttggtattttggagaagaagctggaggatccatgtgcgacgcccatgcatctgccactggactttctgaaatatatcacgtgcgatttctccaaggagcaagaacttggaagaggcggttttggagcggtatacaagggcattcttcagagcaggaaggcgattgctgtgaagaaactttatgaggtgcaactagatgatgatcggtaccataatgaagttacttatcttatcgggttgaagcatgaaaatatagtacaactcctaggctattgtgctgaatcatggtgggaagctgtccaagcagacggaaaagtatgtcatggctgaaatacgacacgggacgggctgatctgctttgagtatctaaataacaagagccttgatgcatatatttctgctgaatcatgtggactcgagtggcacaagagatttgaaataatcaggagaatttgcttcggtctgcattaccttcacaaggaatgcaatattgttcatttggaccttacaccacagaatatattgatggataacaatatgctgccaaaaattgcagattttggtatgtcgagactctttaggccaacaacaatctcggatcatcacccaaaaacgtgtggggacacttggatacatggcaccagaatacataaacaatggattgatatcatacaagtcggatatattcagtttgggcgttataatcatagaactgctgataggatccagggactatccccagagcagtgaaacatcattcgaacacgtcatcgagaatatgagacaaagttcagctaggcatgaatttttaacagtgagctcattcttttttaaagtttttttgacacaattactatgggggtgtgtggatacaccccctaaagtttagtacccatcacatcagatgtttggatactaattaggagtattaaagatagactatttacaaaacccattgcacagatggagtctaatttgtgagacgaatctattaagtctaattagtccatgatttgacaatgtgctgctacattaaacatgtgctaatcatggattaattaggctcaatagattcgtctcgcgaattagtataagggttctgcaattagttttataattagctcatgtttagtccttctaattagcatccaaacatccgatgtgacactcctaaagtttagcacctcgtatccaaacaccccctactagcatatttgctaggtagttcagaaatggaggaacagattcgaaaagacatccaagttcacacctgtggaaatatacagtcaacaagtacacgcatgcaccgtgataggacttagatgtgttgactctgacccgaacaaaaggcctgctgcctgggatataatccaaatgcttaacgcaacagagagtgagaacaggtggtctggcatcaacggaggaccactagtggacgagatcgtcagggacaggttcgccaatgtcaaggagaagatgcagcagccgtcgatactttcgtgtcgggtggaggtgcaatcatcccaggagtcctgcagcagaggcggcgggttctaatctgatcatttgacacacagttctatttttaaccttccccctctgattgacttaggtgggaaaaagggaaggctagctttttaggaggttgtgctgcgttgagtaagatccatggccatgaattatactactggcgagtggcgatctctgatgaactatcctatgtacaatttagccgttatttgccgctatagcttcatttatctcgctattagctgtttttaatttggaggtcaaacgctaaatgccttaacccgctatttaaaacattgcctctaactgattcccctaccattccccctaaggatgcgtagcacctaccaccctttgcaaatagaattaaacattcctcacattcatgctctttgaatacaacaaaagtgctacctgatcactatgccctgagattcatcagataattatgtggaaaaaaactgcatttcgtggctagctagttatattttctgcaagtttgcctatacttagtgacaaattgttaacaagcttatgtttgttttatataaggtaactagttatactaatgtgttagctggtattctaagttaaaaacagaatgaagttcttttactctgatgaaggaacttggtggaagtaagattttgaaatttttttgctcagttcttctcttttcgacataaagagcatgcaaacttcctatcatctaaatagatttattgatgtcataggaaattccttgtgcagctgtactggattattctcttcgtgtaatagtgtgcaatatcacctaagtttggattcgcagttggtttacagaacatttccctttgcagtctgagtaaaaatagccggttatgttatgggtatgcaagctctcaggcgaaggaactatcgatggaggacttttatgatacaatgctagctagacatcgttgacggagagccagttggaatgttcggtgtatacaatggtcataatggagcgatagcagctgaatatgtcaaggagcatcttctcagaaatttaatcgaacacccaaagttcataactgataccaaggctgctattgccgaagcttacaaccacacagattcagaatttttgaaagttgatagaagtaaaccaggtccaggtgctggctcaactgccgtgacagctatttttgtaggtggtcgtttacttgttgcaaatgttggagattctagagctgttatttgtaaaggaggacgggcgattatgtgttcaagggatcacaaacctgatcagtcagatgagagacatagaattgaggatggtgggggctttgttatgtgggatgaggggtggcgtgtgggtggtgttgtcccagtctctcgagcatttggtgataaactcttgaagcagtatgttgtcgctgatccagaaatcaaggaggtggtggttgacagctcccttgaattcatcatccttgctagtaatggactctggcaggttgtcactaacgaggaagctgttgccatagccaagagacatatttgggaccccgaggaatcagcaaaagagcttctcaaagaagcttacaaaagggaaacttccgataacaccacggtggtgatcgtccggttcctgcatgagaactccgagtgacaaattcagtgatgttgttgggagtccctactatgtcgcaccagaggtactacagaaatgctatggtccagaagctgatgtgtggagcgcaggggtgatcctgtacattttgctttgtggtgtccccccattttgggcagaaactgaagcgggaatcttcaggcagattctgcgaggcaaacttgattttgaatctgaaccctggccaagtatctctgatagtgctaaggatctggtccgtaatatgcttactcgggatcctaagaagagatttagtgctcatgaggttctttgtaagcacaccccttcatctctctcatggagttgcggtgtagctgtgtaggtcacccttggattgttgatgatgccgtggcacctgatacgcctattgattctgctgttttgtcaaggctgaagcatttttcggcaatgaacaagctcaagaagatggcattgagggttattgctgaaagcctgtctgaggaagagattggaggcctcaaggagctgtttaaaatgattgatacagacaatagtggtactattacatttgatgagctgaaagatggcttgaaaagggtgctcagaattgacagaatgaaatccaggctctaatggaagcagctgatattgacaacagcggaaccatcgactatggtgaattcattgcagctacgttgcacatgaataagctggagagggaggaaaacttggtttcagcattctcatttttcgacaaagatggaagtggctttataaccattgatgagctgtcacaagcatgccgtgaatttggtcttgatgatgttcaccttgaggatatgattaaagacgttgaccagaacaatgttagtcggttttatattttgatctactctccgtctccctgttctagttgcattcacaaatcttgaattttggttgttcaccagttaatttctatctggttttcacttcaggatggacaaatcgactacagcgagtttacagcaatgatgaggaagggcaatgctggtgcagcaggaaggagaaccatgaggaacagcttgcacttgaatcttggcgagctcctgaaccccagcaaaacctagttagtgcataacagaaggccttgccgctacattctcatggcgtctgaagttttggatgcgttgttgatcagctggtctcatatgagatgttgagtggttgtcctgtggtattactgaggtgctggagaattttcgtagtactggtggtatcggctagagaagagaggtgctaccctgtggttactatgatcaactgcttatatgtattcctgtcgatgtagattgaacgttgtcgaaaatattccctagaagtacaactttgctgttaagtgtcaatttaggttgatattcaatggcactctcaagctctaatttcctcacccacctcttattttgtttgacaaaaaaaaaa

SEQ ID NO: 10861 - DNA, 1368 bp, Setaria italica
  Peptide Sequence Number=SeqID_76835
tttttttttttttttattcataaataattgtatatttaaagacggatgtacacgtaacaaaagataatgaattttaggtagcgacagcaaactttgacacacatgacggttcatgcagtacactcgatccaggtgcttttattttaccacgagcacatactgaactagatacgagagacgagacacagcaggacgaagcacccccgcgccgttttcgatcgtcgatcgacaccctcaggcagatcgatgcaagcatcatgctagatcttgagagtgtccgcgaaccgggtcccttccggaatcgccttgaggatgcccttgatgtagtcgtcgatatccaaggacttgtagcgcggctcctgctccttgaggaggcccgggagcggcgtcaccatctcccccaccgtgccctcctcgacgaagacgacggtggtgcgtcccctctcggcgtccgggatcacccggtgctcgacgctcgtgtaggcgccgttggtgaggacgtcgaggagatcgccgatgttgatgaggatggctcccggcagcggccgcaccgggtaccaccggccgtccttcttgatctgcaggcccggcgtgtcgtcgacgtgcagcagcagcgtcaggccgaggccgtcggtgtgcggcgtgatgcccatcaccttgtccgggtgccggcacgggagggtagtagtgcatcgccatgctctgccgcttcccggtgaaggcctccaccagctcacccttgtcgtccccgatgtcggccgccatgaagcccagcagacgcctcgcgagcttcgtcatctccactgagtacgtcgcaagcgcatcgcggaacgtgggtgggttggtaggccacagtttcatgttcctctcatggactggctgggtgatgaggattaggccctctgcccagtccagcttgtcacctggccctctgctgtagtggtggccatatccttcaaggccagctcccttccccagcaccgccactctgttcttgatgtccagtggcaagctgaagaactccgcagtactgtcttttataagctgtgccactgcttcgtcgactccatggttcgttagctgaaagaaaccccagtgtcggcacgcagagccaagcttctctgtctccatggccgaggaatcgggatcaagaagcttggccatgtcgacgaccggcagctcgtaggcctcgtccttgccgacgacttcgtcagcaaggacctcatctgttctgatataactctccgggatgtggatggagtcgtcgccggcgaacagggacagagcggtgtccgtgatctcatccctgttgacgatcttctcgctagcaacctccattgttctttgtgtgcacctctcaaatttgtc

SEQ ID NO: 10862 - DNA, 835 bp, Setaria italica
  Peptide Sequence Number=SeqID_76836
tttttttttattggaagaaattttgtggaacaaattttgaaaactaaacaaagagtctctgaattacacgtcaaaggtttggagactaaacatggaagaaacaatacgattgacatatcccattacacgcaagcaaatatttacagatgtagagaagctactacacaccaagcacaagggttcccatcacagggcccgccggtcgctaccactcagcggccaagctgatcgagtcagaggaactgacagtagtagtaagcattttactccctagtccataacataggacaaaattaaataaaaggcaaagtctttagcctcggacagcaacgcagccgtggtacatgcgttttagataaccacaaggaccagcaaacatgtggcctgacagggaccggccaccgctcctccgtcgatctcatctaacccgatccgagatctaacggtggttgctcctggtctcgtcgctgtagagccagtcgtagacggtgggggagttgggctgcgggcggtcgaagaggttggcgcccatgctcttggtggccaggttgctcccggggtggaacacgctgcgccacacgttgttgccgccgcgcggcgtcgtcgacgacgacggcgtccccggcgttgtcggggtcgacggcatcgactgcgtccgcttgtagctcccggcagcagcaacggcatctttgtcgatgacgatcgggcgggggtggcggccttgcggagcttctcgagccccgtctccgggtgaggcccggccaccacgtcgtcccacagcttctccagcatcttcgccttcctccaacaaaggttacttaccgtctacctacct

SEQ ID NO: 10863 - DNA, 2677 bp, Setaria italica
  Peptide Sequence Number=SeqID_76837
gcgggaagtccagcgtcctcgaggcgctcgtcggccgcgacttcctcccgcggggctccgacatctgcacgcgccgccccctcgtgctccagctcgtgcaccagccgcggcgacccacggacgccgaggccgatgagtggggcgagttcctgcacctctcgggccgccgcttctacgactttcgagaaatcaggcgtgagatccaggcagaaacggaccgggaggcgggtggtaacaagggtgtatcagataggcagatacgtttgaagattttttcaccaaatgttcttaacattactttggtcgatttgcctggtattactaaggtgccagttggtgaccaaccaactgatattgaggccagaataaggactatgattatgtcatacatcagacacaagacatgtatcatcttagctgtttcaccagcaaatgcagatttagcaaattctgatgctcttcaaatggctcgggttgctgatcctgatggttctcgaacaattggtgttatcacaaagttggacataatggacaggggcactgatgcccgcaactttctgctgggaaacgttatccccttgaaacttggttatgttggcgtggtcaaccgaagtcagcaggatatcaactcagacctcagtatcaaggatgctctggctcgcgaagaaaaattcttccgtactcaaccagcatatcatggtcttacccagtactgtggtataccacaattagcaaagaagctaaaccagattctggttcaacatataaaaacagttctgccggggcttaagtcacgcataagcagtcaattgaccgctgttgctaaggagcttgctgtgtatggtgatcctgttgactctaaggctgggcaaggtgctaagcttttgaacatcctagctaagtactgtgaagctttctcttcaatggtcgaaggaaaaaatgaagatatatcgaccattgaactttctggtggagcaagaatccattacatttttcagtctatctttgtcaaaagcttagaggaggttgacccttgtgaggatgttaccgatgaagatatccgcatggctatccaaaatgcaactggtcctagaagcgctttgtttgtacctgaagtaccatttgaagtccttgtacgtaggcagatcagcagattgcttgatccaagtctacagtgtgcacagttcatatatgatgaactagtaaagatgagccatcgctgccttgcaacagagctgcagcagtttcctatacttcgcagaagcatggatgaagtgattgggaagtttttgcgggatgggcttaagccagcagaaagtatgatagcacacattattgagatggaggaggattacataaacacatcacacccaaattttataggtggcagcaaggctgttgagcaagcacaacagcaagttaaagctgctaaaatgtcagcagcggtggtaaggaaggatggagtagatgctgataaggtgcaagcttctgaaaaaactacaaaaatcgcgtgcggtattgggtagaagtgtaaatggagtggttactgaccacatccagggtgtaaggcctgctgctgaggctgacagaccaggatcttctggtagtggaagcacatccttttggaattcaatatttacttccaatgaggaccgaacgcatgcttctgcaaaagataactcagcaaacagatcttattctgtacctacacccaatctggagcattcattctccacgatacagttaagagagccaccagctgtcctgaaaccatcagaacaccagtctgagcaggaggcactcgaaatagcaataacaaaattgctattgaagtcatattacaatatagtgaggaaaaatgtggaggacttcataccaaaagcaattatgcatttcctggttaaccacacaaaaagggcgctgcataattaccttataacaaaactttatagagaagatctcttggaggacttgctcaaagaacctgatgagataaccataaagaggaagcagatacgtgaaaatcttaaggtccttcagcaagcttacaaaactttggatgagataccactcgacgcagaggcagtcgagaggggtggcttttccctcgagtctgatgtgattggtctaccaagggcccatgggctttcttcatccctacatggattcaatgatggaagctcaccatattcaaccccaaagcaatcaaggtcaaggagatccaaccattccggggagcagccccctttcaatcccaacatgagtggcaatggtttttgatgtcaccttttgccatggcctcccagattggttattgaaccaaaaccaactgatgtgctgcaagcacaccctattctgcatcgagtttgttggcacccatagatatatgttttttctagttatattctttgtagcgctgcgccgatgaagcctgacatggtgcgagttttgtcatttcgctttttgtacagtaatatctttgcccagtcatttcgtcgtaaaatgatatcggtgatgggtatagttttgttcggacccatggaagaagctatggaaagttctgctaggtgtagtagtgccaagtgcctgtatgttaccacggatttgccgtgcaaaatatgacatggctggtatggtggtgcaaaaaaaagttgtggcaagaatttgttaccttttt

SEQ ID NO: 10864 - DNA, 1848 bp, Setaria italica
  Peptide Sequence Number=SeqID_76838
agcccacctcggcctctcttcttctccagccgcacgtacgaagttgccacactgccagcaagctagcgagagcgagagcgagagcgagagagagctatggggagcgtgccggcggaggagatggccgtggacttcggcggcctggtaggcgacctgagggaggtgtacgagagcgacaggacccgggacctggaatggcgggagtcgcagctcaggggtctcgtcaggctcctggaggaggaggaggaggccatcttcgacgtgctccgcgaggacctcggcaagcaccgcggcgaggccttcagagacgaggttggggttctgaagaagtccgtcgtcgacaagctgcaaaacctcaagaactgggcggcacccgagaaggctcacacgccgctggttgccttcccggcgaccgcgatggtggtgccggagccgctcggggttgtgctcatcttctcctgctggaatctcccaataggcctggccctggagccgctctccggagccctggcggctggcaacgccgtggtggtgaagccgtccgagctcgcgccgtccacctcggcgttcctggcggccaacataccaaagtacctggacgccaaggccgtgaaggtggttgagggcggggcggatgtcggagagaagctcatggagcacagatgggacaaggtcctcttcaccggcagcagccgtgttgggcgccttatcatgacgaaggccgccaagcacctgacaccggtggcgctggagctcggctccaagtgcccgtgcatcatcgactggctcgatagcaacagggacagccaggtagctgtgaaccgcataattggggccaaatggtccacctgctccggccaagcttgcatcgccatcgactacgtgctggtcgaggaggaattcgcgccgattctgatcgaaatgctcaagtccacactgaagaggttcttcaccaagacagagtacatggcgcgcatcctgaacgagaagcacttcaagaggctgagcggcctcctggcggatcgcagggtggcagcctccgtcgtgcacggcgggcacttcaaccccaagacgctgagcatcgaacccacgctgctgctgaaccctccgctcgactctgacatcatgacggaggagatattcggcccgctgctccccatcatcacggtcaagaagatcgaagacagcatcacgttcctgaaatcgaagccgaagccgctggcgatctatgccttcaccaggaacgaggagctgaagcgccggatcatcgacgagacgtcttccgggagcgtcacattcaacgacgccatcgtgcagtatggcctggacagcatcccgttcggcggcgtcgggcacagcgggttcgggcagtaccacggcaagtactcgttcgagatgttcagccacaagaaggcggtgctcaagaggagcttcctcattgagttcatgttccgatacccaccctgggacgagagcaagatcggcttcctcaggcgcgtctaccgtttcgactacatctcgctcttcttcgcactgatcggcctgaggaggtgaggcagccggcgctcgccagccagccagcctgaggaagaagaggccggcagtgagtcaataaccgagcaaacagaatttgctcctaccattgctgatggtcaagtgcgagcaacggttatggatccgtttataactttatactggtttatttaattatattgcgtaaagaatttgcccctgctacctgtgtacaccaaagcctctatattgtcagcttatatgtgcccgtcgtttattgcaccaacagatttcataatgtaatataatttcagcttgtgcttttctcattgacac

SEQ ID NO: 10865 - DNA, 2958 bp, Setaria italica
  Peptide Sequence Number=SeqID_76839
cctccctctcccatctctcctctccccgagatgggggcagcgcgcagcggctgcagtcctgcagcacgcacaacgctagatccatccatgaagaacttctatggtagcacggtgtgcgcccggtccccgtgcccaccatcgcggccgaagcccgacacatcgggtcgagcagggaggaggaggaggcagcagcttgtgccgccatagtctgggagctcggcatcgcttggccgctcgagtcgagcatggtgtggtggttagctccaggtcaagtacctcctactactctttcacgcatcaaatctctcttctccttcctttctctgatttccctctgattgaattgattcctgatctagggtttcgtccatgggagctgctgctgcgctgcacggcatggctgtcgatcccttgcatcaatttttgtatttggactcagattagttcactaatcaacccccagtccttgttcttcccagttttcagtatctaccattgctctgttgtgcttcagtttttgatgctttactgaaatttagggttccatacttgaattgatgtgtggtatagctaatctggtgcatttattttgtggatcaattcccttgattacatgctggtagagttactgcatacgaaaaaagaacttcatctggtcattaaagttttctcaatcaggttccatgccttagcctagatacagtttttttaccgcgcatttgtgcattacagtaaaagctctgcagttttttttccttttgagaagaacctaatcttattgctctttagtgtcccaacaagttggtgggatacgtgctagcatataccttttagaaaccactatactgtgatccagatgttccatcaggagttgtacaatttttctgtggtcgacttgtcctgaatcactgaatgtgaaacttttcctgaaatgaagccccagcaaccaatttgttattgatttgctgtctgaacgcatccaatactgactctcgatgttatgaaacagttggattcctgaataattatgctgaactaaatttctttgatttgtttccaatggttactttgtcagttgtgacaggagaagccagttcatgaatctgtgcttgccgtggtttaaatacctgtgttggtgaatgggtgcttgccgtgctttaaatacctgtgttggtgtagtgaataattagcacctgttttaggacatttcgttacgactagcacctgttggagggcaattatctcgctattctctttcatttccattgagaggtgattcagctctatgaaccccttttcaatctgattcttcgcaagagctaaattgataggtcaaatatcttaatttttataatgcagtctggtggagagaccaagtctatgaattatctctgagagctgcttttcttccccattcatctccagctcctccactgagaattatcttctagaaagtgcatataaagggaaggggcaaaatatgacagagcttatgacttatgtagtagaataatcgaaatcatggtccttgcttctaagccatctctgggtattaatccaatgctaaattaaaaactttgattgaagtcctcagtctaattatttaatttcactctactaaaacatttattaaaatgttttgtttagggaatacgttttattttcttctgttatggcaactcttggcattcagatcattgatgattgatgtctgatgtaagtctctctccctccattctcttgcattcatttaacatttcctagctttttgttgccctacaaaatttatttccagtttccttctaattagaaatttctcttaggttttcattttttctgagatgcaattcaatgttagttgtctgaactcttgtaatcagtaacaaccaataataaggccatcaatgtatgcaattgagatggcttatttgtatccttcactcacagctaaattacctgcagcaagtaagcactcatatttttttccatctattcagtagtaaattgattcttctttcttctcatgcttaatgccgtgacacccacaaaatagcctccaaagaaggtagggatgatttccctttctaaattaaaatggcttcttccgtttcattcactgtgacatcatggctgactggctgtattgcaaaaccacacatttttttgtttccaaggatgattggaagctctttgttgtggagagtatgcagttatccttctcaaagctgatggagagtattgttcaaacatgtatgcttcatcggttcattcctaaattcctgatcggatagtctatatcctgttcttgtgaaatcaggtccaatttcaattatttctaattttctacactccttggcagaatgattgctcatctgccttgtcctcttcccttccctcacttcagattcatggtatttgtatcagaatatttttagtagtcaatcaaacctttttcctgagagttcatgttcttatcatttctgtttgttgtaggtcatgccatccttttcgagcattagggttgaaggcttgaagctgaatgattgcaaacggagtagaagtgtcaggttgtaaactaacttagcaagtgtcaggcttgaagctggatggaaagcatggacaaccaaaatatttaaagaaagctttatgtctatatgctgatgatggacagctagaagaatgaagaattacagaaaggtttattggtgactgctggtgccgatgggggcaggaatatatcaataagagaactcatatttagttttattttattatgccaaacatagttgcaaacttgtagtcagagatgatgtttttattctgttgtggtcatgtttattttagcactatggttattgtgttattactttgcttgagacatatatttcaagttaaaggtttgagttcttatatgtgatgatgaaatatatgctcatggcacaattattttagtaaaaa

SEQ ID NO: 10866 - DNA, 3700 bp, Setaria italica
  Peptide Sequence Number=SeqID_76840
ttggcaacctctaacaagccatggcaactaaatatgcctagcgattctaggcatggaatgaagggatggttggttgatgatgacagcttcagtacaggtgtggacaccctggcctgactgctggaccctggaattagtgatgacgtatcctcctgctgaccgaatatgatggaccccgagcatacggcagttgcaaatacgtaatatcttgagagatgccggtaggttgggaacctctaccaaagatggacaataatctaatgatagagactctagacatggcagtagtccactccgttctggagcagattgctcagaagtttcttgtgtgcgtccagtcagtttgctgcatcgcacaatatctaacgtcctcaaggataccagggcctggaacacattttctggccagtaaaaaagagcgtcgcaatacgaaatttttaaatctacgagctgtgcaaaacatgtccataatggcagtgcacttgagtgggagaacaaaaggttgtatctctgtaacgtcatacgtgtcagaggggatttatgctcccatttctccttgccatgcaccaactcacttgaattttgttcagccaccgattctgtttctggatcatcggctaacaactccaatctggacaatgaagtgatatatctgctagctgcttgtagttgtagggacaatatttgttggctagcccctcttaatagtagcccacttagcttaggtgcttcgggtagagtagtcaacgctgggcaattcgaaatacttagtttctcaagccgatgaaatgctagctcttcttctggatttccttggcctgcctcccattgctgaaacatctcaagtttttctaattccatttccttcaatgccggaaatgcagatctgtactcagtctcgacccccccaaatggttctttaataactgatgctttcggcaatgcagccagacctttacactctttgattaacagcttctcaagcagaggaaatattggcttttctcctcgcaccgcacttgtgccccaccatgtcgcaaaatttggcatcttaaaaattgcaaggtccttcagtttctgaaatgtgaaggttgtatcactgctgcacaagtaacgtatgttttccaatccgcacaagcaaagaatttgcagagctgggaactgccagaatgcaggaagcttctcgagtcttttgcaatcggataacttaagcttcactatgccttgcaacttattcatccatgttggacaaatgttgatactgcaggaatatatctttagaaccttcagtccgtcatgaggctccagaccttccagtacctctttatcactattatgtgcctccttgtcacaatcactccatctcaatgtcaatctggccaggtttttcttatttccgagttttgcctcttttgcatctgactctttcacattttctagccgttttagctccagctgaccaccaaggtcatctaaccgcctcagttctcccaccctactgcaatcggagcctgcacctgctacaaagcatgtcagcgtctgtagggaagtgaggtctctgaggtcagcaggcatgctctttaacttcgaacatccgtgagtgtagaggtgacggagggcagtcatgtacttcattccctttggaagtcgtccaagactgtaacagtaagaaagcttcaatgtttgcagatgatataggatgcttatatcttcaggaagtgattcgagaacatagcttcctgagagatcaagatacctcaggtgatgtagccatacgggttttaggaatgaagtttgtctccataactctaaacctagcatggtccatgatgttgaatctcccttgatctttaatgctcgcgcagacatgtattttgacaaatgttgcaagtctttgtctacatatccctcacatatcagtgtttgtataaccggagagcctttctcctgggaagcattcagaagagtttctggtctataaactgacaataataaatgacgagctgaatgtggaaaatccccacttttactctgttctgtacctatagaagcgcattcttttcccatagaatccaatgcaacatcatgcataaggtcatggatcttacaagtaactctagagacttctatatcagtgaactcaaatgggatccccttcacatcctggaaaaatgaccttgacgcaagctcaatgaaaatatttttacctaaaatttcaggatgttcttctccttgtagcaccgggataaaaccattggccatccataactggatcaacatttccacgtcaatcacataatccttgggaaacatagcacagaaagcaaagcattgccgcatatgtgctggcaagcaattgtaactaagcttgagtactggtaagattccgtttctatcatcacaaatctttttcgtccttagcacatccttccattcacgcgcggtggtcttggtacttaacacagaacctaatgctgtagcagctaaaggagaaccagcacatctctttgcaacatcaccaaccatgttaactagttcacgaggccaatccttttcttgttttgagctgaatgctcttgacttgataatttcctctatgaaattttcacccaggcgtccaagttcataggctcctttagctgtacccatcattagttttgcaacttcttgatcacgagttgttgtgagcactgagctgccgctgccaccatgctgaaggtaggacttcagtttttcccacttgtgtgcttcatcacggttccagacatcatccaatacgaggaggtacctcttcccactcactgcattttgaagcttgtccaatgctgaacttccatttgcttgacaaccattcttcttagcttcttccacaattcttttagccagggtatccacatcaaagttgtcagagacgcacacccagagtcgcagctggaaatgcttctgaatctcagggtcattgtaaacaagctgggctaaggtggtcttccccatccctcccatcccgacgataggaaagacagtgaaattcacattgctagctttatcaagcaacgacttaataatcttctccttgtctccagctctggatctgccggcaatgtccacagggtcgatgattttagaactactctccctcaagtgatttacgggtactggtggctcttgccggaacttgaacccgaaggtattcatctctgcgataaggacatcaagttcttccaaaatcatgcagagcttgttgcccatccttttacggaacacaaaacggttgtgagaagggaagagctttattacatccataccgagctccttgtagtgcccctcctccctggctttgcggcggagcgcctcgtacttgaactcgtccaagacgtcattcgcctggtaggtcacctgtcggatctcctccagccaagctttcgccccttctcgcttggctgccgcctgctcctcggcgtcggtgatgacgtccaggattgcaggcagcttgcgcttgaggagcttgtgctgcttctccaagccctccatcacctggtactgctccaggaggtagctggaggccttctccttcaccatggacaccagtggcccgaccaccatggtggccagtacctcagccatcggaacgcctggagctcgatcagaacacacgcgcaggatagtggacacagggaaacacagttgcaaggtggaagaa

SEQ ID NO: 10867 - DNA, 1391 bp, Setaria italica
  Peptide Sequence Number=SeqID_76841
cttttcatgcgcaaggggccgtggggaccaccaccttccgcgcgcctctcgctgctgctgctgctcctcctcctcctcctcctgctcgcggggcggccggcctcctgttcctgctgctgccggggggaacgcgcggaggaggtggcggcaccacgcatggggctcgacggggacgggccgccggacgccgccgccggcggccacatcagtaatagtgcaaatggccgcttcacttatggagttgcaagttctcctgggaaaagagcatcgatggaggacttttctgaggcaaggatagatgacgttgacggagaaaaagttggaatgttcggcgtatatgatggtcatggtggagtgagagcagctgaatatgtcaagcagcatcttttcagcaatttaattaaacacccaaagttcatcactgataccaaggctgctattgccgaaacttacaatcacacagattcagaatttttgaaagctgatagtagtcagactcgagatgctggctcaactgcctcgacagctattatagtaggtgatcgtttgcttgttgcaaatgttggagattctagagctgttatttgtaaaggaggacaggcgattgctgtttcaagggatcacaaacctgatcagtcagatgagagacaaagaattgaggatgctgggggctttgttatgtgggctgggacatggcgtgtgggtggcgttcttgccgtctctcgagcatttggtgataagctcttgaagcagtatgttgttgctgacccggaaatcaaggatgaggtggtcgacagctcccttgaattcctcatccttgctagtgatggactctgggatgttgtcactaatgaggaagctgttgccatggtcaagcccattcaggacccccaggaagcagcagacaagcttctccaggaagcttccaaaaggggaagctccgataacatcacagttgtcattgtccgcttcctagagggaacgacccctggcgataaatccgaagagaaagagaaagagactgccaatgaccaaaactcctcctagctgctcatgtagaatcatgcgtgcgttcctgtggctgttgtatctgatgcttgaagtagatgcggcgcgtgtgcccgtgcagctgtcccacgcagctgttccgcaaggaaactgactcgccccaaccgtcatgctgctgctgctcatgctcttgactctggcctaggggctcctgactctggtctgggtggggcattgctggagcagaaacgacgatagggctggtgttgctactgtacgatccaacttgaacttttcctctttttttctattaagctttacatgcacttgctgcgaagaaaacctctaatacgattcatgaatcaacatcacagaaaagctac

SEQ ID NO: 10868 - DNA, 3412 bp, Setaria italica
  Peptide Sequence Number=SeqID_76842
actcaccaactcaaccagtcgtcgctccgtccacacggccatggcagctaagctcgcggcggcggcgctgctcctggtcgtcctggccgtcgctgcagccacgccggcgtcggcgcagaagtgcgggtgcgccacggggctttgctgcagccggttcgggttctgcggcacgggcaatgactactgcggcacggggtgccagtcgggcccctgcaacatgccggccaccaacaacgtgtccgtggccagcatcgtcacgccggccttcttcgacgccctcctcgcgcaggccgccgccggctgcgaggccaaggggttctacacccgcgacgccttcctcgccgccgccggctactacccgtcgttcggccgcaccggcaccgccgacgactccaggcgcgagatcgccgccttcttcggcaacgccaaccacgagaccatcaggttctgctacgtcaacgagatcgacgggccgagcaagaactactgcgacgcgggcaacgcggagtggccgtgccaggcagggaaggggtactacgggcggggcccgctgcagatctcgtggaactacaactacgggccggcggggcagagcatcggcttcgacgggctcggcgaccccgacgcggtggcgcgcagcgccgtcgtcgcgttccgggcggcgctctggtactggatgaacaacgtgcacgagcccctactcgcctccggcggagggttcggcgccaccatccgggccatcaacggcgcgctcgagtgcggcggcaagaaccccaccgccgtcaacagccgcgtcggctactacaagcagttctgccaggacttcggcgtcgacccggggagcaacctcacctgctgattcggctggatgggtggatgtttcgatttggtggtgtgaaatgtcatgtgcgtggtgtgaggcatgaacaagctaggcatgtatagcgtgcgccgttctgattcatattattcggaaaaataattaggagtattaaatataggctaattacaaaactaattgcacagatggagtgtaatttgcgagacgaatctattaagcctaattagtccatgatttgacagtgtggtgctacagcaccacatttgctaatgatggattaattaggcttaatagattcgtctcgcgaattagcacagggttctgcaattagttttataattagctcatgtttagtcctcctaattagcatccgaacatccgatgtgacactgttaaagtttagcacctcgtatccaaacagcccctaaacaaggcctatgacgaggtagcactgccaaaagccatcgctttcgcttcactagttcacaaggctggagctgtcgggattaatggggcggtctggttggtcattcggtgacttgttactgcctactggcacgttaaaaacgtttgaatcgaactatcgtacttgacgcaataacaaagcacagtcaagagcccgatacagagcagtagcaggaccaggaatcggtagttttatttgtaccagatttggggcaggggcaccggcacccgccttcagactctcggtcggctccatgtgcgcgcctccgtggtgtgggggcgatccccgtcgttccaatgatacaatcgctgaaacagtagcatgcacagagcaacgggttcagagtgtgcctgagattttcaggggcatggggctagttcgtcttcgttcagcatgcactagcgtgcgtgccgtcactgccgtgctgtcctgtgctgtgtctgtgcgcgcccggccggcggtccacgtggacgcggcatgtggtcatgtgggtgcccttccgttcgagatgatggcgtcgtaccctgcctggctgtctgctcacctgttcacctcgcgtgggctaaaatcgccgccctgccggtaacccagctcgtcattttactacgccgcaggcccgcagcaagccactaaagccagtcgtaaactcgtaaatgcaagggacgtggtaccggtgctctgccactacggtagatgagatcggggcacggttggtttcgcaagtacggttgcatcgtactctcagtcgttggtcgttccacgcgcaggcctgtcgctggagccgctgatcggggccatcgcggccgggaacgccgtggcgctgaagccgtcggagctctcgccgtgcaccgccaagttcctcgccgataacatcggcaggtacgtggacccctcggcggtgaaggtcgtccagggtggccccgaggtcgggagcagctcatggagcaccgctgggacaaggtcctcttcaccgacgacggacagggagcccgcgcatcgcgcgctccgtgatggcggcggcatcgaggcacctgacgcccgtggcgctggagctgggtggcaagtgcccctgcatcttcgacgcgatgcccggcgggcgggacctgcaggtctcggtgaaccgcatcatcggcggcaagtggtcgtcctgcgccggccaggcctgcatcgccatcgactacgtgctcgtcgaggagcgcttcgcgcccgtcctgatcaagatgctcaagtcgacgctcaagaggtttttccaggaggcggaccacatggcgcggatcgtcaacgagcgcaacttcgagaggctgagcagccttctcaaggacagggccgtggcgccgtccatcctgcacggcggctccatggacgccaagaacttgtacattgagcccacgatactgctgaacccaccgctggactccgcaatcatgaccgaggagatattcggccccctgctccccatcatcacggtgaagaagatcgaggacagcatcgcgttcgtgaaggcaaggccgaagccgctcgccatctacgccttcacccgggacgcggcgctgcggcgccggatcgtggacgagacgtcgtccgggaccgtcaccttcaacgacgccgtggtgcagtacgcgatcgacgggttgcccttcggcggcgtggggcagagcgggttcgggcagtaccacggcaagtactcgttcgagatgttcagccacaagaaggcgatcatgaagcggggctacctcatcgagctcgcgctcaggtacccgccgtgggacgagaggaaggtcaccctcatgcgccacctctaccgcttcaactacttcgccttcgtgctctccttcctcggcctcaggagatgagctcgattccattatcagcccgataaattgaacagggattggagccaataaactgatggtgaatgaaggaatataagcgaataaagaatagtagtatgcagtaattatgttattgtgagagcaaagtagcatatgtgctgcctgcacccgatctgggatttccttctagtgagacaaaccgtaaaaatactaatttgcaataatgtttagcagcgcattagtcggatacgatccataactaaaaaaaaaaac

SEQ ID NO: 10869 - DNA, 1477 bp, Setaria italica
  Peptide Sequence Number=SeqID_76843
gggccgccgggacgacgagatcgcgctgcagctgccggagctgcggaggctcctggacgcgctgagggcttccagggggaggagcgccgagggggagggcggcggcggtgggcctgggagggtggcgctggtcgggacgggacccggggaccccgagctgctcacgctcaaggccgtccgtgccatcgaggtcgcggacctggtgctctacgaccggctggtgtccaacgacgtgctggacttggtcggggagggcgcaaggcttctatacgtcggcaagacggcgggataccacagccgcacacaggaggagattcatgagctgctcctcagctttgcggaggctggtgccaatgtggtgcggttgaaaggcggcgatcctctggtctttggaagaggtggagaagagatggatttcttacagcagcaagggattagagttgaaattatcccaggaattacttctgcttcaggaattgcagcagaactaggcattccactaacccatcgaggtgttgctaccagtgtcagatttttaactgggcactctagaaatggtgggacagatcctctatatgtggcagggaatgcagctgatccagacaccactttagttgtgtacatgggtttgtcaacactgccatcccttgctccaaagttaatgaagcacggccttccaccagatacccctgctgttgccgtagagcgcggcactacccctcaacaacgaatggtattcgcattgttaaaggatctcgtagatgaagtcaagttggctgatctagtttctccgactctaataattattggaaaagtggtggccttgtcacccttttgggttgaaccatctgaacatgatgcactgaagaccgagaactcatacgcaagtgaggccagatgatagcagcctttcctgaattaagtgcttggacagtcctttgcaaatttccagacatgagcaattctaattgagatctaaggttgtctgatctggtttagttcgggtcatatgagcagagttttgacgccccttgaaatttcaggaagcatgaaatctgaattatggacggcagctttatacacaggaagcccataaacaaccttggagccgcagcgtacttgaacgggtggcacctcacagtgtggactactctacctgagatctgcaatcgtaggtttatttgagtttggcaatagttgtgggaggaggtgttggttttctgaattgtcatttctggagcatcagtagatatatatggctttcgagtcaactcagtttctttttgtcaaaaggctcattcatggagcctaagtagatgtattcaccctgttcgcttcaccttattcagccggcttatcagccaccaaacagtattttcctctcacaacaaaacggctaccagcttataagctgaagcgaacagggtcattgttttcaattcagcagctacccccccaacccccccccccccccccc

SEQ ID NO: 10870 - DNA, 1486 bp, Setaria italica
  Peptide Sequence Number=SeqID_76844
cgggagggaggctgtaccgcacttaaatgcgagcgtaacttaactaccttccccgtatcggcgaggaacagacagaggaaggaggaggaggaggaggaggaggaagcgaagcggaaatggggctccgcgtccgcgcctcctcgctcctgctagccctggcgctcgagctcgccgtcgcgctcgtctcagtgtcggcgcagcagaagttcgggatcaactacgggcagatcgccaacgacctgccggacccgacgcgggtggcggggctgctccagtccatgaacgtgaacaaggtgaagctctacgacgcggaccccagggtgctgacggccttcgccaacaccggcgtcgagttcatcatcgccgtgggcaacgagaacctgcagaccatggccgccaaccccgccgcggcgcgccagtgggtcgccactcacgtgcagccctacatcccggcgacgcgcatcacctgcgtcaccgtcggcaacgaggtcttctccagcaacgacaccgtcatgactgtccagcctcctccccgcccatgaaggccgtctccgacgcgctcgggggacctgggcctcggcggccaggtcaccgtgtcgtccgcgcactccgtgaacgtgctcgccaccagcttcccgccgtcgtcgggcgcgttccgggaggacctcgccgagtacatccagccgatcctggacttccacggccagacgaggtcgccgttcctcatcaacgcttacccattctttgcgtacaaggcgagcccgggcagcgtgtcgctgccgtacgtgctgttcgagcccaacccgggcgtgcgcgacccaaacaccaacctcggctacgacaacatgctctacgcccagatcgacgccgtgtaactcggcgatgaaggccatgggggcacacggacgtggccgtgaggatctccgagaccgggtggccgtccaagggcgacgaggacgagaccggcgccactgtgcagaacgccgcggcgtacaccggcaacctgatgcagaggatcgccatgaaccaggggacgccgctcaagcccaacgtgcccatcgacgtctacgtcttcgcgctgttcaacgaggacatgaagccagggccgacgtcggaacggaactacgggttgttctaccccaacggctcgccggtgtacgcgattaacgccggctccggctccggctccggcggcggcggcgggtttggtccgggcgggtctctgaacccgtactacacgtccatgttctcctcctcgtccaaattggcggtaagcacagcatttttgacagagcgcgtgatactattattgctgctgcaagctattgtaatactcctacagtcatagtgttagtcagtgataccttgtaatgttgtatacggaagcacgcatttcaattcaaccatggggtaggcctagattcggaaatttggcacgacagtgagacagcccgaaaagctctgctcttttctcttattcccccag

SEQ ID NO: 10871 - DNA, 1870 bp, Setaria italica
  Peptide Sequence Number=SeqID_76845
ttttttttttttttttggtttagcaagagtcaaacggatcactcgagggccgagaccgagacaaaccttagtgggtcaaatgggaacaaaggctaagccattaattaattaatctatactaatcagcttataacagtagcatagttacatatagactaaacaaaggtatcccccattagccaaggctgcaaaaagaaggcgtactacgctgcaccattgcttgctgcagcaggagtcaaagctgcagtagaggcacagcggcagtataaagaaaggatgaaaggggcgcaaagattccaacatcctctcctctctctagactttcgccctcgagatagctgctggccttgaatcctcgccactgcttgctcgagtttcttcagaccgtcgatgggaggtcgcacttgcccatctttggtgcctggttgacgacgtatgcggcgccggcgaagtcgcaggtgccgatggtccggcccttgcgctggaagtagtcgttgaaggcgtaggaggcgtgcgccaccatggtgttgggctcgaagcacgctgcgccgggctggatgtccttgcagttcgcaccgccctcgccgcaggcgtagttcagcgccgccagcagccgctgctccccgaccgccgcgttcgccacgcaccacgcctccccagtcgtgaccttcaccccgctcggcgggttgccgctggtgctgccgctgccgctgcttggcccgccgttctcctgccaaccgaggccgccgttgccctggctgccgccgcccgccgcgccgccggcgccgagcacgaactcgacgtcgtacaccttctgctggttcgggtagaacacgccgtagttccgttcggatgtcgggccgggcttctggttctcgttgaagagcgcgaagaggtagacgtccatgtcagcgttggggcggagcggcgtgccggcgttgccggagagcactcggcgcgccaggttgccgttgtacgcggcggcgttggcgggcgaggcgccgacctcgctggcgtcgcccttggacggccaccccgtctcggacaccacgacgcgcacgccattgtagttcccgagcctattcaccgccgcgaacacggcgtcgagctgggcgtcgaggaggctgtagtacttgaggccgttcccggcgtcctgcacgccggcgttggggcggaacagcgcgtagtcgagggagatgtcgcccgcattggcggagtaggcgaagaacgggtaggcattgaccatgaggtaggagccggtctgcgcgaggaagtcgagcatgggcttcatcacgggctgcgcgaggtcctcccggaacacgcccgcggaggacgggtacgagttcgcgagcgcagtgagcgcgacgggggacgacaccttgacggccttgtcgaggccgagcctggccagcgcggcgtgcacgttgaccatggccgggacgagctgcgccgtgacgttcttggcggtggcgaagacctcgttgccgacggcgatgccctggatctgcgtggccgggtagtaagccgccacgttccggcgcacccagaggagcgcgtaggaggcgcgggacgccgcggcggcgacctgctcgttgggcagcgcgaccaccaccttgacgccggtgttggccagcgcgcgcagcacggtggggtcggtgtcgtagagcttcacctgcgtgatgccctgctgcttgagcagctgcaccaccgccgacgggttcggcaggttgttcgccacccggccgtagttcacgcccacagtccccgcctctgccgggcaaacgaggagcagcggcagcgccgcggcgaggagtccggcgacgaggagggcgcggcgtgggagcgccatgctctgctctgctctgctgcg

SEQ ID NO: 10872 - DNA, 1854 bp, Setaria italica
  Peptide Sequence Number=SeqID_76846
caatccacggccccgtctcatcgccatgggaaccaagaatctttcacggaaacatcccgcttccatggcgacggcatccgccactctgctcctttccctcgccctcctcgcctccgccgccgcctcctcgccgtcgtcggacgcggatgcgatctcccggttccaggagtacctccgcatcgatacggcgcagccggcgccggactacgccgcggccgtggccttcctccggggccaggcttccgaggccgggctcgaggcgcgcacgctggagctcgtcgctgggaagcccctgctgctactgcggtggcccgggcggcggtcgtcgctcccctcgatactcctcaactcccacaccgacgtcgtgccgtcggagccgcacaagtgggaccacccgcccttctccgccgccctcgacgaggcatccggtcgcatctacgcccgaggctcccaggacatgaagtgcgtagggatgcagtaccttgaagccatccgacgtttgcgttctgcaggttttgttccagatcgaaacatctatataatatttgttcctgatgaggagattggtgggcatgagggtgttgagctgtttgtttcatctaaggagttcaaagaaatgaatgtggggttggtccttgatgaggggcttgcatctcctggggaagagtatcgtgtgttctatgcagagcgtagcccttggtggcttactataaaagcaaagggtgcaccagggcatggtgcaaaattatatgatggtagtgcaatggagaatttgatgaagagtgtggaggttattaggagattcaggacatcgcagtttgatttagtgaagtctggagagaaggctgaaggagatgtcgtgtcggtgaattttgcatacctgaaggctggcacacctacaccgacgggtttcgtcatgaatctccaaccatctgaagcagaggtaggtcttgacatccgaatcccacctagtgcccatgtggaagcactggagaggcgccttgttgaagaatgggcaccatcttcacgcaacttgacctttgagtttaaacagaagatgtctgtcctggacaactatggtaagccagccatcacacctgctgacagcacaaacccctggtggttgttgcttgaagaagctgtgaagagtgctggtggcaaacttggtaagccagagatattcccagcctctactgatgcccgctacttccgacagattgggttaccagcattcggtttttcacctatggcgaacacaccaatattgcttcatgaccataacgagtttttgcgcaaagatgagtacctcaaaggaattgggatatacgagtccatcatcagggcactggccacccacaaagatggcagtaaagacgatgaatccagggcagagctatgaggaaaaccttgaccttgcctcatcttgtcgcgattcttgctgcccaactggagcactgaaatcatgaatccagcacactaaaaagcagctgcttatgtttctgctcctgcggcgaaatgatagaactgcaaacaccatccttgtatatttgcaataagcgtgcttagaataattggcatgacattgcagctcctccgcgcaattcagagctgaccctgggcatgttcggttcagcttattcagccggcttatcagccactaaacagtgttttcctctcacaacaaatcagctgtttcagctttttagccgacttataagctgaagcgaacagtgttttcctatttctacttgatgcttcagtcttaactgttgtatcagacttacattcattgcatcagtaatgcagtacatgctgccacgtgcttcattagaaaaactaaaaaaaaaaaaaaaa

SEQ ID NO: 10873 - DNA, 1377 bp, Setaria italica
  Peptide Sequence Number=SeqID_76847
gccgacggcgcgctcgccgtcgagggcgacgagggggccgaggtcctcgaggccgaggcccagggcgtcgccgtcgacgacctcgcacgaggggactgcgacgaggaggcccagcgggtcatgcagcgcctcgtgccctacaccggcgtcatgaacctcgaggggctccggcgaccgctgctcgccgtccagtttaccaagctcaaggacggcctggctgtggggtgcgccttcaaccacgccgtgctggacggcacctccacctggcacttcatgtcctactgggccgagctcagccgcactggtggtggtaaagaggcctcctcgcagcagctaccaccgcagcccatccacgagcggtccctggcccgctccgtccgcgtgcggctggaccttcccgagtccgctgaggcccacgagaagacggacccccaacgggcccaagaaggctcttgtggcccgcgtcttctccttcccggagcccagcgtggcccgcatcaaggcggccgcgaacgcggccctcccgccgggcgccaagcccttctcgacgttccagtccctgggcgcccacatctggcgggccgtctcccgcgcccgtgggctgggccccgccgacatcaccgccttcgccgtcttcgccgactgccgcgcccgcctggacccgccgctgccgcccgcctacttcggaaacctcatccaggccgtcttcacgggcgtgccagcggggatgctcctgggcgggccccccgagctggcggcgggcctgctgcagaaggccatcgacgaccacgacgccgccgccgtcacccggaggctggaggagtacgaggcggcgcccaagctcttccactacagcgacgccgggcccaactgcgtcgccgtcggcagctcgccgcgcttcaaggtctacgacgttgacttcggcttcggacggccagagcgcgtgcgcagcggcggcaacaacaagttcgacggcatggtgtacctctacccgggggcgcgggcggggagggaggcatcgacgtcgagctcgcgctgcagccggagcccatgcagaggctggagaaggacgcagacttcctcctcctgtctgcttagccgatcgacgattcgtggttcgcgatcgatccatcgatactactagcagttgctatgtatgtactagcaactgagtactgtattacttgatgatgattgtactgtacactagctgtacgagtcgtgttggttggatttaatttgctggaataagtaagccaaggaagaatgcatcatatcatgacaggattttatttgtaatgcacctgcaattaatgtaatctttttacaatgtaccactggaatcaagaatgaatccacacatgcatctgtactcca

SEQ ID NO: 10874 - DNA, 2902 bp, Setaria italica
  Peptide Sequence Number=SeqID_76848
aacacacagctgcaacaagacgcaaattcccaacgaaccgtcagaggccaattgcagcgagtttcaattgaaacattaaaaagttacatatgatacatcataaataaaaatagaacaggcggccacctttcagccagtgttctattctttttttccctgagctacacaaacagcctatcaggataaatacaacacatccacaaactcgctgcaacaagcacttaaacagctcaaccatgacaggcaaccagctactgctactactactcttccttatttgccggagtatgagtacaacacaatcgcccacgacaccaagctcacccacattttatgcctcgatcggagaaatatcaattacccggtaaagaaaagctacctagattcattattgttgtttttgttatttccacaccttgacggagttatcatggcttgcagaagctaccatccctgtcactggtgactgtgccagcgcagcaatcagaccttcatgagcttgtactgtcaggctctggttcttcaccatgttccatacctcgagagactggtagcctccaataaccaatagactggtatagcttgggtggaatacacaggaatggaacttgttgccattggagctaagctcatgaatgcactctcctgatgatattgaccaaaccttaactaggtcctgactgacggaggcaagatattccccgctgttgtcccaacacactgactgcacatcggtgttatgaccctgcagagtgtattttttcccatgtgtctcgatatcaaatatcgaaaccatgttttcagcagccgcggctaaaaattgtccagcattaggttgaaaccgaacttgggcagtaccaccctttatggcacgcatacacgtaagctgggtcacattccagtaccggatttcaccattgccatcacaagagcacagaagatcagttttctttggatggaaatctaacgatgtgacctggaagctatgcccagtgaacgtgtgcagagagaatccaggatctgcagcattccatagtttaatagttctatcaaaagatgatgtcgccaggtgattagagttaggcctgaaacggacatcggtaataataccgccatgctcttctgacgtatactgtgtctggaaattttccatgttccaaagtacagccttcttttcatgtccagcgctagccaaaatcttgccatctgtagagaagtggcagcaaacaactttgctgttgcttgtccgccaacaattaacctcactgaaagtaaaacctttcgaagtggttggattaggctctgcgggacttcttttgagtgcagcaaaaatatccctggcatctccatcgtcgttggataagaaggattcaacattatcatccaaagagcccacatcaccaaactgctcaagatcatccatttgatttgaagaggaggcaagtccagttccatctgcaccatacatcattaaattcttcggaacgtggcacatattaccagccattccaagtccatccccaggcgtatgtgtggatggtgtagatggtggggaattggctgaaggacccacagtgtttcctgtaccagtactatttgctggtcctgatgatgtaggctgctttctttttctattgttctgctgcatttgttgctgctggctctgctgctgctgctgctgctgctgttggttctgctgctgttgttgaagctgctcctgcggttgctgtgaagatgtctgctttatgagatactcttggtctggtctgactttgggtgaactggattgcataggggaactaatacacccatcagttccagcaggttgtccatctttaccattcaacccactcctggtcagcgctgtaagtctacggggatcaatatccccataattagttgagttgccaaggttcccttgtgcttgggcctgtgctaagtattgttgctgctgctgtggtgacataagttggaactgtgactgtgttgaaagaaatggcttctgcatttgagcacctagattcggccgcaattgatcaattccagttagcggccagcccttcaatggtaaaccgctcacaccttggttcagtcctgcaccactcaatccaggtttagggtgaattattccctgtccatataaggatgatggatccatgggcaaagatctctgaggtactcccatgttaccttcacccttaatatcaattgtttgctgattccgagcctggatttgctgaagagtggtagacacgtttccaggagtccccggaactaattgccctgcatggtttgttgcagctgacttgagaagagccattctactagcatcaagaagctgtgatccctcagagtccattgaatgtgggtgcttcaagcgttcttcatacatcttggcagctaaaacactagctgttgatggccccaaaatgccatcagagtttaaagcgtttattgggccattaagtgaaggatggctagcattagttcgctgaagttgagcatgtctttgctgcataagttgcagttgctgcatctgcatctgctgctggtgctctcttgcctttatttgttgtgcctctagatatgccgctgcaacttcagaatgcttctcattcgtccttgctatgaatatatcccaaaagacagaccaccactcaaagagaaaccctccaggaggcatcaattgcgactggatcagcagcaaccttcccctccgccatgaaggccttcgctgtcgtctgcaggttcctcttcagcaaatagtcatagatatacacgtcgagcatcttatccgcttcccaattgctctgcgccattctggtgggttcgtccttcgtcgccggcaaaggatccggcgaagggcgaagacgtggttcgtcacagccaggaaaaggaagcc

SEQ ID NO: 10875 - DNA, 1834 bp, Setaria italica
  Peptide Sequence Number=SeqID_76849
cttagactacgagtaccgattccttacaaagtctgcaatcccaaaaggatataaatataacagctcaacaagcagacatttcgctgttgctttcaatatgttattctcgctaatctagccttgaagaattccacgtagtttgctatgctgattctaacagaaaggggaaacaaatggaattgatttccccaagtaaacaatattgtttattcttcggtctgatcagatggaagccattcaagggtgcagccggtaaacatgggcacaatctcccctgaactgtatgtataggttgcaggaaccttccaggcactctttttcaggacaatctttgaagtgttccttgggaggccataaaaatcagggccattgaagctcgtaaatgcttctaacttatctagggcaccagcctcttcaaataccttcgcgtaaagggacaaggcaacaggagcactgtatattcctgcacatccacagtaacgttctttgttccgtttatcatggggagcactgtcagtgccaagaaagtaccgtttactcccacttgttacagcagatagaatagcttgtctatgagtctctcttttcagtactggcaagcagtaattgtgtggctgcaagccaccctgaaataaagcgttcctgttgaggaggagatgctggggagtcactgtcgcagcaacatgaccttcttcacatgattctatgaagttcactgcatccatagttgtgatatgttccatgactattttcagctgtggaagtttttgtacaagtggtgccaatattctatcaatgaaaaccttctcacggtcaaatgtgtcaacatgcggatccgtgacttctccatgaacaagcaagggcatttcctgtctgaccatctcctcgaagacaggcatgcatttcccaatatcagtgacaccatcttgggaattggtagttgctccggcaggatacagcttcacagcaaagactacaccactctttcttccgagtttgatctcctctgggctagtgttgtccgtgaggtaaagggtcatgagtggctcaaagctactcccgggtggcagcgccttcatgatctcctccctgtactccagcgcgcgcgccgtcgtggtcaccggaggcttcaagttgggcatgatgatggccctcccaaaatgcctcgcgctgtgtggcagcacagcctcgaggacgctgccttcacggacgtggaggtgccagtcgtcggggcgcgtgatgatcagctgctcctcctgctgctgcgacgtggctgccatggcagtcgccctcaggctcaggcgcggagaagcgcggaagctgacgcggcgaggaggaggcagccggaggaaggaggccgacggaggattcgtgtgcgtgtgcgtgcggacggtggtggtggtggaggcggcctgcattggcttcccaaaactgtgttcacaaatcacagaaggatcgaatttctgcaacatagaagttttctacttttctgtgtcaggcaagaaataatagttaattttcagagaattgctattggcttctctgtgagaatcttctgtgtcttgtgtgtttgacgagataattgcaagctcagataaaatggagtgccaaaaaagttctacatctggtaggctattcagaaccacgaagaggagagaaacaaacctagaatgcccctgttctggcgccgtactctaccctaaccttgcacccggtaagaatcatctgctgccctttgggcatatgccatgaagaggtgagcgtgggcagaggcgaacagatccagggagtgcttcagtgaccggaggcgcttaccttcttcagggagtgcggc

SEQ ID NO: 10876 - DNA, 1810 bp, Setaria italica
  Peptide Sequence Number=SeqID_76850
ttatatggtcgatggggtcttggtatggacaacgggtacaggcccaggggtcgtgctaatggatactatggttatggcaatgagagtcaggatggaacaattgagttaaacagaggtcctagatctggccgtttcaagaaccagaaattatatggtcatactgtttctattgctgtgaaagggcagagccttccttctggcgaaagcaagaatgatagtgccctacctgatcgagcacagtttctaactagtagtattgtacttccctgttcaatacgatgctgcaaagttctttgtcattaaatcgtacagtgaggatgatatccacaagagtattaaatacaatgtgtgggcaagcaccaccaatggaaacagaagcttgatgctgcttatcaagaagctcagtcaaagggctctgcgtgccctatattctgtttttctcggtgaatacaagtggccagtttgttggtgtggctgaaatgactggtgctcgatcaggtagggcactatcattcttgctttcgccagaaggaaggctctgccctttcacagcaatagaaacagtatgaccatataatttctggttcttgaaacggccagatctaggacctctgtttaactcaattgttccatcctgactctcattgccataaccatagtatccattagcacgacccctgggcctgtacctgttgtccataccaagaccccatcgaccatataacctggagtcataaccgttactgccataaggaagaccagtttttattgagttcccatactgggtgtaaggccgggagctagggtacatcctatttggatatgtaggtgtcactgatccggttgtagctgtaggtcttcgattctgcataccctgcatctgtggagccgtggagctctttgtctgatttcttgctgaggaaccattagcattgaaagtcgaggtcggcatatgattagttgtagttgatctttgctgtccatttgcataagcagagccatcataccatgcaaagtgtgctcctgtgctgtcataaccataagttgtgtccaggtaaccagcagaaggaactccacctagcaagggtgccctataagttccatcaggcgtcagtgatgaattttggtggcttgacgcaaggggtacagttccactgttactgtgagcagtaccattaggaacaccatttgttgttgtcttggcaggatcggttttagctgctggcttttcaggattgacagaagactgtaggtcgccttgagtggtagaaggaactggtgtaggaggttgaaaatacgcagttggatactgataatgctgcgcaccaaacatctggccatcaactgttggaactggggaactggcaggagagtatgcaccatagggagcatacccatatccataaatatcgccatatactgctggggcaatctccactccgtcttgatttagatatctaggataatcatcccactcgttcatggaaccgtcgtagcctccatagtaatacgctggcagatagaacaggttgggatccataaagtcttgaagcaccggcgtgatggaccgctccggcgggatcgacacgctcagcggctggctcgctgcagcacccttcttggcaccggcaggctctgtggcatccgccgccttgggctgcgaatccagcgacagcttctgcagcagatccgtggtttgatccgcgacagggacggctgcaggagccgtagcggcagcggcagaagcggccggcgccggcgcgggcggggcgctgggggccggggggcggcgtgacggcggccatggtgc

SEQ ID NO: 10877 - DNA, 909 bp, Setaria italica
  Peptide Sequence Number=SeqID_76851
ttgacacaacttgtatgaacttttattcacgtatatatgaagttacagacacaaatgtttgtatgatgaaatagaacaatattttacatggcaaaagctctcccgatccatcacccggacaccgaagtgaagagaacacatacgtgcattcagatatagaccaacacatagactataataacataggtgcacaagatcgcagcaaggcagtggttacttagagggggcaggtgaagtctgcggggcagaccttgccacagtggttgaggaggaggcgcaggtcgatgggcacgttgaggttgatgccgaggatgttggccttgatggcggtgcagaggcagacggcggcgtcgaggtcgacgagcccctgcagcagcgggcagcactggtcgttccccaggccgggggatgttgagcttcagtaggttcagcacgttcgcgcacacctgcagcttgagcgcgttgatcgggcaggatcccaccggccggacggcgtcggcacgaccgggcgggggtggggacccaccggcggggtaggggcagtacggcgtgcagccgtgaacggccgccgcgaaggcgaggacggacagggcgagaaagagggcaagcttggatgggcgccattgctatctcagctagctatagcttttcaagtgtgctatgagcttctctagctatagctagctcttgtgagtagtattggcttgtgtgtgtgatggcactgaacttatatttggcaagaataaaaataagttcagtgccatcacacaccagtcctacactcaagagttcactgttcttctcaaacagcagcgatacatggcctaagagttcaaacgcctacacttagtacttcttaaaacctaaccgctgttaatgcactgcagatcgatatgagctttaggaaga

SEQ ID NO: 10878 - DNA, 609 bp, Setaria italica
  Peptide Sequence Number=SeqID_76852
ccaccaacagcattgaagacaaggaagccctggagaccagtgcagttgtcggcaagcttcctgatgcggtcaaggcacagtcggaacaaagtctccttgccaatggtgtagtgaccacgggcaaagttattggcagcatcctccttgccactgatgagctgctcagggtggaagagctggcggtaagtaccagtcctcacctcatcaatcacagtgggctcaaggtcaacaaaaacagcacggggcgacatgcttcccagcaccagtctcactgaagaaggtgttgaaagcatcatcacctcctccaacggtcttgtcgccgggcatctggccatcagcctgaatgccatgctcgaggcagtagagctcccagcacgcgtttccgacctggataccggccctggccgatgtggatcgagatgcactccctcatggtgtcgtcggaagggtggtgcggcggcgacggcggcggcggtagggaatgggaggacggggaaagctttgagtcgcgagagaggcgagtacgaagacgccttcctctgcggtgctcggcttagggttcgcgtctcctcccactcgcttatatagatcgaggcgacagcctgggcc

SEQ ID NO: 10879 - DNA, 1388 bp, Setaria italica
  Peptide Sequence Number=SeqID_76853
atcacgttactgagcttcattcagtagttcaaactgaattagccaaaaacagaattgcagctaatttaatttgaacagcccctaatgaactaaacaaaaaaaattggcgtactcctacaattgcaagtgcaatttaagcagctgtaattacaaaagacagccgccgtgacaaattatcattttaacagttatcattttaacaatacagacgccaaattactccacaaggcgagctttgccgggtattacccaagccaccagggctagctacctctatcaatgtcaccaacttaccaaccaccttcaaatggtcttgttattagaaattcaatcatgtcaccaaggccttgtttagttagggaatttgggaggtgccaaattactgttacagcactgtagcacactgtagcgtttcgtttgtatttgtgaattattgtccaaatattgactaattaggctcaaaagattcgtctcgcaaagtacaacaaaactgtgcaattagtttttaatttcatctacatttagtactccatgcatgtaccgcaagtttgatgtgatggggaatcttctttttgcatagtgtcaaagttgggagttgggagtaactaaacatggcccaactcttgcgtgccatcaaatggacaagttctgttacaatctgcagcaatcaagctaacctccatggaaaaccagtgctcaacttctaattgatgaactcactgcctgatcgaattaaccaagaatacgtacaagcagaataaactgaggcagttaacaaccagcaaagagattaagtacagaacaacaaacacctggggactttggggcacaatagacaccaccaggcaatataaccaaccggattgttcacttgccaaaatcttcagcttgggtaaaagcatcatcagttccatcatcacagccgccaagaatagctccttgttcacttttctcaacacgatcaatagaatccatcgtacaggaatttggaaagcctctaaagctcttgtgagtttcgctgtagctccatgtctttgcagcggcgatagtagatgctagttccagactcgacgggagaacgggaagcaaaaggcacagggacaccatgggggaagagaacccggggccaaaaaaacaagccccgtgcgatctcctcccccggacacaagaatatttttttattaccgtggcctgccatgcgagcgcacccaacatggcaaaggcctctctcgaagtcacatctttttctcatttttctgccctcaacgcacgccgactcgacgccgaaatcttacatgcttcaaccttacctcgcctcttcaaggcggcacggctcacatctcttagatctactaataattatcgaaattcatccaataattatcagc

SEQ ID NO: 10880 - DNA, 1119 bp, Setaria italica
  Peptide Sequence Number=SeqID_76854
ttttttttggttttgggaaaaacaaaaagtagtaacatccattgacaatcgatgagaaacggtttacaacaacgaagggaacaacaaaagatgacgctgcatactcgtagatagccattacatctcagttgcatgctggactacctactccaactacaataacacgaagcccattattcctgactaatgcctgaaacaaacacggaaaaaccaccaactctcaaagatgaaaactcaattgcacgaaggataccaaaatggactgacactaatgctgggctccatctcctgcagtttggctccaagaagcaagctagggaaatctcagtggatgccaccgctgccggatccggaaccaacgccgccgccaccgccggagccgccctcggaaccgccaccgccaccgccgccggtgccagcaccaataccctgtgcgaaacctgagccccaggagccgtcactgccggcctgtcccctgcctccaccaataccacctccggttccgtagcttggagctccggctgcgccaccgccgttgccaccaccggagccagaaccgccaccggtagcatcggcgacgccaccgttgtacacaccagttggtgccaatgctacaccgctctcgccctggcccttgccgacgccgccaccgttaccagagccgtagccgccattggcaccaccgcccatgccgccgccgccgccgttgccattagcgttggcgtagttgccactgctagggcctgcagccgcagtcgaactgcttccggaaccatagcccgacccaccgccggaaccagctccaccgttggtgccaccgccgcccgccctggcctccaccaccgccgccagctacgctggaggcgaagcgatcccaccagctgccgctactctggccggcgccataaccaccgccaccgccagagccgccgccccatccaccgccggtcgatccgacaccgcctcccccaccgccaccaccgcctccggcagaggcgtagctgccgaacttaactaccctcgcggcatcggagaagccgatggccaggaggacggcgaagccaagagccacgagcctggtgctggtagccattgccagtgagctcggtggagtgagtg

SEQ ID NO: 10881 - DNA, 1480 bp, Setaria italica
  Peptide Sequence Number=SeqID_76855
gccacactgaccagagcttgtagagtgagtgagtgagaggaaagagtgggagtgagaggatgggtggcaaggccgctctgctgctggccctggtggccgtgagcctggccgtggagatccaggccgacgccggctacggctacggcggcgggtacgcgcccacgccggccaccccgacgcccaagccggagaagccacccaagggcggcaagccgcccaaggagcacggccccaagcctgagaagccacccaagggccacaagccgcccaaggagcacgggcccaagccggagaagccgcccaaggggaacaagcctcccacctacaccccgtcgccgaagccgacgccgccgacgcccaagccgactcctccgacgtacacaccgtcgccgaagccgacgccaccgacgccgaagcctactccacccacatacacgccgacgccgaagcccacgccgccgacgtacactccgtcgccgaagcctaccccaccgacgtacactcccacgccaaaacccactcctccgacgtacaccccgtcacccaagccaccggtgaccaagccgccgacctacaccccgactcccaagcccaccccgccaacctacaccccgtcacccaagccggaagccgccgaccaagccaccaacctacactcccacgccaaaacccactcctccgacgtacaccccgtcacccaagccaccggcgaccaagccgccgacctacatcccgactcccaagcccaccccgccaacctacaccccgtcacccaagccgaagccgccgaccaagccgccaacctacacccccacgcccaagccagccccgccaacctacacgccgtccccaagcccactcccccggcgccgaagccgaagcccactcccccgacctacaccccggcgccgaagccgaagcccactcctccgacccccaccccaacccccaagccaacccctccgacctacacgccgacccccaagccaactcccactcccagccccaagcccacgccaccgacctataagccggctcccaagcccacgccgccgtcgtacaacaagccgccggcgtcgtcctacacccccagcccgccgccgccttactacaactgaaatccgctactctgctgtcaagctcggagcataggaaggtgatggaagagagtttgtgctagccagccgaccaagatgagctgatgatgagaggcccctgatcctcctcttatgtttgctgccgtccatctatcctagctagagaggagaataatgcagatctgtgctgcgccctctgtttcctgttgtcccgtttaattcgtgttcgtcgatcgtttagtgtcttagcagctgtattgtgtgtgggtaatggtattgctactattggtgcgaggaggcttactgtaaaaccacaataattgtgatggaaatgcaagtgaaagctagtatttttaccgtaactaaaaaaaaaaaaaaaaaaa

SEQ ID NO: 10882 - DNA, 1575 bp, Setaria italica
  Peptide Sequence Number=SeqID_76856
ataatccccgggcagctccggcggccgacgccgaagggcacgaaccggaagtcgttgccatgggcctcaacggccttctcctcctccaggaaccgttccgggcggaactcctcgggcttcaccaccgcttgggtcgttggcgaggaaccacgcgttgacgaggatcttggattcggctgggatgtcgtagccatggagcttgccgtcgttgaggttcatgtgcgggaccagcagcgggatggccatgcgcagccggagggtctccttcaccacggcctgcaggtagggcaggcgctccaggtccggctccgtcaccgccacgccggcgcccagcacggaggtcaggctcctcccggagcttggactggatctccgggtggttcaccagctcggcgatgccccactcgatcgaccacaaggtagtctcgatggctgcgacgttgatgttctcgacgatgtagaggacgttgtcgtggttgatctcgcccttcctctcggcctcaaggatgtggtccatggcgcaccggatctcgccagtctgggccatcacattcttgcgctcctggacgaagttgtcctcgaagaccttcatgcggcgggtcttgaggtcgtggcagcggttgaggtacccgcggaggaaggggcggaggacagggatgaagtcgccgtagttgtactcgaagctctgcgagaggcggctgcgctcggcgttgagggccttgagcttgttgaagagctcgtcgtcctcgctgtcgaagcggcgatcgaacatgatgcggaacatgtcgttgtacatcatgagctgcaggcggcggcggatcaccacaccctcggtggcggccttggggttcttcttgacgtcctccacgaccaggcgggcctcctcctcccagccggcgcggttctgcgcgacgaccttgttggtgaagaaggggacggtcatgatgcggcgcatcttgcgccagtggtcgccgtagacggtgaagaccatgtcctggcccttgccggtgaagatgtcgaagacgacgttgcgggtgcgggagccgaactcgacgccctgggtgtggaggacctccttggcgagctccggggtggacacgaccaccaggttgcggacgcccatgcggaggaggaagatgtcgccgaagcgcttcgcgagggtcatcaggttgcggtggttgaggtcgtcgccgacctggagccagttgcccaccacgggggcgccgggcgggccgggggcaggcggaggcgcttgcccgtcagcttcgccacggtgatggccagcaccgccgcagcgaacaggcccagaagggccttctcgaggagggcgaggtccatggctggctggctctcgtctccccggcggggggtaggtggggtgtgtggcctgtgtttgttttgtttggtcgcctcgcttgccttgcccgtggagaggaggtgaaggccgttgaggcccatggcaacgacttccggttcgtgcccttcggcgtcggccgccggagctgcccggggattatccttgcgctgcccatcatcggcatcacgctcggaaggctggtgcagaacttccagctg

SEQ ID NO: 10883 - DNA, 1744 bp, Setaria italica
  Peptide Sequence Number=SeqID_76857
ttttttttagttagaataagcaacttggtactcggcaagaaatcaagaattacaggcactgcaggaacacgtcaaacaagtgccagaacccattccaacagcgagcacgaaaccttgtacagatcaagcaacaaccagaaaccattctgaatggacacaagttcttcatcttttattgaaatatcaggcaattggggatatgaatgagttgcataatcaccgaatctagggcaatttctcattggtaatgatctgacattctgattaagatattcacgttcagttcaggccttcagggtggtggcaccaggaaagaaaatggcgatgtatgaaaaatgactctgatcatcgggcagggaagcatcggaacatcagcaaggattttataagtttgagttggccgccagccttgatctgagctcatcagcaaccgcatcgatgaactcttcggtgttcaggtaatggctccttgtgacatttgaagatccgtgaacaagaagggcaaggtccttggtcatcttcccagactcgacagctccaatgcaggcagcctcaagcttctgagtgaagtcaagtagtctagcattgtcatcaagctttgccctgtgcgcaagtcctcttgtccatgcaaatatcgaggcaatgctgtttgtactggtttcacctcctttctggtgaacacggtaatgacgggtaacagtaccatgggcagcttcagcttcaatcgtctttccatcagggcacaccaagtactgatgtcatcaaacccaatgagccaaaaccttgagctaagaaatcgctctgcacatctccatcataattcttgcaagcccagacataccctccttcactcttaagtgcgtatgcaaccatgtcatcaataaggcggtgctcataccatatgccggcggcctcaaatttggatttccacccagcttcatacacctcctggaaaatgtccttgaacctgccatcatatttcttcaatattgtattcttggtgctaaggtacaacggccatttcttttcataagcagtggccatagaagcctcagcaaaggcgtggatggactcgtcagtgttgtacattgccaaggcaactcctccagaaccagtaaagttgtacacctccagctcaacttgctcttcttttccctcataaactaatttaagcttgccaggtcccttgataactgcatcagttgcccggtactgatcgccgaatgcatgcctcccaatgcaaatgggctttgtccaccctggaacaagccgtgggatgtttttgcagatgattggttctctgaacacagtgccattcagaatgttcctaattgtgccattcgggctcttccacatggccttcaagctgaactcctttacccttgcttcgtctgccatggattttgatgcaatgtcagtaaatcaggaatgtctttgaaccattgtcagcacatgtcagcatataacccaaatgtacccggtgtgatggtggcacacttgatagccacattgtacctacacagaaatggagcataagcaatagaagaaataggtgtgtaatgcagtaaaattatcaataaacgcagcagcaaaggactgaagcaacagccgacaagcatgactgagtagcagtaaaacgcttaaacaagtcgctttcttttcaaggaagttcctcagtgcttaaatgactgatgaaaaatgttttaaaaggacaaatcgaatatgtatattccaccgtataaag

SEQ ID NO: 10884 - DNA, 1171 bp, Setaria italica
  Peptide Sequence Number=SeqID_76858
gaccaaaagtaagctaatatcataaatacagtggaatagaaacaaggagtcaaccagatgaacagaacataggagcgctgaaaatggtagacgcatcatcacaagtttgatttgtgctggttttgcttatgctgacttgtttttgagggtccagtgagcctggcgaatttactgagttcgcaactgatctgagcgaagtggatgggatgtttacacgggtttaggggttgtttctgtagtgcgcgagaacgcagaatttgcacggaatataagaacgtaaatagaattgcagattaaattaccgattgtaccttgtgagtttcgctgtagctccatgtctttgcagcggcgatagtagatgctagttccagactcgacgggagaacgggaagcaaaaggcacagggacaccatgggggaagagaacccggggccaaaaaaacaagccccgtgcgatctcctcccccggacacaagaatatttttttattaccgtggcctgccatgcgagcgcacccaacatggcaaaggcctctctcgaagtcacatctttttctcatttttctgccctcaacgcacgccgactcgacgccgaaatcttacatgcttcaaccttacctcgcctcttcaaggcggcacggctcacatctcttagatctactaataattatcgaaattcatccaataattatcagcacagagagatcatcccgcgcggtggagacagaggaagagattacccgactaggtaggaccaacgaacccgtacaagctccgccgccgcctccaacacgctccgaacggaagttcaccgcggtccgccagatcggtgcaggatccaaagcgccgcgcacgcggatccgtagcgtccttgcgcagatccagatccaggtggtcgcaacccgattcaaccggcaacgaacccaaaccacccatcagatctgagcctgcgcaaaagaaaacaaacgggtttttccgcacaaatcgaaacaaatcaacccaccgttctgctaaggggcccaacggattcgtcgatacgagatgaaagttctcggcgagatttggatttccagattgcgtgtgggggaagagcacgggctcatggcgattctagatctggagggagggggagaggttgcgtgcaggaggggagcgcgccaagcccgcccaggg

SEQ ID NO: 10885 - DNA, 1149 bp, Setaria italica
  Peptide Sequence Number=SeqID_76859
cgcgagcaggcccgcttatctctgtcctgcggtgcaggtgcggcgcaggaggaagaaggcgagatgcggagtactaccagtactactgctccagtaataaaaagttaaaaaaatacggggcaccagaacaagttcttctacagtcatggattagcaacacacagcaacggcgcgggtcgcgccatttttgattcttggcaaggggtaaaaccgaggcggtaaaagataccgatcgccatgagggaggggcgtgtcgctagaaccgggcgagcgcgcggcggagcacctgggcgaggaggccgggggcggagaggtgcgggaggtggccctcggtctggaggaactcgacggtggtgcggccgccgaggtgggccttgaggtaggcggcgacggaggccgggacggagacgtcgcgggtggtctgcaccaccacgcagggagagcgcaccatgcccagcacgccgcggagatcggtgttgaacaccgtgcggcagacgtggagggagatgtccgggcgcatgttgaagagggtgcggctgaactcctgcaccgccgcgggcacggtccgcgcccaccgccagcggcgcgtaccccgtcgcccacgccgagtagttggccgccatcgcggcgaacacctgctggatctccggcagctcgaacccgccgtggtagtcgttgtcgttcaggaacctgggcgatgcgccgatgaggatgagcttggcgaagagctcgggggcgtcggatggatgcgaggatgccgatcatggcggagacggagtgcccgacgaaggcgcatcgcgggatgcggagcgcgtcgaggatggcgagcaggtcgtcgacgtaggagtcgagcgtgtcgtagcgtcggaagtcgaagtgctccgggttgacgctgccggcgcagacgaggtcgtagagcaccacgcggtggtcgcgggtgaggtaggggagcacgcggctccacgccgactggtccgtcccgaagccgtgggacagcaccaccacgcggtcgccgctgcccaccacccgcacgttgaggatctgcagcagcttggccccgctcggggcgccgctgcccgccgcgccgccgccgccgagctgccgctggtggggctgggcgggtgcgtggaccgaagcatgagaccgggg

SEQ ID NO: 10886 - DNA, 1708 bp, Setaria italica
  Peptide Sequence Number=SeqID_76860
aagacaagacaaaggaaacctagtcactagtaagcaactgaagctgtgtgatccagtataggacgaagttcagcaacgtcgaggatcctggctctcgggctggcgctcctcttcgccgccggcctggcagccgcgcagaacgtggctagcgtcgtcaccgacgcgttcttcaacagcatcaagtcccaggacagcgggtgcgagggcaagaacttctacacgcgaagcgcgttcctgaacgccgccaacgcgtacccgggcttcgcgcacggtggctccgagacccagggcaagcgcgagatcgccgccttcttcgcgaacgtcgcgcacgagaccggacgcctctgctacatcagcgagatcaacaagagcaacagctattgcgacccgaacaacaggcagtggccgtgcgtctcggggaagaagtactacgggcgcggccctctgcagatctcgtggaactacaactacgggccggcggggaagagcatcggctttgacgggctcgggaacccagacaaggtggcgcaggatcccacgatctcgttcaagacggcgctctggttctggatgaacaacgtgcacggggtgatgccgcaggggttcggcgccaccatcagggccatcaacggcgcgctcgagtgcaacggcaagaaccccggcgccgtgagctcgagggtgaactactacaagcagtactgccggcagctcggcgtcgacccggggagcaaccttacctgctaggcgtcgacgggtccatgctgcatgaataaagctctgcgtcgcgcattcgtgaaaccccagggtgtttattagcgagtacgtgtactagtagtaataataaacaggcctagctccagcgttttattattactactagtacacgtactcgctaataaacaccctgggggtttcacgaatgcgcgacgcagagctttattcatgcagcatggacccgtcgacgcctagcaggtaaggttgctccccgggtcgacgccgagctgccggcagtactgcttgtagtagttcaccctcgagctcacggcgccggggttcttgccgttgcactcgagcgcgccgttgatggccctgatggtggcgccgaacccctgcggcatcaccccgtgcacgttgttcatccagaaccagagcgccgtcttgaacgagatcgtgggatcctgcgccaccttgtctgggttcccgagcccgtcaaagccgatgctcttccccgccggcccgtagttgtagttccacgagatctgcagagggccgcgcccgtagtacttcttccccgagacgcacggccactgcctgttgttcgggtcgcaatagctgttgctcttgttgatctcgctgatgtagcagaggcgtccggtctcgtgcgcgacgttcgcgaagaaggcggcgatctcgcgcttgccctgggtctcggagccaccgtgcgcgaagcccgggtacgcgttggcggcgttcaggaacgcgcttcgcgtgtagaagttcttgccctcgcacccgctgtcctgggacttgatgctgttgaagaacgcgtcggtgacgacgctagccacgttctgcgcggctgccaggccggtggcgaagaggagcgccagcccgagagccaggatcctcgacgttgctgaactcgccatactggatcacacagcttcagttgcttactagtgactaggtttccttgcttgtcttgtta

SEQ ID NO: 10887 - DNA, 1217 bp, Setaria italica
  Peptide Sequence Number=SeqID_76861
ccaagctgcaccgcagcaactaaactttagtcatctcatcaggagctcgattaggtgctgatccagtatggcgaagaaggcgccgacggccctagcggttctggctctcgggctttcgctgctatgcgccgccagcccgtccgccgcgcagaactgcggctgccagtcagactactgctgcagccagtttggctactgcggcacgaccgagccctactgtggcaaggggtgccggtcgggcccgtgctggggtagcagcaccggcggcagtggcgcgaacgtggccaacgtcgtcaccgacgcgttcttcaacggcatcaagaaccaggccggggccggatgcgagggcaagaacttctacacgcggagcgcgttcctgaacgccgtgaactcgtactccggcttcgcgcgtggcggctcggaggtcgagggcaagcgcgagatcgccgccttcttcgcccacgtcacgcacgagaccggacatttctgctacatcagcgagatcaacaagaacgacgcctactgcgacgccaacaacaggcagtggccgtgcgtcccggggaagaagtactacgggcgcggcccgctgcagatctcgtggaactacaactacgggcctgccgggagggacatcggcttcgacgggctcggcaacccggacagggtggcgcaggaccccgtgatcgcgttcaagacggcgctctggttctggatgaacaacgtgcaccaagtgatgccgcaggggttcggcgccacgatcagggccatcaacggcgccctcgagtgcaacgggaggaacccccgaccagatgaacgcccgggtgcgctactacaagcagtactgccagcagctcggcgtcgacccccgggagcaacctcacttgctaggcgccggaggtttcgtgcaatggctcgtcaagaataaagcgctgtgcgtcgcgcactcgtaaagtagtagtgataataaaacgcaggggtggacctgtgtattcgaactgaataaggaagcatttgtaatatgtggattgcctcaaaacatgttaatgtccgaagttattattaacaagcaaatgcatgcctcacaactcccttatcttgctggatcgaaactttcaagtttatgttatcacaaaagaattctcacattgtgtgctggacatgaacaaaaattttggtgtattttatccccaaaaagatatttaatcggttcgatatgc

SEQ ID NO: 10888 - DNA, 2923 bp, Setaria italica
  Peptide Sequence Number=SeqID_76862
ctcataaatatggtcaccggggtaggcaggcgcctcctctctcttctcctttcccctaccccctctctctcggtctacctgcacctcgctcccgtcgagagacgaacggtggacgaggaggcagccatggaactctctcggcaagagtctacatggaacgaggctccacgggcacggtggcacggtgttctttcaccacggtggatccactgtccatgaacaaatctacggccacaacatggtaagccaccacctcctcggcgtaaatacgagttttctttactttctcatcggtttggtttaacggatccggttggtttgaatgcatccttcggcaagatgctttgaacagatcgacctgacgggttgtttgaacaaatccggggaactagttcgttccgtgcaacatgggtcaaaccaccgtgtcatccacggcaagaggctccacggccaccttgtttatgcaccacggtggatcatcttcctctctcacaagaggcaccatggaaagagcctcctcggccacggtgtgtggcacggtgcttttgcaacacggtggatgccgtgtccatgaacaaatctacgggcacaacacgatttggagacactggaggttgtctggaatcgcgttcctagaccatgaatacatccaccgtgtcattcaaccgggtcgaattccctgcgaccgtgggcctgtggagaaatgccgaagcccggatctgccggatctaccgtggaccgtgggtcgaatgccggtctgccggctcaggcacacccttgtcatgggccgcttcaacatccagcaccggaggggctggaggccggcctgcatcgatcgaatccctgcctgccctgccctagggttaccatccgccgtcgtatatatttaccctctcgcactccccgtcctctagcacgccgccgcccctctccgccgctccttcgcctcttctcccgccgagcccccgtcgagcgcaggtctcgccgccagcccgcacgagatggagtctgaggtcgtgttcgcgttcgagattcgggccaacgtggatgaggagtacaaggttcctgcatccaagcctgatgttgctgtgaaccatggccttggctggagtgttcggccgactcggggagagcatcaacgtggttctgacctaccagagagaagagcgcgatgcaggcgtggacattgcaggcgccgttgcaggtagtctgatgtcaacaaataattaaccttttaattttcgtaacaacacaacacctccagtagtctggcatggcatggatttttatagcagttcaccatatcattacaagttgtgactggcgctgtcttggttttgttacagaaatggttcaagtcatctacatcctccttgaagagatgcagggataccttgatgaagctgagctgggaggcgtggaggctttcgagctccctggcgccctgaaggaggcaatgcttgacctcgggatcgtgtggccacgcgatgcgtgaagtgctcgttgtaactaaagatcttatctactctaaagacggagttactctaaaggtcgataagatcttattacaacgggcacttccaagttcatcgccaagtagcttcctgaatactctgaagtagataagatctttagttacaacgagcacttcacgcatcgcgtggccacacgatcccgaggtcaagcattgcctccttcagggcgccagggagctcgaaagcctccacgcctcccagctcagcttcatcaaggtatccctgcatctcttcaaggaggatgtagatgacttgaaccatttctgcaacggcgcctgcaatgtccacgcctgcatcgcgctcttctctctggtaggtcagaaccacgttgatgctctccccgagtcggccgaacactccagccaaggcatggttcacagcaacatcaggcttggatgcaggaaccttgtactcctcatccacgttggcccgaatctcgaacgcgaacacgacctcagactccatctcgtgcgggctggcggcgagacctgcgctcgacgggggctcgcgggagaagaggcgaaggagcggcggagaggggcggcggcgtgctagaggacggggagtgcgagagggtaaatatatacgacggcggatggtaaccctagggcagggcaggcagggattcgatcgatgcaggccggcctccagcccctccggtgctggatgttgaagcggcccatgacaagggtgtgcctgagccggcagaccggcattcgacccacggtccacggtagatccggcagatccgggcttcggcatttctccacaggcccacggtcgcagggaattcgacccggttgaatgacacggtggatgtattcatggtctaggaacgcgattccagacaacctccagtgtctccaaatctgatgaaaacgaagatcaggaaacgaaacaacaatcacaattgaattaggtgctgccgagaggtggttgcttaccgtgttgtgcccgtagatttgttcatggacacggcatccaccgtgttgcaaaagcaccgtgccacacaccgtggccgaggaggctctttccatggtgcctcttgtgagagaggaagatgatccaccgtggtgcataaacaaggtggccgtggaggcctcttgccgtggatgacacggtggtttgacccatgttgcacggaacgaactagttccccggatttgttcaaacaacccgtcaggtcgatcatgttgtggccgtagatttgttcatggacagtggatccaccgtggtgaaagaacaccgtgccaccgtgcccgtggagcctcgttccatgtagactcttgccgagagagttccatggctgcctcctcgtccaccgttcgtctctcgacgggagcgaggtgcaggtagaccgagagagagggggtaggggaaaggagaag

SEQ ID NO: 10889 - DNA, 1820 bp, Setaria italica
  Peptide Sequence Number=SeqID_76863
cccccacccccacccacacacacacaccataagcagatgaactaggtattcagttagcactaaacaaaggcagctcaggagccacttagcacaccatgatttgctcacgtggcatgctaatccagaagcacggtcgactagtgctactgcttggtgtttgctggaacggataggccactctggtctccgtttctctaatataaggataagggctcgtttatagttcatccccaaattccaactttggcactataaaaaaagaagatttcccgtcccattacagtacattcatggagtactgaacgtagacgaaatcaaaaactaattgcacacagttttgttgtactttgcgagacagaatcttttgagcctaattagtcaatatttggacaataattcacaaatacaaacgaaaacgaaatgctacagtgttgctacggtaattttggcacgtaaagttagccaactaacaagccgtaaaactaatatgcgaaaatgatcggtcatgtcatttgagcttcagcgttatcatcacgagtcatgatctgggattgttctttttatttcaggctctacagcgacgagaccaggagcaaccaccgttagatctcggatcgggtgagatgaggtcgacggaggagcggtggcgggtccctgtcaggccacatgtttgctggtccttgtggttatctaaaacgcatgtaccacggctgcgttgctgtccgaggttggagacttcgccttttatttaattttgtcctatgttatggactagggagtaaaatgcttagtactactacttggtcagttcctctgactcgatcagcttggccgctgagtggtagcgaccggcgggccctctgatgggaacttgtgcttggtgtgtagtagcttctctccatctgtaaatatttgcttgcgtgtaatgggatatgtcaatcgtactgtttcttccgtgtttagtttccaaacctttgatgtgtacccctcccgtccccaaaactttggaaactaaacacggaagaaacagtacgattgacatatcccattacacgcaagcaaatatttacagatggagagaagctactacacaccaagcacaagttcccatcagagggcccgccggtcgctaccactcagcggccaagctgatcgagtcagaggaactgaccaagtagtagtactaagcattttactccctagtccataacataggacaaaattaaataaaaggcgaagtctccaacctcggacagcaacgcagccgtggtacatgcgttttagataaccacaaggaccagcaaacatgtggcctgacagggacccgccaccgctcctccgtcgacctcatctcacccgatccgagatctaacggtggttgctcctggtctcgtcgctgtagagccagtcgtagacggtgggggagttgggctgcgggcggtcgaagaggttggcgcccatgctcttggtggccaggttgctcccggggtggaacacgctgcgccacacgttgttgccgccgcgcggcgtcgtcgacgacgacggcgtccccggcgtcgtcggggtcgacggcatcgactgcgtccgcttgtagctcccggcagcagcaacggcatctttgtcgatgacgatcgggcgggaggtggcggccttgcggagcttctcgagcccccgtctccgggtgaggccccggccaccacgtcgtcccacagcttctccagcatcttcgccttcctccaacaaaggttactgctggccactggcttactgcactactatgctaacgagaggaagagcaccgtctacctacctactaagta

SEQ ID NO: 10890 - DNA, 1916 bp, Setaria italica
  Peptide Sequence Number=SeqID_76864
cccttgaatgaaatttcttctatgttcaccagagaggggggatctaaattcaagtttacagcactataaattatggataagtttgcaagaacataaccaagtgaatctacaacacctcacgtacctcagccacatacatgcccccatcactcaacaggcaacacaaaactcctcttagtacaaaaacacaaaagaaaaaacaaaaacaaaaatacatagtgcttgatcgatggcctctctctctggaagaactcgcattctccgaagctctaggcctcgagcggcttgcagacgatggtggcgtgcttggcgatctggttgctgaactgccccggcttctcggtggtgtcgaccttggcctgccccggcggcggcagcagctggaagttctgcaccagccttccgagcgtgatgccgatgatgggcagcgcaaggataatccccgggcagctccggcggccgacgccgaagggcacgaaccggaagtcgttgccatgggcctcaacggccttctcctcctccaggaaccgttccgggcggaactcctcgggcttcacccaccgcttggggtcgttggcgaggaaccacgcgttgacgaggatcttggattcggctgggatgtcgtagccatggagcttgccgtcgttgaggttcatgtgcgggaccagcagcgggatggccatgcgcagccggagggtctccttcaccacggcctgcaggtagggcaggcgctccaggtccggctccgtcaccgccacgccggcgcccagcacggaggtcagctcctcccggagcttggactggatctccgggtggttcaccagctcggcgatgccccactcgatcgaccacaaggtagtctcgatggctgcgacgttgatgttctcgacgatgtagaggacgttgtcgtggttgatctcgcccttcctctcggcctcaaggatgtggtccatggcgcaccggatctcgccagtctgggccatcacattcttgcgctcctggacgaagttgtcctcgaagaccttcatgcggcgggtcttgaggtcgtggcagcggttgaggtacccgcggaggaaggggcggaggacagggatgaagtcgccgtagttgtactcgaagctctgcgagaggcggctgcgctcggcgttgagggccttgagcttgttgaagagctcgtcgtcctcgctgtcgaagcggcgatcgaacatgatgacggaaacaatagtacgttagtaacaatcaatgagctgcaggcggcggcggatcaccacaccctcggtggcggccttggggttcttcttgacgtcctccacgaccaggcgggcctcctcctcccagccggcgcggttctgcgcgacgaccttgttggtgaagaaggggacggtcatgatgcggcgcatcttgcgccagtggtcgccgtagacggtgaagaccatgtcctggcccttgccggtgaagatgtcgaagacgacgttgcgggtgcgggagccgaactcgacgccctgggtgtggaggacctccttggcgagctccggggtggacacgaccaccaggttgcggacgcccatgcggaggaggaagatgtcgccgaagcgcttcgcgagggtcatcaggttgcggtggttgaggtcgtcgccgacctggagccagttgcccaccacggggggcgccgggcgggccggggggcaggcggaggcgcttgcccgtcagcttcgccacggtgatggccagcaccgccgcagcgaacaggcccagaagggccttctcgaggagggcgaggtccatggctggctggctctcgtctccccggcggggggtaggtggggtgtgtggcctgtgtttgttttgtttggtcgcctcgcttgccttgcccgtggagaggaggtgatgggaacggcgtgagggggatgacgggg

SEQ ID NO: 10891 - DNA, 1357 bp, Setaria italica
  Peptide Sequence Number=SeqID_76865
gtcttcctctggagaactcataatcacaaacacagcagcatgagatgcatgtaacatactcccacaatccccagcattccatacggtttaacagtggaaaattgaggaggcaaaactccatgaacgccctggtaccgatgtttcagtcaactgccgatgtacacatgggcggatttcgcgaagaacgatcccatgcgcgtgttaatatcacacaacattctgggagcagtacaaggcaggcaccctcacggaaaatgagaaaagaaagggtatatttctttaccacctccgtcttctttgatctccaatataacatatagctcgacaagacacatctatacaaatcgcagcactgctaaacttgcacagggtaattgagtatacttccagttcctcaggccggtacagctacaggtctttggctggtcttgattcctttgatagctgcagcatagtctggagctccaaaaactgcagaaccagcaacgatggcattcgccccagcttcaatgaccttgtaggcattgttaggaccaacaccaccatcaacctcaatccaggggttcactcccttctctgcacataaccttctcaagtctgcaattttctttacttgactctcaataaagctctggccaccaaacccaggattgacagacatgatcaagaccaggtcaacaacatcaagaacataatctattgcgctgagtggagtcgctggattcaaaacaactcctgcctttgctcctaaacttttaatctgattgactgttcggtgcaaatggatggttgatgattgttcacagtggacactaacaatatcagcacctgccttaataaaatctgggactcgctgctcaggttccacaatcatcagatgtacatccaatggaagatcagtcactggacgcagagcatcaacaaccaaaggtccaatcgtgatatttggcacaaagcgtccatccatgacatcgacatgaatccaatcacatcctgccagctccacagcttttacctgctcaccaagcttggaaaagtttgcggatagaatggaaggtgacacaatgatgtcattctttgagaacttgtcgacccgagatgttgccctcacttggaatgccttcctgggggaggagaaggcgaggccgcggcggtggccgagggaggccgtccgcagggatgcgaagctggagcatagcgacgacgacggcgacgccatctgactacctgccaaagccaccaactcttcccttccggctcttggcttggtgcacgagcagctttgttttctctgggtctggggggcgagccgaaacgcttcgggtggagaagcgatttggggtttggcggaggagag

SEQ ID NO: 10892 - DNA, 2582 bp, Setaria italica
  Peptide Sequence Number=SeqID_76866
attacgctataatcaaagccatcaaaggaaagctactactccaatctaacccactttcattcagatccacttaatataacgacgacaacgacgaagacaagggtatactcaactcaaagacccaattacgcaacacgcacccagccagatggcctccgcaatccattttgtccggccacagaagtctctggcttttttttttttcctgatgatgaggatggtactattacgaaagtcctggagctaagcaaactgaaacgagaaaatacggcaaaagagaaactaggggaaaaactaacagctagcccaactgctctccagtaggcgcgaccaagcaaggctctcggggccatgcttccagttccacaggtagcccttgctagatcaccagttccttgggacccccacacttcggttgagttgtccgaccatcttcacggcctagctatggaacatcggttttgcaatcaagctagccagtcttggcaactccattggcgagggcgggcttctcggttgctgtttgggccacctttgcagcgtaggaaacagcgggagcagtgacgttctctgtaggagccttcacctctccgttgacaccgtttggtacagatggctttggcttcccgttagcgacttacctagacaagactacaaccggttagtgacagaaacgggagccctgctgtcccagacctgcttttggatctgctgctgtttagcccttttatcctgcatcaacttctgccggctttcatagaaggcaaagtcatccaggatggaggtcttgctgacatgctccttgaatatcttgagcatctgaaggccttgttcaaggtgtatctcttgtgtgtcacggctattagtgacaggcttgttctcattgttctctaggatgatgtgcttcagcatattgttaggcacgtccttgacaatgtgccacttaagagagaaggaaccattccacttgtcctgttgccagtactcaagggttttctcaaaatcaacagcaccagtcatttcagccacaccaacaaactggccacttgtattcaccgagaaaaacaagaatatagggcacgcagagccctttgactgagcttcttgataagcagcatcaagcttcttgtttccattggtggtgcttgcccacacattgtatttaatactcttgtggatatcatcctcactgtacgatttaatgacaaagaactttgcagcatcgtattgaactagggtaagttctattcttcttgttgaactgtgctcgatcaggtagggcactatcattcttgctttcgccagaaggaaggctctgccctttcacagcaataagaaaacaagtaatagaaccaataataatttctggttcttgaaacggccagatctaggacctctgtttaactcaattgttccatcctgactctcattgccataaccatagtatccattagcacgacccctgggcctgtacctgttgtccataccaagaccccatcgaccatataacctggagtcataaccgttactgccataaggaagaccagtttttattgagttcccatactgggtgtaaggccgggagctagggtacatcctatttggatatgtaggtgtcactgatccggttgtagctgtaggtcttcgattctgcatacccatctgtggagccgtggagctctttgtctgatttcttgctagaaggaaccattagcattgaaagtcgaggtcggcatatgattagttgtagttgatctttgctgtccatttgcataagcagagccatcataccatgcaaagtgtgctcctgtgctgtcataaccataagttgtgtccaggtaaccagcagaaggaactccacctagcaagggtgccctataagttccatcaggcgtcagtgatgaattttggtggcttgacgcaaggggtacagttccactgttactgtgagcagtaccattaggaacaccatttgttgttgtcttggcaggatcggttttagctgctggcttttcaggattgacagaagactgtaggtcgccttgagtggtagaaggaactggtgtaggaggttgaaaatacgcagttggatactgataatgctgcgcaccaaacatctggccatcaactgttggaactggggaactggcaggagagtatgcaccatagggagcatacccatatccataaatatcgccatatactgctggggcaatctccactccgtcttgatttagatatctaggataatcatcccactcgttcatggaaccgtcgtagcctccatagtaatacgctggcagatagaacaggttgggatccataaagtcttgaagcaccggcgtgatggaccgctccggcgggatcgacacgctcagcggctggctcgctgcagcaccctgcttcttggcaccggcaggctctgtggcatccgccgccttgggctgcgaatccagcgacagcttctgcagcagatccgtggtttgatccgcgacagggacggctgcaggagccgtagcggcagcggcaagaaagacggaccggacgaccggacgacggacgggacgactaggggaccggga

SEQ ID NO: 10893 - DNA, 1781 bp, Setaria italica
  misc_feature (1758)..(1758): n is a, c, g, or t
  Peptide Sequence Number=SeqID_76867
gatccggaagccgaccgatcaaccaggagattacttaagaaatggaccatccattacaaaagtcgtggtacataccaatgcagcaaactggatcacgaaagggatcggatcttattggcgtggaattgacgggacctggccagtacaggtaccctcgatcgatcagagacacatggtactatcgcgcatgctgtgcttcagcagtacaggtgacagtaggcaaagcaccaacaaccaaccacacgtcacgcgcgccgtcttcttcaaaggaacctgttgaggtactcatcgacggtggtgtacttgacgtcggggtacagctcgcttgcgtccacccccttcgccggatcgatctcgaagcctgcctgcctcccccctcacgtacgccgcgtgcccgatcgccaggatgatgttcagcggcatcggcgactcttggatctgcttgagcacggcttccgtcggggatgtacacgcgctcgaacgtcttgccggtcttcttctcccacaggtccacgagctcgttgtgcgacagcgtgttggccggcggcttgatgtacagcgtcttgttctcggcgcgggggtcgtcggcggcgagcaccgtgtacgtcccgatgtcgctttcctccacgaacacggccttggcgttgccgtcgccgaggatgagcaccttgtcggcggggggtccctgggcgagcagctgcccgacgctgggcagcgcgtagcccgcgaagtacccggccacggcgaaggtgtaggggatgccggacgcctcggtggcgcgccggatcgccaccttgccggacaggatggtcttgcccggctccacgatgcccgttctgtccacgtccagcccgaactccgacgggaagaacctctgcatatccatctcatttagctttttatctagtgacaacgagcatgccggaagaaagacattgatggcggcattcatgagaaggcgctcaagcaagaacaaattaaagaaaaaggaaggaccttgacattgccggcctccttgatggcgtcgatgagcctggtctggtcggcgatctgcatcgaccccagcgtggaggaaagcgacatcgggacgtacacggtgctcgccgccgacgacccccgcgccgagaacaagacgctgtacatcaagccgccggccaacacgctgtcgcacaacgagctcgtggacctgtgggagaagaagaccggcaagacgttcgagcgcgtgtacatccccgaggaagccgtgctcaagcagatccaaggtcagaacgtgccttgctgcctcgatcgatcatcgtggaatcaatggcgtggttaacaattgtttctttctggtgcagagtcgccgatgccgctgaacatcatcctggcgatcgggcacgcggcgtacgtgaggggggaggcaggcaggcttcgagatcgatccggcgaagggggtggacgcaagcgagctgtaccccgacgtcaagtacaccaccgtcgatgagtacctcaacaggttcctttgaagaagacggcgcgcgtgacgtgtggttggttgttggtgctttgcctactgtcacctgtactgctgaagcacagcatgcgcgatagtaccatgtgtctctgatcgatcgagggtacctgtactggccaggtcccgtcaattccacgccaataagatccgatccctttcgtgatccagtttgctgcattggtatgtaccacgactttttgtaatggatggtccatttcttaaaacaaaaaaacctaaaaagngactgccaaggcacacaggggat

SEQ ID NO: 10894 - DNA, 2031 bp, Setaria italica
  Peptide Sequence Number=SeqID_76868
ttttttttttttttttagttaagaaacccttgcaagtttattcgatgaagggctcattttattcggggaacagatacccaagcttcctcaggtcccaaggtagcagctcacacaggttcagacttcaagcagtcgctcaacacatacaacactactcttaactcgggagggaaactccctccctcagcctcagcgcgccacctcaatctaggaagactgccggagctccggccgcacgaagtcggcgttggcaggcacggagatgtcgacggtgggcctcagctcagcgcagacctcgatggcgccgtggactgggtccgacatgaagttgctgatgaggtcctggttgatcggggcgtccttgtccaccgtcacgaaggcctgctgcgtcaggatgtagtcgaagcgggggagcccacttcctgggatcccaggcgagccgttgtggagcagttgtccaccatgaaggccaccccgcgggcgtgcatgaaggggttcagcgagtccaccgactcgatcacgctctcgttgatgactctccgagtaggagtgccccttcttcctcaggatctcaatctgagccatcatcagggcaatgtacactccagcagtgaagggatggcagcgggccaagatcgccctccggacgggtcgagcgcaccttctcaccaaccttccacatgcgagtttgatcaatgttgcccattggaaaagctggcagtccctctttctcataaaatcttcgcccagccaacaccacgctgcggatttcacttccagaggccacatcttcatagcactcatagagaatatccatgcaaggataaaacgaggcactgtaagccttgttgaactccttcttgccttcctcgcttaaagagttgtagacttcaagcatccccttctttgagatggtcttcgagacaattccagtgatgctctccacagtgtttttgtaggctgactcttcatccattccttgttctgtgtatctcctgaacagagcctccacaatgccatggacagcacccagcaaaatgcctcgctctccgaagatatcgctcttgtactcctgttctaaagtagtagcaaatgtgaagggagagagccaagtgcaactgaccatgctagagcaacatcagttgcccttccatcaacatcctggtgcacagcaaagctagagttgatgccggcaccatttacttccttgccttggacataaagcctgcggacagatggacccattcccttgggacatacagcaatcacactgatgttctttgggaaatcaagtccaagcgattgcaaatgtcccagaagaaatccatgggataaaccaaggatactgttcggtttcatgtgcgagaagatcttctcatagttgtctgcctgtgcagctattcttgatatcaatagcaacacaagatcgctgcctgaaacagtctcccagatatcacccaatgttccattctcttcagtgaatccagcagcacgtgccttcctcaaatgatttggaacctttccggagaccaatcttgacaacaatgtccgactttgcttcagccagtgaatccctcaggttctgagcttgggcgggaccctgcgagccccatccaatcactccgatctgcttcacccccttgaacgcctccgggagcagcgggaacaggttcctcccgcccctcacaatatactcctcgtggccggcgagggagaccttctccttcttgaagacggaggtctcgaagtcgagcgacggcatggccgtgccgacggccgacggcgccgcgaccatggcggcgacatcccggcggcgggtggctgacgcggagaggaggcacgcgggctgggtggccgggaaggagacggaggccgcggccggcagggttttgggcccggcggcggcggcggcggctagggttttggggtgcccgaaggcgagggtggaggccgccgaggtgtgcgctgccatgtcgtcgcgcggcactgggatggcgagcggcgggcggcgagtggttgttggggacttga

SEQ ID NO: 10895 - DNA, 1823 bp, Setaria italica
  Peptide Sequence Number=SeqID_76869
ctcgcgatttagcctaggggttctgcaattagttttgtaattagcttatgtttagtcctcctaattagtatccgaacatccgatgtgacagggctaaagtttagcctcctccttccaaacacccccaaagttgttctgccccttctcaccctgatcgagcgtaataatgtaatgtacgtcgtagtacgtggtttcgtttcagttttctgaaccgaacacggcccctggcctacaagaacggggccggccttatgcctcgtacaccttgcactcgtcggtctcggggttgtccttgcagaagtcctccagagggtcgccgctgccgcccgccgccgccgcgcccggccacttggccgccaccaggtgcgccaaatcaaccacgcgttggctgtagccccactcgttgtcgtaccaggcgacgaccttgaccatgtcgtcgcccatgaccatggtgagcgaggagtcgatggaggaggacacgtcggagcacctgaagtcgacggacacgagcggctcgtcgcagacctgcagcacgcccttgagcgggccggcggcggccttgcggaacgccgcgttaacgtcgtcggccgtcatgcccttcttctccgtgttgatcaccaggtccaccacggacacgttcggggtcggccacgcggagcgcgatgccgttcagcttgcccttcagctggggaaggcaccagggcaacggccttggcagcgccggtgctcgtcggcacgatgttcagggccgccgcacgggccctcctcaggtcgcggtgggacgcgtccagcagccgctggtcgccggtgtatgagtgtgtcgtcgtcatggttcccttcacaatcccgaactcttcgtccaagaccttgacgaatggggcgaggcagttggtcgtgcaggaagcattgctgataatgtcggccacgccgtggtcgtagtcgccctcgttgacaccgacgacataggtcgggatgtcggcgcccttcgccggagcagtgatgatgaccttcttcgcgccggcctggatgtgcttcccggcgccggggccggtcgacgaacactccggtaccctcgatgacaatgtcaatgcccatctcagcccatgggagcttgagtgggtccctgctggagacgaccttgatgggcttgccgtcaacgctgatggtggtgtcgtcgacgatcttgacgtcggccttgaaggtgccgagcatcgagtcgtacttgaggaggtgagatgcgttcctgacgcctccgctgtcgttgacgacgacgaacaatcgagcggggagtcctcacggccgtgccaacaccggaggaagttccggccgatgcggccgaacccgttgatcgccaccttgagcttcgcctcagcaggcgtcctcacggcgttctctccggtggccttggcgacgagctgcgcgccgagcacgtcgtagaaggacgcctccctggcggcggtgctgacggagcatgatcccggcctgagcccggagaagtcggcgaagtccaccctctgcctggacgcggccctgctgttgagccgggcgctggtggggatgcgggacgcggcgagagctgcgtgggtggccatgtcgtcgcgcgctaagctagctgctgccggatggcgccgatgctaaggcagccagacgaaactgagccggcggtggtgctcccaatttatgtgctgccggccggccggggggtcgtggcgccgtgatcacttctttgtgcttgtggcctcggggcggcctcgggggcgccgggcgttaggattaaggcgattgcatgcgccgcagccacccgttcggcggggcgatatccg

SEQ ID NO: 10896 - DNA, 216 bp, Setaria italica
  Peptide Sequence Number=SeqID_76870
accttagattgttcatgtactgagaacctgtggaagttttgccaaaaatttgttatcgaacagatggaccattgtcttaatgttatgctagcaccagagcttatttgtccatcagttggttatttgattctgttaacagccttattttccctcatctgcttgccgtgttcgtgcgccatgtatccgctgcagtatggatgtgatgttttcgtgcca

SEQ ID NO: 10897 - DNA, 377 bp, Setaria italica
  Peptide Sequence Number=SeqID_76871
gcggcggaagcggaaggaagcaggcggccacaatggtgaagggacgcacggggcagcgcgtgaggctctacgtccggggcaccatcctcggatacaagaggtccaagtcgaaccagtacgagaccacgtctctggtacagatcgagggggtgaacaccaaggaggacgtcgcgtggtacgccgggaagcgcatggcgtacatctacaaggccaagaccaagagcagcgagacccgctaccgctgcatctggggcgcaaggtcagggtcttcatgtaccccagcagcatctaaaagataatttcaaggtgtggacgatcgtgcttatactgttaggttttatcttgagctaaaaagttccttgtaaggggtctgttca

SEQ ID NO: 10898 - DNA, 408 bp, Setaria italica
  Peptide Sequence Number=SeqID_76872
atttgattgctaaacatagttaggccctttttatctacttccatgactatcagcttttgccatcattaaatgttttgtgtgcaaattatgctgcagaatttgcttcttttgtatactgctaatccaacttgcttgggactgcaaggctatgttgttgttgttgtatgctgctaatccatgtatcttccaatgcagataatttcaaggtgtggacgatcgtgcttatctgttaggttttatcttgagctaaaaagttccttgtaagggtctgttcaggttgagagttagcaacttgaattgtctatttgagaacccttcgaaagttctccctggttttggtgttgtggaccacttaaatcattatatggagttgaagtttagaactgaaaaagtacttgtcatattttg

SEQ ID NO: 10899 - DNA, 649 bp, Setaria italica
  misc_feature (634)..(649): n is a, c, g, or t
  Peptide Sequence Number=SeqID_76873
gcgcgagctctcttctccggcggcggaagcggaaggaagcaggcggccacaatggtgaagggacgcacggggcagcgcgtgaggctctacgtccggggcaccatcctcggatacaagaggtccaagtcgaaccagtacgagaccacgtctctggtacagatcgagggggtgaacaccaaggaggacgtcgcgtggtacgccgggaagcgcatggcgtacatctacaaggccaagaccaagagcagcgagacccgctacaggtgcatctggggcaaggtcacccgcccgcacggcaactccggcgtcgtccgcgccaagttcaagtccaacctccccccggagtccatggggcgcaaggtcagagtgttcatgtacccgagcagcatctgaggttctgttggagtaggaatggtcatgcttatttcttcccttgagctgaaaatgccatgttttggtgaacccgtgacgtgttggcaccttagattgttcatgtactgagaacctgtggaagttttgccaaaaatttgttatcgaacagatggaccattgtcttaatgttatgctagcaccagagcttatttgtccataaaaaaaaaaaaagattctgttaacataaaaaagaagaactagaccnnnnnnnnnnnnnnnn

SEQ ID NO: 10900 - DNA, 521 bp, Setaria italica
  Peptide Sequence Number=SeqID_76874
ttgtaagtatagataaaagaaaaaaacaaattgaaaccggtaccttcaagaaaacagagctcaacaaagtataagtagtattcaaacaaattgcacaaatattttcgtctagtcgagacccttaaattcgcaccaaagtgactaatccctaaacagaatcttatcaaggaaatgtctgcagaaggaaaggaggtttgcggacaatacaagtgtttcataggactgaagctgcagaccggatgcaagagccccatgtgcatatgggacgtgatatccaccatctagataattgtcacaaaagaccttccagttacagttgataatatattctcgcctgcaaatatgaggcagtgaagtgtcaatgccatttgtactcaacagctctgaagcgctaccgagccattcatctccaaccacatcaccagcatcatcttcagtggactcgttcattctaaattcttggtcctaactacttaaaaggtttccccttattttgttttagtttccttttacctttttta

SEQ ID NO: 10901 - DNA, 1094 bp, Setaria italica
  Peptide Sequence Number=SeqID_76875
taactaagaaaaacaaaagtactatgaaaacaagtgttttgttctgtacaagtgtggtgagatgcgcacatgagaattgctagccgctaaggttagcatgcaggaggcagtggaagtggtgcatggccatctccacggacggagcgtatcttccaacgccgtaagctggtgactccaggccccgctgaacccccttcacagagtgcaatgtcctccatctgcaggtatgagatgcaactatcaagcagcagcattgaaatgcctacgcctggtgaatatcaatgtaaaagctgttctactatacacatggattagactgcttgcttgtgatgctgcaagcctgagagaaactgagtttagcttcctgtttgttcatctaatcgcgcaatatagcaatttataatatgcatcatggaatcaggagtttcatgccatgtcagcactgtgcatcattcagagaaaacttgcagcacaatagtatagcaacgaaagaattgaggcagaacatttttctgcttctgcttcaaccagcatggttttcataagaaaagcaggaaattcatctggtaacttactcagtcatgttgttagcctattttttactgagaccatgtacttgaatgtaaactgtcatactacctcacaagtcacaaccagacattagtgctatatcgatgtacctgtacttgctcactgtcttttaggcttctctcgataaagttctggtcatcctgcgcattcaatatggaagttcaactgaaacagctcacaacatgcatgaatataccatgtgtaaacctcagcacttaaaagatacaactacaaaaaggttcattttaaactgtagtaaatgcaaatgatcattaattattcaggtggaacctatagtattccatcaagttaacacacaagacaaaaaaaatgttgtactgcaaaaggaatgaacaagaggaaaccattgtaacaaaaaaaaatgctcaagttggcaattcaaacaactatctcactagcacaacacctgagatgcgtaaaataaacataaattggcacataagttaaagaaaatggactgtaccagcagagacttgtcgaag

SEQ ID NO: 10902 - DNA, 1185 bp, Setaria italica
  Peptide Sequence Number=SeqID_76876
accatatttgctggctattaaatttggttttgtgtaatcgaggaggtgtggtccgcttcacattacaagattgcaatcgagagcagtgtaaatgcggtaccctgaaaacaagtgttttgttctgtacaagtgtggtgagatgcgcacatgagaattgctagccgctaaggttagcatgcaggaggcagtggaagtggtgcatggccatctccacggacggagcgtatcttccaacgccgtaagctggtgactccaggccccgctgaaccccctcacagagtgcaatgtcctccatctgtacttgctcactgtcttttaggcttctctcgataaagttctggtcatccagcagagacttgtcgagaaaataatcaaataccaccttacacttggttgaacccagtggcacagctagattagtgtccatccatggaccgtacctgttgatcataaagtttggataaacaaaggcatagagagcttttgtccctaagcgttcgaagtcatctggttcagatggtgcactttcacatctttgaacactaactctttcgtatgcaagtgtttcataggactgaagctgcagaccggatgcaagagccccatgtgcatatgggacgtgatatccaccatctagataattgtcacaaaagaccttccagttacagttgataatatattctcgcctgcaaatatgaggcagtgaagtgtcaatgccatttgtactcaacagctctgaagcgctaccgagccattcatctccaaccacatcaccagcatcatcttcagtggactcgtcatcaaatctggccaacacaaaaggtccccatgtagccaccttaattggtacgagaccaaaatcattcttattgaaattctttattcctgatattcttgtagccttcaggagggtaccgtccaatccatatgtccatccatgataagggcactggaagcaagtcttctgaccgcttccacatgcaaggagtgaggcatgatgtcggcacacattgtgaaaagcatgaaggttcccgtttgcgtcccggcatacgacgaattctacatttcccagtcttcctgtgaagaagtcatttgggttcttcacttgccatatgtgacctgcagtaaaatttaacaggtacaggcattcagagaggaattatggatgccaacaaaaacgtaata

SEQ ID NO: 10903 - DNA, 498 bp, Setaria italica
  Peptide Sequence Number=SeqID_76877
aacccccaagtaatctaacaaggttcttgtgctgaagctttgccagtacctggatctcattgtgtagctgatgcaatgcatgcccggttcttcctaaaagtgtcttgactgctatctcttcaccatcagagagcatccccttgtatacagtaccgaaaccaccttctccaagcttattcttttccgacaagtgttcagtcgcctcttgcaacgtcatcaaatcaaagaccgtgcattgcgggttccctattttcttcagtggatgatccttctttgtcgccttaatccttcgcctgaagcgaaggaagaaaagactgaaagaatcaacattaacacaacaaagccggcgatgcccaccgagactccagctgtaatccctttcctccctgctccagattctggagtagcaggtgaaggcgtggccgccggtggtggttccggcggtgcggcaagctgcagcatcgcccggccctcgtagaccggcgacaacacgctgta

SEQ ID NO: 10904 - DNA, 567 bp, Setaria italica
  Peptide Sequence Number=SeqID_76878
acgtcaggaggatgttaagcctgtttgaagccgccactgttttgtgccaaaattccacgacagcaatggtctgacgaagtacctaggccactcaagagtatacattggagagtgaatggagaggaaagtactgaatagaatgctgtcgaggctcctgttcttgatgtattcatatacgagcagtgtatcattctgatgcaagcaataacccagtaatctaacaaggttcttgtgctgaagctttgccagtacctggatctcattgtgtagctgatgcaatgcatgccgggttcttcctaaaagtgtcttgactgctatatcttcaccatcagagagtatccccttgtatacagtaccgaaaccaccttctccaagcttattcttttccgtagaagtgttcagtcgcctcttgcaacgatatcaaatcaaagaccgtgcattgcgggttccctattttcttcggtgctggtgccatatgaaaagaattgtgtaaggaaagaaaaaaaaatacaaatacaggatcgtgaccagattgctactcatgatgatccttctttgtcgccttaa

SEQ ID NO: 10905 - DNA, 653 bp, Setaria italica
  Peptide Sequence Number=SeqID_76879
taaggcacgtcaggaggatgttaagcctgtttgaagccgccactgttttgtgccaaaattccacgacagcaatggtctgacgaagtacctggatctcattgtgtagctgatgcaatgcatgccgggttcttcctaaaagtgtcttgactgctatatcttcaccatcagagagtatccccttgtatacagtaccgaaaccaccttctccaagcttattcttttccgagaagtgttcagtcgcctcttgcaacgatatcaaatcaaagaccgtgcattgcgggttccctattttcttcggtgcgagactccagctgtaatctctttcctccctgctccagattctggagtagcaggtgaaggcgtggccgctggtggtggttccggcggtgcggcaagctgcagcatcacccgagcctcgtagaccggcgacagcacgctgtacctcagcaaacaccacaccagcgcacctacgttgctctggggccggccgtccatgtgccgcgccatgatttccgactggatgtacccaaggcaaccccgacactagtccggcgtcaggtccgacgcgcactgcgccagcccgtagatcttggggttgaaggccatctccgccgtggtgaagtacttcctcgtcgagttggtcgccgccaccg

SEQ ID NO: 10906 - DNA, 464 bp, Setaria italica
  Peptide Sequence Number=SeqID_76880
atggaggtggcggtgcgggtcgtgcaggtggcctgcaccctgtgccagcgggtccaggactcgctcctccgccccggcgccgacgccggcggccgcgtccattccaagctcgaccgctcccccgtcaccgtcgcagattggggcgttcaagcgatagtaagctggttgctttccaattcctttcaagatgagaacgtatcgattgtcgccgaagaagatgatgagacactatctagttgcgatggtgcggctttgcttgaatccgttgttgaggctgtcaacggttgcctgattgaagctccaaagtatggactgagacccccagagaaagagctcagagctcatgatgttattcaagccatacggaaatgcagctctactggaggtccgaaaggaagatttttgggtgcttgatcctgtcgatggcacccttggttttgttcgaggggatcaatatgctattg

SEQ ID NO: 10907 - DNA, 1700 bp, Setaria italica
  misc_feature (1)..(56): n is a, c, g, or t
  Peptide Sequence Number=SeqID_76881
nnnnnnnnnnnnnnnnnnnnnnnnnnnnnnnnnnnnnnnnnnnnnnnnnnnnnnnnaaactcttaactagaacgcgctgcattctaccatagttgcaacaaacaaacaacacaagtgtcaagtctgctactagtaccactcaattataccatatttcaattctctagaggcaccatcttgccacatttcatctcattccctgtcatatacactctcttatccagcagcagaaaatgaacgggacgaaatttgggttgcgccagtagtctggcatgacaaaacaaactatgaagttgtctggcgcataacagactacatgccagagaaccttctaaggtaatgggtgagtgacctccttcgcttcgccttggccattctctcttcttccaccgcaagttgcaacgaagggcctaacagcctgctcaacagctcttggttcaatccaattccttgaccattaattacaagtgcccgccacatactctcttcaaagcccttccaattgattcgccctccgctgtcttccgatggttcatgatctggatagtacttgaggactggaccattctggcatggagctgccccaaattctcgtggcaacggagttcccaacacttggacatgggacacgcatatgtagtactgatcatcctcccgctgtttctgaatcctcccgagaaactcaaccttcaccactccaccaatgcataaaactgggcgtggtagcttgaaagattgcaaaacatttttctgcaacattgggaattccgaggatgtatacatccaaatatagttgtcatcagctgtcagctgcccttcattctcttcagatacaagatcttcaagtcgtagaggcaactttggacagccaaacttgaagcgaacatactgtgatgaatatatcgggaggccacgctggaaataagctctgaatggttgtatcctgatctcatcgatgagacaaagatctgagcaaagcttgtacacaagaaactccgggactgcaggatcctcttggcctccgctggaccagtaacatggccaattgttcacgcgttccctaggctcaagggtattttggatgctctcacctgggaaattgtcggtgctggatgctcctaagcaggcagtaatgcagctcatccaagtgtgaggggagaaaagagcatggacgagatgcatgtacaccattttctctgtcttgtagttttcccaagtagtagtagcagcagttgatccagcatcttcttcatttacgccactgtcgctaccactggcagaattggttggctgttcgagttcaatccgggtgaagctggcgacctcaggacacagtctcaggcactggatcttgctcatgtgaaccaccattacgagggtgcgccacgagcgggagacggcggcggcgtgggcgaggtcggcggggtcacggagcaccgcgaagacggcggcggaggcgtccggccccagccgatccacgaagtccatgcccgcagcggcggcggcggcggcgtcgtttttctccacgaatcgaactgcaggctacgggtcggagcaactaggcaggcaaggatctgtaacctctatttctctctccgatttggggacgaggaagaagaacagcgcccacccatttgttaattaaggtaggtagtaggaacgagatgctactggttcctggaaagaaaaaaaaagacaag

SEQ ID NO: 10908 - DNA, 555 bp, Setaria italica
  Peptide Sequence Number=SeqID_76882
ttcatgccttcagtttactaataactatcagtttttgtacatgtactgttcaagatttgtcagactatatattatacatattttagttaaaagtaccttttgggtttgccatcagaagtattatggaaatactatttgtctataagcttagaagtatttaggggtggtaatggatcatggccctcatgcattcttcacaatccaactcatcactatttatttttagctcaaaatcatatagtattatggcctgatccttattgagcccgatcctaggttaaattagagagccctttaccacccctagaagtatttgtacatacacttgtaaaaaaatccagtaaaagtttgaaaagtaaaatcaaagttgatagttatttttgagtgggagtatatagctatgttggacaggaatagacaatgcacatgtgcagcaagcagcataatgccccgagcattagcaaataatgtattattacccaaaatatgtcagcttgcactggtgtgcgcactgtggagcactatgtcgtgccacctgaagtatgaatttcaggg

SEQ ID NO: 10909 - DNA, 417 bp, Setaria italica
  misc_feature (402)..(417): n is a, c, g, or t
  Peptide Sequence Number=SeqID_76883
cggaaagtggcaggcgggtgggggtcgcgggagcgcgcggatatacgcggccgccagccgggacagaggtacatacattactgtccccattactgacacaattactgacacgacagtgtgcaacatgtaaatgatagtagtagctccaagtcattgcaaaatgcaaagataaatcgtacagaattttcgattatctttttcttgtgtgtttgtttcgtgcttgtgtctgtgcagcaccaacttggtgctagtggcagtggcaatgttcagctaatcagctgggtgcctctctagctgaatctggacactgtactgtatgtagacagactggcttacaataatgccttcgaaagagcattcttttattgagttcaacaacttgcgaaatgttcaccaaaaggnnnnnnnnnnnnnnnn

SEQ ID NO: 10910 - DNA, 1700 bp, Setaria italica
  misc_feature (1664)..(1664): n is a, c, g, or t
  Peptide Sequence Number=SeqID_76884
gggcaatataactacagaaaggctcactcattcatgagccaaccctaacatccacaagcaagaagataccgttcaacaaatcttactctgaaactgaacaaaaagaagaagaaagcgaatgcatttgccctaccaagtgccactacctatcggtgaatcaaacaaccttcttagcatttaaccatttaagtttaaccttgtgatgaaattttactctagattctatatggacacttgagagataaccaacccttgtatgttcatcttcactccaccatccgttgcattacagctaacggttgagagtttcagagacggatcacctgcagatcagtttttcttctttgagataacctgcagatcagttgaggaaggcgcagtctcggcggatgttccccagcgacgggtcggtcttgacgtcgacgcggccgagcttggtcatggcgtcgacgaaggcctgctcgaagtcggtggcgttctgcgcccacgccaccacggtgggctgcgagcgggcgtcggagtagagcacctggtcggaggtgaagagcccccggccgttcaccaggttgacgaagtactggttgtcgaaggcttgcggcgtgacggggtccagctgcagcgcgatgttggggtccacccccgccgggcacgccgcctgcaggtccgccgcgtacgtggcgttcatcgtcgggtccaccgactccggctggatccggcccgcgaacgtgttgcagtgcgcgaaccccagcgtgtgcgccccagatagagcgatcatgtcggcctgcgacaggtttttggcggcgaacagcgtcgtcagctggtccaggtcgaacgacggcggcggcagcttcccgtcgacgttggtcgacagcgacaccagcccgtccagcctcccgagctccaccgcgtacgacggcccgccagccagggcgatgacgtcccgggtggccagggcgaggatgtcggcgcaggagacctggttcgtgcacgccggcacggcgtcgacggcggccttggccttgatgaccgtgtcgaagccgtcgccggcgagggagaggttgctggggtggtccttctccgccgtgttgttccccgtcgacaccatgatcacggacgcgtcgcatccctcgacgaagcagtcgtggaagaagaggcgaatggtggcgccgacggcgacgggctggtcctggaccttctgggacacggcgtcgcgcacgatgctctccaggtcggggcacaccgcggcgtagtagtcctgccgcagctgcgccgccacgccggcggccgccgcgagcgccgccaagaacgccgccaggatcctgatctctgcgcccatcccgtgctagccgccgcgcgctctccccttctctcactctcctctccccgcgctccccaccggcttcgcacgcaacgctctctcgccccctgccgatggccgagtgtctcgcactctcacgcagtggcttaatggcctatgacaccacaccagcgggcagcggcgcgcgcggctggggcactgcgagcgatgatgacgctgtcgagcgctgcgtgcgctgtggtggctgctggtggcgaccgaccggtgaggttatgatcggtcgatgcagtagaagccaagtctcctcggaggtggggggatcagtgagccgagcgagagagttaancgcgcgggaggcgggctggcggcggcgcgccgtacg

SEQ ID NO: 10911 - DNA, 287 bp, Setaria italica
  Peptide Sequence Number=SeqID_76885
accttggcttcagccttccttgtcccctaggtggacccttctttttgtttgtgaagagcgcctcctcttcttccttcacagtaatgcttccaatcttcctggctacctcatcctgattagccaataaattttctatctccaccaatgaaggttgagttggccatccactcactacggctataaacccatgatatttaggtctaaggctattaatgatgatttttcttatacaggcctcaccaaccttctgattgtcgatggaccttatcaccatatccaaccatcaa

SEQ ID NO: 10912 - DNA, 255 bp, Setaria italica
  Peptide Sequence Number=SeqID_76886
ttcttaatagtagatgactgtggcactggtggccgttcagtcagaatcagtgatatggctgatacagttttacccaggccctgatcatctgcaagaattccaccagagcaatgcggactactcgtctccttttgtaccatccaagacaaggcaattttctgatgcctcaataaaggaactgccaaaaccccatcaggtggattagcctccaattttggctgtgaaatatcctgcaatgcaagccgcagagtgatt

SEQ ID NO: 10913 - DNA, 2547 bp, Setaria italica
  Peptide Sequence Number=SeqID_76887
atcagtcaccaaagtcaaatatgtacaatatcatgttagctgatgattgtcattgttatcttcatgatattttcaacaggcactattgcagctatctgaagaattcacctggttcagtatcttacagcttcaagtgcgaaaagaattggatgatctaaccaccacaatgccaccttcagaactacaaaatctctacaaactgtacaaactacaagcactaataggtaataacccctaaatgaaaactatttgttatttgttttgagagatattttatctatcactgtctacaccatccaatgagcaaaactgttttcactctcaggagcaatgctaaaccataaacagataattcagatcttcgacggtcaatcgagtctggcgggaaccagatctgtcttccccaaacgcagaagcaaccatctcccgctttttctcctggagagccagaatacgatcttcaacagtgtcttttatagttaatcgtgataccgtgacaggccgcgtttggccaatacggtgtgctctatccaccgcttggtcttctgtggttgggttccaccaaagatctagcataagcacgtggcaggcagcaaccatgttcagaccaagacttgcagctttgagtgacatgatcatcacagtaacctctggaaccgtattgaagtctttcacagctttatcccgtgcagcaacagacattgttccatcaagccttcgatatgtcacatgagaagctttcaaatgaacttcaagcaaatctagcattctagtccattgagagaaaacaattgctttctccgttaacttggtgtttgtttgttccaaaggaccctttccatcaaacttttcagaggctagcccgatcgaatttttgctattgatcatttgggtagggtctattttgggcaatgaaagaagaatatctagtgcagccctcacttttgaagatgcataggatgaatctgtcccaggacgcttttcagcatgtaccatttccatacgagtatcgttagacttgaaattgcaggttaatctactcagagagcattcaagggtgtctctggagaatagtgaagttgtatttagtcggactctgcaattcgacactgggcatacgctgtcatcgccagtgagttgctccagtatgcactggttgcaaaaaacatgaccacatatagtgacaacagcatattctggtgcatcattgcagagagcgcatattgcagaacaagattgcaagcaaataagtaattgttgctgcctttccatgggaagtttcttggccatctccaatgaagacatccagttagaagtagattcatggcctctaactaggtgagggtgatcacatgcctgtctgagccgtaaaagcatcaataatatgttgacataattttgccttacagtaccggcagctgcatattccttgaactgttctcgcgattcaacttctaaagtgttataaaaattacgctcttcgctagtgaagtccaccgtcttaagtgaaacggttttcggtggtaaggatatgattggtttcccatcaagcatggttgctttagtccggcgtagcattaccgtcttcaaaacaagctgaagcttcttgtaaccattagttgggttccgactgataggaatctttatcatagagcaaaattgcttgtacacagcataggggtcatatcttagaaatctaaaatagctatagagatcctccacggcattctgtataggcgtcccagacaaacaccatcttcttttggctcgcaaaccccagcaagccctggcaacctgagttcggtaatttttaatactttgtgcttcatcaagaataaccctaaaccaagcaacttttgcaagaggtttttcaggcaagctactctctgcagcacttttatttttcattttcttagaagatggtggcttcctctttttgctgcctgaagaggacacaggagcaccatatctgtcaggcttccccttctcttcatcatcactatcaggatttgattgttttggtacttccatgcttactatagaatatgtagttagcacaacatcatatttggtgagctcatcaggatccttcgtgcggttgctaccatgatatattaaaaaagacagattagctttgcttgtaactttgttcttcagttctcctgcccactgtcgcagaacacttgttgggcaaacaaccaaagtaccagcagctggccttgtcttaaccgctacaataggattttcttgcttcactgtgttacttgtcaattcagagctgcaagtctgcatctgctttttcaaattaggttcagcacaatcatcctcatcgtcatcgtctagagttacagcttcgcatggctctttcttaatagtagatgactgtggcactggtggccgttcagtcagaatcagtgatatggctgatacagttttacccaggccctgatcatctgcaagaattccaccagagcaatgactagtgcgcctttaggtttttcaggcaagctactctctgcagctactttttatttttctattttctta

SEQ ID NO: 10914 - DNA, 692 bp, Setaria italica
  Peptide Sequence Number=SeqID_76888
tccagttgatgcacccccttagcatggcgttcccgtcagtcgcagggctcatcaagagcatgttagtctcagcccgcatgagaagcgccttcttgggtgttgagaagttcgtgctcccaccagaaaacttcactgacattcccttgccgtgtatcccatgctcaaaatttctcaccacctgaatgccagagtccccgacgaggaaactgttgtctagtgcgccaagcgcaagactttgtatcccactgccttcctcaacaggctcctcgaactccctaagatcctccatcagcggcttcagtgtgggggtccgcggcggcatcaggctgcccttgggccccggggagaacccatcggttgcatcctcccaaatggactcgtcaccatcctccgggcgcgcccacgccgcgaaatccttcccgaacaccttggcgcggccctcgtcggtggcggcgacgccgtagctattctcaaacaggcagctgtggtacttggcgcagaagtcgccgaagccgtcggcgtggaggaacttgagggcccacactccgtcggcgacgaagtccacccggcgctgcgcggggaaggtcttgacctgcagctcgggcccgaccctggcccggatcttcgagcccacgacgaggcaccagggcccggcggcgggcgcgtcgtcgtcctcgtcgtcgccggtgcgg

SEQ ID NO: 10915 - DNA, 298 bp, Setaria italica
  Peptide Sequence Number=SeqID_76889
ctcctgaagaaatgaagcgttctttcatggtttcaacaagtttagcaggcgaaataccaagattaagaatgttctccacccaaatttcacctttatcctcaaatccacacctattaggattgaaatcacttgaaattatttgttcaagctctgcttccgaaaggatgccaatctccacaatttccataagctcttttcttgaaatattccaactcttgttccctctgttttgcagatataggtatatgtttcatgattcagtaaaatttcgataattccaacacgaaggcctttagaa

SEQ ID NO: 10916 - DNA, 658 bp, Setaria italica
  Peptide Sequence Number=SeqID_76890
agatgctacattgtctgcaatctgctcaaatccctcatacgtatggtcgagttgtagggaaaagggtgaaccacttggcgctgatttctgtccagaatgcatcagcttctgggccagattctggaactgactctgcatctcgcctcatctgaagaagcatttcctcccctctcctcagatggagatcagaaagcatccctatgggaaggtcaggcaggtcttgagccatctccatcaaagcatacctgtaaatctcttggccacataattgtttaacaagaaatgaaacagctggatcaagcttgcaatgtgctgctgcagttcccaactgacgaagtgctgcgcctccatgacgcacatcgaccccaacatccatgtccaagggatacatcttcatactcttcttctcaaacttcttttctctttcccaaggctcaaactcattcccagtaacctcctcaaataacctaacgaattctttaatagcatcattgacacggctaccgaaatcctcaactctttcctctgccatctggtcatgaccgattggacctttttggtagaataggtgcaaacggtcggttgggaccataaccagctgcataatgcataactgattcatatcacatcctagattcgtctactaaagtctaaaagt

SEQ ID NO: 10917 - DNA, 1157 bp, Setaria italica
  Peptide Sequence Number=SeqID_76891
tttagggttttactttaagtttaagttacttaactttacccccgttcttgtccaccactacatggttccaccctaagacaaacagcgatgagcccatgacaaaacaaccagaacgaggcagcccaaaatggaacccaggctcctcatcgtcactatggtatcctaccagttcacacaaccactacgcacaactgcaaaatgcggcggccgaccagtgctggcaccggcttcacacgtcgtccggcaccacctccatgttctgctcctcgtacttaaccgcaaccaggaagcagatgctcacctgcttcgggtcgtagacagcgtactcgctgtactcgagtgggccgttcttgttcctcgacggcaccagcttgccgcaggggaccttcacgccatccctccaggtgaggtgttccgactcattggtcttcttcctcccgacgcctttcacgcctatcttcttctcttcaaagccttgggcatcctctgcccctggggtgccagttacttcagttatctcgttccccagagaggccacagccaggaccaagtacccttctggacgatccactgcagtgaagccgtaccgagcggcttcagctgctgcatcagaacacacaatggctttgccaaacatgtaccctggcacaggaaggtgacaaacagcaggcaggaatcctttatgtagatgcctaagcaagttggagcttctagttccacaccagagaagaattttgtttggtagattctttattttctcataagaaggaaatgaactggactctacagcatatatcctctcaacagacacaccataaaccacatcatccaccttgacaggctcatatgttgtttccagatacctcagaatcatcttgtaatcctctgaatcctcagctacaggattgatagaacaacccagcttcttgtagcattcagacagtggatcatccaaagtcgaaccaaacacatccccaatgagacgagaagcatcgttaatatcacgtattgtctccaaaccagatgctacattgtctgcaatctgctcaaatcccctcaatacgtatggtcgagttgtagggaaaagggtgaaccgctgatttcgtccagtctaattactaagtaaactaacttaacttaaatttaggttactttta

SEQ ID NO: 10918 - DNA, 215 bp, Setaria italica
  Peptide Sequence Number=SeqID_76892
tccagttgtgcgagcagttggtatctagttcagttatgtgcgtttgtactctgtactgtactgtactgccactttgttcttgtcatgtcagccaaactgtatataggttgttgcttgcaagtttttgcatgctcttttgctgttaatcgtattaaatacgtagtacctcatttggaaatgtaaggagtactatgttgttacacatatacattatg

SEQ ID NO: 10919 - DNA, 647 bp, Setaria italica
  Peptide Sequence Number=SeqID_76893
gcgcagtgcctctgataagttggttgtagcagcattcttgattatctgtgtatcttcagaaagcctgcttaagagctctcctgtcctagtcacatcaaaaaatgctatttcctggtttatgagatgactgaacaagtccttcctaagtcgagcgactactctctcactagcagaattaaataaccatgcccgaagtgccgtgcaaactgaaccgactacaacgatcaacacaatgtacaaaattgtgcccttaacatcctccagcgcttgagccttatcttctgggcgccgaacatctcttgacacaatgtcaattattttgccaccgtatttcggaacgagaatgttgctgagggaggcgacgagcagtgcgatggtggcgagcaccagcttcccggcgtcatgcctggccaacttgatgacccggcagaacccgacgttcgctggctggacgttgctgccttcctccaggtcggagagcgccctcgacgtctccccgttgccgaggagggggatgcggttgggcttgggcgccgtcttgatgcgcatgttcttccccatcgccgcagctcccctcggtccgcgcgcggaagggaggcgaggcgaggcagccaacgaatggggttgggggagtgaggcgagccgcg

SEQ ID NO: 10920 - DNA, 1952 bp, Setaria italica
  misc_feature (1925)..(1952): n is a, c, g, or t
  Peptide Sequence Number=SeqID_76894
ggggaaaaaaaatacggtgctctgctgagctgttgtgcttgtcctcggagcggagcggagagcggcagccatggagggagcgggggaggtgtcggccgccgccggcaacggcaacggaaacggctccgcgcggaggccgtcgacggcgccgtcggcgcgggtgtcgatctgggagtcggtgcgcgcgtgcggggtatgggggaaggaggtggacaaggccgagctccggagccaggtcgtcatgccgctccacctgcgccgcgcggtcgccaaggccgtcacgaccaaggacgaggccgccggcgtggcggcggcggcggcggaggaggaggaggagagggagaaggaggagggggcctacggtggcgcccgtggtcgtgttcgtgaactcgcggagcggcgggcgccacgggcccgagctcaaggtgcggctgcacgagctcatcaccgaggagcaggtcttcgatctttctgttgtgaagccttcagattttgttcactatggcttgagttgtttggagaggttagctgatcaaggtgataactgcgcgaaagccgctcgtgaaaaaatgaggattgtggttgctggaggtgatggcacagttggttggatgcttggttgtctgtcagatctttataagatgaaaagggaaccggttccacccacaggaattattccactcggtacaggaaatgatcttgctagatcatttggatggggtggctcttttccctttggttggcgctcagctgtaaagcgttatctcagcaaggctgccacgggtcccatttgccgtcttgacagttggcaaactgtaattcagatgccagaaggagaaataaaggagttgccatatgcacttaagaaagtggaacctgcagatcggctggagatcagccaggagaatggcagtgagttacccgaaaaggcttcttgctataaaggagtattctacaactaccttagcattgggatggatgctcaggtcgcatatggcttccaccatcttcgtgatgaaaagccgtatcttgcacaaggaccagttgcaaataagttgatttatgctggatatagctgcactcaggggtggttctgtacaccttgtactgcaagtcctcagctaagggggcttaagaacattttgcgactttacattaaaaaggtcaattgctctgagtgggagcaagttcaaatgccttcaagtgttagatccctagttgtcttaaatttatacaactatggcagtggaaggcatccatggggtgatcttaaacctgaatatcttgaaaagaggggttttgtagaagctcattcagatgatggcttgcttgaaatatttggactgaaagaaggttggcatgcttcatttgttatggctgagcttataaaggcaaagcacattgcccaggctgcggctataaagttcgaaatgaggggaggcgagtggaatcgagcatatgttcaaatggatggagagccatggaaacaaccacttattcaggaactgtcaacgattctggaaataaacaaagttccgtatcactctctcatgatcaatggggatcaatgattttttttcctttgccaatcagggttgcattcttagatcgttagaattgtgtacagttcaggagcagcgagtactagattcttagaactgggttcgctgcagcaggggaatgcatgatcgttggcctttatcatgccatggtcaagtcatggcaagagcatgatatggcaccatgcattgttgtattgtatcatatgtgttgttgtatcctaatttcttttgaatggaaagaaacagagcttaatttcttttgcattgtaacgttttgtgtcaaaatgctgaagaataacctgatgaagaacattttgactgtaaaatcagacagtttgccgtgagcgctgtcctagagcaaannnnnnnnnnnnnnnnnnnnnnnnnnnn

SEQ ID NO: 10921 - DNA, 1648 bp, Setaria italica
  Peptide Sequence Number=SeqID_76895
tagtgattgtaattgattcttgtcactagatccgcaagatggggaaaatgacccacattcagcttgaaagaaaggatcctcaggagaaatacgacacactcatcaaattgcttctcaatccgatcgatttccatctcgcatcgtgtcctcacagctggagcagtcccaccagtactgagagtctgttctacgttgtgaaaatcgagagctaatccaagaatagtcttaactcgactggcaatgagggcccacaatttatcagaggccacaaagcattgtcgctgaatagatgaaagatatgcctcatgaacttccataacttcatccaacgtagtagcagatgccatgccatcacaaagttcggtccatgcactatgatatactcggtccatgacgtactgatggaacgcttcgacaaaatggaggagcttctgtgctacaatcaagtgttgtttgaaattatgtgcagttctgcctctggccttccacatccactttcgggtttcatccaaaacaaactttgcccgcttgaccttcagtaagaatcccataacctgattatacttcttcagtgcctctgtattaacaattaaatcaagaggccaagacaccttatatgtaaaattaagcatgtcaagagcatcgatgccaaaaccaagtgcacggccttttttggaagttgatgcaccttcctcaccattgtgtgttgctaatgaaactactaaagaatctggtgctgtcagaagcattttgtcagctgagtttcttaaggattcctgcaacaaattattcaactcaaaatcatcatcccaggaactccctcgatcaagcttatcaaaaattgttatcagaaactgctgcagcaggtcacctgatcctagcaaataaatagcacgtaacacaaacagttcatccattaatctccattcacccattagcttgaacaggatttgcttgccaatgtgatccacctgtctctttatgcattgggaaaggcattcttggatgatactcactggctgaagaggatctttcaaactcatattctgaataaacttcagaactctcgacgctaatgtactatctttctgcattggtaagatctccgacagagggacatttcttttgcacaaggaagaagagttggaaatgcataaaggtcctccaaggtccttctgtcatcttcttggcggacatattccaaatcatcaaaatggaaaccaaacttataatcagtgccatctagtctggggaaagaggttgtaggttgtgtatcaccactggtgctagttcctacagaatgtccatcagcaaatatagctcttcgcatgtctccgtcattcaatggagggagatgaaagctttcagagatattcagttcactccaagaatttggattgctcagtagcacttctctgcaagcagtgatggctggattttcataacaagataaagtggaacacccttctattgcattggaagatgcatcttgtgggtcaccagggacaaatattggcttatccataacagtgtttctggatatgttgttctccataccatcatatttcctcctgatgtagcatgttaaggagctttaccaattcttctcagtgctgttctctgcacatatatcctttgcttcatgtac

SEQ ID NO: 10922 - DNA, 404 bp, Setaria italica
  Peptide Sequence Number=SeqID_76896
ggggggggttgttggcgcgcggcgccgggtcgcccttgtcggaccggaaggagccccccggcaccagcggcgccgtcggccggttgccggactccaggtcgaccgggtggatcctctggtgatccgccatggccaagctccaaaccgtccgcctcttgtccgcggcagaagcaaaggggaagcaagatcacgctagccccacctccactcgcccagcctttgcttgctgcctggtctgtgcgcgcgtgcgtgtgctcccacctccgttccttgccgcagagacccgcgcggctctctttctatataggaggcggcgaggagcggcgcggtactaggcgtcacgccactacggggcgaaggcgagggcgaggaggtggaaaggcggttgacttgcgagggagagg

SEQ ID NO: 10923 - DNA, 637 bp, Setaria italica
  misc_feature (148)..(148): n is a, c, g, or t
  Peptide Sequence Number=SeqID_76897
cttcacaataattacagtacagttctagattgatctgtctagggcccatttaagcccctctgtacttccaataagaatgcatcaaatgagataaccagagtgacagccaacaaggtccatcttgaataaacaactgtaaacatggtcntaaaggcgtgctgaccattgtaaattgcatccatcttgatggtagataacaggttcctgactgaccagtcccctagtgctcgaaaagaaataatgtcagagtcagggaaacatttaatcatgtgtctgtttcatcttgcaagagtatctcatagatgtcagtgcggatgtttaattccttgtcacgcatcacttcctggagatctgataactctttcagtgtaagaatcgagctcaacttttggaacccgtcaagccataaccttttagaccatgggcaggcatgtatagctctgaagaatacacgtcgtgctgcagaagcattgcacgctttctctgcctcataagctagataacagcgccacaacagaacagatttctgcaacttatcatcagctagagctctctcaaacagactgtgtattctattgtcagatcctgctttactccattcaaaggacaaagcaaagagcaaggtgatgatggaagg

SEQ ID NO: 10924 - DNA, 1809 bp, Setaria italica
  Peptide Sequence Number=SeqID_76898
caaccgaaccaggataagagacagattaaccagatgcaggctgacctatactgggttataaggcaggcacacgcacataatgatccatcgcatttcccacatcaatgtacacatgtacatgaagcagcaatttatccaggtagcgcgcatgaacagcaatggctagagacaagtgtccagaaactcactcacgaatcaactgtcatcaaatgaagagccaatgcagcacgcacaaacagtcaacacaacattactgaagcagtgtagatgatccaactggcataatccttggggaatacctaatgtccactttgtgttgccacttctcttatttttgtgccacccaagcataacagtctctaatcttttgactttgcagcgtaactttgagggtcttaacaaaaagaccatatgtgtatgagcattgagcacgattgtctccccttcctttccataatatgtcaggtggagctacacactagaagcctttctttgaacagtcgagtaaacttcaaggcccccctaacctgaggatgtagttgctctacaaatagttaacgaaaggatcagtcgcttttggtgttttagttttgcaggtcttccatagtgtcaaaacttatgctggctgtgctatggtttcttcacaataattacagtacagttctagattgatcttgtctagggcccatttaagccccttctgtacttccaataagaatgcatcaaatgagataaccagagtgacagccaacaaggtccatcttgaataaacaactagtaaacatggtcataaaggcgtgctgaccattgtaaattgcatccatcttgatggtagataacaggttcctgactgaccagtcccctagtgctcgaaaagaataatgtcagagtctgcaatgtaaaactaatctctcttaaaaccttggaagcaaacttgcacacaatgtcatttgaggcagtcccggaattcttgatacaaaccagggaaacatttaatcatgtgtctgtttcatcttgcaagagtatctcatagatgtcagtgcggatgtttaattccttgtcacgcatcacttcctggagatctgataactctttcagtgtaagaatcgagctcaacttttggaacccgtcaagccataaccttttagaccatgggcaggcatgtatagctctgaagaatacacgtcgtgctgcagaagcattgcacgctttctctgcctcataagctagataacagcgccacaacagaacagatttctgcaacttatcatcagctagagctctctcaaacagactgtgtattctattgtcagatcctgctttactccattcaaaggacaaagcaaagagcaaggtgatgatggaagggtccctttgactacatttgtcgagtgtgagacggagattgttcgatacactgtaaagatagctcagggttaacatggccgaatatgattttggattgtacgggtatttgtgcactccttgtgacacgcttggccagatccttgagagactcaatcgtttaagatttttctgaagcaatttgatgtagtacacccacaaatcctcaaactccgagttatgactgctatctgaaagtgccataggaaagatctcctctatcacttcaagacctgaagaataacccgatgtcatactttcaaacaaagaagctgagcatatcagagcaacagattcttcttttataccaccagaagcaaatccagatcgtaagcttctaatctgctctttgaacccttgtcgggccctcaagacctgaggccttgaaatagggccaatgaaagg

SEQ ID NO: 10925 - DNA, 373 bp, Setaria italica
  Peptide Sequence Number=SeqID_76899
gattaagctgagttacccttgcatctacctgattgtcattcatcttggtactgccttcttatggcacggaaaaggggcacgaacacatcggcaatcactctgccacacctctccatctctcactcggcgagaggggcaaagcaagccgcaaagatctcccctccttttcccagtcactgtgccgcccgtgccctcccgtagtcccgtccctccaataatccatccacccccaccccgctgcggcggcgtctgttcctccggtggcggcgatgtgcggcggcgccatcctctccggcttcatccgcccgtccggggcgcggccgcggcggccaagaagcagcagcagcagcagccgcgccgggtcacggccgta

SEQ ID NO: 10926 - DNA, 477 bp, Setaria italica
  Peptide Sequence Number=SeqID_76900
taccaaagaatagaaatagttcaatcaggtagatgcaagggtaactcagcttaatcaatccaaagttctaactggagcgatacaaccttgaccttatctacgaccaccataacaaataaactcgcttagagaggctttataatgttcattcatggtacttccttcttatggcacggaaaaggggcacgaacacatcggcaatcactctgccacattaaccaattcatactctactagagaaaggttgttgtcctccttcactgtgaagctggcaggttctgtagcctcaatccgcccccatttgtcaactgcaagcctcattgatcctttgaacatgtcgattttagcgttgcgcaagatcaccgtggcatcgggcttcagcaaatcaacttggtcgttgcgggcggtgaagacgatggcgccggtgtcatccccgacgaggcactcggcgatgcgcggcgcgcgggaggatgcggg

SEQ ID NO: 10927 - DNA, 416 bp, Setaria italica
  Peptide Sequence Number=SeqID_76901
gtggggaagtagagagaggcgatgatgatgacaccgcggctcctgccggctccgcagcgacgacttcatttcaccgtcgtcgccctcctccttccggcggccggagcccccaaccagcccagatctggcgcgcacgcccagccgccgctcccaaagcggcctcctttggtcaccccctcgagggtcgaggcgtagcggcagtcgcgaccgtcccacgcgccgcgaaccgcgagcgcccaagtgcgggggagggcaagcggtgcgacagcaggggcggcgagcaagcggtttgggtggagattggagaaggggaggctgcaggggcggggctggtggggatgcggcaggggtggcgagagtcggggatcgttcggcgtggacggcgcggagggaagctgacgccggattggacggag

SEQ ID NO: 10928 - DNA, 333 bp, Setaria italica
  Peptide Sequence Number=SeqID_76902
caaagcctacaaaccacaaattagcaattgtactcactgattagcaccaccaacagctgaaattgtttaaatcgatgaacaatcggcattggacaaaataaatcattgtccatattgccatgaaaatagacaagtaatggaagacagagaatatacaaaggcaatggattaagtacacaccttggtccttgtacttctcatagagctgggccagctcagtgtagttggagttagttaatccactgaaataatcagtcacagtacaataattagcagtgtgcagaataatgtcttctatattgccaaccaaacatagatgtctacatcagacaa

SEQ ID NO: 10929 - DNA, 790 bp, Setaria italica
  Peptide Sequence Number=SeqID_76903
gattgttgttttgtttcagattaatacatataaaggagaaaggaaaaatactgtgggcaaatttaccttgtcaaaaattggatactcagccttgaagcgagtgcaagcaaactggacgatctcctcattagtgccaggttcttgcccaccgaactggttgcatggggaaagcaaggatctcaaaacctgaactcacatcaaatcgacaacagcatttagcacataaataaacatgatttaacatgacagaattgatctatatgagcaacagtgcatgcacactccatgattaaggaataacaaggcacaagattagatacttaccttggtccttgtacttctcatagagctgggccagctcagtgtagttggagttagttaatccactgaaataatcagtcacagtacaataattagcagtgtgcagaataatgtcttctatattgccaaccaaacatagatgtctacatcagacaatgaaatgagtaagcacagacaaacattattttacagaatatattaagtaggcacaaatgattccaagcacatcaacgaccttattactgatacaattttgcaatggcccaaacaattacaatagtaccatcccaagttctagttactatgtgctagctaacttgaacataccagagcaaggcgcgttaggaggacaaggttatgcagatgattcataccactgggatgcgacgttgacaatgaggagaaccttccccttgtaggtgctgaggtcaacatccttcccgcttgcatcctgcacacaacgcacagg

SEQ ID NO: 10930 - DNA, 737 bp, Setaria italica
  Peptide Sequence Number=SeqID_76904
ttttagactactacttgaattctacaacaagagatttcatgcattgcatcgaatttattagatggcatttaccacaagacagggcaggcagaggacagtaaaaacatctcagttctaagtacagctttattacaacattactaaagcatcaggttcccaatgcaatgcagcactgcagctagtggctccagtttacaaggtttaagaacctccaagtagcttcttgatgtccttctcgatgctgagtggggaagtggtcggtgcgtaccgctccacaacacgcccctctttgtcaaccaagaacttggagaagttccacttgatattctcaccaaagagactgcctttgctggacttcaggaacttgtagatgggtgcagtgttgtcaccattgacatcaaccttgtcaaaaattggatactcagccttgaagcgagtgcaagcaaactggacgatctcctcattagtgccaggttcttgcccaccgaactggttgcatgggaaagcaaggatctcaaaaccttggtccttatatttctcatacaattggctcagctctgtgtagttggaattggtcaagccgcactgggatgcaacattaacgatgagcaggaccttccccttgtaggtgctcaggtccacatctttcccgctagcatccttgacggtgaagtcgtggacggaggaggcggaggagcaaagggtgacgacggcggcagcgcggaggcgagcggcgg

SEQ ID NO: 10931 - DNA, 252 bp, Setaria italica
  Peptide Sequence Number=SeqID_76905
tgctgctgcttaccaatttcctaggatcaacagtttccacacatgtttaaagtaccattgtggacctgtggtattctctttgttgccatgttgcatgggaacaagctaagctaccctacttttcttcactcctatattgcagacagcaccatatttggtgtgttacagcttttgttgtgttcatccaccaaactttgaaatactcacttgcaactttttgtccatttaaacaatagcactgacataaatata

SEQ ID NO: 10932 - DNA, 228 bp, Setaria italica
  Peptide Sequence Number=SeqID_76906
tagacttgtggaccagccagtgctttgttctatatatgatggtgcatggctgatctgcacctgcattgaaattgaagactcaatgtagtagaattactatttctagttattgaggcactaattctgtactcaccattcaccttggcaacttctgcagcaatgtcaaatgctgattttccagagccaactatcgtgacatgcttccccttaacaaaatgagcaacatta

SEQ ID NO: 10933 - DNA, 307 bp, Setaria italica
  Peptide Sequence Number=SeqID_76907
tcgtcggtccttccttctcgcccgctcttcgccgcccactccggagccctgcccccgtccctgcgccgcgccggcccggccatgcccctcgccgcccgcgcacgccgcggcttaagctcctccaccgccgccgccccgcccgccgaggacgacgacttcgccacagctgccgacctccggttcgagccgccgctccaggtcgtgaagtacccggaccccatcctgcgcgcgcgcaacaagcgcatcaacactttcgacaccaacctccgtgccctggccgacgagatgttcgacgttatgtacaaga

SEQ ID NO: 10934 - DNA, 1026 bp, Setaria italica
  Peptide Sequence Number=SeqID_76908
ttctaagtattgtaagggtttgttagtctagtactacttggtaaatttttgtctaaattactattctattctaagtcttgtagtctccgacctccggttcgagccgccgctccaggtcgtgaagtacccggaccccatcctgcgcgcgcgcacaagcgcatcaacactttcgacaccaacctccgtgccctggccgacgagatgttcgacgttatgtacaagactgatggcattggtctctcagcaccacaagtcggagtgaatgtgcagcttatggtattcaatccagctggagtgaagggggaaggagaggaaattgttcttgtgaacccagtggtatacaagtctgcgaaacgattgcttgtgtttgaagaaggctgcttatcgtttcctggaatatatgccaatgtggtgagaccagaaagtgtgaaaattgaagctcaagacgttacaggggcaaaaatcaaagtaaaattatctggcctacctgcaagagttttccagcatgagtttgaccatttgctggggattcttttctttgatagaatgacaatggatgttcttgaaaccgtacgcgatgaactgaagaacctagagaagaaatatgaggaaacaacaggactaacggttcctgaaactgttgacaactacaagggggcaaaggatgtctttagtttttcaagatgaagggttgtagcagacactggaaattttgcaaatacatcatcaagctgagctttagcctgaagagtttctgggacagctcacatacaaactctactttagttgcagtgttggcagccttgttatgtctaatttctgcattatcaattaaactagaaacagcaaattcactagttacaaatgaggttttattttcaatgctcgtgtctgtattaaatgttttgttagcatatatatgactcttaggataaggagttgtagagccagttttccctgaaattatttatgcaatgagttttttgtctcttgaatttcttattaataaacatactgcagagataa

SEQ ID NO: 10935 - DNA, 2142 bp, Setaria italica
  Peptide Sequence Number=SeqID_76909
taacttagccgtccccgccgctgccgccacggcccctcgtcagcgacgacgaccgggggcctctgcgcgagccgccgtgacgccctcttcttcctcaggctccggccgccggacccggaccagccgagcgcggcgcgcgcgacgctgtcgtttgcaacctccctcgcgctgcgctgcggtttgacgggctgcttgttgaggtaggcgaggttggggaggaggcccgtgacggcccggcgcagcgcgtcgtcgccgacgttggcctgcaccgggttgcccacgaggttgagcgccaggagggagtggtagttggccaccagctggcccagcgccttggccgtcgtcaccttgttgaagctcaggtccagcaccgccagcttcagcagccggtggagcccctccacgtcgctgatcttgttgcccgccaagtacagctcccggatcgccgtgcagttcgacagcccgtgaccaatgcgggagatccggttgtagctgaggttcagcacgcgcagcttcgtcagctcccggagcccctcgatgtttgcaatcttgttcctcgacagatcgagggagtgcaggcccttcggcagcgatcctggggagatatgaacgatgaggttgctggagaggttgacggctcggaggctcgagaacggcgcgatcatcggcatgaccttgaggcccatcccggatatatgcgccaccgacgagaaggcgttcagggactgcacgatggtgttggcctggacgacctcgtcggcagccgcgcaacgcttgggcttgccgtggttcttccccgaagacgactccccgagttcgaggggacgcgggcgcgctgcgcacccgccgcgctcgttgtcgtcatcaacctcgtcgtcgcctccgtcgtagtcttcgtcctcctcggcgatgcggaacggaggcggctcgttctcgatgctgcacacccaggcgctgacgcggtcgtggagggagttctccgcgcagaaggcgacccactggttcgggacggacgccggcggcgagtcgtcgaccatgaccttcttgttcttgcggtcctcttcgagcgtgtccgaggtgtacccgccgtggcggcccggcgagcgcgcctcgacagggcgctccgaccgcggccggtgcaggttccggtggctccagaggaagagccgccaccagagcttccgactgcgcgagggcagcacctggctcgacgaccgcttcttgagcatgacgcggtcggcggtgtacgacgtcttcaccgacaccgggctcgcctccggcgcgccgtgcggagtcgcccacgtgtccgcgacgagaccgcccatcagattccccagatcgccataggagcgcgaccgcgccggcatctctggcgcttcgcgcgggccgggccgcttggtctcgatgttggagcaagaccgcttcagcttgggcgacgggtccgccggctcctccgccgcgtcgcccgcgatcacctcctccgtgccgtcgccgtcgggcttcttgggcgcgtggaagtcgaagtcgaaatctgatagctcacccccctcaaccgactccttggagacgaattgatcacctcctccttcgcgggacgccacgggcaccgtgtccgcggcggctgtggcggcgagcttgacgtcgttgggcgcggccttcttctcgaattccccggcgccggcagcgaccggcgagtcgatgaactcgaccggcttcaccttggggcactcgttgccgctggccttcttggcgtcggcgaccttgcggttcttcttcttcctgccggcggcgagcaggttggggaagcagctcatcttggccattccttgttgcgcgtctgtcgcggcgttcacggacggaatcagcagcagtacttaaccgttatctacgggagaagccctccgcagcagtgacgcgatgatcgcgaggaggacgacgacgacggaggaagagggcaagctcgcatgctcctcgctcaggctgcgaggcggcgccggcacggggaaggccagagtgaacgggggagagccggcggcgcgagagccgtcttggcagctagccctttcggttcgccaacggccggagcagggcgagaacgtcgaggcgcctcctgtttgttagctggcggttcgttacggggcg

SEQ ID NO: 10936 - DNA, 436 bp, Setaria italica
  Peptide Sequence Number=SeqID_76910
gccaagcaggacaagtgtcagaggagttccttttgcagctgggctgataagagcatgcagatcattgacccacttgaggagacggaaaacttttcgagctatcgtggttgatttatcgacgtcctgtgcggtgccagcctgcccgttgcttatgaactttgatccatactgaattgccctgcagatcttgtccctagcctcggctttgttcaagtacagaacaacgaggccgagctcagctcgtgtggcatctaacgagcccatcttcctgtcctaagtgacaggaggacgcacaaattccattcagaaaagcccaggcagtaagtacaatagaagacgctaatatcttttacttgttttgcttattctgtttctgaggcggagtttctcaatgaatgaaataaaaaaaacagaacaagccagtgtggaagtgtgc

SEQ ID NO: 10937 - DNA, 1140 bp, Setaria italica
  Peptide Sequence Number=SeqID_76911
tttttaggaagtagacccacttcaccgctgcaaacatcatcgtatgcttgtcacaacaatgttgcacgtaaaaaattcctaccgcaacatctactgatgcagatctgatgactctaagaatcgattgagataaaggtaaaaatcaagcatttgacatctagtaaatctgattctgttttctaaaaataaggcaggagcgctgccaatccatccatgtattctatactcgcgcatataattatggtacgatccaggctgacgcacagctcaagttccagcgatgactccaatttggttgcgacacccctcaaaccttgactttggccacaggagcacgggaaggaagttgctgatagcaggagatgagcgaggtgatgaatccgaaagctcctgtcactctgggagtgatcttcttaggtgctagctgaagaagcccgatggccacgaccacgtccatggcggccttcaccacggccaggagcctttcatctgactgcttcattttattctggtactgttcattctcgtacttatctgtgtccctcagctctcttgcaagcttcctcattgatttcgatagcctcttaagctctccaagctcaactagacttgcacagactgaagaagccatccaacagtatagggatatcctgccaacccggtccgtagcctccttgttcttgattatccctgttcgtcctaaccacacaaattggtccaggaacaagaacgtcgaaagcagagcgtttttggacttgccaagcaggacaagtgtcagaggagttccttttgcagctgggctgataagagcatgcagatcattgacccacttgaggagacggaaaacttttcgagctatcgtggttgatttatcgacgtcctgtgcggtgccagcctgcccgttgcttatgaactttgatccatactgaattgccctgcagatcttgtccctagcctcggctttgttcaagtacagaacaacgaggccgagctcagctcgtgtggcatctaacgagcccatcttccgcttgccggtgatggcacagggagaatggttgagatatgagaccaagcgaaggggtggatagaggagggacggctacctggtgttagccgagggaccttaaggaaaggaagtcc

SEQ ID NO: 10938 - DNA, 609 bp, Setaria italica
  Peptide Sequence Number=SeqID_76912
ctccagaacattttttaaggaaaagactagcagcatccaaattgtccgcggcgctgagctttctaacaagtgcatctgctgtgtgagcctgttgccgtttgtccagtctatccaacatggataccgcaatgcttatcttctccttcctgcaatattcaaaagctaaagtgacacgagttacatcacatggaaccaaatgtttatcaagcatgctctcatataatgcccgtgcttcctctagtctggactccttgcataacccacttattagggccccgtaagttatagagtcaggaaggcatccatgttgaaccattctctcaaacattctcagagccgaggttgatttcccaactttacagtatccggcaatcattgaagtatacgtttgtttggttggcactaatcctatagcatggcatttctcaaacagcttctgactttcttccatttgcctttgctggcaatatgcagcaatgatggtggtgtatgtgcctatatccggatggcaaccatttttctgccatcctgttgaacaaccgtagggcattactattgtattgttggtcccttgttttgttcttagtttgttctttcttagttttattt

SEQ ID NO: 10939 - DNA, 1922 bp, Setaria italica
  Peptide Sequence Number=SeqID_76913
agggtgtgttgttccagtccagtgtaccgagttttaaatctaggcttcaagatgagctttcaccagccttgacaaatggtaaggttcagattgcagagtatgctagtaagttcctcaagggcagttctggtaatagaagcccagtggaacgtcacattctagctttgccagcaatggatgagacgaattccacagaacaaaataccacatcagctcagactgctgcagatataagcaggaaatttgaccaagaagcatcttatcaagagctaactaaaatgattatttcacatggctatcccttgtcaattgtcgaacatgaagaaatgaaaaggtttgcaaagagcctgaaccctgcatttaacatggcttcgagcattgatatagaagagtattcaactcttttatttcagaaagaaaagactgatctaaaggaaaagattgctcttttatcccatcgggtttccttatcagcaagtgtgtgggctcctcatggagctgaggcctcagtgaagtatctctgtctggcagtgcattttattgattctgaatggaaacttcaaaggaaaatcatcaaatttggtgtgttttggtcctcacctactagtttagaaaggatgatacattttaaggaggcctgcgtactggattctgatagtggaccatttaatgtcatacaggaagctttaagagattggaatcttgatcagaagcatttcagcttgacatctgtcaatgcaattagaagggatgagggtacctcaaagctgatggacttgctcatccaaagaaaatgccttcctattagaggtgaactgtacaatgttgcttgtgtggatgatgtgcttaacagcattgtttcaaaagggcaaccagtgcttcaccatgttggtgacatactagagaaatttattcaggtacaaatgtcctcatcgctgactcggcagcaacttttagaagttgttacacatattggattgaagtgcccacaggaggatgcaaaatggtggcataaaatttacttcaggcttgaagtttttctgcatttcaagaaggcattcccctcggaagaattgttatctgcagaagatactaaaactgtggaatctgtttgcaggatactgagggctttttatcgtgctgttgaagtaatttctggtcctgtttgccccacagcaaatatatacttcaatgaactatggaaagttagaacaactttgcaagaagaagcatcctctgatcacactgaacttgctaacatggtttgggtgatgcaagaagcgttcaatgagtattggcaaagttcatacgtgtggctgtcaatacctgttgttcttgatccgagattcaaaattacttttattgagttccgtctaaagcgagcttttggtactgatgcagagaagtatgtatctgccgtgcgtgatgcaataagggagctgttccatgaatattgtggtccttcagagaagtcggggcttgacacatcaactcgtgaagctcgtattgttgagtttgatggatttgatagtgattcattggaagattgggatgagcatcttaatgcacagacaaggagccaactaatgacagaacttgacaactaccttgaagatggtcttgtcccgagaaaggatgatttcgatattctgaactggtggatgaataattctacaaagtatccaactctgtcaattatggcacgtgatgtcctggcaatgccagcttctgctgctaattgtgaagctgcgttgagcagtgagggaaatatgattcataagcaatggagcacattaaatatcaaaacaattgaggctcttgtatgtactcgagattggattaaatagaaagaagattacaagcagttcataaccatggtgcttctaactcaggaacctaggatggtatcagaaaagagtgca

SEQ ID NO: 10940 - DNA, 567 bp, Setaria italica
  Peptide Sequence Number=SeqID_76914
tgtcgtattggcggttggttaattgaggggttggaagaggccgcgagcttcccaggggtgggtgtggcggaggaagcggcagggcagggagccgatgtcatcgtccttgacgtcgggggaatgtcatgtggtggatgtgcagcaagtgttaaacgcattctggagaatgagccccaggtgcgatcagcaactgttaaccttgccactgagatggcagtcgtctgggcagtgccggaagatagggatgttcaggactggaaggaacagttgggtgagaagcttgctagtcagttgacgacatgtggctataaatccaatcttcgagatgcttcaaagatcagctcacaggcagtttttgaaagaaagatgcatgagaaacttgagcagctgaaacaaagtggtagagaacttgttgtatcatgggcattatgtgccgtttgccttctgggacacatttcccacctctttggagttaatgtgccattgatgcacttcattcattccactggatttcatttgtctctgtcaatatttacatttgtcggtcctggtcgaagactaatactt

SEQ ID NO: 10941 - DNA, 2045 bp, Setaria italica
  Peptide Sequence Number=SeqID_76915
ccgcaaggtcgatgctgccgcatccaagctacgctcggaagccagcgctgtgatcgaccgcggtgttgctgagtccaatcagaacgatgtgtggtgcgggcttcaggtgtactacaatcttggggagttgaagccggcagtggaaggacttgttgggaagtacaaggcagcaggcgcaaagagtgtggctgtggctctggacatgaaggcgatttcaatggctgctgccagtggaggtggccctggaggagtgcagaggagtggtacaccgcagattggtggtagtaagaaggcagcagaggcactttgggataggatgaggcagtgcatggaggagctgcatcgggctgtcagcgctgcttggcagctgcaaactgtactcaccaagaagcgtgtgccattcacacaaatgctgttccttgaggaggtttggcaggagggtgagcctctgttaacagagagagtttgggatgcaattgtgaaggcctttgcaagtcaaatgaagtctacctttacggcttcaagctttgtgaaggaaatatttactcttgggtatccaagactgttttcaatggttgaaaaccttcttgagaggatttcaagagatactgatgtaaagggtacccttccagctctcactcctgaaggaaaagatcatatgatttcagccattgagatattccagacagcctttttggctctttgtcatagtcgtttatctgattatatcaatagtatatttccaatgtcaagtcgtggaactataccttcaaaggaccagatatcaagattagtttctcgcatacaggaggaaatcgaagtagtgagaactcacgggcatttgcttgttcttgttctacgggaaattggaaagatcttacttcttttagcacagagagctgaatatcagatctctactgggcctgaagcccgacaagttaccggctcagcgactccagcccaactcaaaaactttgctttgtgcctccaccttcaggaggttcacacacgcatttcgagcatcttgtcaacactccctaatgttgcttctgaagtgctttcaccatcccttggtgtcatctacggtgttgcttgtgattcagtgacctccctgttccaagcgatgcttgatcgactcgagtcatgcatcctgaaaatgcatgagcaggactttgcaggtcatggaatggatgcagcaatggacaacaatgcatcagcttacatggaggagcttcagaagtgtgccatccacttccgcagtgaattcttatcgaagcttttgccatcatcatcctctcgttccgaaaccatatgcaccatcatggttagaaggatggcctcaagagtcctcatatttttcataaggcatgcttctcttgtcaggccactttcagaagcggggaagttgagaatggcgcgggacatggctgagctggagcttgctgttggtcagaacctgtttccagtggagcagctgggagcaccataccgggcattacgagcattccggcctgtccttttcctggaaacatctcagcttgagaaatctccactccttcaagacttgccggctagcgttatcctccaccatctctattctcgaggacctgatgaattgcagtcacctttacagcgcaacaagctcacgccactgcagtactctctgtggcttgattcgcaaggtgaggaccagatttggaaaggggtgaaggcgaccctggacgactacgagatgagggtcaggtctagaggtgacaaggagttcagtccggtgtattctctcatgcttcagattggatctgcattgtctcaggccacgatctaacatgtattcggttcactcatatgcatttgtaccatcttgtagcattgattcctggagggatcgggggtgagattttgcatagtttatacacatgaatgaaatagcaattgtatttgtttccggaaataattcttagagtacagagtgtcttgtagttctggtagtttctgtatcttgctatctttggaactctgattcatatgaaatatcttgaagggtg

SEQ ID NO: 10942 - DNA, 691 bp, Setaria italica
  Peptide Sequence Number=SeqID_76916
agtactgaaagtagaccatagtttcagatctctcctatctccattcttcctatatatggctaacacttccacagcaagacatgcttaaaaatgttgtccaggactccaggttcaccttggagcaagtacctacaaagagtagcatgttttgtttgcctccttgccttggccacgttcctaactctagtgttcagtttttttcacaaaaaaaacccctctagtgttcagtttcgagtcacatatggacaatcatttaaaacccatactctaccgcttaaccaaaaattatgcctatcttttttccccttctcaacttgaggtatccaattggcaagttacacattctagaattacagccatccagtggcaaacattaaaattccaagttgtactgcccaaaagtctaaactgataggctgcaactgcaattcacctcccctaaatggtaaatcctagttccgattccttagtgatcacctattcacctattggctattgctaatcccagaagcaaacgttgatcaatctgagccaacaaaccttaggaatcaaatggtgatttggagagcacactgacagatttggaagaatttcgtaaaactggcatccagggccaaattcacagatacaattcaaatgaaccatctgtcagcaagaacaaaatcaaacgcgaaccatattctgttctttt

SEQ ID NO: 10943 - DNA, 326 bp, Setaria italica
  Peptide Sequence Number=SeqID_76917
gagggtttctggaggcgccgagaggacgaggaggaggacgacctttacttcgacgaccgggactcgtgcgggttcccctcgccgcaggtcagcagctgctccgcgtcggactcggagtccgagtacgccgaggccgacgacgtcgccattgatgagaagatggcgtgcccggccacgtcgcagcccgcgttccagtgttcaagctcggcggaacacgactgcaccgacgccggcgcgcctggcgccgcaggagacgggaagaagatggcaggcggtagcggcggatggcgattcggcggtggggcgcggcaaggttggggatggag

SEQ ID NO: 10944 - DNA, 969 bp, Setaria italica
  misc_feature (967)..(969): n is a, c, g, or t
  Peptide Sequence Number=SeqID_76918
actaacgacggaaggcctcgcccaacgtccccttccgcctcggcggcggcgggagcggcaaccccaaggaccgccgccccgccgccgatgaggaggaggaggaagaggcggagagcgctggtggctccggggcggtcacggggacgctgcttgctggagcgctactggttggggtcgtaggggggtttggggcggcagggtacgtgtacaaggaccagatcaacaccttcctcacgcagttctctgggttcattgatggttatggccctgctggatatgctctgttcgtacttgtatatgcaggattggaggttctcgcaattccagcaatacctttaaccatgtcagctggtctattatttggcagtgtcactggtacaattattgtttcagtcagtggaacactagctgcagcggtggccttccttattgctagatactttgccagagagcgaattctcaaattggttgaaggaaataagaagtttctagcaattgataaggcaattggtgaaaacggatttaaggttgtcactctgctacgtttgagtcccctattgcctttctcccttggtaactacctatatggcttgacttcagtgaagttcttgccttacgtcttgggcagttggttgggaatgcttccaggatcatgggcttatgtgagtgctggtgcattcgggcgagctataattcaagatgaatcggagattggtttgggaggaaatggccaactatggacacttggcgtagggttattatttacagccattgctgctgtttatgtaacaaggcttgcaaaggatgctgtaaaggagatcgacgagtagaattggtaggacattctagtagaaagggccctccgaatagtatactagcacattgtacatcactggcacctttggtgcaatctaatctaatagaaattcagaagacaaattttactagaaagggaaaaaaaaaaaannn

SEQ ID NO: 10945 - DNA, 2587 bp, Setaria italica
  Peptide Sequence Number=SeqID_76919
cccaaacgagaacatcgtttctgatctcttccccctcccttcgcacccacgcgagcgaaaccctagcctccaccgccacctcgccggaaacctagcgccgagcagcaggcggcggcgccggggagaggaggaggacgatgatgaacggccagaagaagcgcgggacgaagatcgagcccttccggcaccgcgtggagaccgaccccaagttcttcgacaagtcgtggcggaagctccacgacgccatccgcgagatctacaaccacaacgccagcggcctctccttcgaggagctctacaggactgcttataacatggttctgcacaaatttggtcctaagctctatgacaaactcatagaaaacatgaaagagcatcttgaagagatgcgtacatgtgtagaggctgctcaaggtggtttgttcctggaagagttggagagaaaatggaatgaccataacaaggcattgacaatgattagagacatcctgatgtacatggacaggacttacattcccactaataaaaagacacctgtctttgatcttggattggagctttggagagataccatagttaggtctccaatgattcaggggaggttgcttgacacacttcttgaactcatacatagagaaaggaccggtgaagtgattaatagatgcttgatgaggactacaactaaaatgttgatgaatctagggtcttctgtttatcaggatgattttgaaagaccatttcttgaggtgtctgctagtttctacagtggtgagtcgcagcaattcattgattgctattcttgtggtgactatctgaagcttgccgagaggcgcctcagtgaagaatcagagcgtgtttcacaatatatggatgtgaaaacaaatgaaaaaattactgctgttgtggtgaaagagatgctagcaaatcacatgcagaggttgattcttatggagaactcagggcttgtgaatatgcttgttgaagacaggtatgaagacctgacaaggatgtacactttatttaatcatgtacctgatgggctcacaacgattagatctgtgatgatgtctcacattaaggatactggaaagagtctggtaacagatccagagagactaaaggaccctgttgattttgtccagaggcttctaaatgagaaggataagtatgacaatatcatcaacgtgtcatttaacagtgacaagagtttcatgaatgctctgaattcctcatttgagcacttcatcaacttgaacaacagatcccctgagttcatatcactgtttgttgatgacaaactgcggaaaggggtgaaagaggccaatgaggaggatcttgagactgtcctggacaaggtgatgatgctgtttaggtacttgcaagaaaaggatctctttgagaagtattacaagcaacacttggcaaagcgtcttctttctggtaaggctacttctgatgattctgagaggagcatgcttgtgaagctgaagacagaatgtggataccagtttacctcgaagttggagggcatgttcactgatttgaagacctctcatgatactacgcaagggttttatgcgtctacctcagatctggcagattaccccacaatatctgtccagatactcaccactggttcatggccaacacagccctgcaacacctgcaacctgccccctgagatagttgctgtctctgagaggtttcgggcttattaccttggcacccacaatggcaggaggctcacatggcaaacaaacatggggaatgctgacatcaaagcaacatttggaaatggcagcaagcatgaattgaatgtctcaacttaccagatgtgcgttctcatgctgttcaactcatcagatgtcctgacttaccgtgaaatcgagcagtctacagcaataccagctgctgacctgaagcgatgcctccagtcactggctctcgtgaagggtaagcaagtcctgcggaaggagcccatgagcagggacattgctgatgacgacagcttctctgtgaatgacaagttcaccagcaagctgttcaaggtgaagattggcactgtggtggcacagaaggagacagaccctgagaagctggagacccgccagcgggtcgaggaggaccggaagccgcagattgaggcggccattgtgcggatcatgaagtcgaggcgggtcctggaccacaacagcatcatgacggaggtgacgaagcagctgcagccccgtttcctgcccaaccctgtggtgatcaagaagcggatcgagtccctcattgagcgtgagttcctggagcgggacaagacggacaggaagatgtaccgctatcttgcctagaaccacctcccttgcgccgcgcatatttcaattttatgctacccaccaatatcatataaacagaccttgatccatgtacttatgcaagaaggaattgggtctcttcccccccctgcaccccgtgacggttctagtttaaactggtttttgcggcgttcgtccaggtggtagctagttagcttctctatgtgacatgttgcgctggtttacatgttaatggtgatagatttaaatctcactgtatgttc

SEQ ID NO: 10946 - DNA, 266 bp, Setaria italica
  Peptide Sequence Number=SeqID_76920
tctcttggctaggagttacggaattatatgcacaaactgcgcatgttcctttttgttttgacgttctaacttttctttacattttgttagacagtatgtatgtcatacgtgtgtatgggatctgtgccgtgggctttaagcctgaccggccctagatatggttagttagagataggaggtcttgattggttctatttcaataaacctcaagatctcctcacccctatatatatgtaacctctatctctcaattaatcaatctaata

SEQ ID NO: 10947 - DNA, 615 bp, Setaria italica
  Peptide Sequence Number=SeqID_76921
taccttacttacaacgcgagccctggcggctcaactccgtcgcctcgctcccgctcaaccagcatgcatcgtcgtcgttcccgctgcgccttcacccgtggcccgtagtggtggtggcgccggccgtcgtcaacagccgcaatgaggttatctgcattgcacagatattctgaagaaaatagtcagacgggtaacaatcagagactagtttgtatttgagaaaccttgtttgtatttgagaacagttctgttcactgacttcaattggaatcatgcttactagactgaagattgcactacaaggtggtaatccccttgcccaatttcgatcagttaattcttccagcagcagaacaaatgcatcagagaaatacattcaggtggcttctgtcgataaccatgagtttggactttggttcatgggctttgtgtactacgagagtgctgtaaagaatctgcaggaagcacttcaggaggctcagagaatgcttgtgcttagtgatgtccatagattggaactagcatgtcttatacattatttaagttgtaatatactgtgtttcgactgttgttgttcagtctgtgacaacatgtgcatcctgccatgtttgctcc

SEQ ID NO: 10948 - DNA, 540 bp, Setaria italica
  Peptide Sequence Number=SeqID_76922
gacttcagaatgcacaggataaactctctgaactagaaaaggaagcaaaaactgaaggctgaaggttcatgccatgtggcttccacattggcttgcagtacgtgttgtgcgctgtcaggaagtagcatctgccaaatggcaggtccatgggaaacctgtgcttggtcctctgatgcaaaaggttgctgagaaatcgacatatgctcagcaattagtggagccacatcttcagaagacacaaaatgtgaggtcttttccggtgtcttatactaggctacactagtgttggaaaaggagcatccgacggctcagattacttgtatatactactaaaatgttaacctggtatagatgagtagtataggtggtataagtgtattatgggaaagaattttgaatggtttttgtaattagggcttggtcttgtttgtaaattagaatcacaatcatttcattagaatattagaatcatcacacgaagttcatttagaaattagaaattggaatcactctttttccaatcacctcttttcctctcac

SEQ ID NO: 10949 - DNA, 1070 bp, Setaria italica
  Peptide Sequence Number=SeqID_76923
tcaggaggaggaagaggagacctcgcagcttgagagtatcgtcagggagaggacggcacagatggcagcactgtaggcgaactagaacttctgcagaagttaaatgtggctgatgatgagtctgtgatgaaggcaaacacgaatgttgatatgcttgaaagcagattgagaggttgggtagtgatttggaagatcaggttagaaaaggagaattcatttagaagcccgggctactgacgcggaaaaaactggcatgaattcagccgcaagttggagcatgcagagaatattaatgttgagcagaggaagaaaattaaggacctcgatgacagacttcagaatgcacaggataaactctctgaactagaaaaggaagcaaaactgaaggctgaaggttcatgccatgtggcttccacattggcttgcagtacgtgttgtgcgctgtcaggaagtagcatctgccaaatggcaggtccatgggaaacctgtgcttggtcctctgatgcaaaggttgctgagaatcgacatatgctcagcaattagtggagccacatcttcagaagacacaaaatgtgaggtcttttccggtgtcttatactaggctacactagtgttggaaaaggagcatccgacggctcagattacttgtatatactactaaaatgttaacctggtatagatgagtagtataggtggtataagtgtattatgggaaagaattttgaatggtttttgtaattagggcttggtcttgtttgtaaattagaatcacaatcatttcattagaatattagaatcatcacacgaagttcatttagaaattagaaattggaatcactctttttccaatcacctcttttcctctcacgcgagccctggcggctcaactccgtcgcctcgctcccgctcaaccagcatgcatcgtcgtcgttcccgctgcgccttcacccgtggcccgtagtggtggtggcgccggccgtcgtcaacagccgcaatgaggtacccttcgatcactacttactctgttgactagcgtaaattaatcgtcgatcataatttcatgatcctgt

SEQ ID NO: 10950 - DNA, 705 bp, Setaria italica
  Peptide Sequence Number=SeqID_76924
aacattgatggctgttgatttggaggactgaaacatctcaatcttattttgtggtggcatgacaaaatttaagcatgaattgtagtgtattgatttaattcaataacaaccttgccagagtcactggggttctctgcatagatgaggtatagaggaggaagcagattggcatccaaacgcctgtatatgccatgacccagcttgtccatatgctccttgctaaaatccatataaaccagtcccccataaacctgtgccactcggtcctgaagtccagcaacaattccaagctctttctcagcatcaagaatcagattaggtctcaattcaacttttattaaatgcctgacatcatagaagtcaagaaggcagcttagagcagcacaaacaatagcgcttgaaccagatagcccagcctacagaacaaaattgtcaagataatatgtattaatctccaactcataaacatatcaacaaaatgttatagctaggacttatctacagtgcttcaggaaaacacagctaaaaatctttttatgttgccagttttcaaggataatgatatcttttcgccagctatcacacatagcaatatgaatagaagcagccaatatgcaatgggagcaaaaagaggcgaacaaaaggaagagaatttcgactagttacctgccgaggaatattagtatcgtaggataaggtgaaatt

SEQ ID NO: 10951 - DNA, 1255 bp, Setaria italica
  Peptide Sequence Number=SeqID_76925
gcaaggcatcccacatatcaaaacacataacctggcaaaccatacagttatattgttttgtttccttttacctccgaaacaataaaacagtagcttcaactcctcaacagctcatccatcgttccactagcaagttaacaagcttgtcagctcctcgtccgacagcgccgagggtgcaactatgatctgttgtaccacaaagccagcctcctggcaagccctgtggagaagctccacctgcgcttccccatctgggcacagcgcaaccaccgcgcccccactgcctgtgaacttggatgacgcgcccacggagcgtgccacctccaccatctttatgttcactgaaccaagcacatcatctccaaacatttctcttcgtagatcgaagttcctattcataagcctcgcaagctcagtataatccttctgcagcaaagccctgtggccatcaagcgctagctgcgctacttccttcatacgtgatattatgaactcgtcaccatcaaaccatctttgcctaacagtgctgtggaccttgccagagtcactggggttctctgcatagatgaggtatagaggaggaagcagattggcatccaaacgcctgtatatgccatgacccagcttgtccatatgctccttgctaaaatccatataaaccagtcccccataaacctgtgccactcggtcctgaagtccagcaacaattccaagctctttctcagcatcgagaatcagattaggtctcaattcaacttttattaaatgcctgacatcatagaagtcaagaaggcagcttagagcagcacaaacaatcgcgcttgaaccagatagcccagcctgccgaggaatattagtatcataggataaggtgaaattttcagcttttagactgatgttattttgaatacagtgattatagaaaactttacagatagccatcagcagccgaacacctccataatatccttcactttgcaaacgattcacgaggtgggggagggaggggaaggcgacgaggtcgtggtgcgggtgaggctggatgagcagctcggccgaagggcggaggcggacggtggcggagaagtcggcgatggcgaaggacagagccctgccgccgtatacgtcgctggggttgcccaggagccccacccgcgcgtacgcccgccgctccaacaccatctccgccgccgccatctcctcctcctctcgtgctaagcgggtagatcaaagattcagagcgagaagataaaca

SEQ ID NO: 10952 - DNA, 298 bp, Setaria italica
  misc_feature (19)..(19): n is a, c, g, or t
  misc_feature (29)..(29): n is a, c, g, or t
  Peptide Sequence Number=SeqID_76926
gtgttcttctagtggtgtngtcgtacacngccgccgccgctccatccatagctgtttcctcattggttgggtgtgctttgctgtcctggttttttggcttatcacaataagccgcagcttctgggaatgatatgtacatacggctacttacttttaggacttgccgcagcatgtgtatgtgggacgagatgcagatgaggactttatttacagtgcttctgacaagagtttcctgatctttatatgatgcgtgtatacttgcttcaatttcaacctgaggtttttctgaacaaaaaaa

SEQ ID NO: 10953 - DNA, 1013 bp, Setaria italica
  misc_feature (996)..(996): n is a, c, g, or t
  Peptide Sequence Number=SeqID_76927
ctcggcgcgccggcggaaggggaggacggggacgaggaggagctgctgggaggcgggctcatcgaggagctgcgaagggagaattccgtgaagaagcggctcgacatggacgaagccgagaggggaatggctgcaggggcggaggccaaggggaagaggagcaagaggaagaggcaggaggaggcgcccaaggagtcggcacgggagaagaaacgctctgaaaaggagaggagggcgcagcttgattcgatccacgccgagtcgcagaggttgctgcgagaaaccaggagtgcatcatttaggccaatcgtgcagccagtttgcaagcccatctcatcgctcctagagaagatccgccttcgtaagctggagattctaaagaaatcaagcactactactgaagataatgatgctgcttcggagccagccattgattctgctgtgcgtttggatgtgccccaggttaaagaagtgacaagagatgataaggatttgaggattgatggtgttgaggaacttggaacaaatggccatgagctggatcagtgtggtgttgctgaggatgaggatgatttgaattgtaaggagaaagatcttcataccaaagcttcagatgaggaagcttctgatagatcgcaagagaatcatgaggagaatactcagtcaagtgagaaacataatgattcagtagatcagactcaactgcccccttcttcaagccctgctaagaagagtacagatgatgaatcttcatcagaagatgaagaagaagaagataataataaagagaatatagaaccgagcactcaagataatgatgtaaatactcgtgaacacctccaacgagctattggaggagactcatgtccagataatgccatcctgaaagattttctagatgacgaagctgaggaagaggatgatagtgataatgacatgatgagatttaaggatgatgatgaggatgatggaagtgatgaaaatgaagtttttaangatctgatagcagctgg

SEQ ID NO: 10954 - DNA, 861 bp, Setaria italica
  misc_feature (764)..(764): n is a, c, g, or t
  Peptide Sequence Number=SeqID_76928
agtaggacgtcccaggaaggagttaaaacctggggagaagccaaaacctagggccgcccaaggaaagacaaggttgttcatgatgtagttatctcaaaagggagccacactgacccattacagaatgagggaatttcttctgtcttggcacctcatgcagaaggtgcctcttgtgcaagaacagttactttggaaagagttatagaaagtgtttctgaagctccagaaccatcgatagactctttagatctcataattcagaaaataatgctgttagacattaacaaattggatacgactcgagtagctgaaccacatggtgctcttgtcccttataaaagagaaatttgtgcaattattccgtttgagggaaatgtgaaaagaaaacgttctcgggccaaggtggaccttgatccagtaaccactttgatgtggaagttactaatgggaccagatatgagtgatggtgcagaagcgatggacaaggataaagagaagtggctggatgaagaaaggaaaatattccgaggacgtgttgattcatttattgcccgcatgcatcttgttcaaggagataggcgtttctctccttggaaaggatcagttgtggattcagtagtgggggttttccttactcagaatgtttcggatcatctttccagctctgcctttatggctctttctgcaaaatttcctgcaaagccagaagtctctgaaaaacctcaatttcagaagataatggttgctgctcgagtttttttggngatgctaccaaattgcaaggcgaagtccttgttgaagaggcaagcaccacagcaggctccttaatcacagcagaagaaaaggttggaaagcaatagt

SEQ ID NO: 10955 - DNA, 410 bp, Setaria italica
  Peptide Sequence Number=SeqID_76929
actactctgaagtccttatctctggtcaagtacagaagcagaactatacccatctcagttcctcctttcttctctgtatcttgaggtgcccatgccaaaaaaatcttcatcctgataaggcgctgctccagcagaacagtgtaacttctgagcacaggtggtgctgcctgtatcagttcaacatctaggactgatgtttggtggattcaatttggatttgtcctgtgtgttggttctgaacttctgatccatttggattctagattgttttgtgcatcagtatgagcttgcacatgttacattgatcagtgctcctcttaaggcgtgtgtacattcgtagtcatgttgtgctacatgtcctaggtctcaactctcaaggtagtcaggctgcttgccaaggggcagaacga

SEQ ID NO: 10956 - DNA, 432 bp, Setaria italica
  Peptide Sequence Number=SeqID_76930
ctgggagagtgggagcgttgcaatccttggtcgcagcgctggtgagtgaggcagccaaatcgaacgagaggatggatcttgcaacacatgaggcctctgttctcctgtccagaataaagcagcagcctgtttcgatgcatgtttcaggtgaacatgctcctaggctgcagtaggccagtagctacaccattattgcattttgcgcaggcaatagtgattattaacaactataagtagcagactagcagtagttggcaacaagagaactatggaatcgatgtgatgtgattctgttctagatgtgcattttcgtagcttgggatcgaaatccttttgcaccgcatttgagttccaaaagcacttgttaaacatgtatttcaacgatctaatcaccacggcccacagctacgaagaaattctttgtataattta

SEQ ID NO: 10957 - DNA, 1830 bp, Setaria italica
  misc_feature (10)..(10): n is a, c, g, or t
  misc_feature (16)..(16): n is a, c, g, or t
  Peptide Sequence Number=SeqID_76931
aacccatttntgtcanctttgacatgattatctgaaggcatatcatcatcatcttcgtccatatacacaccatcatcttctgtcttgcgtgcttcttgattcaactgtagtccccacacaaactcttccatctctgtgataacaaccttgttttgctgtgaatctccttccgtggcatctgtatcctcttggcccttggttgcagtagccagttcaactacggccagaggaccagcagcctcttcctccttcctcagggctaactttcttgcttgctccagagatttctggagatcttcgtagtcatcaccgaaaacaagttcttcttcttcagcgggtttagcaggcataattttctctggacgcaatgctctcgatgcctcttcagcctttgcaatggcagcttcatatgcattgcttctcttttcagcatcagccttctgctcttcctcccttgcagattgtctcctatcatcgttcctggacccacgatcagctgcccccaatccagaagcaattgcttctgcttcaagcgcatccaggtccagcttccccttcttcctgagggatttctttttctttggttttttaaactgaagcatttcgtcaggggtaaaatagtccgttgacatctttgaggtggaagtaagatcttctgtctttttctggacatgaccaccttcaatccttttccggagctcttctagcttcttttctgcttcaccagtgaaacgtccaccttcatcaagcgtcactccctcatcttgcaccgggtcatcataatgcgagagtatagatttctttgacgatgaatcctcactgaacttgtcatcataagtccctttcttctttgaagacttataagcttcatctcgctgtttctgctcaccaatctcaatgttctcaagcatatcagcatcttcattgatatccccattggcaagaatactctgatctttgagagtcatgacaactgcaccaccttccaataccttatcaaggccatgaagaaccttaacaccagataagtggtctccaacttgtttatcttcctcttcctcgtcatcatcctcaccattttccgccaatatattatcctgctcctccaatgcccgtgcaagacgtaatgctttctccttttcagcttgccttttctcatcaagtttacgactctttcccacccatgacagtatctcagcagccccatcatcaccatccagtattcctcctccttttttgtccttcaatctttcttcctttaccctcgcaatgcgctctctgagctcagtggttgcgggctgctcagcatcccctgaagcatcaactctctgcttatgatccccctcatcgcccttggacagatctacctcatcttctccgcgacccttcccccttgacttctcgcgctccctatcctccctctccctgtctcccctgtccgccctatccttgtctctgttgcggcttctctccttgtccctgtccctccgttccctttccttatccctctcccggtctggttccttatcccgatctttgcctcggtcccgctcccgatccttggctcggtcacggtcgcgaccacgatcacgttctggctccttatccctgtccctgtgcttactatccttatccttgtctctctccctatccctatccctatgcttgccatcatccttctccttcctcctatcatccttctccttctccctctccctctcccttctgccactgccatggtgatccttctcctcccgcctgtgcctgtccctcctgtgcctgtcccggtgccgcccaggcttcagcagcatcctcacctcgcacccaccc

SEQ ID NO: 10958 - DNA, 1722 bp, Setaria italica
  Peptide Sequence Number=SeqID_76932
ttttttttttttttaagtctgaatatgtcaactctatccaaataaaagcatcaaagtatcgaagagagcgtatcctctgttttcctagcgaatcatcggacacgaattcctcggaccgcaagaatactttgggcatcaacaacgccgacatgacttgtgagaactgagaagcatataaccaaaacttgagcagcaggaacaaacaaaagcgtataacctctgttttctatttactgcaagaagaaacacggccatatggagttacgcttctggagtttgctcttgtctgccctcctctttcgcgctaccatcagtcatgccactgccacttgtatgactgctagggcggtttccataaacatgccccatctttagtcgctttgcttccatatagcgccgattctcattggttatgggtgtaagcaacggcactctgcccaggacacttaaaccataacccttgagtccagtgtacttcgcagggttgttagtcatcagccgcatggtcctgacaccaagatcgcgcagtatctgtgcacctataccatactcccgggagtcagcaggcagacctagctccaagttagcctcaacagtatcccgcccatcatcctgtaagttgtatgcccgaagcttgtgacccagcccaatgcccctaccttcatgaccacgaagataaactactacaccccggccagttttctcaatcatggtcattgccagagcaagttgattcccacaatcgcatcttgccgaccctaaattatgtccccagttaggcactccgaatgcactcttactaagatatcctggccatcgccaacatcacccttcaccatggcaatgtgttccatcccatcaataagagatctatagcaataggatgtaaatgatcccattgtacctgcaaaggtgtgacacaaacacattctaccaatctgtctctcttcctcctatatcttatcagatctgcaattgatattatcttcaggttctccctcttagcaaattgttgcagtttcggtagcaaagccatggagccatcatcatcatcaacaatttcacaaagaactgcaacaggaggtaacccagccaacatggcaaggtccactgatgcttcagtatgcccagccctttttagcacaccaccttctctatatttaagaggaaaaatatgtcctggacggttgaagtcctcaggttttgaattaggagatgcaagcgctagtattgtgtttgcccggtccttagctgaaaccccagttgttgttccctctttggcatccactgaaacagtgaaggcagtccgcagtttctcttcattttcctttgttgtcaccataagaggaagttgtagcctttccagatcctcttctttcatgctgacacaaacaatcccagtgccatgcctcactataaaagccatagcctcaggtgtgacctttgatgctgccattataagatcaccttcattttctctgttttcatcatccacaacaatgacttattttccttgacgaatgtcctcaatagcttcaggtatagatgagaaaccctctgtagggaagtcaaggtcaagctcatcatcatcagcagaaaatccatcaacaacaggagccatatcagctgcaatggtcccaagtgcaacagcatctgcttgaactgcattagatggattgaccttcccatttataataacattctctgacgaatcacccccag

SEQ ID NO: 10959 - DNA, 321 bp, Setaria italica
  Peptide Sequence Number=SeqID_76933
ctgaaaggagtgtgtttttcaaaccctccagaaggatcactgatgtaaattgtttcatgttttgataggtaaaattttttatacattaaagttggaaagaggcacctaagatgacagaaagatggtaaatgagggaaattacaaattttagacttgtttacatcttccacagttagaaattactgttgtatcatgtgtccattagccatgacagcatcaagtgaatagttgcttgtaatagacatgtgccaactttacagttttatgctgtgacatgtatgttaccctatttaacataaattgtcaattaaagatagcatt

SEQ ID NO: 10960 - DNA, 1571 bp, Setaria italica
  Peptide Sequence Number=SeqID_76934
atcatcttctccgatccccttccctgaccgagacgagatcccgacagatcagatcaaggcgcccacacactcgcgacctgctcgacggcggtgtcggcgatggcaacccgttactggatcgtctccctccccgtgcagtcccccggcgccaccgcgagctcgatctggtcgcgcctgcaggacaatatctcccgccactccttcgacaccccgctataccggttcaacgtcccggatctccgcgtcggcaccctcgactcccttctcgccctcagcgacgaccttgtcaagtccaacatcttcgtcgagggcgtgtcgcacaagatccggaggcagatcgaggacctcgagcgcgccggaggtgtcgagagtggggccctcaccgtcgatggcgtccccgtcgacacctacctcaccaggttcgtgtgggatgagggcaggtacccccacaatgtcgccgctcaaggagatcgtcggcagcatccagtcgcaggtcgccaagattgaggacgacatgaaggttcgagcagcggaatataacaatgtaaggagccagcttagtgcaatcaacaggaagcaaagtgggagcttggcagttcgtgatctttccaatctggtaaaaccggaggatatgatcacctcagaacatctagtaacacttcttgctattgttcccaagtactcccaaaaagactggatgtcaagctacgagtcactcgacacatttgtggtaccaaggtcatctaaaaagctctatgaagataatgagtatgcactctactctgtaacactttttgctaaggttgttgacaactttaaggtccgtgctcgtgagaagggtttccaggttcgtgattttgagtatagccctgaagcacaagaaagtcggaagcaggagatggagaagctactgcaagaccaggaagctatgaggtcctctcttctgcaatggtgctatgccagctacagtgaggtattcagttcctggatgcacttctgtgctgtgcgtatctttgtagagagcattcttagatatggtctgccaccatcattcctgtctgctgttcttgcaccatctacaaagagcgagaagaaagtaagaagcatcttagaagagctttgtggcaatgcccatagtacttattggaaatctgaagacgatgtgagtgttgctggtctgggaggtgaatcagaggtccatccttacgtctccttcaccataaacattgtctgagcccagtgtatcgcctattttctgtggcctgccaatattttgaagcagctattaccttgagtaatcgaaagttcgaaacaaacgaatggttcatgtatattacttgtgacacgccaattctttcttgatttgtcacttttctctggtactgtaatttatattggagagagcagccgatcaataatgtagcttttgaggaaactgaaatatgttgtagctgaagaagagatccatcaccttgtaaagcttttgtggatacttgttttgtaacattgggctactggatttactgtaataaagccatgtcaaataaattcaaaaaaactaaaaaaaaacg

SEQ ID NO: 10961 - DNA, 274 bp, Setaria italica
  Peptide Sequence Number=SeqID_76935
gcggaccatctccccgctgtcgtcccgcatcgcccgcatgaactgcaccatccagatgctcgcgtccaccgccacccgcttccccgcaagggtctccaccgacacgcgccgccccaccggagccagcagctcccacagcccgtgaactcccatctccttcccctgagcgccggtggacgaggtctagatggagggtactctcggcggtcggcgactcgacgaggcgcgcggcggtggcgcgacgccgagcaggagcgaaggggcccgtcgctcg

SEQ ID NO: 10962 - DNA, 470 bp, Setaria italica
  Peptide Sequence Number=SeqID_76936
gcgccagggagttggcctcgaggttgtagcccagctgctccctctggatgctgctctcctgctccatgattgggagcagcgagggcggagccgggttggaagcgacgtaggggaactcatcgcaggcgttcgcggcagccgataggttcatcatcttcttcgtcccccgggctctcgctagctttatgatcgatttgctgtgcagggaggggggctaggagctgaggcggcaaacacacatggaagtggattcggggacggaggggaggacgcagcaaggacggctcgcctctcgccgctcgatcgctcgctcagtcgtcgctggtggtgggaactgcgagatgactggagggggatgagggaggaggagctccggccgggcggcaggggtgatggagatgacgacacacagatatatgagcgcgcgccggcagcggcctgcttctcgggatctctatcgatctcgtgcc

SEQ ID NO: 10963 - DNA, 247 bp, Setaria italica
  Peptide Sequence Number=SeqID_76937
tccaccccaattccaatttcaaacctcaatcccccttccctgagttccttccccgtcacagctccgtgtccatcctccattcctcctccaatctccatcgccatccccaatcctgagctgaaagcaaggccaagagcatcatagcagtgagcagtctcgcaccacgcgagaggagtccaggccaccaccacgagacagggacacgggcgccatccccatccaccaccaccctcccagcttccgttgc

SEQ ID NO: 10964 - DNA, 1272 bp, Setaria italica
  misc_feature (1)..(46): n is a, c, g, or t
  Peptide Sequence Number=SeqID_76938
nnnnnnnnnnnnnnnnnnnnnnnnnnnnnnnnnnnnnnnnnnnnnnaggtagcatttctaaaattggcatttgaatattgaccgttcgtaaggatggtaaaaaattctggttgcattaatcatcctatgcacagcaaccaacaacgtgggcaaggtttgcagtatcacatgacatatctgattaatcaagtgttcctacatccaacaacaatgtcatcttggattcaccctgctgttccaccagggaatgaccacaaagtttatcatgcacgaaaaaaatctgtcaatgtatttcttgaggaaaacaagatgctttactatccagtaacaagagttttctggagtaacagcttgaggtcctcgagcctcacatcactaaggtcaggataggtagcaattgcatccgtgaaatcttggctagcagttgaaggtgtatatgttattatacatgacatccccgctccttttgccgctagtaatccaataacactgtcctcgaccacaaggcagttcttgctttgcacacctaatttctctgctgctgtaacatatattgttggatcaggcttctttagtttaacatcatcgcctgcaaggaagcagtccaggcccttaaatcgctcaagtccaataaggttttcaaggcacattatcactgaacttttagttgctgcagagcaaacagcaagcttgatacccgcaccctttacttcatccatcagccgcaaaacaccaggtctaggctccacagttccagattttattatttctttgtatctctctgttttccagtcctggattatgtcgaccaacttctccttatcggagtcagtcgaaggtggtgtctcgaagatatttgaagaaggccacccattttccccaaagtaccatcgcatcttgggcttcccgccgccgatgcggttctgtagctcgtcgtagaaggcctcgtcccagtacagcgggtcggcggaggccggcgggcagcgcaccccgaagtgcgcgaacgcgtcgttgtaggcctgccggtggaggtgctccgactccagtatgacgccgtcgcagtcgaagatgagcgcgtcgagcgacgacgcgggagaggccggtgaggctgaagcggaaacgacgagccggggcgcgcgacggaggcgcgtcatgggaacgcggcagtgggatcggtggctgaaggaggggtggcggctaccggtggccgcggcggtggcgccggcggtggtggggaggaagagggaggtccaagccatcgtagtcggaggc

SEQ ID NO: 10965 - DNA, 844 bp, Setaria italica
  misc_feature (812)..(812): n is a, c, g, or t
  Peptide Sequence Number=SeqID_76939
aaacaaataagaactaagaattaggtagaagaagtttaaccaatggattgaatttcaggtcaagatatgctgtgcagcgaagtggaaatgtactgatgtcctttaacaacaaggaggcaagctctgcgatcccactattttcacctgtaattgttcccatggcacagagttttggcccaatattatcccagctgacatcatatccaacaatccgttttggggtaagatgtgtttctataactttggtgtcaaaactgttgcttgaaatgtctaacaacacaggaccttttttatgttcacactgtcaatgttcacttagatatttccttgttttgaatacgcactgccttattactatatatctcatatgcaaagttttggagaccatctcgattaacagaaatatagcttgaagcttttttgtattaactagaatatcttatttgtgtccaactgaacatgaaaggctttacttattaccataaaactactagaatattcacttttagttcagtagtcctctctttttcataactctgacttttaaacattggaatggcatggctttttttaaaaaataaatggaagattgcatgcagatgttttttctgttgttacactccatggtatgatggctacaagcctacaagacattttctttattgcaaacttatcttctttactttctagttgggaaaatcctttttaatttacttattgtgaattgaggacttgctactcgtaagaatgtcaattgaggcggccattaagcagcttgagaatctaagccctcctgttgttaagcaacttcngcctttacttcaacacttcctccgttgtatat

SEQ ID NO: 10966 - DNA, 647 bp, Setaria italica
  Peptide Sequence Number=SeqID_76940
agttcagtttaagtttgataggtgcttgagaaacttggatgagcctataaatgatctcccaacatttggtgttggacattccttgggatctgttatccacatgctgattgggtcaagatatgctgtgcagcgaagtggaaatgtactgatgtcctttaacaacaaggtatgttttgcatctctccttgtcgtatctttttttagagaaaggttattctggttttatagaaagcatatatgcttggtacatcggcttttgctggagacttctgcttgcaaaaaggaaacgagagaattcaacagtgttctccaatattaaaaggatccaattctcgtgaagctcaaaagatgatcacaccagcacgtgccatttatgcagggatgcaagaattttgtgtagtacatcagtaggtgaatgagagaacagtttctctatcatcaattttttcgactagtccacaaagaccaggaggcaagctctgcgatcccactattttcacctgtaattgttcccatggcacagagttttggcccaatattatcccagctgacatcatatccaacaatccgttttggggcagaaacggccattaagcagcttgagaatctaagccctcctgttgttaagcaacttctgcctttacttc

SEQ ID NO: 10967 - DNA, 811 bp, Setaria italica
  misc_feature (20)..(20): n is a, c, g, or t
  Peptide Sequence Number=SeqID_76941
aaaaaataaaaaataaaaanaaaaaataaaacaaaagtaaaggtaagaaataagaagaagaaacaagtgtactactatttaccaatccaattctcgtgaagctcaaaagatgatcacaccaggtcttcttgtgactactctcttggcagcttcacaaactcgtccatcctaaatgtcactttcatcatctgcttgctgactcgtatttgatctactgttttgagcagcacgtgccatttatgcagggatgcaagaattttgtgtagtacatcagtaggtgaatgagagaacagtttctctatcatcaatttttttcgactagtccacaaagaccaggtcagcaccacaaacacaaacagttttaagtcaaagcacacccctaaggcacccaacactcgaaggcctgatgtgatcatccacgtgtgggttaggttattatttctttttagctgcatgtatcattgcaactgtaactcatagttctagtcccttatcccaacatacatgagcttgagttggtccttgaaataagaatctgagtttaggacatctagcactatttctagaattattggtgttctgtagtacttcagatttgtgggtgagagaccacatattccagatgttttcgcttcacaagctgatatatttcttcctatttcaaattcggttttcatatatcatgggatcaaatgccaaagcaaagtaagaagttgtaaacgagtccttccttcataaaacagcattatcatttttaacatgtgatgtggcctttgaatgcgacttgtaaatattagttttatgaaccata

SEQ ID NO: 10968 - DNA, 445 bp, Setaria italica
  Peptide Sequence Number=SeqID_76942
agcaatgggaagcgtatgcttctgtactgaagctgatctgagaaattgactaatagagcactatgctatctctgcgggaaaacgaaggatgcatcgcactggcaataggagctttggtggacaagtcatcttaagccattggcaaaggcaagatctccttgctctgattattttctgtaatcaataatagattgttggtaaacgatatagtcttataaggtgcttaagtaacgttagaatatttctccttgttaagtccaagatctaatattcaagatggatatatgcaaggaatgttagagaaattgctcagctcttagcttctctcttccttttgcaaagtcaatggagctggtagagctcctgacatgctactggctcctacctgctgtatatggcagcaatgcccatgagtagaagggcgagcatgccctgtcttgtattg

SEQ ID NO: 10969 - DNA, 383 bp, Setaria italica
  Peptide Sequence Number=SeqID_76943
aaaatttaggaaagtagggaagaaaggtaacaacacctgtagttaattgaacattaaagaaccacaacattgttagataaattgctcagctcttagcctctctcttccttttgcaaagtcaatggagctggtagagctcctggcctgctactggctcctgcctgccgtatatggcagcagtgccatgagtagaagggcaagcatgccctgtcatgtattgtactaggtagtaggtagttggtagaagcattcattctagtatgtactctagtttgactttagactctataaagagtagaagagcagctgcagctcatcagttcagcagcacaaattaaaattgagtgtgtgtgtgtgtgtgtgtgctctgtgctcctctatct

SEQ ID NO: 10970 - DNA, 375 bp, Setaria italica
  Peptide Sequence Number=SeqID_76944
ggttcatgaacaatcagccaccattgcagagttgtgggatggggcaactctgaaatgtacttttcgaaggtgtgttatgttagttaattgctcagctcatttgcttctctcttccttttgcaaagtcaatggagctggtagagctcctagcctgctactggctcctgcctgccgtatatggcagcagtgccatgagtagaagggcgagcatgccctgtcatgtattgtactaagtagtaggtagttggtagaagcactctagtatgtactctagtttgactttagactctataaagagtagaagagcagctgcagctcaattcaggtcagcagcacaaattgaaactgagtgtgtgtgtgtgctctgttctccta

SEQ ID NO: 10971 - DNA, 1658 bp, Setaria italica
  Peptide Sequence Number=SeqID_76945
gcgcgggagagatgataaggatggcggcggcgtctccgccgcccgcgtcagccgtgcgggtgcgcgggggcggcggcgcggcggcctcgtcgtccgcgcgcctcttcacggggccccggagtagagtcgcggcgccaattgggagggggaggaggaggtgcgccatctcgtgctgctcgtctcaggacggtgatggaccccgccccgccgcgccgccgacctccgcgtcgccttccgacgggtcgatacagctctactcccagatcgagagggtgatcacggaggcggcgaagcagtcccgggaaggctggggctcgaccggagattggaccgaagtggagggagcctgggtgttgagacccaagtcctcggagccctcgtttgttgtccacttcgttggagggatttttgtcggagccgctccccagatcacataccgctttttccttgagcagctcgcggacaggggagcattggtgattgctacgccgtatgcgagcggcttcgatcatttcttcattgcagatgaagttcagtttaagtttgataggtgcttgagaaacttggatgagcctataaatgatctcccaacatttggtgttggacattccttgggatctgttatccacatgctgattgggtcaagatatgctgtgcagcgaagtggaaatgtactgatgtcctttaacaacaaggaggcaagctctgcgatcccactattttcacctgtaattgttcccatggcacagagttttggcccaatattatcccagctgacatcatatccaacaatccgttttggggcagaaacggccattaagcagcttgagaatctaagccctcctgttgttaagcaacttctgcctttacttcaacaacttcctccgttgtatatggacttaataaaagggcgagaggacttcattccaaaaccagaagagacacgtcgcctgataaaatcctactacggaatttctcggaacctcttaataaagttcaaagatgatcaaattgatgaaacctctatccttgcacaagtactaagctctgaagcagccattagctcgttgcttgatatgtcgattcgatcacttcccggggatcatagcctgccattacagcaggttcttcctgatgttccaccagcaatggctgatgcagtgaaccgcggaggtgaacttctggcaaatctgactgcaggcacaccatgggaggctgttgctaaggaggttggtaccactttgggtactgactcaggcattctacgagcacagatctcaaaggatgtcgagactcttgttgatgtaattgtttcgtggatatcttcaaattctggtccaagactacttcgtccatgatcacccgttctgcgtacagaaatgtcaataacattgaagagcatcaggatttcactgacaaactgtgagtaataaaaaaaattggattgtgcttcagcatgacatgttagtactttagatccatgctgtaattcaaaaaaatgaagatggtgtgtatatagatggaatattttttaactaaggaaactttataaggaataaaaataaagttggtagattctttctacggtaaaactcctcagttgtacaaaggagtcctggcaaatcaataaggatctgattggaactaggaacagccct

SEQ ID NO: 10972 - DNA, 230 bp, Setaria italica
  Peptide Sequence Number=SeqID_76946
aacaatacgttacttagaaggttagaccaaaatggtctgggagcatctgttggtcaacctcaagaacgatgttgtgcgccacaccagaggtcatcttcgagttgcgtggaactcatgcagtcgcaatgacactccccgcttacagttggacttccctaccatacacccagctgaaaggcatcgttccagctgggtgtatggtagggaagtcgcaatgacactccccgctt

SEQ ID NO: 10973 - DNA, 543 bp, Setaria italica
  Peptide Sequence Number=SeqID_76947
tacgaacggggaaggaacgaacaaggtagggacaaggacaattagaaggatcttcttcttcatcatgtcagccagagcaaccacggtaccatcagggtccatctcaaacagcttctcaacaatcttggtgtatgctgtttcatgtcgcttctcatccgaggcgatgatgccacagatttgtgcgagcttcaggtcaccatagtccttggcatggcgagcagtgttcccatgtgagatgaaggtcgcacgctcttggaaggaggtgtagatgaagccaagataagggttgttctcagtcctaggatcctgaaaagggcaaagtaaagagagtatacattagttatttataatctgtagccaagacagacaaaaactgagcgagagagaattaactaatgacatagctgaaagctgaaccacaacttgacaatttcacaacagaagtcgctcaaaaagcatggcgcatggtgaataactatcaaaagaatttcatgaaagaatcaaactctcaactagccaaaataaacgcttcagaagcatcaa

SEQ ID NO: 10974 - DNA, 102 bp, Setaria italica
  Peptide Sequence Number=SeqID_76948
ttcctgatatccacatcgcacttcatgatagagttatgagctgctcttggcgttctccagctcctgctcgtagtcaagagccacatatgcgagcttttcctt

SEQ ID NO: 10975 - DNA, 222 bp, Setaria italica
  Peptide Sequence Number=SeqID_76949
aggaaaggtagactaaagggaaggacaaggatggaccctccaatccagacactgtatttcctctcaggtggtgccaccaccttaatcttcatactgcttggtgcaagggcagtgatctccttgctcatgcggtcagcaataccagggaacatggttgagccaccgctgagcacaatgttaccatagaggtccttcctaatatcccacatcacacttcatgat

SEQ ID NO: 10976 - DNA, 169 bp, Setaria italica
  Peptide Sequence Number=SeqID_76950
gccttggggttgagtggggcttcggtcagcaaaacagggtgctcctcgggcgcaacacggagttcattatagaaggtgtggtgccagatcttctccatatcatcccagttgctaacaataccattgctcgtattcggtattactttctaaggttctagttattacccta

SEQ ID NO: 10977 - DNA, 243 bp, Setaria italica
  Peptide Sequence Number=SeqID_76951
aaggtcaagacggagaatggcgtgcggaagggcataaccttcatagattggcacggtatggctcacaccatcaccagagtccaacacgatacctgttgtgcgtccactggacgtaagaagggaaaagacaacaagcctgaatggcgacatacatggccggcacattgaatgtctcaaacatgatctgggtcatcttctccctgttagccttggggttgatcccggtggatatgatgacggcga

SEQ ID NO: 10978 - DNA, 234 bp, Setaria italica
  Peptide Sequence Number=SeqID_76952
aactatgttcccaggcattgctgatcgtatgagcaaggagatcaccgcccttgctccgagcagcatgaagatcaaggtcgttgcaccacctgagcggaagtacagtgtctggatcggagggtcgatcctagcctcgctcagcactttccaacaggtacctattgtttgattgcagttactgaacttataacttatcaatgtgaaattaaagcagcatctaaattctgttatatt

SEQ ID NO: 10979 - DNA, 294 bp, Setaria italica
  Peptide Sequence Number=SeqID_76953
attggtggctccattctagcctctctcagtaccttccagcagatgtggatctccaaggcggagtatgatgaatctggtccaggcatcgtccacatgaaatgcttctaagttcctggagcagtatatctgtacttgtattttgagatgcaagatttgaaggtcccgtggcttctccatcattcttggttctttctgaatccttgaagggctgttagccatggagcattgtgaatggtggtaaagtcgtactgacctgacgacctagactgctgaagtatttcatgtagtacgact

SEQ ID NO: 10980 - DNA, 394 bp, Setaria italica
  Peptide Sequence Number=SeqID_76954
aaccggtcccggcattgtccacatgaagtgcttctaagtttctgagtgaggccagtatagaaccaccaatccaaacactgtatttcctttctggtggtgcaatcactttaaccttcatgctgctaggagccagggacgtgatcgtatgagcaaggagatcagcaatcccagggaacatagtagatcctccactgagcacaacgttaccatacaaatccttcctgatatcaacatcacacttcatgatggagttgtatgtagcttcatgtatgccaggagattccatgccaacaagagatggctggaagagcacctcaggcacctgaacctttctgatccaatggtgataacctgtccatcaggcatctcgtagctcttctcaacagaggagctg

SEQ ID NO: 10981 - DNA, 195 bp, Setaria italica
  Peptide Sequence Number=SeqID_76955
cggagtatgatgaatctggtccaggcatcgtccacatgaaatgcttctaagttcctggagcagtatatctgtacttgtattttgagatgcaagatttgaaggtcccgtggcttctccatcattcttggttctttctgaatccttgacgacctagactgctgaagtatttcatgtagtacgactttaccaccattc

SEQ ID NO: 10982 - DNA, 505 bp, Setaria italica
  Peptide Sequence Number=SeqID_76956
ctgaaaatgactcatcacaaatcacaattcacatgaactggaaaagagggggcaactcctacatataagcagatcaaaggctacactgctacagatctgaacaaaagtcacaacccacatgatgcaatcaatggttgcacatgaaaaagttacagccagcaactcttcacaaagcaacaccccatgttctccaagtacaggcgcatgttcctgcctttgatgcgttcagaaaatcagtggcgctaacacgccacgttttcggtaccaccagacgaatcaaaccagcagaatgtgcattcagaaatcagtggcaccaacatgccatgtttttcggtaccagatgaacaaagcagcagaatgtgcactcagaaatatggcaaggactcgacaaaagaacagccccaataaagcagaaagacggtgaatccagggcttagaagcacttccggtgaacaattgctgggcctgactcatcatactcacccttcgagatccacatctgttg

SEQ ID NO: 10983 - DNA, 401 bp, Setaria italica
  misc_feature (371)..(371): n is a, c, g, or t
  misc_feature (386)..(386): n is a, c, g, or t
  Peptide Sequence Number=SeqID_76957
accgcctgctccgagcagcatgaagatcaaggtggttgctccacctgagcgcaagtacagtgtctggatcggagggtctatcctagcttctctcagcaccttccaacagatgtggatatcgaaggacgagtacgatgagtccggcccagcaatcgtccacaggaagtgcttctgagttcagctgccgttttcgtgtagtctcctatgtgtgggtttttctatggggggaggagaagattgcaggttatgtttgtgttctgcagacggtccttatttcggccacttgtatctgtggttgccccagttacctttggccgaaataaggaccgtctgcagaacacaaacataacctgcaatcttctcctcccccncagaaaccaaaaccncatagaggacacacg

SEQ ID NO: 10984 - DNA, 408 bp, Setaria italica
  Peptide Sequence Number=SeqID_76958
gtaacattgtgctcagcggtggctcaaccatgttcccatagaggtccttcctaatatccacatcacacttcatgatagagttgtaggtggtctcatggattccaggcgactccataccaatgaatgaaggctggaataggacctcagggcatctgaacctctctgccccgatggtgatcacctgcccatcaggcagctcatagctcttctccacagaggagctggtcttagcagtctcaagctcctgctcatagtcaagtgccacataggcgagcttctccttgatgtcccttacaatttcccgctcggcagtggtggtgaaggagtaacccctctcagtaagaatcttcatcagactgtaagtgagatcacgtccagcaaggtcaagacggagaatggcgtgcggaa

SEQ ID NO: 10985 - DNA, 513 bp, Setaria italica
  Peptide Sequence Number=SeqID_76959
aacaatgatctgggtcatcttctcacggttagccttggggttgaggggcgcctcagtgaggaggacagggtgctcctcgggagccacacggagctcgttgtagaaggtgtgatgccagatcttctccatgtcgtcccagttgctgacgatgccgtgctcgatggggtacttgagggtcaggataccccctcttcgactgggcctcgtcaccgacgtaggcgtctttctgccccatcccgaccatgacaccggtgtggcgtgggcgccccacgatgctggggaagacggccctcggggcgtcatccccggcgaacccagccttcaccataccggtaccattgtcgcagacgagaggctgaatgtcctccgcgtcagccattttctacctacaggaaagctcgcacgatgccacatttgtcaaatcaagcaggaattaaataagcaaagcaggcaaattgcaaagctatcgatgatttgtttccattgtttgctctacatacaaaatctactcta

SEQ ID NO: 10986 - DNA, 1575 bp, Setaria italica
  Peptide Sequence Number=SeqID_76960
gaatagcaatcgatcaaaggaattgcatatctcagagatggatgtacaaagaaaaaccaataatgtgtctcgcatacagccaaaataaatgatcctaggtactctgataacttccaacctctttttgttgttttcaccactagcaacaaacttggcatggaaaggagctgcagcaatgcatgcattgtagcgagccacaaaataataaatccaacaacactgcctgctcaaaggctggcagtctcaaacatagtaccttacatgaaacagaatcaaggaacggaacggaacggatacagagaatgaagacgaagtgagcccttgagcttagaagcacttccggtgaacaattgctggcccagactcatcgtactccgcctttgagatccacatctgttggaaggtgctaagggaggcaaggatggaacctcctatccagacactatatttcctctcaggtggtgccaccaccttaattttcatgctgcttggtgcaagcgcagtgatctccttgctcatacggtccgcaataccagggaacatggtcgtgccaccactgagcacaatgttaccatacaagtccttcctgatatccacatcgcacttcatgatagagttgtaggtggtctcatggatgccaggagcttccataccaatgaaggaaggttggaagaggacctcagggcacctaaatctctctgccccaatagtgatcacctgcccgtcaggcagctcataactcttctccacagatgagctgctcttggcgttctccagctcctgctcgtagtcaagagccacatatgcgagcttttccttgatgtcccttacaatttcccgttcggcagtggtggtgaaggagtaccctctctcagtgaggatcttcatcaggctgtcagtcaggtcacgcccagcaaggtcaagacggaggatggcatgaggaagggcataaccttcatagattggcacagtgtggctgacaccatcaccagagtccagcacaataccagttgtacgtccactggcgtacagggaaagcacagcctggatggcaacatacatggcaggaacattgaaggtctcaaacatgatttgggtcatcttctccctgttagccttggggttgagtggggcttcggtcagcaaaacagggtgctcctcgggcgcaacacggagttcattatagaaggtgtggtgccagatcttctccatatcatcccagttgctaacaataccatgctcgatcggatacttcaaggtcagtatacccctcttggactgggcctcatcaccaacataagcatccttctgccccatgccaaccatcacaccagtgtgacggggacgcccaacaatacttgggaaaacagcccttggtgcatcgtcaccggcaaaaccagccttgaccatgccggttccattgtcacatacaaggggctggatgtcttcgccgtcagccatttgctacagattccggagatctacgaggaaccgccgctgctcccggtctcgtgtccttcctcccacggagaagacacgagcggagcggaaggagaggagaagtgttcttgttgt

SEQ ID NO: 10987 - DNA, 1721 bp, Setaria italica
  Peptide Sequence Number=SeqID_76961
tttttttttgggcacaacgagggtcttccgggaaaaggaacgagagaaaaggcacaggtttgcttcatcctgtattattatcttaggctcgcatagccacataggcatcagccggaaccaataaaccgcgaactaaacagtacaccaaatacacgaacaatccactccaaacggcatgaaacaccacagaatataatgtgttgatgcttaattcattatcacgacctaggtacacggctactgtatttctgtccacttatactctgcctctgccctttctgtattgcttcgaggcaacggactgacaagccggcaacctcttggacgtcaaatttcactcagaaacttagaagcacttcatgtggacaatgccgggaccggtttcgtcatactctgccttggcgatccacatctgctgaaaagtgctgagagaggccagtatagaaccaccaatccaaacactgtatttcctttctggtggtgcaatcactttaaccttcatgctgctaggagccagggacgtgatctccttgctcatacgatcagcaatcccagggaacatagtagatcctccactgagcacaacgttaccatacaaatccttcctgatatcaacatcacacttcatgatggagttgtatgtagcttcatgtatgccaggagattccatgccaacaagagatggctggaagagcacctcagggcacctgaacctttctgatccaatggtgataacctgtccatcaggcatctcgtagctcttctcaacagaggagctgctcctggcagtttccagctcctgctcgtaatcaagggcaacgtacgcgagtttctctttaatgtccctgacaatttcacgctctgcacttgtcgtgagggagtaccctctctctgtgaggatcttcattagatgatcggtgagatcacggccggcaaggtccaaacgaagaatagcatgaggaagtgtgtatccttcatagattggaacggtatggctcacaccatcaccagagtccagcacgataccggttgtccgcccactagcgtacaaggaaagaacggcctggatggcaacatacattgccgggcattcaaaggtctcaaacatgatctgtgtcatcttctctctgttggccttggggttgagaggggcctcagtcagcaatacagggtgatcttcaggcgcaacacggagctcgttgtagaaggtgtgatgccaaatcttctccatgtcatcccagttgttgacgatgccgtgctcaattgggtacttcagtgtcaggatacctctctttgcctgagcttcatcgcccacataagcatccttctggcccatgccaaccatgacaccagtatggcgtggccttcccacaatgcttgggaagacggctcttggtgcatcatcaccggcaaaacctgccttgaccattccagtgccattgtcgcacacaataggctgaatatcctcgtcagccattttcgagttttctgttcaaagaggagtggcgatcgcctcggcggacggcggctcgtcctgtccggactctgaactctggagaacccgatcggcgaggaaatgatgacgcaaagcctcgggagcaagcaaggcaagagaaaaggaaggaaaacgcacggatgggcggcgtgacgggcggagcttggggtttatactacacgcctccgccgtcctctcctcgaagagtaaaaggtaagggttgttg

SEQ ID NO: 10988 - DNA, 1595 bp, Setaria italica
  Peptide Sequence Number=SeqID_76962
tttttttttactagagctcaaattttgatattattcattcatttcataagacatcaataaccaatgacaatcagaacaccatatgtatttgctagtagcctcatcaggcatctcattaaaattgaataaaccgaacatatgtgtccaaaatcacaagtgagaagcataggtagcaatagatattacagtcttgatgaatagaagaaaacgatcgcagatagactggccggaaactttgtccacgctaatgaagaaacagtaacaaaaagagaaagaaatggggaaggaggctggcgataatggctcctctcagcttgcatttcttgggcccaaagaattgccgaagaattagaagcatttcctgtgcacgatggacgggccagactcgtcgtactcagccttggcaatccacatctgctgaaaggtgctgagcgatgccaagatggatcctccaatccagacactgtacttcctttctggaggagcaaccaccttgatcttcatgctgctaggagccaaggcagtgatctccttgctcatcctgtcagcaatgccagggaacatggtggtaccaccagagaggacgatgttgccgtatagatccttcctaatatccacgtcacacttcatgatggagttgtaggtagtctcgtggataccagcagcttccatcccaatgaaagatggctggaagaggacctcagggcagcggaagcgctcagcgccaatggtgatgacctgtccatcaggaagctcgtagctcttctccacagaagagctggtcttggcagtctccatctcctggtcgtagtccagggcaatgtaggcaagcttctccttcatgtccctgacaatttcccgctcagcggtggtggtgaaggagtagccgcgctcagtcaggatcttcatgaggtagtcagtgagatcacggccagcaaggtcaagacgaaggatagcgtgggggaggggcgtatccctcgtagatggggacagtgtggctgacaccatctccagagtcgagcacgatacctgtggtacgaccactggcatacagcgagaggacggcctggatggcgacgtacatagcaggggtgttgaaggtctcgaacatgatctgggtcatcttctcacggttagccttggggttgaggggcgcctcagtgaggaggacagggtgctcctcgggagccacacggagctcgttgtagaaggtgtgatgccagatcttctccatgtcgtcccagttgctgacgatgccgtgctcgatggggtacttgagggtcaggactacccctcttcgactgggcctcgtcaccgacgtaggcgtctttctgccccatcccgaccatgacaccggtgtggcgtgggcgccccaccgatgctggggaagacggccctcggggcgtcatccccggcgaacccagccttcaccataccggtaccattgtcgcagacgagaggctgaatgtcctccgcgtcagccattttctaccggagtagtggaggatccgcggcgaggaggtggggagcgggcggcgagctcgcggcgggggggaagagtggggaggagaggagaggagaggagagggcgaagc

SEQ ID NO: 10989 - DNA, 1720 bp, Setaria italica
  Peptide Sequence Number=SeqID_76963
tactaactaaacttaacttccccctacttcccttccgtaagtctttctaaggtccgttcgtcttccttccttccttcctttgtatttcggctccgtccccgagtacctgtaggaaatggctgacggtgaggatatccagcctcttgtctgtgacaatggaactggaatggtcaaggctgggtttgctggtgacgatgcaccaagggctgttttccctagcattgttggtcgtcctcgccacactggtgtgatggtaggaatggggcagaaggatgcatatgtcggagacgaggcacagtccaagagaggtattctcacgttgaagtacccaattgagcatggtattgtcagcaactgggatgacatggagaagatctggcatcacactttctacaatgagctccgtgttgcacctgaggagcacccagtgttgctcactgaagctcctttgaaccccaaagctaacagggagaagatgacacagatcatgtttgagaccttcaatgtccctgccatgtatgttgcaattcaagctgtgctttcactctatgctagtggtcgtaccacaggtattgttcttgactctggtgatggtgtgagccacactgtgcccatctatgaaggatatgcacttcctcatgctatccttcgtctggatcttgctggccgtgacctcacggattctctcatgaagatcctcactgagagaggatactctttcaccacctctgctgagcgggaaattgtgagggacatcaaggagaagcttgcatacgtggcccttgactatgagcaggagctggagactgccaagaacagctcctcggttgagaagagctacgagctgcctgatggccaggtgattaccatcggcgcggagaggtttaggtgccctgaggtcctcttccagccatctatgattggcatggaatctcctggaatccatgagactacctacaactccatcatgaagtgtgatgtggatatcaggaaggacctgtacggcaacattgtgctcagtggaggctcaacaatgttcccaggcatcgctgaccgtatgagcaaggagatcaccgcccttgctccgagcagcatgaagatcaaggtggttgctccacctgagcgcaagtacagtgtctggatcggagggtctatcctagcttctctcagcaccttccaacagatgtggatatcgaaggacgagtacgatgagtccggcccagcaatcgtccacaggaagtgcttctgagttcagctgccgttttcgtgtagtctcctatgtgtgggttttttcatggggggagagaagattgcaggttatgtttgtgttctgcagacggtccttatttcggccacttgtatctgtggttgccccagttacctttgtactcctactatttcgtcgccctgtgacagtgaggtcacctcgtggaacttatggttggcttgatcggttgaaactgttatagctgatagttctataagtttttttgtgggtagaggattatgtggatttttaaaatttattatttttgtgtgccagtgcctacgatgccttgggtggttgttggctcagttcaaatctatggtgctaaagtagcagctctgttgttctccgagaatcatttggaagtgcaactgtggtgatgatcatcaattcgtggtgacattatatgctgcaactgcaagtatcattcgtggtggttgccgagttgaaacc

SEQ ID NO: 10990 - DNA, 430 bp, Setaria italica
  Peptide Sequence Number=SeqID_76964
aaatccaaagcatttccaagcttccccattgagcaaagatgatcaatcaatatattgtatgtaacttcatcaggggtgcatccagtgctcttcatcacctcgaacaatcgcataccaagatgaggatctcctaccttgcaaagggcattgatcaaaatattgaaagtataaacatctggagaaagtcccttcacagttagctcacgtgcaaggtccaatgcttcctcaagtcgattctgtgagcatagagcaacaatgagagtgttgaatgtggtggtgtcaggcaagcaacccctatccaccatctcatttacaattcctttagccgcatcaagctctccatttttactgaggcaattgataacagtattgtaggtgaaaacatcaggatcatggccctcctgaatcataaggtcgatgactttcaagg

SEQ ID NO: 10991 - DNA, 473 bp, Setaria italica
  Peptide Sequence Number=SeqID_76965
ctcgagggctggtgcgacgacaagggcgagctgctgctggtgtacgagtacatgcccaacggcagcctggacagggcgctctacggcgagccctgcacgctgtcgtggccgcagcggtacacggtcgccgccggcatcgcgtccgtgctgtcgtacctccaccaggagtgcgagcagcgggtgatccaccgcgacatcaagaccagtaacatcctgctcgacggcaacctgagcccgcggctcggcgacttcgggctcgccaggctcatggaccacaacaagagccccgtgtccacgctcaccgcggggaccatgggctacctcgcgccggagtacttgcagtccggcaaggctactgagcagaccgacgtgttcagctacggcgtcgtggtcctcgaggtgtgctgcgggaggcggcccatcgacaaggacgatagtggcggcaagaacgtagaaacctaggtaggaactag

SEQ ID NO: 10992 - DNA, 355 bp, Setaria italica
  Peptide Sequence Number=SeqID_76966
tccgactccacgtacctccttatggcgtcgccgctcttggcgcccgacggccaccgccgggagcaggtggctgtccgccacgacctcctcgccactctgggcagtgttcgcgagcaccatccccacgccgcccgcctgcttcaccacctgccccttctccaccctcgagttggcgcctcggtcgcagagcaccaccttgcccttcacctccgcggcgtccagcgtgccctccatgcagagcttgctcgcattactgccggcgcggatgcccttgttgtacaccagggggaatttaccgtcgccgagcccatcgcctgcgtagagcgacatgccggcgtgggtctcgccgtttccg

SEQ ID NO: 10993 - DNA, 655 bp, Setaria italica
  Peptide Sequence Number=SeqID_76967
tgtaatttgtgggggaaaggctgagatgagagagagagcactgtggaaggagagagatcatctcatctcatagggcagaaaattagacaaatcaaacaatgatccaatatttcaagaggatttcttcgccgagtcgaacatcggatccatgatctttgccgtcgatcgatgatcaaggcggtcgacaacttgcaagcatggatttagaaggaggaggagatcatgagaccaaggatagagcgaagaagccaagaagtgtaagtgcagtgctgccatgccaccacttgttatttgcgtcttcttggctagcttctccttgggtgttttgtacatagggcatatggtgggggatacaatagctaaggtagcccatgagagaccatggtgcaagtcatgagtctctctctctcatctcggcattttaaatcagtgtgtttaattggttactctctctttctctctctaccatggatttgggaagagctctctagatgtacaagttaatactagtacttttttcctacccctttgcagctgaaatagagaactgtttttgagttctcatgcagtagagttgttaagggttcatgcatcaatttcttccttccttctttgatcttctagagtggaatcaatttctctttcttttgggggg

SEQ ID NO: 10994 - DNA, 2104 bp, Setaria italica
  misc_feature (2096)..(2096): n is a, c, g, or t
  Peptide Sequence Number=SeqID_76968
ctcccctgcaccgaacgaactctcgatccgatcccgatccctgcagggcgccgcctcggctccccgattcggccccggatctgctcgtcgctcggcgggggctctcgattgaacaagcatgctgcatcaggaaaacagtgaggcttttgtcaggcgccactctgaacagcttgcatgtggcaacatgaggggagcagataatggtcgtccaaatttccttcctgagaaatgccagattgcagtttgtcaaagggacgaaaaggttggcccattcgatgaggacttggtgaatggtgttcatctagccaatgctgatgttcagtcaccattggtggcaagtggtgtcaaagaagcatctacagtggatcataacaagagacatgcatccagtgacatgacggacatagttgaatgcaaacggcagaagcaggaagtcacatctaaggaggacaatcatacaacaagtgctgatgaggatgttcatcagtatcccacatacacatcatatgaaagaagctttgactcaccgatatatgagagtgaggaaagtgaagatgagggtgtaggttcccctgtgcattttccacttgctcatacatatgtcgaagatgatatatggcctgccagctttcatcaatctgtgggtccttgccccacaaggaaacctgttcctattgggccaaatcatcaggctgaattacctgagtgtaggccatttggtggaagaacagaagacgatgagagtaacaagtggatcagaaacagtgtcatgccaatgcctgattctgatttattgtctttaatgctgaaacctgttcactgcaaggcaggctgtgattgtcttgatgaagattcaatcaattgtgtgaggaagcatgtgagggaagcaagagggaagctgaaggtttctgttggtacagacacctttagggagttggggttctttgacatgggagaggaggttgcctcaagatggactgaagaggaggaacatctgttccaggaagtggtctcgtcaaatcctgcttctctgcgcagaaacttttgggatgaactccctcttgccttcccatccaagtccagcaaagaactagtgagctactacttcaatgtcttcatgttgaggaagagggctgagcagaacaggtttgatccgatgaatgttgacagtgatgatgatgaatggcaagcaagttgtgatggtgagttcgcagtcacaggaagaactgatgaatacttgccaactgagtcccttaccgatcaagatgatgtcgcatgcaatcgagttcctacagagggggagttctatgaagattctgaggatgaggatgagcttgatgatgccagtggtgacaggcacaatggtgtgcagaggggtggtatgttgtcagagggtcttcctgccatgtcatttgtagatcataatcaacagacattcaagctagatgcagatgcacaagatgactcatgcacatcctttgaggctcatcagggcggtgttgaaggtgggacacctactgatattgctgaagaccaccactacaggagtggttttgatggtgttgcagaacatgggttctttggtgaccattgcgacacaaaaggttgggagtttggtttcactaccggatgggataagcatgattttctgtcgacgaacaatgtcattgaagaggtgtttggaaagggttctagcgaagatggaagtgacactgctagtggccaggaccttatctgagccagaggcggaggcttcttttcaactgtgaaagcttttgcagtttcccctgcggccctgccgctcagaatttgtacagcagtagttcgccattttgatttaatgccttacttgttctttataggaatctctcatccttccttggaacatcatctgcttgagaaacgtgattatgctctcatgattaatgtaaatccttagatgatatcctgtcatcggtcgatgatctgctgtagcctgtcgtattgttattgccatcactgtgtccgggcctgagcattttttccatgtgctagcgcagctcatgtaataaaagctgttatgattccttgagaaccgggaaaaaaaaaaaaaaaanaaaaaaaa

SEQ ID NO: 10995 - DNA, 426 bp, Setaria italica
  Peptide Sequence Number=SeqID_76969
tttttttaattcaaaaggactatcttttctggctataaaacctgtagttatacttgcaatacattaacacggcatctccagttttttcctttccttctattttcctttagctacaccaaacaatgcatcaacccatgttacacacaaagccaagaaaggcaaagaagagaagctcgaaaatggaggcaagaagagatgcacaagcgcgcgcatcgaagtgtttattacagttcgacggactcgtaggtggcggagtagtccggcatgcggtgcaggcaccggagcacgctctcggctgcctgcttggtggcggcgtcgcccttgtggaaggcgcccaccagcaagctcggcagcgcccgatcgccggtcacctccctcacgcaccgctcgctgccgtgcgcaaggaacctctccaccgcccagaag

SEQ ID NO: 10996 - DNA, 1597 bp, Setaria italica
  misc_feature (1586)..(1597): n is a, c, g, or t
  Peptide Sequence Number=SeqID_76970
agaggttatgctgctggtggagatattggaaaggcttttgagtatttcaccaaaatcaaagagagtggtctaaagcttgatgtgtacatttatgaaacattgctcagagcctgttgcaaatcaggaaggatgcaaagcgccttagcagtcacacgagagatgagctttcaaaagataccaaggaatacattcatatataatattttgattgatggttgggctcgaagaggagatgtctgggaggctgcagatttaatgaaacaaatgaaagaggatggagtccctcctaacatccatacatatacatcctacataaatgcttgctgcaaagcaggagacatgcggagagcagaaaatgtgattcaagaaatggcagatgtaggattgaaacctaatgtcaagacatataccaccttgattaaaggttgggctagggtgtcactaccagatagggcgttgaaatgcttcgaggagatgaaaatggctgggcttaagcctgatgaagctgcttatcattgcttggtgacctcacttctctcacgggcaactgtgatggagggaagcacctacacaggaatcttgggtgtctgtagggaaatgtttgagaatgatttgactgttgacctacgcactgctgttcactggtctaaatggcttcacaagattgagaggacaggaggggcactaacagaagcacttcagagaatatttccacctgattggaattcatcagaaaatttggaggcttccaattctgtaagtgatggagattctgagtcttgcactgattcagattttagtgacaatgatgatgatcatgatattgatggccactgacataatatcaagacagtgttaacctttttgcaatccttcactactgcttcagtgccagagttaagccatcaaggctatttgctagtggactgccaagaggagggtttggaatcttaccctgtttttaagcctcagctgtcggggctctgcggcatttcttcaagagtcgcagacgctcagtaacacttctgctggggctgaaggcacaggctgtcaatgcaacagacgaaggtcactcagttatgtgtgtttctgtacagaccaatgactcgtagtacaggtaggttttcttgtacaatgactctgcgcaacattttgcaaaaaggaaattcttggctttcttttgcgtcgttcatgtcaatcgtaccagccataataagaaattaagaaggcctctgcactcatttcgtagtatgacattagtaggacctagggagtaggggtttgtggggctatggttgaataccgcctctgtggctctgtcattggcattgagcgagcatttcccagcacaggacttgtaactgcacttggccaggacagtactcctatgttatagtagtgtatacacagagctttgtaacctcttctcttcctttgataagctatgagcggattagctgaattgcgtgctaccaaaaccaactgatgattttaaaccaacttgctagataaatgtgtgtggatccttgtctttgttctaatgattttacatatggtataataagagcttagattggtggcttctnnnnnnnnnnnn

SEQ ID NO: 10997 - DNA, 407 bp, Setaria italica
  Peptide Sequence Number=SeqID_76971
gtacgtctgctgccatgcgtgtaccggttggcatggccatggccatggaccatggctttaccggaccgcactgcggtaggtttcgaggttttacttggcagttggcacgcggtaacaggatacaagcagcaagtaataggatagagacacgatgcatgcacaaacacatccccggggaggtcctcaggctttgcatcagatctgctccacgaaaagaagagacgaatgggatgctcgatctgagtagccatctcctgtctgtcaccaagaattaacgccacgatcgcagtaacctttattcctgcatgcggttctctgtcgtcttaccctattcccctcccggcttttgcttttgcagcttcctcccgaatggaccgatcagttcgcatcaggcatccagaccatag

SEQ ID NO: 10998 - DNA, 344 bp, Setaria italica
  Peptide Sequence Number=SeqID_76972
cttgtatgtggcctcgcgggagagctgaggggaagccactttgacatccgtccacgcccaggcccaggagtcggcggggaggctgtcacggaggggccggacgacggcgtagaatcgggcggtggtgctgaggacgaggccggcgttggggcgctccagcacgaggtagccacccgcgacgagcaccttcccgggcgccgacgccaccacttccatggtcttcgaattctcggcggccgggagttgatcgcctccgctggagcttggcggggatggagaggggacgggctgaacagcagcgcggtggtagtggtacgctctcgcgatggcggcgacggctgggc

SEQ ID NO: 10999 - DNA, 393 bp, Setaria italica
  Peptide Sequence Number=SeqID_76973
gggtagccgcagatttatgctaggggtcaaagctaatgatgcctcacggagtgatccgcatagtcgattgattgaggaactagagattctttcagcgatgcagaagagccaatggaggagcatgctgttgttgtagagagagttcatgggattgtgcatgatgctcatccacagaacctgggtgctgaaagtgcatatccatgtgaagaaagcctctcatcatttgacaatagacatctcaaatacgaacaaaattctcatcaagaaattaggctaataggtaacgccgacaaactaaaggaagagtacaatactgaagaaaacagtaccgccaaagatgcagcagaggacgttgtagatagttctcatgagagtggcaaggattggcaatcc

SEQ ID NO: 11000 - DNA, 1350 bp, Setaria italica
  Peptide Sequence Number=SeqID_76974
tatccctgtgtgtcctttgggcaccatcaaaggcacacagtgatgtagttctcacttgtgttccaagaactccataataggactttcttgcaagcagcaactaattgtcagccacacaagcaggttatataacgtacaggagtttgcagataagagcgctctgcgcctctgcattgtttcatcttacacagatcaagtagacaccacttgaacgcctactcaaaatcccaatggttcacaagacagaaggcactaccaactagtcgtcctcctccggaagatcaaagtccctaaccttcacgtcagcatcttccccatactggatacaggagtcgatgtacgatagcacatattgtatgctgctctcctttctcaagtcaagtggtatgaaattaaccatgctgtaatcatcaaccagttcagccaaacacttgttcaacttgccaaaccggggagccatctgctgattcaactgtgacaaaagaacctgtgcgttcgggtctagatactcttccacgtcttttttgttggagaccagatccatctttgaaaggatgttgatatgaggaagttcaagctgaatcatagcagaaagagaagccatgcaaccactaatgtattttgttacatcactgacaaactgcgaatcaagaaggtacacagcacagacattgaaattcttccgtttcaaatgttcaacaaagttgcgcagaactggaacatgagtgaagagttcaatctggccagggcaatcaaacacaagatagtcatcatccaaatagttctctagctgttcatccaaccaatcatccaaactgtcttcaaggtgctccatgcagtagataaggccaccattgggccccatcccaaactcctccataacatcatccagtgaaatcagctccctgatatccatatctacgggatagttgaaatgctctgcagctggatcaagattgactatatgaattgtcctgcccacagtctggcaatggtcatacaaactggagcaataagttgacttgccgctcccggcggggccgatgacgagttgcgcgtagcccatggcggcgcgagtgcggcgaagcggagcaagtagggttgcagggtagggggtttggggtagggtttagagaacaggtggcggagggtgttgactacgagtggagagcgggggccgagggggcggtgggctagaaggcggaggagatggcggcggcgaggtaggcggcgcaccagacggcggcggcgaggagcgcgctgattagggcggacagggccatcgatggccaggagtgcgtatgtctcggcggctcgctcaactggcctggctcgggcggccgctctttc

SEQ ID NO: 11001 - DNA, 1878 bp, Setaria italica
  misc_feature (1878)..(1878): n is a, c, g, or t
  Peptide Sequence Number=SeqID_76975
tttttttttaagaaccaccatgaaaaccaaatcaacgcaaaatatgcaggctaagaaaaaaacaatccatgtgtcattacagaagaaaatggaaacaggtgatgaatcaaggtgataactagcaaccgaaacttagactagtaaacaagtagaatgaaaacgtcaagaggatctatgaggtaagaaatgtttagactgatcaaagttccgggcttccaagcaagcccagtgtgcatgtcctcagttaaactgaatagtatcagtgccgacaagaaacccttcctctactgattgaagtaagcttggaaacatcaaggcaccaaaacgagccttgatgggttgctatgtacatctgtatttgcctgataagtttctcatgaaaaatgaatgcgttgatgcttctgaaactgacgcgttgatcattggcaatatacagccaagtcgatctgtggaggtattgtcttaatttctgttccgagttcttgctcaatcctatacaagttgaaacggtcctcataagtgatcaagttcactgccaaaccaaggtgcccgtatcgaccagaacgaccaaccctgtgcaagtatgtctcggaggtcttggggaagtcaaaattaatgaccacattaacagcttggatgtcaatgcctctggtaaacagatctgtacacacaaggtttctgcaagcaccattgcgaaaatcatgaaacactcggtttctgtggtcttgcaacatcttagcatgaatgtagaagcatgaataaccaagttcagttattttcttagccagtagctcaactctattaacagagttgcagaatataatggattgattaatttgaagcttagagaaaagcgtattcaggcaatggactttctgcctttcttcaacaaaagcatagtattgagtgattcctttcaaggtcagttcatccataagattaataacgtaaggtttaggcagatatttctctttgaattccttgacagttacaggaaatgttgccgaaaacatcaacagttgccgactaggtggaaggaaatgaataagcgcctctacagaaggctggaactctggagctaatagcttgtcagcctcatccatgacgagcatcgaacaatcttttagcacacaaatgccctttctggtaagatccagtattcggccaggagtaccaacgagtaaatgaacaggctggtacaaacgcatgatgtcatccttcaagctggttcctccagtgctgaccataacttgaatgttcaggtacttcccaagctctttacagacttgtgaagtctgcagagccagttcccttgttggtaccagtataacaacttgaatggcatttttctcaggatcaattttctcaagtgctggaatgcaaaatgcagcagtcttcccagtgccatttttggctcttgcaagaatatcacttccagtcagtgcaattggaatgctttcttcttgaataggagatggcctttcaaaccccttttcatagatgcccataagcagttcacgtttcaaaaaataatcttcaaactcattgccttttgttgcagtgacatcctctgtcctatagcgtgtatctggagctggtatattcaattgcgccttccaatcttgagaactcgagtctacggcgtcgagatgcgacgccgtcctccccgcagcatctccaggccccgcggcggaggcggcggcctggtcgcgccgcagccactgctggtgcagatgcgaggaattcctatgcgcgagctgctgctgctgttgctgctgctgcggctgctggtgctggtagtggtggtggtgctgcggctgcggctgcgggttttcggccgtagtagttgtgatttccgccaccgcctcctcctcctcn

SEQ ID NO: 11002 - DNA, 339 bp, Setaria italica
  Peptide Sequence Number=SeqID_76976
tagggttacgttagtaacttactaattagtagtttgagttttgtttcaggcaaacggcagtggttgtttgaagtttgaacgggagggactggcaggcagacaggcgcatatattcaagatcttgatcatagcatggaggaatctggcgatggcaactgttcatcaactgcccggatgatccagaactcttgagagcgataggcgacgagcttccttctgcacagggcagctccttttaagcataaagatccttgtgtcacacattcctttcacaggttcgcttcaaattcggtgttgcaatagtatttccattaagaagacaatctgactgcttatttc

SEQ ID NO: 11003 - DNA, 871 bp, Setaria italica
  Peptide Sequence Number=SeqID_76977
ccgcggggggctccgccccccgtacccccctccggcccaagcctccggcgacgggcctccacttcactccgttaaaagcccgacctataccctggagtgaatttggaacaactccaacatgttaagcttcggacttcagaatgttcggagtattatattctgatcccaaattccttatgtagatcagagctcttgctatgcctgaaacgggtcgtgactcatgagttgagtttgtttcaggcaaacggcagtggttgtttgaagtttgaacgggagggactggcaggcagacaggcgcatatattcaagatcttgatcatagcatggaggaatctggcgatggcaactgttcatcaactgcccggatgatccagaactcttgagagcgataggcgacgagcttccttcttgtgtcacacattcctttcacaggtttgcttcaaattcggtgttgcaatagtatttccattaagaagacaatctgactgcttatttcagcatgcagatccatgggactgatcttcaaaattaccagcagctgctttaagaaaaccgaaggatatttatcgttccagcagtgttgcgcgcagcatggcaggcgtgcagagcttgagcaccgaggccatccccaagatccggagtggcctcccgggtgccgtcgagctcgtcctggatcatgaagtagtggagctcgtccagagcgtcctctgcctcatcggccttcttgctcaggtcctccagcaagccctgcaggccggggttgtcgctgaagtccctcccttgggcaccatgcagcagcccgagggtgtacttgagctcggtcttgatcttgtcgaagttgaggcggagctctacggtcttggtcctacta

SEQ ID NO: 11004 - DNA, 416 bp, Setaria italica
  Peptide Sequence Number=SeqID_76978
taggaagaacataacttctgtgtttatgtaaaacatttcccagaggataaacataatacatgtttgtttacatcaaggtgctacccactacatgaccatagcaagcaaaggcatacatgactaaagcttgtgccatctctacctctaaatgactcaaggtgcattttttttggacatcccattcttacatttcggatgagcaagaaacaacatgatcagtccccaaaaatatagcctgaatccaaatgcattcgtagatattcatcgtatcagcctgacaatgtttcactaaatgaagaaaccaagtaccagcagcaaagaaactgccacctctcattttcagatactctccttccaaattcagtcatgacttcatcttgcgcagccacttgagcgagttctctagctcagtatat

SEQ ID NO: 11005 - DNA, 471 bp, Setaria italica
  Peptide Sequence Number=SeqID_76979
accaggcgtcgccgccgtcgcggctgctccgtctccttgtccaggcgccgcctctccacctccgatttgcagcgacgcctccacctcggccaccacctccgcatccaccatggtggtgtcatacgtctttctcctcagcctatcttggtgacctcaaagctgctagacccaagatccgttcgtctcttcactggacattcctgatctaggatctgctaagttctaccacaagaacaagccatacctagagtgatgttactactgtggtgacaccaccatcatgacttgagataatggaatcgtgggaggataaagttagaagattcatgctagagaaggaagaagaggatgacgagctattcctagttacggtccccgcacttcagcagtgtctatatgaggagaaacggtcggagcacacctcaactctgcctggtgctgaaaaggtctagtattaaattcttttggtta

SEQ ID NO: 11006 - DNA, 415 bp, Setaria italica
  Peptide Sequence Number=SeqID_76980
tacttcctcattcattgctccataccgaggagttaagtatcaacttagtgagtttagaagacatggaaattggtatgcaaattacaaagaattgttcaaccatcggcatgcgcagctacgcaatcatattgaaaggacctttggcatgctaaaaaagcggtttccaattctgaaagttgggacatttcatccaatagagaatcaaattaaaattccagcagcagctgcagtctttcacaatcttatcaccaaccaaataatatcaacccatctgattatgttgagttgccagagggggataacaactacccaaatgaactgcaatcaaatgaaggaaccaccctacgagaccaaattgctcttcagatgtgggctacccgtaataaatagccatgtcaacggaaagggctacgtg

SEQ ID NO: 11007 - DNA, 895 bp, Setaria italica
  Peptide Sequence Number=SeqID_76981
ctttgatttaattttcactttcatctcatgtgacatagtttactttccttaccatatacatacatatagataatggaatcgtgggaggataaagttagaagattcatgctagagaaggaagaagaggatgacgagctattcctagttacggtccccgcacttcagcagtgtctatatgaggagaaacggtcggagcacacctcaactctgcctggtgctgaaaaggtcagataaatcttggaaggtcacgagaattcgtgcaaactgaagttcaagatggagcctgagatatttagagttataacaaattatcttagaatggaaaacttgttacgtgatacccgtgatgttagagttgagaagcagctgggaatgtttatatttatgctctctcatgatgcaagcaccgataggctaaaaaaaggattccaacacagtggtgaaacaattcataggaaaatagcagagttcttcgatataattccagcactgactcatagattcttgaagctcccaaatgtgaaccatacacatgtgaagattgcatcagaccctcgctttatgtctttcttctagaactgcattggggccattgatggcactcatgttcctatcaccattgcacaagaaagagctgctccctacagaaataggaaaggaaccttgtcacataacgtgatgtgtgcatgtggctttgatttaaattttactttcatctcatgtggttgggaaggatctgcatctgatgcaggggtcctacgctcttctttctactattacgaagggttttcatgtgtctgtgaggtagttctaccttataaatggtggataacgcaaaataacttacctacaatttacaatttagacttacctaattaaccgtaaggtaagttta

SEQ ID NO: 11008 - DNA, 863 bp, Setaria italica
  Peptide Sequence Number=SeqID_76982
acgagcttctcccctcctctccctctccttctccccgcgacgccgccgcctcccacctcgccgtgcccaggatgtggggcagcactgagggcgggacgccggaggtcaccctagagacctccatgggcgccatcaccgtcgagatgtactacaagcacgcgcccaagacctgccggaacttcgtcgagctcgcgcgccgcggatactacaacgacgtcatcttccaccgcatcatcaaggatttcatcgtgcaaggtggggatcctactggaaccggcaggggtggcgagtccatctatggagtaaaagtttgaggatgagataaagtcggagttgaagcacaccggggctggaattctgtccatggcgaacgctggtccaaatacaaatggaagccagttcttcataactcttgcgccttgtcagtcacttgatggaaagcatacaatttttgggagggtatgcagaggcatggaaattgttaagcgccttggaagtgtgcagactgacaaaaatgacaggcccatccatgaagtgaaaatccttcgagccatcgtcaaagattgagattgaagcttgacgtgctgagtttggctctgtgaactgtgcttgtgccagtttaggtttaatgatcctgaaagtggtgccattcgggaaaaaagattgagaaacagcctggttatgggttgtactactgttatataaaattcatcaagtggtgaatcttatctctcgatctgtctgacttgaaaacatacctgatgagttaatcagatcatcaagtggtgcatccaaccaaacatatcctcctctagtagaaaataatattgcgttgaacatgcagtttcatttggacctcagaa

SEQ ID NO: 11009 - DNA, 435 bp, Setaria italica
  Peptide Sequence Number=SeqID_76983
aacctggtcaagcaaccacttatacctctctctgcatcgtccctttatatatatactagctgtgaggctccgctctggtcgatgatatatggcgtggccgaggcgaggaagaagcccgcacaagctagcaaacctgggaggggccatgggcatggcgcgagccgcgtgacccaacatacctagcttggagatcggaagcggccgtgcacgtaaggatgtgctgagagatagagcagagagcagagagagaagctgtttgattgaggagaggagggaacagagagaaattagatcgaggagctcgagaaggttcttgattggcttcttgcctgctgatcgatcgccggaggacgtcatgtggggcctggccatggtgcggcacggcctgcggtggggggcgccggcggcggacggcgcgggtggtggacgagagcg

SEQ ID NO: 11010 - DNA, 292 bp, Setaria italica
  Peptide Sequence Number=SeqID_76984
aaagtggaagtgcgacaagtgctccaagaagtacgccgtgcagtcggactggaaggcgcacgtcaagacctgcggctcccgggagtaccgatgcgattgcggcaccctcttctccaggagggacagcttcatcacccaccgcgccttctgcgacgcgctggcggaggagagcgccaaggcacgcgcggaggcccctcccgccgaggagaacgggggctcagcggccgtcggtccgccaccggcctcccccgcctcactcaggccccagtaccagccgcgccggtgccgctga

SEQ ID NO: 11011 - DNA, 457 bp, Setaria italica
  Peptide Sequence Number=SeqID_76985
tgatcagtcgcatcttcttgcatggctggatggcggaatcgatcaaattgcagaccccgacgcggaggtggtggcgctgtcgccggcgacgctgatggcgacgaaccggttcgtgtgcgagatctgcggcaaggggttccagcgcgaccagaacctgcagctccaccggcgcggccacaacctgccgtggaagctcaagcagcgtggcgccggcaaggatgcgccgcggaagaaggtgtacgtgtgcccggaggcgtcgtgcgtgcaccacgaccccggccgcgcgctgggcgacctcaccggcatcaagaagcacttcttccgcaagcacggcgagaagaagtggaagtgcgacaagtgctccaagaagtacgccgtgcactccgactggaaggcgcactccaagatctgcggcaccagggatacaagtgcgactgcggcaccgtcttctccaggc

SEQ ID NO: 11012 - DNA, 413 bp, Setaria italica
  Peptide Sequence Number=SeqID_76986
gcccggaggcgtcgtgcgtgcaccacaacccggcgcgggcgctgggtgacctgacggggatcaagaagcactactgccgcaagcacggggagaagaagtggaagtgcgagcggtgcgggaagcgctacgccgtgcactccgactggaaggcgcacgccaaggtctgcggcacccgcgagtacaagtgcgactgcggcaccgtcttctccaggcgggacagcttcgtgacgcacagggcattctgcgacgccctggcccaggagaacaacaagctggcgcagcccatgaacatggccacggtggcctcggcgctccagggccacgcccaccacctcgccttgccgccgtcccacgccgacgacctcgatgctgccgccgaggacgacgccgacgccgacttcaacctcgacacc

SEQ ID NO: 11013 - DNA, 260 bp, Setaria italica
  Peptide Sequence Number=SeqID_76987
cggcgacctgacgggcatcaagaagcacttctgccgcaagcacggcgagaagaagtggaagtgcgacaagtgctccaagcgctacgccgtgcagtccgactggaaggctcactccaaggtctgcggcacccgcgagtaccgctgcgactgcggcaccctcttctcccggagggacagcttcatcacccacagggctttctgcgacgccctcgcccaggagagcgcccggctcccgccgccgggcctcaccgccagccacc

SEQ ID NO: 11014 - DNA, 667 bp, Setaria italica
  misc_feature (649)..(649): n is a, c, g, or t
  Peptide Sequence Number=SeqID_76988
cgtgccggctagctctttgtcgtgatcgatggcgacggcgccatgggtggtggtggtggtggtgcagatcctgacgcggaggtgatcgcgctgtcgcccaagacgctgctggcgacgaaccggttcgtgtgcgagatctgcaacaaggggttccagcgggaccagaacctgcagctccaccgccggggccacaacctgccgtggaagctccggcagcggagcggcaaggaggcccggaagcgggtgtacgtgtgcccggagcccagctgcgtgcaccacgacccgtcgcgcgccctcggcgacctcaccggcatcaagaagcacttctgccgcaagcacggcgagaagaagtggaagtgcgacaagtgctccaagcgctacgccgtgcagtccgactggaaggctcactccaaggtctgcggcacccgcgagtaccgctgcgactgcggcaccctcttctcccggtacgtgcgtcgttcatcccatgctgtgcgtgcttcatcaattccgtgcgtgtatcgtctcttctgtacgtgtacgtgcgtgtcgtcaccgtcgatctagctctaggcctactatatatgtgtgcatcgagttagtacgtgtaacttggtacgtgtacctggaatagtacttaccaagtacgaanactagactagaacaacga

SEQ ID NO: 11015 - DNA, 538 bp, Setaria italica
  Peptide Sequence Number=SeqID_76989
aacaagcgcaagcggagcctcccaggcaacccgaccccgacgcggaggtggtggcgctgtcgccagcgacgcagatctcgcacacgaaccggttcgtgtgcgagatctgcgggaagggtttccagcgggaccagaacctgcagctgcaccggcgggggcacaacctgccgtggaagctcaagcagcggggcacgggaaaggaggcgccgaagaagaaggtgtacgtgtgcccggaggcgtcctgcgtgcaccacgaccccgcccgcgcgctcggcgacctcaccggcatcaagaagcacttcttccgcaagcacggcgagaagaagtggaagtgcgacaagtgctccaagaagtacgccgtgcactccgactggaaggcgcactccaagatctgcggcaccagggagtataagtgcgactgcggcaccgtcttctccaggcgggacagcttcatcacgcaccgcgccttctgcgacgcgctcaccgaggagagcgccaaggctatcggcttcaacgccatggccgccgccgcgccggc

SEQ ID NO: 11016 - DNA, 641 bp, Setaria italica
  Peptide Sequence Number=SeqID_76990
cggatctcgtcgctgcctccccgttgggatctctcgctcgcgctcgcaccatggccgccgtcacgccgcccccggccccagcgccggcgcagggttcggggccgtcgacgacggcaggctgagcacaagggacttcctcggcgtcggcaggggctcgatggcgccgccggggctccacatcggcgcgctggacccggcccagatgaagtgatcgatatgatgatgggatcaaggcaatgaacaacaacaacaaaataagatgcaagatgcaaggagtcaataaacagacggacgtgcacgtggaagcgagctttcgcgtgcatgggaggtaagttagcttgtgaggaaccggagagatcaagtgaacttaatctagatatgtttccatttaatttctgtgtcgttgatggtgccatgacatggctagggcgctgcatgcaacttcattttgttatttcggtacaatttcgtttcgttgagtttaagtgcttaagttttggctggagattggtggtctcccctgatgtcaagttcatcatgtgggggccggagaccagacctgaacctaagcagatgttttggacgtttactgcttgttgtctcgtgctcttctggatacgctgctcccgtttgcaaaaaaa

SEQ ID NO: 11017 - DNA, 936 bp, Setaria italica
  misc_feature (35)..(35): n is a, c, g, or t
  Peptide Sequence Number=SeqID_76991
tgatcgactgcacagcacagaggagtggagagagngaaagcaagaagccagcaggagagaggagggagagagaggggagagtgatagaatctgcaattgctttccagtcattgaccacccagtttcagttttcccctcgttctgtccctccttgattcccgtgttgcttgctgttcctcgttatcccctcctccctccctgggctgcctgcctgcctgcctcggagccttgccccatcctcctcctccattctcgacgagttaaatgcctcacatccctccctagttatatatacacaagtatccaagcgcaagagcaagatcaggccaagctagcctcttggcttcagctttgctcacttgatgtcccaccgccaccagcaggataagcggaagccgcgggtcaggagcgcagcatgtccaacctcacctcctccgcctccgccgggcccgacgcgccgccggtctccggcaacaagcgcaagcggagcctcccaggcaaccccgaccccgacgcggaggtggtggcgctgtcgccagcgacgctgatggcgacgaaccggttcgtgtgcgagatctgcgggaagggtttccagcgggaccagaacctgcagctgcaccggcgggggcacaacctgccgtggaagctcaagcagcggggcacgggaaaggaggcgccgaagaagaaggtgtacgtgtgcccggaggcgtcctgcgtgcaccacgaccccgcccgcgcgctcggcgacctcaccggcatcaagaagcacttcttccgcaagcacggcgagaagaagtggaagtgcgacaagtgctccaagaagtacgccgtgcactccgactggaaggcgcactccacttcctaagtattcttgtcggtctactgcgactgcggcaccgtcttctccaggcgggacagccttcatcacgcaccgcg

SEQ ID NO: 11018 - DNA, 685 bp, Setaria italica
  Peptide Sequence Number=SeqID_76992
aacctgccctggcgcctgcggcagcgcgggcccggcgcggcgccgccgcgccggcgggtgtacgtgtgccccgagcctgggtgcgtgcaccactccccggcgcgcgcgctcggggacctcaccgggatcaagaagcacttctgccgaaagcacggggagaagcgctgggcgtgcccgcgctgcggcaagcgctacgccgtccaggccgacctcaaggcgcacgccgaagacttgcggcacccgcgagtaccgctgcgactgcggcacgctcttcaccagacgggacagcttcgtgacgcaccgcgccttctgtggcgcacttgtggaggagacaggcagggtgctggcgccgccggcgccgccatcgcctcggccgcctgatttggaggccgaggagaatgtggacaaggacaaggggcaggaggaagaggagactgaggattctgccggggccgaggtggagcagcctaagcctgtggaggcaccggccccggaagagccgcagcgcatcccatctccaccgccattgccacaggagccaccgcgccgtccgtctccaccaccattgccacaggagccaccgcgccgtccgtctccacctccattgccaaaggagccgccgcgccgtccgtccccacctccattgcccaaggaaccacagctctttccctcgccacttcgattt

SEQ ID NO: 11019 - DNA, 903 bp, Setaria italica
  Peptide Sequence Number=SeqID_76993
gaggtgtgcaacaagggtttccagcgggagcagaacctgcagctccaccggcgcgggcacaacctgccgtggaagctgaagcagaagaaccccaaggagacgcggcggcgggtgtacctgtgcccggagccgacgtgcgtgcaccacgacccgtcgagggcgctcggcgacctcaccggcatcaagaagcactactgccgcaagcacggcgagaagaagtggaagtgcgacaagtgcaacaagcgatacgccgtgcagtccgactggaaggcgcactccaagacctgcggcaccagggagtacagatgcgactgcggcaccctcttctccaggagggacagcttcatcacccaccgtgccttctgcgacgcactggcgcaggagaatgcaagggtgccgcccatcggcgccggcatgtacggcgccggcggcatggccttcggcctctctggaatggccgcctcccagctgcaatccttccaagaccaggcccactcctcggccaccaccgccatcagcggcaatccggcggcgcagttcgaacacctcatgccgacctccacctcgttccgcggcgcgcagccggcgtcgtcgtcctcctcgccgttctacctcggcggcgctgaggacggcaaccagagccaaccgggacacacctcgctgctccacggcaagccggccttccacggcctgatgcagctgccggagcagcacggccagccggggagcaacggcctcctcaacctggggttcttctcgggcgcgagcagcggcggccaggacgcgcgcctcgtcttcccgggccagttcaacggcgccgccggcgggaacggccgcggcgatggcggcgagcacggcaacagcagcgccaacaccgagtccgcggccatcttctccgggaac

SEQ ID NO: 11020 - DNA, 1019 bp, Setaria italica
  Peptide Sequence Number=SeqID_76994
ggcatgcgttctatgctagccaggcgagcaagaaccacagcaagagcaagcaacagctagtggcagcactcgagaaagagggggaggagggaggatagggaagatcgacgacagcctctgctagtccaatccagaaataaggctaccaaaagggaaaagattcccttgttcttgagcagctttgtcaaggacaaatctggagggggcgatggcatccaattcatcagcggcggctgtggcagcgctgttcggaattagggatggcggcgaccaccaagaccagattaagccgctgcttacgcagcagcagctgcctcctgcgccactgctcagcgcggccgcttcgtcgtcggcggggtccggccaggcgccagcggcgtcaccgccagtgaagaagaagaggaacctaccagatcctgacgcggaggtgatcgcgctgtcgcccaagacgctgatggcgacgaaccggttcgtgtgcgaggtgtgcaacaaggggttccagcgggagcagaacctgcagctgcaccggcgcgggcacaacctgccgtggaagctgaagcagaaggacccgctgcaggcgcagcgccgccgcgtgtacctgtgcccggagccgacgtgcgcgcaccacgacccgtcccgcgccctcggcgacctgacgggcatcaagaagcacttctgccgcaagcacggcgagaagaagtggaagtgcgacaagtgctccaagcgctacgccgtgcagtccgactggaaggctcactccaaggtctgcggcacccgcgagtaccgctgcgactgcggcaccctcttctcccgcttaacttgaggtgatggtgtagaacatggaaggtactgaatggtgagaggctcaggttggcttgagccacatgcagacctacacatgaagaaaatgtacttaaatagatgcattgaaataagctaaaaataattgaagtcaaaactgatgtactcaaaacaaaaattcaaatttaacttacttatcagttgtagtagagctcaaa

SEQ ID NO: 11021 - DNA, 1322 bp, Setaria italica
  Peptide Sequence Number=SeqID_76995
ctgctggtatccaccggtcgggaagaagatgatgctcaaggatctggccgcaattcagcagcagcagctggccgccgacgagaacatgtccaacctcacctccgcctccggcgaccagaccagcgtctcctcccacccgctcccgccgcccgccaagaagaagcgcagcctccccgggaatccagaccccgacgcggaggtgatcgcgctgtcgccgcggacgctgatggcgacgaaccggtacgtgtgcgaggtgtgcggcaaggggttccagcgggaccagaacctgcagctccaccggcgcggccacaacctgccgtggaagctgaagcagcgcaaccccaaggaggtggtgagaaagaaggtgtacgtgtgcccggaggccgggtgcgtgcaccacgaccccgcccgcgccctcggcgacctcaccggcatcaagaagcactttagccgcaagcacggcgagaagaagtggaagtgcgaccgctgcgccaagcgctacgccgtccactccgactggaaggcgcactccaaggtctgcggcacccgggagtaccgctgcgactgcggcacgctcttctctaggagggacagcttcatcacccacagggccttctgcgacgcgctcgccgaggagagcgcacgggcggtcaccgccgcggcggcggcggcggcggtggcggcgggccagcaccaccagacgcaccccgggatgctcggcgacggcgtacacctgccggccgtgctggaccacccgtcgcagccgccactgggcggcatgtccttgcaggagatgtgcctcaagagggagcagttcgcgccgtcgtggctcacgccccagcagcagcagcacctggagatgggcaaccccccgtccgtgttcgggtcccaggagtacatgacggggagctccacgccggatagcaacgcgcagccggcggcgggcctcggtttcgggttctcgccgccacccaccgcctcggcggcgcacatgtcggcaaccgcgttgctgcagaaagcggcgcagatgggtgcaacgctgagccggccgtcgaaccagggccagatggcgagcgtccacagcaccagcaccaccagcgctaacgcagcagctgctgccgcaggcagcctgcctaccactggcgcccacactggtgccctcggcttcggggcatcccatcactttggaggggatcgggagaggagcagcaggaccgatcgcgacgccggtagcggcggcaatgccgcgggcgccgccgccggaggcggcaacgacgggctcaccagggatttcctggggctacgggccttctcccacggcg

SEQ ID NO: 11022 - DNA, 1371 bp, Setaria italica
  Peptide Sequence Number=SeqID_76996
gtggcaggtgccgcgcccgctccggcgaccggccaaggcgcgccggcggcggcggcgcagccaccgcccaagaagaagagaactttgccagaccccgacgctgaggtgatcgcgctgtctcccaagacgctgctggcgacgaaccggttcgtgtgcgaggtgtgcaacaaggggttccagcgggagcagaacctgcagctccaccgccgcgggcacaacctgccgtggaagctgaagcagaagaacccgctgcaggcgcagcgccgccgcgtgtacctgtgcccggagccgacgtgcgtccaccacgacccgtcccgcgccctcggcgacctgacgggcatcaagaagcacttctgccgcaagcacggcgagaagaagtggaagtgcgacaagtgctccaagcgctacgccgtgcagtcggactggaaggcgcactccaagatctgcggcacccgcgagtaccgctgcgactgcggcaccctcttctcccggagggacagcttcatcacccacagggcgttctgcgacgcgctcgcgcaggagagcgcgcggctgccgccgacgagcctcagcagcctaaccggccacctctacggcgccacgaacgcgggcaacatggcgctcagcctctcgcaggtgggctccaacctcacctccacgctccaggacggcggccaccaccaccaccaccaccaccaccaccaccagcagcacggccagccggggagcaacggcctcctcaacctggggttcttctcgggcgcgagcagcggcggccaggacgcgcgcctcgtcttcccgggccagttcaacggcgccgccggcgggaacggccgcggcgatggcggcgagcacggcaacagcagcgccaacaccgagtccgcggccatcttctccgggaacctaatgggcaaccaaatgacaggcggtggcggcggcggcttctcttcatccttgtacaactcagctgggaccgtcgcgccgccgcagatgtcggcgacagcgctgttgcagaaggccgctcagatgggcgcgacgtcgagcggcggcggtggcggaagcgcgaactctctgctcaaggggctcggtagcggcggcgcgttgaacgggagagctgccggagcagccgggttcatggccggggagagctcgtcgaggagcgcttcacaggccgagaacgagagccagttccgggacctgatgaactcgctcgccgcttccgggagcagcggcttccccggcctggacgacggcaagccgagcacgagagacttcctcggcgtcggcggcggcgtcgtgcggagcatgggcggcgcggcggggctgccgctgcggcacggcgccgcgggcattggcatgggctcattcggg

SEQ ID NO: 11023 - DNA, 1651 bp, Setaria italica
  misc_feature (47)..(47): n is a, c, g, or t
  Peptide Sequence Number=SeqID_76997
accgagtagagtccaaggagggaggtagctgccagtcgcgcaacctnttgggccaggaaggaaggaagctagggagagtaagcgctctttgtgacttgttttctcccgatggcggccgcctcgtccgcgcccttctttgggctcggcgacacgcagatgcagccagcacagggttcctccctgccgcagcaaaactccgcggcggctgctcccggcgccgcggcgccgcccaagaagaagaggaaccagccgggcaatccaaatcctgacgcggaggtgatcgcgctgtcgccgcggacgctgcttgcgacgaaccggttcgtgtgcgaggtgtgcaacaaggggttccagcgggagcagaacctgcagctgcaccggcgcgggcacaacctgccgtggaagctgaagcagaagaatcccaaggaggcgcggcggcgtgtgtacctgtgcccggagccgacgtgcgtgcaccacgacccgtcccgggcgctcggcgacctcaccgggatcaagaagcactactgccgcaagcacggcgagaagaagtggaagtgcgacaagtgcaacaagcgctacgccgtgcagtccgactggaaggcgcactccaagacctgcggcacccgcgagtaccgctgcgactgcggcacgctcttctccaggagggacagcttcatcacccaccgcgctttctgcgacgcgctggctcgtgagagcgcgcagatcccacccatcggcgcaggcctctacgtcggctccggcagcatgagcctcgggctctccggcgccgccgcccagatgcatggcttcgcagaccaaggccagtcctcttcagcagcagctgccgcgcagttcgaccacatcatgccgtcgtcctcgggcccctccatgttccgttctcaggcgtcggcctcctcgtcgtctttcttcctcggcggcggcgctccttctcccgcccaggacttctccgaggacggcgaacactcccagggcggccagggctcatctctgcttcacggcaaatcgcccttccatggcctgatgcaactcccggagcagcagcaccagccgggcagcagcaacgccaacggcaacctcctgaacctcggtttcttctctggcaacggcggcggctcggccggcggccaggacgcgagcattgccatacaagaccaattcaacgccgccgccggcggcagcaacgccgagcacggcggcgtgatggcgtccatgggaagccacctcagcgccggcttcccttcttccctgtacaactcatctccatcagccggcctgccgcagaactcggcgacggctctcctaatgaaggctgcccagatgggctcgacgtcgagcacccacaacggcccgagcgcgctgctccgtgcggccggcttcagcgcctccagcggcgggcaggggactagcagggctgcaggagaagggacgtcgcacgaggcgcacttccatgacctcatcatgaactctctgacaggcggcggcggcggcttctccggcgccggcgcagggttcggggccgtcgacgacggcaggctgagcacaagggacttcctcggcgtcggcaggggctcgatggcgccgccggggctccacatcggcgcgctggacccggcccagatgaagtgatcgatat

SEQ ID NO: 11024 - DNA, 297 bp, Setaria italica
  Peptide Sequence Number=SeqID_76998
cgatccccgacgacgactgccgcagcgactgcggctcctcggcctcggtcgtcgacgacgactgcacggacgcggccgcctcgccgtcctgccggctcccgctaccgttcgacctcaacctgcccgccggctccggctgcggagccggcgttgggtggtacggcgacgaggaggacgagatcaggctcacggcgctgcggctgtgacgtcaagctcaagttagccgctgcttagagaaagaggaaaggagaaaatatttggttcttcccttctcttgtagcctacacgaactccctc

SEQ ID NO: 11025 - DNA, 267 bp, Setaria italica
  Peptide Sequence Number=SeqID_76999
gatccaaatccgagccccgatccgcacgcgcccatgaatttcttcagctccgtcttctccgcccccgccgaggaggaggagggcgaggagcagcgggagggggagcaggagggcaagcaggagccggcggccgagcagtcgggcggagggtggattttcggtgggctgatcgacacgctcaaggaggagattgaggagcagcggagggtgaatgagtcggccgccgccgcggaggaggaggaggtgcagcagggagccgagggggac

SEQ ID NO: 11026 - DNA, 1201 bp, Setaria italica
  Peptide Sequence Number=SeqID_77000
ttatcttaacaaataacattagtggaccaattccatcatgtcttatggaaagagttgacctgagcatattgaagttaagaggaaacaaattacatggcgtgctacctgaaaatattagagaaggatgtaagcttcagatagttgatttcaatgaaaatcaaattgaaggtgcgctacctagatcactagcaaattgccaagacttagaggttcttgatgttggcagtaatcatattgtagattcatttccatcatggatgggtactcttccaaagcttcgaattcttgtgttgagatctaaccaactgtttggcactataagggatcttcgcagtggctaccaacacttcacaagtttgcaaatagttgatttggcctccaactatttctctggtgacttacattctgaatggtttgagaattttatttcaatgatgaataacagcaatgatgaggggcagatattagagcacgaaacaactggatcatggacatcattgtgtcaagatactgtcactatcacattcaaagatgctactttaagcatcaccaaaatccttactactttcaaagtaattgatttctcaaataactcatttgagggttccattccaagttcaattggaaggcttgcttcacttcacggacttaacatgtcgcacaataacttcacgggagaaattccatcacaacttgggaagttaacaaggttggaatcaatagatctctcttgcaaccatctctcaggagaaattccacaggagtttacctccctaacttctctttcctggttgaacctttcgtacaacaacttgacaggaagaataccgcagggaaaccaattcttgtcatttcccagcagttcgtttgaaggcaatgctggcctatgtggaattcagctttccaaggaatgtgacactcgtccagattcaaccaccccaagcatattggctccagaacgcaatactttgtggcaggatagacttgatgccatcattttgttcctctgtgctggcttgggctttggcgtgggttttgcattggcaatcatattcggtcccttttaccacatagaagaatggctttgcaagcatttgtaatagtaatataagttttcaacaagaataattatgtaatgtttgtgttgtactcgttattagtatgagacagcttaaatccaacttagttgtaattacgttgt

SEQ ID NO: 11027 - DNA, 344 bp, Setaria italica
  Peptide Sequence Number=SeqID_77001
gacacgaacgccctctggtccaggttcccgaacatggccgcctccgtttccggcggcacggcggccaagtatcttgaccggcagaatctcgagaaactggagctcgggtactgcatcaatgcgtccatcgggtcgcagaacctcatgatccgatcgaagcgagcggcactgattttgagttctgcttcctcctcctcctcttcttcttcctcagtacctgtagtagcaccgagcatcgttcgccacaggtgcgcctcaagtgagtacctcctccatgactgctcccctgcatctgcatcgctgacacagttatctgaagataccatcatgctagatgcaatcat

SEQ ID NO: 11028 - DNA, 982 bp, Setaria italica
  misc_feature (939)..(982): n is a, c, g, or t
  Peptide Sequence Number=SeqID_77002
taagcttaaatcagaatgtgatcttgaagcctgtggagttccttcgtggacgagggatatccaatgaggatgttgcacggatggtggtccggtgccctcagattctattgcagcggatcgagctcatgaagaacagcttatacttcttcaagagtgagataaagagaccaatgagtgaattgttggaatacccagagtattttacttacagcttggagtcaaggatcaagcctaggtacatgagagttacaagtaaagggattaggtgtagcttggattggttcctgaactgcagtgatctgaggtttgaggaaaggatgcgaggggactttattgaaggggatgcaccaggacctttgtttacaatgggtgggaagcttcagatgccgggcagccagctagtgtcggatgatgataacgaggataccgatgatgaggtgctatataggcggacagtcatgctctaatatggtggagtttaataccaaaggtcattcatgacatgttttcagcagtatcatattagcgagcatcctcacatgctaggtgagaaggcaccagaacatgattgaggagtgatctcttggcaccagccaaagtagtcggagtgcccaaacaacaacttgaagggattggcaactcgggtacagcctttgatcatatgccccagcgatgaaagtcagaggtccatcgataatttaagcaggactgcaggagatagaatggatatgatgtgctggtgatgaaaatctccctccagctaaacagttgatcattgcattggttgatttatgctactctaagacatgccatgggttgatcatgcaatagattcagatttttgtaaatgtgaactacttaccatctttaactcaaatgtttgcataactttgacccgatgaaatagcacatgacatacagcttgcattgtgttccaannnnnnnnnnnnnnnnnnnnnnnnnnnnnnnnnnnnnnnnnnnn

SEQ ID NO: 11029 - DNA, 589 bp, Setaria italica
  Peptide Sequence Number=SeqID_77003
aaggacaagaagtaaaccaatcaattgtgtacaagtatcaaatactaggcaggaaatggttatctagtaattgcaggattcttaaaaataattaatggggttaactagatccgtaccactgcaagttcagtggctttaaaataggacactgcaacttttcgatatctgaaatacattctttccattttatttttttgacaaatcgtgatatatctctatataatctatctctagttcatttttcttagttttattgaatttttaatagacaaacaacaattcttaaatggccgagaggcttgctttccttgttagttgtaatatacattttttaaaaagcttgatccatgcataactgaactgtgtgaaagaaataatatacaattgacaaagcttttatttttatgcattgtgatgacattaaaggtggaaaaatcacattcaacttattccagttgatgtttcatctctgtagtccattcaagcatgctagccacacaattattgcttgatcatttacagttttgattttgattattcttaatctaattgagtattactgattacaaataattcttcctataaagca

SEQ ID NO: 11030 - DNA, 194 bp, Setaria italica
  Peptide Sequence Number=SeqID_77004
ccccgccctcccgctgcacctgcacggagggggagggggagggggagaccatgacaagaggaagcaaggatccacaaggaaagatggcaagttggtagatgccaagacggaacggcggctggcgcagaacagagaggctgcgaggaagagcaggctaaggaagaaggcttacgtgcagcagctggagactagca

SEQ ID NO: 11031 - DNA, 1168 bp, Setaria italica
  Peptide Sequence Number=SeqID_77005
tgcgcccgcctgctgccccgcccccgccccgcccaagctttcagcagcaccaccccgccctcccgctgcacctgcacggaggggagggggagggggagaccatgacaagacggaacggcggctggcgcagaacagagaggctgcgaggaagagcaggctaaggaagaaggcttacgtgcagcagctggagactagcaggatcaggctccagcaggtcgagcatgagctccagagagcacggtcacagggcctgttcgttggagggtgcagcgccgccggggacatgagctctggagccgccgcgttcgacatggagtacgcgcggtggctggacgacgacggcaagcggctggcggagctccggggcgggctgcaggcgcacctggacggcaacctgggcctcatcgtggaggagtgcgtgcagcactacgacgagctgttccagctcaaggcggctctggcgcacgaggacgtcttccacctcctcaccggtggctgggccacccccgccgagcgctgcttcttctggatgggcggcttccgcccgtccgagctgctcaagatcctgatcccgcagctggacccgctgacggagcagcagctactggggatctgcaacctgcagcagtcgtcggagcaggcggaggaggcgctcgcgcagggcctgcaccagctgcaccagtccctggccgacacagtcgccgccggcacgctcaacgacggcgccgccgcccccaactacatgagcctcatggccgtcgcgctggagaagctcgccagcctcgaaagcttctatcagcaggccgacaatctcaggcagcagacgttgcatcagatgcgccggatcctgaccactcggcaggcggcgcggtgcttcctctccattggggagtactaccgccgcctccgagctctcagtaacctctgggcttcccgtcctcgcgagaacttcatcggtacagagagcctcagtcccacagcaacggagctgcaggtcatgcaccaacagcagcagaaccaattctcaggattttgaggcctcacctggagggtgtagacttaggggccgccagtgatgtgacaaagattctgatttttgagagggagatgcattgtaatgttctattattaaagtactgagaaagcagcatcactaggcgaaaggaag

SEQ ID NO: 11032 - DNA, 867 bp, Setaria italica
  misc_feature (813)..(867): n is a, c, g, or t
  Peptide Sequence Number=SeqID_77006
ttgtagcatagccttgttcttgcggcagtcggctttcaaacccagctccccagcagctaaggctgtggttgatcagctactccgtgtcgtccgcaagggtgaatatgatgtgttgctcctcccatgtatcaccgcccttggctgccttgcacgcaccttcacagcaagtgagaccagggtcatcgcccctcttgtgcagcttcttgatgagcgtgagccaccagtcaccaaggaggcagtggtcgcactcactaagtttgcatgctctgagaaccacctgcatctgaaccactgcaaggccattgttgatgatggtggtgcacgccaccttgtccagcttgtctacctcggtgacgaaattcaaattgaggcactgatactactctgttacattgcactgtatgtgcctgagagtgaggagcttgcgcaggccagtgtgctggctgtgctgctctgggcatcaaagcaggctcacatggtgcaggacacacgtgtcgaggcgctactgccagatgccaatgcgaggctggagctgttccagtctagggcctccaggtgatattggaaatcggataactggacatgggttagtagttatttgctgcaatgtgtaactagagtagaattatttccattgtccgcaattgctcttgtgaggtatattacattttattctgtacatacaatgccatcaatttgtctccgaaattggttgggggtttttgaattataaattcaagagacattgaaacacaacatactgtccatggatttactttgttcagaattttgctttggttctaattttttttnnnnnnnnnnnnnnnnnnnnnnnnnnnnnnnnnnnnnnnnnnnnnnnnnnnnnnn

SEQ ID NO: 11033 - DNA, 525 bp, Setaria italica
  Peptide Sequence Number=SeqID_77007
gaggtggaggatcctgagatcaaggcacatttgaaggccatggcggcgaaagctttgtggaagcttgctcataaccatttgggggtctgcaagagtattacagagtcacgtgcgctgttgtgctttgctgttcttcttgagaaaggtgatggagatatgggcaccgatgtacaattcttctcagcaatggcaatcatggaaattgctcgtgttgctgagcatagccttgttctgcggcagtcggctttcaaacccagctccccagcagctaaggctgtggttgatcagctactccgtgtcgtccgcaagggtgaatatgatgtgttgctcctcccatgtatcaccgcccttggctgccttgcacgcaccttcacagcaagtgagaccagggtcatcgcccctcttgtgcagcttcttgatgagcgtgagccaccagtcaccaaggaggcagtggtcgcactcaccgaggtagacaagctggacaaggtggcgtgcaccaccatcatcaacaatggccttgttgta

SEQ ID NO: 11034 - DNA, 325 bp, Setaria italica
  Peptide Sequence Number=SeqID_77008
gagactacgaatgtttgaagcagactttgtcactatctcgtggctcgcatcattttttgtgggaccacttatgattcttatcgttttctgggaccatattatgatttgcatcatgattacattaactatttctgtttttatttgggataacatagccatcctctgtttggccattggatggatcctattttcttagctattgtgtcactggttgtgaaacataaatttgatatagagtgctaaatttacagccttgcttacttacatgaggcaatcgaaccaaaagttgtgcaccgtgacatcaaatccagcaatatcttgatcg

SEQ ID NO: 11035 - DNA, 1746 bp, Setaria italica
  misc_feature (1707)..(1746): n is a, c, g, or t
  Peptide Sequence Number=SeqID_77009
cctcgcccccctcacaccgcacccagagctaggtttttagccgccgcccctcccccattctcgccgcggcggccgcacgcactgacctcctaccggaagaagcctcccagtgccccccgcttccgctccgtgccagatcgttgtttatgagctcgaaggagaagcccacccttggaggcacgcggattaagacccgcaagcggaatattgcagctcctttggaccctgcatcattctctgatgcaattgtccagatttatctggataatggtggagatctggaacttgttgccaaaagtatcgagtcctcggatctcaacttctcacgttacggtgacaccttttttgaggttgttttcgttggagggcgaacccagcctggcacaataaaacctgaagaagaaggagaccgccacccttattctgtacttgattgtgcggcacagcgtgaagcaattttgccttttgtactctatcttcagaaaacattacgcaggaggcctttcttaattaagaatcttgaaaatgttatgcgaaaattcctccaatccctggagttctttgaggaaaatgagaggaagaaacttgccatattcacagcccttgcattttctcagaagctatcagggcttcctcctgagacagtattccagcctctgctcaaggataatcttgttgccaaagggatagtactttcattcatcactgagtttttcaaggagtacctgaaggaaaacagtttggatgatctaattggacttctgaagaaaggcaaaatggaggacaatctgctggacttcttcccatcagccaagaggtcctctgaggctttatctgagcatttcaccaaggaaggtttgactagccttgttgaatataatgaaaagaaaatgtttgaagttaaacttaaggagataaagtcaactttgactaccatgatcaatgatgaggctgaaatttctgaagtcattgagactgtcaagcaacaagttaaagatgccaaatttcctgatatagaggttatccgaatgctgtgggatgtgcttatggaggctgttcagtggtctggaaagaaccagcaacaaaattctaattcagcacttcggcaggtgaaagcttgggctgagcttttgaatgctttttgcacgagtggcagattagaactggaactgatatacaaagttcagacacagtgttatgaggatgctaagctgatgaagctgtttcctgagatcataaggacactatatgaccaagatgtcctagctgaagatactatccttctttggttccgtaaaggttctaacccaaagggcaggcaatcttttgttaaagctctggaaccatttgtcaaatggctagaggaggcagaggaagaagaataagtttgtcctcctggaggctggtcagatcttcctgaagtatttcccaatatttctatggtttgaagtttgtggaggaagttatgtatctttgctgcttgttacaggcgtaagatttattttctcattttgtgctgcctggctctctttctcttctgctggatgctataatgtgaagcaaatacagtcgctgttgactttgcgagggtttggtgaaacggttgctatcattacccaagtgaattgtttaaacggtttctatcattactcagatgaatcttttaagtcgctacagtatgttaagttaaaaaaaaaaaaaaaaacnnnnnnnnnnnnnnnnnnnnnnnnnnnnnnnnnnnnnnnn

SEQ ID NO: 11036 - DNA, 2380 bp, Setaria italica
  Peptide Sequence Number=SeqID_77010
tatggatgcaaccagaaggtattttaatcacgatataatcagatggaattagaaagtccttcagagactactgttatcggatctgttgaaattttttggcaccagatctccattggatcttgtaggaaaataatatccacatatttgtgaccaacattgccataatctcttggtctcactgttgaggatgatattgtgatgcaaatcttgtttttgagtttgaatgcatctctgctgatacagcacttcaatatcagataagatgatcgaaattttatcatacttgtatcatcctttatctaaggagttttgtggtttagcacatatggttcctttttgctctgggcctatgactgatgctaatttttcattcaagtacagaagttattattggttttgatattgtaattgatgaagacattataattgaagctgaagaagaaaaacaagaaaaaacaagcaaagaaagagaaaggaaaagcgcgaagcgaaagaaaaatagctatttctgaactggttttatatattaaaacaatgagctcataaagggcatgatagataaggcccagttcgggcaatatgggatagttcatactgttcatgaactctatggtgcagatacagctggaatactgctctcgacattcagccgcttgtttacgctgttcttgcagtttcatggttttacttgtggggtggatgacctgctactatgccaaaaagccgatgaagcgagaaggtcaattatcagtgaaagtgacaagtacagtgaaaaagcccacgggacatttataaaaactggaaaggatggtgaagaattgcaaatggaggtggaaaaagttataagaagggatggggaatctgccacagttaacatggacagagaaattagtaatgctctcagcaatataacatctgatgtcaataaaaatgtattcccttatggtctacaaaagccttttcctggaaattgtctcactcttatgactgcaactggagctaaaggtggcgatgtcaacatgtatcaaatatcatcattgctagggcagcaagagttagaaggaaaacgtgttccgcggatggtttctgggaagactttaccgtgctttctgccatgggatacttcttcaagggctggtggtttcattagtgatcgatttttaactggtctgcgccctcaagaatattactttcattgcatggcaggcagagaagggttgtgtgacacagcagtcaaaacatcccgtagtggataccttcagcgttgtcttatcaaatgtctggaatcgctgaaagtctcttacgatcacactgtacgggatgttgatggatcaattgtacagttctgctatggagaagatggagtcgatgtgctgaaaactagctttctcaacaagttcaaagaacttgctgataacaagaaagttgtccttgacaagataaaaggccataagcagaatcagctgttatcaaaacctaatggctacattactacactgcctaagaagttggttgctgaagcaaaagagttccttaagctcttaaaggaaaagaaaagcagtgacattaagaagggactaatgtgtgacattaagaagaagggactaatgaagttactgaaagtcaaatacctatatagtcttgtagatcctggcgaggctgttggtgtggttgctgctcagtcaataggagaaccttcaacacagatgacgctcaacacttttcatcttgctggaaggggtgagatgaatgtaacgcttggcatacctcggttaaaagaaatactgatgactgcatcagctaatattagtacacctattatggtttgccctctgcttgaaaagtggactagggacgatgctaggcgggtggctgcaaaacttaggagggttcgtgtagctgatatagtggagaaaattgaagtatgcacagttcctttttacaatactaatgggcacgtttcgaccctgtacaagttacaaatgaaactctacccacaaaagcattaccctcctcagtcagatcttactgtagatgagtgtcagacaaccttgagaacagtttttgttgatgcgatggaacatgcaattgaaaagcatctagatctgctgcacaaaattaatgaaattcgtgctgttaaggtaaatgatgcagagggctcattatcagatggcggtgaagaatctgaaagtagacatggtgatggagaagagactggtatgagtgatggtgatgatgaaaatgataatgatgatgacttgggaactgatgcagaaaagaggaaacggcaagagagagatgagatggagtatgatgatgatactgaaaatgaagagggaatggatagtgaatctgaggaaagagaaccaaaagtttaaaa

SEQ ID NO: 11037 - DNA, 633 bp, Setaria italica
  Peptide Sequence Number=SeqID_77011
tttgggtgctgtcatgtctttctccactgggcttgccaatatcagcttaaagcataatagtgtaggtttctatcagatggctaagatagctgtaactccaacaatagttgtagcagaattcattcttttccagaaaaaggtttctgttcgaaaggttatcacgctggttgttgtctcatttggtgtggctgttgcaaccgttactgatttggagttcaattggtttggtgcttgtgtagcacttgcttggattattcctagcgctgtgaacaaaatcctgtggtcaaatttacaacagagtggaaattggacagctcttgcgttaatgtggaagacgaccccaattaccatatttttctttattgttttgatgccattgctggaccctccaggccttctgtctttcaaatgggatttcaagaacagcagtgcaattattatatctgctttgtttggttttcttcttcagtggtctggtgctttggcactcggtgcaacctcagctctcgctcatgttgtgctaggtcaattcaagacaattgttataatgctatctggttatctggtatttaactctgaccctggattcaccagcctctgcggagctgtcattgcccttgctggatgtcagtg

SEQ ID NO: 11038 - DNA, 465 bp, Setaria italica
  Peptide Sequence Number=SeqID_77012
ggggtccccgttcctgcggctcggctgccgctccagcgcgtcggtgcgctgccgcggcgcgctctgggaccgcgccttggcgcgggacgactcggtgttggccatgtagctcgggcacgcctcggaggccgacgacgacgcgtgctgcgggctgctccgcgccgtcgccaccgagaactcgtcgaagtggccgctgtacgccctcgggctcagctccgtcatcgccgacggcgccggggagcaccggccgtggtgctcgacgaggagctgcctgtccttggccgcgccacgccgcaccggctcgccgatgtccatctccacgatcttggcgttctcctcgcaggacctgtccatctcgtaggaccggcggtgcctcgggtgctgcggtgactgccgtggccttggcggcggcggcggcgggtggtggtgctcctggagaacgcgcatgcgctgcgcccgcaggtg

SEQ ID NO: 11039 - DNA, 416 bp, Setaria italica
  Peptide Sequence Number=SeqID_77013
catgtcatcttcaaagctcaggtggtcccttattgtaccatacgctacagctttatgagcatctagttatttgtggattaaaagggtgttttccctttttttttcgagttgtcttttcatgcagtaatctttacattcgtaggttgatgaagatggagagctattactgaagcacacattgaatggtcatgagaagtcggtgatgatggttgcatggagccctgatgattgtcagcttctcacgtgtggagtggaagaaaccatccgacgctgggatgttaaatctggcaaatgtcttcatgtttatgagaaacctggcattggtttaatatcatgtgcttggtttccagatggaaagcaaatattgtctggtctagccgatcaacacttttgcatttgggatttagatggtatgg

SEQ ID NO: 11040 - DNA, 2120 bp, Setaria italica
  Peptide Sequence Number=SeqID_77014
tcaaaacgcgcaagagcatcctcagtagaatctgcaagcttgccagattgtttctcgttttcgaaatctgccaatcctttgggaagtacaatggctagacctttgccttcccaagggaaagaagttatggttggttctaagggtgttattaagaaagaggagtttgtcaggataatcacaaaaactctgtatagtcttggatatgaaaaaagcggagcagttctggaggaagaatcagggataactttgcataaccctatggtgaatcttttcagagagcaggtgattgatgggaattgggataatgcagtggttaccttgaataagattggcctactcgatgagaacattgtgaaatctgctgcatttttgatattggagcagaaattctttgaacttctgagagatgacaatgtcatgggtgctatgaagacattacgaagtgaaatcacaccccttggtgttaataggaaaagagtgcacgaattgtcgagctgtatgatctcttgttctccacaacaattgttcgttggtttttcaaagcttggcattgattcttctacttcacggttgaagctcctagaggaactgcaaaaggtgctccctccaacagttatggtaccagagaggaggttagagaatttagttgagcaagcacttactgtgcaacgagatgcttgctatttccataattctgtagatgggttatcactctacattgatcatcactgtgggaaagatcagataccatctcgcacgctacaggttttgcatgcgcatcataatgaggtgtggtttatccaattttcaaacaatgggaagtatttagcctcagcatcaaatgataaatccgcaatgatatgggaggttgatgaagatggagagctattactgaagcacacattgaatggtcatgagaagtcggtgatgatggttgcatggagccctgatgattgtcagcttctcacgtgtggagtggaagaaaccatccgacgctgggatgttaaatctggcaaatgtcttcatgtttatgagaaacctggcattggtttaatatcatgtgcttggtttccagatggaaagcaaatattgtctggtctagccgatcaacacttttgcatttgggatttagatggtatggaagtagattgctggaaagggcagagatcaacaaaaacgcccgatcttactgtaggaaaagatggaaaggttataataagcatgaatagggagaacacaattcttctacttgatagggagacaaagcaggagaggctaattgaagaggatcacacaattacttcattttctctatctgaagatggtgatttcttgcttgtaaatcttgtaaacgaggtgattcatttgtggaacatacgaaatggtccgattcgagtcagtcggtacagtggccataagcgcagccggtttgtgataaggtcttgttttggcggatctgagcaggcgttcattgctagtgggagtgaagattcacaggtctacatatggcatagagccaccggggatctcattgagactctggctggtcattcaggtacagtcaactgtgtaagctggaatcctgcaaatccccacatgctcgcatcagcgagcgacgatcacaccattcgtatatggggtgcaaagaaggccagtctgaagcgcaaggatgttgggagcagcagctgcagcagcaatgggatccacgcaaacggcaacacccatggcaatggtttcattcaccagtgcaacgggaatagcaccaaatgataatcaccaaggcaatgtatccccatggatggttgactggcacctgtaaatccccctttcctttactttcctccaggacgaagaatcgcggccgccatagtaaagaaaatgaaaaaaccaaaaaaacaaaagctgcagcacaaagtgtggggaaaccatctgggtttcgtgcgccatctttcccttgttctaccatgactgttgtcacatttatttcttaattcaagctgggatagaattatgatattaatttgtagcttttatatcttgatttgccctccctgattgattgtaagtgcattttggtggtcatgatggttaattcctctgattgaactaaaaaaaaaaaa

SEQ ID NO: 11041 - DNA, 636 bp, Setaria italica
  Peptide Sequence Number=SeqID_77015
ttggctctataatattgtcctagaaaaaggttagtgccattactagaggtacatgttatgtgaagtttgtgctgataagtgtgattataggctataaaacttgttgatgcagaaaccaaaaagctgagtcttgtaattcttgtcatttgttattagtacgagcacctgtgatgacaaaatacagtcagatttccagtttagtgctatgccgggatgaaagccattcttctcatgctattagtttctgttatcttcaatccagccaggaactaacagcgtgagaaggggaaacttattttctgcagaatgcatccagaattcactaaaatagtctgcaaatctgggtgcaatctgccttgaataatggcatgttgattgccctaaaaaatggcatgttgattttaccagtttataatgctgagagaagttgctcactatttgttggtaaattagctagtcatccacttatccatgcttggtttgttcatccgtccaactctacttcattgtatacatcatctcacctttctgtttgtgtaataactccataaatgtaaaaactgctttctgctgaatatacttgcttcatatataattcaatggttattcttcaggggggtagctctgaattgccaa

SEQ ID NO: 11042 - DNA, 716 bp, Setaria italica
  Peptide Sequence Number=SeqID_77016
cctaactaaccacaatcacaagggcatcagacactggactcaagactcttgactcaactcttgaatgagcatctagtagcttatagaaagaaactagttatatcctcaggtggaccgggaaatgtacaggttgtgaggtagcaaaagagcgttagggtcaatgggcatcatcaaatgctcaggcaaatgtaactgcacagtgcgcgggctctttgttcccgcaagcaaaaccttcgattcttacttttgggctgctcgccccgcaagacggagaacctacttcagctcttccagctcccattttgccgaaagagctccctagaggagaaaaggatggtgttttcttaccaaacagtgggtcatggataacagggttgttagtgcgtacaggaggcgagccacagaaaaagcccgcctggctgcttggatcagtatctacatcagggtcattcttgctaaggatgagatcaagtatatcacaagtggactccgctctatacactgggagtgccccattaggcttggggctgggtctactgagggagtccacgagcaagggtggacgggaggcacggcgaggctgagggcagatgaggtctattcgagccccaggctgcacatccatctgccaaaaccttgaccttaggtcagggattggttccaccctggagagctgctggccgccccccgcgccaagcctcatcatgtagtgctcc

SEQ ID NO: 11043 - DNA, 312 bp, Setaria italica
  Peptide Sequence Number=SeqID_77017
aaccatctaacaatgacaagagttcgaatctgctacaagatattctaacacagcagcctggcagccatggtggagaggcggcagcggaggaagccgctggtgctcgcctccacgcaggcgctgctcgactcgctcccgggggaccgcccgccgccgccgccgcaggagccggtgcgcctccgggccggcgtcctccgcttcccctccggaggaggaggcgccgagttcggggagctcgcctcgttcgtcgccctccccgcgcccgcgctccgacggctcgcggtcgtcaccggcacgccggtacttgtcaag

SEQ ID NO: 11044 - DNA, 313 bp, Setaria italica
  Peptide Sequence Number=SeqID_77018
aaagaaataaaagaaaataaataagacttaagaacaactctcgcacccaaacattgtgcagtatcatggaagtgatctgactgatgatgcactttccatttatcttgagtatgtctccgggggttcaatccacaaattactaagagagtatggctcttttaaggaacctgtgattcgtaattatactggtcaaattactaagagagtatggctcttttaaggaacctgtgattcgtaattatactggtcaaattcttgctggtcttgcctacttgcatgggaggacactgtccacagagatatcaaaggagcg

SEQ ID NO: 11045 - DNA, 2460 bp, Setaria italica
  Peptide Sequence Number=SeqID_77019
ggcggcggcgcgcgcgcggtgcccggcggggcacgggctggtagggtacaagctcccggtgcccgcgccggacccggagccgccggagctcgtcgggaccctctacgaggaggaggtggcctcctccgcggaggactccagcgcgtgctccgtcgggtcgtcggacgaggcgcaggatcaccatgggtttaggtcaatggatcctgttgcttttggtaggggaagaaatatgccatctgattcagatagaatgttaaatgaagacaagcatgtcatgtcttgtagcatgccacgggaccatcagaagttctttgacattcctgtgtctagtgtcagagaacatcatttgcatagcgacgaaccttcaacgagtgaaaccagttgttcacgtggaagaatggtatctgaagatctctttgctccaagaacgaggagcctatcccctgtaccaaaaggccatgcattcgccatgagcaatggaaattctagagaatttgggtttagcccgagatcgccagtgagaatgatggatggtttgaggagcccacctcatcccttacctcttcctccaggttctgctgcttgctcgcctcttcctcccgcttccgctgcttgctcacctctccatccagcttctggcgcttgctcacctcttcacccagctgctgctgcttgctcacctcttcctccaaaccacagttcttgctcgcctcttccatcatctccgagttcctgcccacctcttcctgcatctcccactacttgctcacagtcccaatcacaatggaaaaaagggaaattgctaggcagtggtacatttggccaggtttaccttgggtttaacagtgaaaatgggcaattttgtgcaattaaggaggttcaagttattatggatgatccacattcaaaggaacgactcaaacaattaaatcaggaaatagatatgcttagacaactctcgcacccaaacattgtgcagtatcatggaagtgatctgactgatgatgcactttccatttatcttgagtatgtctccgggggttcaatccacaaattactaagagagtatggctcttttaaggaacctgtgattcgtaattatactggtcaaattcttgctggtcttgcctacttgcatgggaggaacactgtccacagagatatcaaaggagcgaacatacttgtgggccctaatggtgaagtcaaacttgctgactttggcatggctaagcatatatcatcttttgttgaaatacgctctttcaaaggaagtccttactggatggcgcctgaggttataatgaacagtaaagggtacagtttagcagtggacatttggagtttgggatgtaccattattgaaatggcaacggcaagacctccttggcatcaatatgagggggtagcagcaatatttaagattgcgaacagtaaagatatacctgaaatcccagacagtttttcggaggaagggaaaaatttcttgcagctttgcttaaaacgtaacccagcatctcgcgcctctgcagcccagttgatggatcacccttttgttcgggatcatcctgcggtgaaagctgcaaaatccagtgcattgagtgcgttgtcttctccagctgatggcaggctcacaatgtccaacagggagttgccatcacggaagattattactcctctgagggatataggactgagtgcgagagatttcactggattttcaactgctgttccttcaccgcacagcagcccaattcctgggagaacaaacatgtctatgccggtttcaccatgctcaagccctctgcggcagtttaagcaatctaacaggagctgcatgccctctccacctcatccaatgctttcccccggtgctggctacaacacattaagttatgcccaaaatcaaacaaggcgaagtcctgctcctgcgatttcagatccttggatggatgttggccagttgaaactccaaagcccctatggttccccgaaaagattctgagaaggaaaatcaagaatgcaatatctccatgacaaggtatacagagatgttccatctgcaactcgtgtgtatagttacaacgatatgagactttaccggatgatctgtacagcgaaatcaggctctccaggaaggaagttgtaacaggaagttctgtatattcgtaggtctgttgttggttccactctatagttatacctgtgtgtcctgatgtaaatcctcacaaaatcttacagatgcctacgggatgtaaattcgtaagcttgtacgagctgatatttctgtgcaagtagaagcagttaggactttgatgatggcagatgcaaccatgtctttccgagtgaatcggagaaagatacatgttacggtttaattaaaaaaaaaaaaacactcatctctggattctaagcagattaattgaaaacaaaggaaactaatagaaataaaaaaaaaaaaaa

SEQ ID NO: 11046 - DNA, 907 bp, Setaria italica
  Peptide Sequence Number=SeqID_77020
agttggcgatgtccagcggctccaccaggcggcggaacagcgtgcccaggcccacccactcctcccgcgcctcgaagccgtccggcagctcgcgcctccgcagcatctcgatgatctcgtcccagagcccggccagctccaacctccgcacgttggcgttgaagtcgtgcacctcccgctggagcttgaaggagtcgtagtaggtcacgccgcggagttcgcatgctctcttgtagtcgtttagggatctgagggcctcctggatcttctggcagctttcgtcaatcttcgtttggtttctctgtctttgtttctcccattgcgcagctgcagaaaggtgcagtatagcttccttgctcagttcaatgcttccaaatgccgctctgtctgtctgcctaccaggaacagttgacgagattgctcccaggtaatccacacaaactatatccggcatgcactgtttaattggttcatactgccaatgagcacttaaacttctagcagcagcatcaagcaattgttgttggggatccaactgaagacagtaaaataacaactgcagtacagcatctgaatttgtgataacaatcagttgttcactacttgtcaagaaatgataagtcccgcagggtctgtaaggggagaggtcaatgaaggaagtcaacgttcccaagattgagctagtgcagcccatgaaagaacaggcctcatagctggcaatcgatagtgtgcttctcagtaaagtttcgtagtactcaggtatgacgagagacctcccagcaggtgagttgtttggtgtctgaggagacaaccaatcaagaacagcttgaatttcttctctgaaggatgcaagcggagtcagtggtatacgtgggacaatgtctagcggaagaaggaaatgcaaaat

SEQ ID NO: 11047 - DNA, 768 bp, Setaria italica
  Peptide Sequence Number=SeqID_77021
cgctaattgacgaagttaccaatggaaaggtcaatcgtcttcctcggtggctagtaggcggaagaggctagagctcccgctcatacatgtactttttgcaagcggcgcacaatccttgagttggaggttcagaccgacgaaaaaggcaaccgtgggcacatcttttacaaatgtcgtaatcacaaggtgaggaagttgttgtttgagttcttgtttggcctactgttgttgttctatccggatttgagctgattcgattcaggtgtctctgatctcgttttgtactatggttggcatcgagatgatactgggaggaggattatgtgaccttcttgggtacccggaaagggaagatggccatcgaggagcttctgagaggtaggctggagctcgaatctgtggctatgaaggagacgaaaggaaagaaagagaacactggaaagcaagaactgaagactgaggatttggtcaggcatatcagatgcttagtaggaataggacaacaaatagttgtgttacaaaagtgtattcttgttgtttgtgtgtggattcttatggaatgactttgttgtaataaggagatgaaattacttgaagttattaaataaaatgaggttgttctaaattgtgttgagtgcaataaaacgtccagccatcatattcacagcatcttgaactagatgtgccattagtttagcatttaggtacataacattgcatccatagagttttgatgcttaactttacaagtaatcgctgcacttaatg

SEQ ID NO: 11048 - DNA, 321 bp, Setaria italica
  Peptide Sequence Number=SeqID_77022
aattctcattctctaagaccaaaagttacaatgtgttcagtatgcaggaaccattctgggtatttctttcctgtgttaagtgcgcaccagcgcttgcaattgcaagctgcagtgcaagaacgaatggtacagtacggatcaagtcacgagtacacagcaaacaagcaggtcgtggtccaccggcggtcagatgatcggcggcggcggcgtctcccagacatcgaacacgttctcctcgttgtgcagggcgaagagccggtcgccgccgatggagaagtcacagatggcgccgccgtggctccgccggagcgtcgacgtcag

SEQ ID NO: 11049 - DNA, 320 bp, Setaria italica
  Peptide Sequence Number=SeqID_77023
gtatttttacggacatactttctcttgccagatggtttttcgttccttggaaggctttggagttgtggactttgctgtcttggatggtttttcttctttcaagacctttggcctgtgctttttcctcttagacttttgtgctggtgtcttgttcaagtcaataccttcaactggtccagcaccatctccagtgcctatgatcaacccagcatcatgcctaatagcttcaattggcccagaatcattcctggtgccaacaattgacctagcatcacacctaatgccttcaattggcccagcaccatttctggtgcctacag

SEQ ID NO: 11050 - DNA, 516 bp, Setaria italica
  Peptide Sequence Number=SeqID_77024
gacgtcctctatccctcctccagcctccccctccgccgccgccgccgccacctcctccaggatcaccttctcacgccggctcacgccctcccccgccgcagcagcaccgcatcgctcccgctacccctccgccgccgcctcctcatgtgcctccagatctgcgccgatccgccccccaaatccggcgccctcgcctggcacagctcccgaggcaggcgcgcgtggatccgagtcccaagtcctccgaaccgccaagcccacaggcagtcaggcaacgccctcttcgtgaggagcaagcaaggaaggagcgcaggaaggagactgaagcggcaccacgacagcaccaggcgcggcgtcgtagcaagcaaggcagctggcgagcaccacgcgccctcgaccctgggggaagcggagggagatttggcaggcaaccggggtaagataattgctgggctcgggagtttaccggcagaaaggagggagacggggaagggggaggaaagctacgtgcacttg

SEQ ID NO: 11051 - DNA, 619 bp, Setaria italica
  misc_feature (68)..(68): n is a, c, g, or t
  misc_feature (79)..(79): n is a, c, g, or t
  Peptide Sequence Number=SeqID_77025
tccttacttccccttcggttgtcgttccgttcggttcgtagttcttcgttttagtttttttttttttnttttttttttnttttttttttttttggtgggtgcgctaagtttaaactttcttacatgacagtggaaggtaacataattccatgcgttagttgagtagcacatcactaagacactattgagcatccggcaaaatggctattattccagaatcacttcggaaatgtcatggaactatgttaccctcaactacttgtacattatggcagtcacaacggtacaagcagcatgactcgcagtacaaccagcccacatcatcatataaccagatttcttccaacttcggatcagctcatcagcatagcctgtctgatgtgttctctgcctatttggctccagttatggcatgcattattcgcctcaggcgcactagttcccttcaaactttggatcagccatcacgaaatgatatgctgtgaccaaaacaaatatgaagacgcccacaaagttggtgaagaaacccaagtcttgatcgtcaaacatctttgatacgcagattctcccttgtacgcccccgatctcgcctggtttcgacgcgtcgcacctctacctg

SEQ ID NO: 11052 - DNA, 249 bp, Setaria italica
  Peptide Sequence Number=SeqID_77026
gagtgaacttgcggcctgtcggaatggataaagactgccagagtgtggaatttaatctacttcttttgattaaaagatctgctggttgcgattgagtttgagtgggttggtaggattgttcattatatgcttcccagtcctcaccaaccgaagtttacccatgaggacgttgacgttttatatgtgcataaggggcccttgacattaggacactaattaacatgatgaagcgcatagacagcagcatag

SEQ ID NO: 11053 - DNA, 523 bp, Setaria italica
  Peptide Sequence Number=SeqID_77027
gtggtctattttgtggcatcataatgagcaggagatgcatatagggattttcttttgagcaacttgtggatttgtctcttccatacgccgaagttagttatggaggagaagttattgtcggtaaggcagatggcagtggaggtcttttgagccatagtacttgcgcagaacaacttctttatgaagttggagatccagcaaactacattactcctgatctggtgaaatcaaaagccaaatctagttaaactatagcttgcttatccaaacagtgattatattttggtggaccaggttgtagatttctgtcatgtgcagtttcaccaaatatcaaaagacaaggtccactgtgaaggagcaaaaccatctgatgcttgtcgccctgagaaactcctccagctatctcctactgtatgtaaattaatgcactaagtttcattgccatcttttagttcttctgacttggaactttattgtgatgaatgatcagaaagatttgcatcaataagtagcatatttttag

SEQ ID NO: 11054 - DNA, 554 bp, Setaria italica
  Peptide Sequence Number=SeqID_77028
tcttggatgttgacaacacctgtctaatctgtaatgtcaatgttactagaattatgaggtgtttgattcggtcaaaacttttttctgagaggcttggtaagactgtcatatgctcgcacgattacccaggattcattgtgaaccgcgttctcatgcctatgatcaatgaggcgttctgggcgctgtacactggagtggcgaccaaagaagacatcgacacagggatgaagctgggcacaaatcaccccatgggtcctctgcagctcgccgatttcattgggttggacgtttgtctttcagtactccgagtacttcacaatggccttggagataacaagtacagcccttgccctcttctcgttcagtatgttgatgctggtcgtcttgggaagaagcgtggactaggtgtgtattcatatggacagaaatcttcatcctccaagccaaagtcatctctgtaaacaccagagaaactgctgtgcaaataaaagcatacgaatgttatttatatatcgaggaaaaataacgaacaaaaaaaaaaaaaaaaaaaaact

SEQ ID NO: 11055 - DNA, 210 bp, Setaria italica
  Peptide Sequence Number=SeqID_77029
ctgcgggctcggccccctgccttcccgaggactcgtgctcgccttcaccgccccagcgcaacacttcgccccgtcgccaccatgcgccgcccgtggaagcacccggccccagcggcggcggccatcgcggggcgccacggcgccgcagacctctgcctccgcgaggtcggggacctcctccccgcagtttcgcccgccgcgcggccggct

SEQ ID NO: 11056 - DNA, 306 bp, Setaria italica
  Peptide Sequence Number=SeqID_77030
ggtgcgtaaaaagtaacagttaggaacttaggagaagctataaggaatctaagaaaagaaaagtataaagacaacgcgtatcagttacagtgaacaaatatacttagcagatgcctagaccaactaatgacaataatatactaaataaagccacttcagttcaaaatagttgtataattatactgcatcttttatacagtgaagggtgagtaagcatgtatcaatggcatcttgattaatgataggatgcagcaggacttgatcacacagaattttatggctgtcgtttcatgctttaccccttta

SEQ ID NO: 11057 - DNA, 783 bp, Setaria italica
  Peptide Sequence Number=SeqID_77031
tatctttcttcatcccttgtgtcagctatttgctcatgtagctcagacaggctttccatacgaacccctatggcttcatcctggatagccgcaggtctaagttctggttactgtcggttgcttgataagcgtagtgggagcatcattgcagtttggcgagcacatgatggacacatcacaaagctggcagctccagatgaccacttaattgtatcaagttcccttgacaagactcttcgagtttgggacatcagagggaatctggcaatgcagtcaaacattttcagaagtcattcagatggcatctccaacttttctgtctggggccaagatgtgatatcaatttcaagaaacaaaatcgcactgacttctctttcaaggacagcaagtgatattggacatcagcagcttgcacttcagaacttgtattcggctgacagaggaatgaaacacaaaaacctttctgtgctttcaacgattgatgtgcttccgttttcaagattgttcgtggttggaactgaagatggatttctcaaaatctgccactagttgcttctagtactggtaatcgtgtctccattgagctgagaaattttggtggtttatacctccctccttgagttgattttgtagcagtgcctattgccatagttcgtttttattttgccaggagccacactagagtatacacacgcatattgtacaggaaatacattgtgtgcaaaccttatctttgagtgaaagcttgataatttttctacaaaaaaaaaaaaaaaaaacaaa

SEQ ID NO: 11058 - DNA, 465 bp, Setaria italica
  Peptide Sequence Number=SeqID_77032
gtggtggtgctgctgctgctgatactccccaaataattccgcctggcgccgctgctccgacatcctcgtcgccgctaccgcctcctgcgattgctgagactgcgacggcccaggaggcgcaagggaaagcgaagtcgccacgggcgcactgggtgtcgtcgtcggcgtccctcccggcgtcgggtacagtggcccggtcgtccccggcgatggcggaggcgtgttggattgcgagagggcgagtgcctgcgccagatcatcgccctcctctccgatcgtctcgagacccggcttcggctgcaccgagcccccgcgaccgggggaggggaagtcggcatcggagaagctgaggcgcttggacgtggccagcaggtcggggcgcaggttcaggtccaaccaatggtggaggccaggcatggcggttcgttcccggaagggaaccgagagggcgcgcggccgggcggg

SEQ ID NO: 11059 - DNA, 246 bp, Setaria italica
  Peptide Sequence Number=SeqID_77033
gggcgggcggtcctcgagccactgcacggcggcgacgaggtagggcttggtgcgcacgacgcgggcgacgcggaaccgctgctggcccttgcagatgaggaagaagcggtcgtcggcgaggcgctcgtgcttgacgacctcgccgacgcaccccacctcggcggcggatccgccggagcccgcgaagacgaccccgaagcggaggtcggtctgcagcaccgtgtgcatcatgatgcggtagcggag

SEQ ID NO: 11060 - DNA, 462 bp, Setaria italica
  Peptide Sequence Number=SeqID_77034
tgaactagcagtcaacagctaatcaaatcatccgatataggaaattaataataggaacaatgattactaaaaacagaatagcaagagaccaacccatcccaacagtaagtgcagctcaggcaagcaattcataataataaacaaatcgagggccttctactgactaccacgagatcgggaccaacccatcccaggaaccactcgagtgagcacagatcagatcagatcagctgataggtcagcgcggactccacggaatcgagatagggctttctcctacgcggcgagtgtgagtgtgagagaggtggggaggaactggatcgaggcggtgcgggggtgcagacctgggagaacttgatggggtgctcctcggggctggtgcggatggagccggagacgaagacgagcatacctccctgggatcccgacggctggcaccaccagcgcagcgcgcttggtgtg

SEQ ID NO: 11061 - DNA, 861 bp, Setaria italica
  Peptide Sequence Number=SeqID_77035
aaataaatcgttaaaatttaatttaaaagaccgtgccatatcttacggcatgttctgttcggggaacccagtttcctgtatgattacaagaacttcaccaaacaaagggcttccgggacaaccatcaaccaggacaaacgggagacccctcacatgaaaaatctggacagttttcattcacattccacaaagaaacggcgcccacgcaaccagagtacacgatccaaaataagagaaattatccagcaagcatatcaagtctagcaagtctagcaattttcttgcaataaacgacagcagtcaacaaacgcacaagagtagcagcaccattcatattcatcgattcaacatgaaacccttaaatcactttgcttcccgcgatttccgactgtcttaaccatagttcaggcggaacatgtcattctgcacgtagaagctacctccagccggcagcaaatggaacgcctgggagaacttgatggggtgctcctcggggccggtgcggatagagccggagacgaagacgagcatgcctccctggggtcccgacggctggcagtcgacggtgacgatctggtgctcgcaatgctggaaggggagcgagccgagcttgccggcgatggcggccgggccctggaacttctggccctcgaaggtgagcatggaggtgtcctggtacagccccaccagcgcggcgcggttggtgtcgaacgtccggtagtagtgctccacgaaggccttggccaccgcgtccgggtccatcgccatgcctcgccgccgccgccgcgccgcacgctcctagggtttcgagctctggggaagagagaggaagagagaggagaggaggcgtcgcggtgtgat

SEQ ID NO: 11062 - DNA, 242 bp, Setaria italica
  Peptide Sequence Number=SeqID_77036
atatttacaagatggatcatagcttcagcgacatgatcttgagcgagagcgcgtggagcggcggcggcggcgacggaggggcggtcttgctgccaccggagatgggcgtcgtcgaggggggaagcatgacggtgctggagaggctggtgctcgacgaggccctgacggcggcgatcctggagctgcagggcatccaggtgcccgccgcctgcgccggcaaggtgccggcggcggccggtggg

SEQ ID NO: 11063 - DNA, 745 bp, Setaria italica
  Peptide Sequence Number=SeqID_77037
aacgtggaaaaccccttcgatgtgaaggggaaaaaccacaggcaccagctagcaacaatctcactatctcaagagttttgagttacacgcccttacaagagaatcaagcctccacgaaaccctagcaagggtgtaccgtaccgtaccaaacctccggcccaagcctccggcgatggacctccgctccgtcagaagcccggcctatttcctagagtgaatttggaacaactccaacactaccgacagtgctatttaggagcagcgttcagaaaaatcgttcagcaagcgacgggaaacacccacaataatggagcgtacgcctgccacgtcagctaattgctctctcttcttcactcggctcctgtcgttttctctagcgaaactgaactcgacccgtcttaacagcacgccacgaaccaagcacaccaaacagataacgtaacaaagcaaatttaaccgtgtcacgcgtgaacatgtacacttgtacggtggtcgcggaggcgttctcctctgctatcgatcaggcggctcgtacgccggcgggacgcggctcgtcggagtccgtgcgcgcggtggcggatgacgccgtggagcgccacgaggacgagcccggcgacgacgcccgggctttcttcggcttcgtcgccggcttcttcgggggcggtgcgcctcttggggggtcgtcaccgtcccgtgcgtcgtgcgctgcggagatgtcggcggtgctggcctctgccggcggcgg

SEQ ID NO: 11064 - DNA, 539 bp, Setaria italica
  Peptide Sequence Number=SeqID_77038
acgcctacgaagtgcagctgatggaggccgagcggcagcggaaggcagaggcgcgcgccgaggccgcccgcgtcgccaacgaggagcgcaaggcagccaaggccgccgccgcgcagacgcgcgcggccgagcggcgcgcgttcgaggaggacttccgccaggcccttatgaaagaaagggctgagaagctggagagctggcggaaaaaggagaagctccaggagcagaagaaggcggagcacaaggagctcctgcacaagaagagcagtgtgtggcttactgaagataaacttgaagatcaaatacttgatgctatcaagaataccactcccctataaggttgctgtgaggaagccaatagctgcacgcgaatcaagaggaggggcatcacaaagccgaatctgccattccctctgaggactagtttatacccagcaaccagactaggccataagaatcagtttgggttgagatgtaatgttatatgtttgttaatttgactggatcgcatcaagctgcttggagagatggctttcctc

SEQ ID NO: 11065 - DNA, 1560 bp, Setaria italica
  Peptide Sequence Number=SeqID_77039
gaggccttattcttgttgttgaagtatgacggagcagcgctggtgccacccagggtctcattgaagggaaatggaagcagcccacggaagccatcatctatccacctaacttcactgatataggagggtatgaagaacgatgatggatagcgatgccactcactcccaacacaaagaacagaaccaggcccagaatcttcatgatattctaaatgctgatagatctgcaggggagcaccatatccatttaacatggaaaatgttaggctgtgggaggcacacaaaataaaaccaaggatcaaaggccgcagacccttggctatcttttcaaagatagactggtcagaagaatatttgtcgtggaaaaaatcaggaaagctgtcaataacagctgcagctgcaacacatatcaatgtatagattggatagagaaacctttcttctttgtgtgcctgcaaagacatgaaagccaaccagatataaacaggagagacaactatcagtagatctggagcatatttctttcttgcaaatggtacaacccccaagaacagaagagccaggatgaaggcaaaattgaaattattgaatccatttctgaagtagaatgaagggccctcggttccatacaagtgactttcaccaccaccaagaacgttatatttcagaagattgaacaccgagaatgtcaatcgaccatagcagtgataatcagcaataaatgaaagaacaagaaggctcagtgaagtcaggaatccagataaaaatacccttccaaaaggtcctctaattaatgagtaaacagtaacaggaaggaataccaaaattgagaaaggccagccaaggatcactccagcagctgcaactgcgactgcagcagcatatttctcaagaaggaagagtgcagatgaaagtgttacagcatacatggagaatgaacttggcagaaaactggtgctggcgaagaagcaaccactggacaagcatagcattgcaagaacataacaagcaagtctttcaccatatcttcttgaaagagcaatcaccagaacagtttcggttatagttgaaataagaccaagaaagattctcactgagtagaacacacgaaccttatgctcgccaaagatcaatgaagcaggcccagctacaagagcatgaatgaaaaggtatagatacgatctaagagcaaagtcggaactgtactcccaggtctggaagccggagcgatagaggaggaagtggaggggctcccagtagttgaagacctcgtcgcagtcgtggatcaggttagaggacgcgctcatgtggcggaggagcccgagcgccaggaacggaaggaaccacttgataccctcgtccgcgccgtccccgtcgccgtcacccgggcgacgcctccggtccttggcctccttggcgtacccgtcgtcggttagcggggacgccgccgtggcccggcgctggcgcgccgacgagagcgacatgggcggaggccgaggcgatgtgggtattcggcttcaggactcgagagggtagcgtgggtttctcctggtttcttct

SEQ ID NO: 11066 - DNA, 583 bp, Setaria italica
  Peptide Sequence Number=SeqID_77040
tgtagaaggtgctgcgcgacgtccgggcgggcgacgtgcgcgtcttccctgtcggcgagggcgggctgcacggcggcgcgtgcgccgactacatggtcgtcgccacaggccgctccgactggcacgtccgcaacatcgcgcaggcgctcctctacaagataaagcagaagcagaagggctctgacagaatattgatgccaagtgtggaaggtcagcaagctggaaagtgggttgtcattgattcaggaagcataatcatccatgcacttgaagaaagggcaagagaatattatgatttagaaagcatttggtcaaaagaggtgtctcctaatacttctgttcaggagttggagacctcgctagtaaagacacgtcggaggaacctgtcgcagaaacccatgaagagcctctgaactcgatggtctggtaccatgatccacgatactgtgagatcgtttttttattcctcctgtaacatcctctagtttccagaactctcgtcttactttgggattatctgtaatggactaaaatcgctttgatgtaaagatccatttgcaaactttttactgaaaaaaaaaac

SEQ ID NO: 11067 - DNA, 364 bp, Setaria italica
  Peptide Sequence Number=SeqID_77041
aggttcagggctggggcgtggtggcactgagagcatggactgggctgcaatggtcatgaacatgtatagatcatgggctcagcgacgaggatatacagtcactgtggtagaagaaatgcctggtgaaatagcaggaatcaagagggccactatcaaagttgacggtgaatatgcatttggatacgccaaagctgaagtaggagttcatagattagtgcgaatttctccatttgacagtggaaagcggcggcacacttcctttgctgctgttgctgtgatccctattcttggtgctgcctctagccgataccagataaaagactctgatcttcggatagaacgtttccgttctggtggtcctggt

SEQ ID NO: 11068 - DNA, 430 bp, Setaria italica
  Peptide Sequence Number=SeqID_77042
ttctgtccaggctgctgcggaccaggcggcggggcggcatccctggcctgggctgtccgaacggcggcggaggcattccaggcctcattccaggaggtggtggccccggcatcccgggcctaatctgtggcggccccatcggcggcggtcccctcatgaactgttgaggtgccccagggaacggaccaggcggcgccccaggcggacgttggaactgcatctgcatctgcggcggcattccaggccgcataggcggaggaggcatcccctgcggcgggcgcacgacctgcgggtacgccaccgggcccgccgacaggttgggcatcggcggccgcgagatctggggctgcatcatgccgggggcggcccaccaacgccccgaacagggccggcgaggccgggagcggcctggagcagcggggccggtggg

SEQ ID NO: 11069 - DNA, 644 bp, Setaria italica
  Peptide Sequence Number=SeqID_77043
ctgactgcaacttgttccaagactgtatatagctcagtgtggcagcagtctgcttcttaactggattggcttgaccaacaagttgcagtcagagataagaaaccggcgtgctttcatggtcaccgaagggcgcaacaggaagaagaagcaggagaatcaaatgaaactcgaggcaaaactacataatttgcaggttgaatggaatggaggttcagatactatggatgaaatacttgctaggatacaacaaagggaagaagcagcagtgaagcgtgagcgagccatggcctatgcgttcaaccatcaggtttatactaactgttatttctaatgttgcggctcatttatagtacataaatcaatatctatgattgaagtcaacttacgaaaggctcaaaacttcagtctaattctagacacatgccttaactctgaaccacgacaatcataatttgttcaagagaacacatagcagcattctgagtgagtgagtgcacctcaacagtgtcaagacaatgatgtattttatcattttgcagtggagagcaaggtctgccacaagtctaggaaacttcagctatgaagtcgggaagggtggctggggctggagctggatggaccgctggatagctgcaaggccatgg

SEQ ID NO: 11070 - DNA, 1636 bp, Setaria italica
  misc_feature (1540)..(1636): n is a, c, g, or t
  Peptide Sequence Number=SeqID_77044
tgtaaattgtaaagggtagtacctagtagtaagtctagtctagtctagtctaactagtctaaagttcctcccgtccctgacctccgacctctgccatctccccccacctgacagcaactcctgatcggattcaggctaggccaccgccctcctctgaacctcagcaagcggacctgaacacaaattgatccctgcggtgcacccctgttgaagccatggggtccggggactggttcaagacgatcatcagcaagaaaaaatcgaaacgggcaaagtcaaagcacgcaaagctcgctggtcaattaccaaatggaggcagccagacaaatcagaaatcgaatggcccttcttccagtagtgaccatgaagacaatgcagcactcgaggaatgggctgctacacggattcagaacgcgtttcggaaatacaaggcgaggaaaaccctccgttgtctcaggggcattaaaagattgcgtgttgttggtcaagccaatccagttaagaagcagactgctgccacactgagctatatacagtcttggaacaagttgcagtcagagataagaaaccggcgtgctttcatggtcaccgaagggcgcaacaggaagaagaagcaggagaatcaaatgaaactcgaggcaaaactacataatttgcaggttgaatggaatggaggttcagatactatggatgaaatacttgctaggatacaacaaagggaagaagcagcagtgaagcgtgagcgagccatggcctatgcgttcaaccatcagtggagagcaaggtctgccacaagtctaggaaacttcagctatgaagtcgggaagggtggctggggctggagctggatggaccgctggatagctgcaaggccatgggagccgcggtccctggtccaccccgagaacccgaagaaagcacaggcaaagaaggataacagcaacacaaacccatcggctctgaagctgcaaggctccatcaccctaagcaacaacgtcaatgaccggaaagcccctaagaaaaagccatcaccgttaaccgctgatcagaaaaagccatcaccatcacctactgatcagaagaagccatcaccatcacctccaagcgatcagaagaaagcggcgccgaaggagcagagagcaaaggcggcaggcactccgccgaaaccaaaggccaaggaaatgaaagggagaccagagaagcagcagcagcaacagcaagtggttccttcagtcagcgcatgaagacaagcagtcctggaaatggttactgatcattgtacgatacatcttgtgaagtcctcgtgtttttcacagtttgttgtttgtttttcttttctttttttcatttttgtctcctttcagtgatatggaacaacgagtgccaatgtagaatgtgcttggtttgagcgattatgcacatatgacatatctgatgagagtggttttggttaggactaggatatctgctattcattgctgtgctgttgtaataagacttgcctggctatctgcttgaatggaaggtcttgttgggaacnnnnnnnnnnnnnnnnnnnnnnnnnnnnnnnnnnnnnnnnnnnnnnnnnnnnnnnnnnnnnnnnnnnnnnnnnnnnnnnnnnnnnnnnnnnnnnnnn

SEQ ID NO: 11071 - DNA, 377 bp, Setaria italica
  Peptide Sequence Number=SeqID_77045
gctactgatgctgttataagccacaccttgcaggttcttgtagaaggctgtgagttggagcaggtatgcacattcctccgcaattgcattgggtcttttccggtaattgctatggataaaaatgggtcacatgtggcggaagcggctctcaagtcacttgcaacacatcttgaagatcaggcctccaggaccatgatagaagagatactgaataagatatgcaaggttattgctgcagatgctgctaatgtgatgtccagctgctatggatcacatgttcttcgcaccctgctttgtctttgtaagggagttccattagagtcactgcaagacttccacgactactaagagatctgctgttctagctgagcggttga

SEQ ID NO: 11072 - DNA, 944 bp, Setaria italica
  Peptide Sequence Number=SeqID_77046
ggcggcgagtcggcgacgacagggcgagcggccacccttgggcaggtcttcgtcgggggcgcttcaccgccgacgaacatcagacagaataatcagttgctgtaaagtgttcatgaacaatggtttctgttgggtcgagggcaattagacccaagggcagcagacaaaacgtattgataggtggagattcagatgatagctcacacaagaagaggggaagaaaggataagagcgagaagccccggaaagggggacatggttcgagtaaagggccttctgtagggaaacctcagcatgggaaggataagaagcagaggagcgatgatgggaagaaagggaaagggcgagggaaggaccaccgttcaggaagctctgcagtgatgaatcccaggaatcaggataaactgccgtcctccaacacaacaaagccagtacaaaatgttcttaggaaaagagttgatcctgaaactgcaaaatactttatggagatctcaaatctctttgataacaaggagattgatttggatgagcgctcgactatatgcgctaatgccttggaagaaacaagagggaaagagcttgaactcgctactgatgctgttataagccacaccttgcaggttcttgtagaaggctgtgagttggagcaggtatgcacattcctccgcaattgcattgggtcttttccggtaattgctatggataaaaatgggtcacatgtggcggaagcggctctcaagtcacttgcaacacatcttgaagatcaggcctccaggaccatgatagaagagatactgaataagatatgcaaggtactattttttattggcaatatattttcttgcaatggaactcatatttaagtcgtcgattcaggttattgtctgcagatgctgctaatgtgatgtccagctgctatggatcacatgttcttcgcaccctgc

SEQ ID NO: 11073 - DNA, 1792 bp, Setaria italica
  Peptide Sequence Number=SeqID_77047
atatgataacagagatgactgatgagcaaatgatagcatttactatacaccgtgtcagagcatctgctgtttttctggctgcttttccatcgctcctgaggaagtatgttaaggctctgcttcatacctgggctagaggacgaggtgcaatgcctcttgtttctattatgttccttcgagacttgtgcattcaattaggttcagattgccttgacacatgcctcaagggtatctacaaggcttatttggtaaactgcaaattgtccaaatccatcagtggatcaaaacttcaacacatacaattccttggaaattgtgtcagagaattgtatagtctggatccacaaagtgcatatcagcatgcttttgtttcatccgtcaactggcggttatcttaagaggagctcttactgaaaaggggccaaagtcggtgaaggacaaaaggcagaaagaaagtagcaaatcgacaaaaaacaaatggagaaatcttaccaaaaagtttatgagtggcaatacatattctgccttgagctttggaccagtgttgtgtgtggatgtagttctgaggaagaattccgacctctggcttatccattgacccaaataatttacggcgtggcatgccttgtacctagcgcacgttacttccctgtacgccttagatgtgtaaagatgcttaattgcattgctgaagccacgggtaccttcattccagtgtcctcccttctgcttgatatgcttgaaatgaaagaactcagaggacgtccagatggaggcgtaggcaaagcagtgaatctgttaagtgttaaacaggtggataagaaaacagtaaagacacgtgcctttcaggaagcatgcatttattctgtggtcgatgagctagctaaacatttggcccaatggagctactccatcgccttctttgagatgtcctttattccacttgttcggctccgaagcttttgcaaaaccattaaagctgacagatttaggaaggagatgaaggatcttatccatcagatagaggccaatgttgagttcatgaagtcaaaacgtgctggggttgcattttcacccaatgatccagttgtggagtcatttctacagactgaaaaagaagagcgtagcagccctctctcaaaatatgttgctactctacaccagagagcacaggacaggatggatgctctggacgagaccagtgtcattgtgggggcggagtcgtcaaccttctcactgaggttaactgaagcacagaagcaacaggatgagcaggaagacgatgaaggcaccatggctttcagtaagaacttgctgactgaaaagaagaagcccaaaactgcaaaagaaaagaacaagaagcgaccccgggagcatgatgatgttgctactgaggaggatcgggttgaggatttagtcctgagctcagatgatgaggatggtaacaaccaggaatcggacgaggatgtctccgttccggtggaagatgacagtgatgaagacttcgtagaccctgacagtgagtataagaaacaaaagaaggcgaagttgaagaagaggaacaagcgccaaccgttgtcgaacaaggcatcctctaaaacgaaaaggaaggtgcatcccaagaagaaggccaagcattagttatgctacataggacccggcaaatatgttgtgatatgcttccggttgaggataacattttgcaagtgaaaaaaagttttgttttatttccctagaaatcttcagtcgttttgtccatcatttcctggaatatactcgtagctagtatttg

SEQ ID NO: 11074 - DNA, 861 bp, Setaria italica
  Peptide Sequence Number=SeqID_77048
tgtgccttggtgtcacggctggtgcctatgttctcacactctttgcgacgaaatatcaggagagggtaataggactgatgctggtttcccctctgtgcaaagccccatcctggagtgagtggttgtataataagatattgttgaatttgctctattattacgggactcgaggcctggtcaaggagtgcttgcttcagcggtactttagcaagagagtacgtggggatgcacaatatcctgagtcagatgtcgtgcaagcctgtaaaagtttacttgatgagaagcagggtgaaagtatttggcggtttctccagtcgataaatgagaggcataacttaacagactcattgaggaagttgcaatgccgcacactaatttttgtgggggagaactcagcattccatgaggatgccatccatatgaccgcaaagctggacaggaaatactgcgcgctagttgaggtgcaggattgtggctcgcttgtaaccgaggagcagccgtatgccatgctgatgccaatggagtacttccttatgggatatggactttacagaccgtatcagctgagcagcagcccacgcagtcctctgagcccatgttgtatatcgcctgagctgctatctcctgagagtatgggtgtgaagctgaagccaataaagactcgggtcgctatctgacttctaacactggcaaacaagtctcaggagtcagaatgaaaatggactacgtgcattacatttcatctcagaaaacagaagatagccacaagctggtcgctctagtgcacgagtggtggtcgcaccttgcttatataccatggcaaatggccatttttgttgacgataaaccaaaaaaaaaaaa

SEQ ID NO: 11075 - DNA, 276 bp, Setaria italica
  Peptide Sequence Number=SeqID_77049
gcacgcgttaactcgcgtactgtagccgcccacatgccgctgcgccgtgcggatttaaggcagtcggatcggacggtggtggagcaggagggcgcaaccaatgcagaccaccggtaacggccggggcgggctgggaagggaaggaaggatgacgcgtaccttggagtagccgttgttcatgtcctggacgatgcagccggtggggaggaggcggcagcccatgtacccggcggcgccgccgttctgcgcgtggtggtgggggttgttgccgccggg

SEQ ID NO: 11076 - DNA, 647 bp, Setaria italica
  Peptide Sequence Number=SeqID_77050
cgtggttcgcgggcggggagggagttggagcagaggatggcgaggtactggcactggcgctggagcgaggcgagccagcggcgcgcgccgagggcctgccctgaacggagcagctggcggtagagctggtgcaccgccgtctcgtcgtactccgcgtgtaccacccacgtgaccttggagtagccgttgttcatgtcctggacgatgcagccggtggggaggaggcggcagcccatgtacccggcggcgccgccgttctgcgcgtggtggtgggggttgttgccgccgtcggggcggaggacggcgtccaccgagacgtcgacgacggcccacaggccctcggcgtgctgcttgcagaaccggaggaagaccacctcccggatcggcaccagcggcgatagcacctgcagctccgcgtgcatcagctggattgacccgctgcgcgtgccgcccatgccgctcgagatgatgtccgtcgtgctcgccctcgccacgatgcacgggaacatctccgaccaccgagccgcgtccatgaggctgtcgacgaggtcgacgctgctggtgatggcgacgccggcctcgcgggtggcctcggagacgaacccggcgggctcggcccgaacaccctggcgaacgcgcggtggtac

SEQ ID NO: 11077 - DNA, 309 bp, Setaria italica
  Peptide Sequence Number=SeqID_77051
gcggatctcctgcacgtagcgcttgaccctccggcgcgcggcggcggcggcctcctcgtcgtcctcgtcgccggacgagtcggtggcgtcgtagtcgtcgcagaacaccctgacggtcctcggccccgcggcggccgccggcgccacctccaccgcccgggaggtgacctcgacgtgctccgtgcgcctcaccgccacgaacatctcctcctccatggcccacatcactccactcgcatttgatgactccacctccaagctccggctaaaacccctcaagaaacctcctagaaaaacctccccaaaggg

SEQ ID NO: 11078 - DNA, 776 bp, Setaria italica
  Peptide Sequence Number=SeqID_77052
cgcgtccagcagcgccgccccgctggcgtccccgccgggctgcgtcgtcaccgtcgcgttccagatcctcgtcagcaacctgccgtcgtccaggctcaacgccgagtccgtcgccaccgtcaacggcctcatcggcaccaccgtgcagcagatcaaggcggcgctcaactgcgccggcccctgatcgatcgatcgtcttccgatccaccatcgccgccgcctccccccgccccgcctcgccagccgcctccgccacagtgagtgactgacgagagagttggttggcccgttgaatgctcgcattcatggacgccacctgccgctgctcccggagctgacgcagctctctcctcatcaacccatccatgatccatcaccaccataacagctctcctcctcctttagattcggtgtcgttttccttttgcttaaatctgcaggattcgtcgagttttcttctttttccttttttcttccttagaaacattcgttcgtgagccaaacagatcgaaggctttcaggctgagggagtcaagaacgcaccatgctaccgtgtcccattcctctcgctgcagccatttttctcccacaccaccaccacagcccttccggcctcttccatgcaggatccatccatccatccttgtcatctcgccattgtcgttgttggtgccgcagcaggggatgaatggtgcgggtattgacttctgtccattaatgtaaagccttcaatgaacattcatttcggttataaatggaaaggagaaaaaacagtt

SEQ ID NO: 11079 - DNA, 390 bp, Setaria italica
  Peptide Sequence Number=SeqID_77053
ttttttttacttctttgatatccttgagttcccattttttccccttcatctaacataataaaagacgaaatataggaagaacccctattgaaatcgaactaattcaaatccaataggaatcaaatcaagatatacaattgataacaatatgctgcatagaattagaattagatatggaatccagttctatatagaagggaattctacatatcggattagataatgaatctaacttaggaataaaaaaaaccatatacatttgtttcttctattttgtttgcgtattttctcattttctattgaatccgattctaaaatcattccttagaaatccgcacaaaagataactgttttgtaggcattaaggatatagatctaatctgccccctg

SEQ ID NO: 11080 - DNA, 2017 bp, Setaria italica
  Peptide Sequence Number=SeqID_77054
tcgtttcggcgagtccctgaagaagatggcgcagaaggtcgccgccggcgacgccgccggcgaggaggtggtggtgaagctggactggcgcgagtcgatgccccaccccgacgagcgcgtcgagtacgagctctggaccaacagcaacgacgagtgcggcgcccggtgcgacgagcaggccgagttcatccgcgggttccggggacacgcccagctcctcgagcgcggcggctacgcccgcttcacgccgcactacatcacctggtactgccccgaggcgttccgcctcacgcagcagtgcaagtcccagtgcatcaaccacggcaggtactgcgcgccggacccggagcaggactttgggtccgggtacgacgggaaggacgtggtggtggagaacctgcggcagctgtgcgtgcaccgggtggcgaacgagagcggccggccgtgggcgtggtgggactacgtgatggactacaagatccggtgctccatgaaggagaagaagtacagcaagacctgcgccgaggacgtcgtcgccgcgctcgggctggacctgaagaaggtgctggagtgcatgggcgaccccgaggccgacgccgagaacgccgtcctgtccaaggagcaggaagaccagatcggtagcggttcgcgcggcgacgtgaccatcctccctaccctcgtcatcaacaacgttcagtacagagggaagctggagaggacggcggtgctcaaggcggtgtgcgccgggttcaaggagggcacggagccccgcgtctgcctcagccctgacatcgagacgaacgagtgcctgcggcggaacggcgggtgctggcgcgacgaggcgacgaacgtgacggcctgccgggacacgtaccggggccgcgtctgcgagtgccccgtggtgaacggcgtccgctacgagggcgacggctacaccgactgccaggcggtcgggccgggccggtgcgccctcaacaacggcgggtgctggtcggagacgatagggagccacaccttctccgcctgctcggagaccgcgctcaccgggtgccggtgcccgccggggttccacggcgacggccacaaatgcgaagacctggacgagtgcagggagaagctggcgtgcacctgcccggactgccactgcaagaacacgtggggcaactacgagtgcacgtgcagcggcaaccagctctacatccggggcgaggacgtctgcgtagccaacggcatgtccaagctcggctggttcatcaccctcgtcgccgtcgcgtgcgtcgccggcgtcgggatcgccggctacgtcttctacaagtacaggctcaggtcgtacatggactcggagatcatgtccatcatgtcccagtacatgccgctcgacagccagaacaacgagaaccagccgctgcggcagcacgactcagaagctctcaggcactgaaaatggtgtggtcgcttgaagcgcctggatggagaagtttgggcagtgaaatcctaggtttcctcccaagacgggcaactgggcaaaggaggtgctgccgggcgcacaccattcgaatcatattcaacataatttgctgcaatttccacggtttttgcttcgcttttgtatagaatagaagataacagtttgtaccgagcacagaggagagctctaggggtttagataggtaggtatctcgtctctcttgtggatcaagaggcgtttacacacgggatattagaaaagagaagaaatgtacaagctgctatacatgtataccgtatagtagacaaaccgtactgagaattcgatacttgtatactggtatgtgtgagtttcaccatatgattctggtgttcttgctggcgctcccagaacagagcgctccatggagactagcagtgtgtccagtgaaaaaggcccagaaatgtattgcattgtacaacaaaactactaacttctgatttccaaaagaacgatttgattagcacccaagtatcccagataagggatcagagtttcatatgacgaata

SEQ ID NO: 11081 - DNA, 282 bp, Setaria italica
  Peptide Sequence Number=SeqID_77055
gccgtcgctggcaactgcaccgagctgtacgcgctggacctgtccaagaaccggctctccggcgggatccccgacgaggtgttcgcgctgcagaagctcagcaagctgctgctgctcggcaacgcgctctccggcccgctcccgccgaccgttgccaactgcgtgtcgttggtgcgcctccggctcggcgagaacaagctcgccggcgacatacccagagagatcggcaagctacagaacctggtgttcctggacctgtactccaacaggtttacgggaacg

SEQ ID NO: 11082 - DNA, 614 bp, Setaria italica
  Peptide Sequence Number=SeqID_77056
cgcttgtttgcttcactgacagtttatttctaccactgttgtcggaagcggatctgtccctctccctggattgtttcaccccaccagagacaacttcaaaaacagtcggcagatcgttcatcatgctaaacaaacgcttcctgttggattttagagagagcgattaaagaaaacacaaaactattacaaaaatagtatttctttctctgtttagttaacaaaatgctattatactacagtaacttcctttatacttgtgccacgctggattactgcaactttaaccatgtaaaatgttgcatagagtggaatatgaaatgcttggcttctatgtaagctaagtcagaactgcttagtataattgaccagacaaagttaactgtatcaatattttataaagacagtggcacatttatcgttacaaaacaagagccataggatacaagcctgtttcagtggcttactacctacaagtgaacttacttgctgactaagattccaacactcattattgtataaagaaataagacttaaagagtaatcagtgactaattgaattcttatttcttttatacaataatgagtgttggaatcttagtcagcaagtaagttca

SEQ ID NO: 11083 - DNA, 1147 bp, Setaria italica
  Peptide Sequence Number=SeqID_77057
caacagagaaggataggaatgtcaagggttataggcataagccagggactctacacacacatggggttatgcagtatacagttgagaacttcagtaaaggctgcagccatgtcccatgtgtataaaaaagaacgacgcgtacaggtgacagataaaaacaggagcacacaggtttcctcttcttttaccccaccgtttatataggggcatccaactcaagtgcctctggttgtcaaatgtctcatcctttcctcacattagcttcatcataggtaaagtagacataaggtacaacgaagatagcaatatagttctaatcttgtaaatgaagcctcagccttctccataagttttgctactgcctagccctcttggagctgcagctcgggcacttgtagtgttttatgctttccgccttggcgggggttatcttgacgcacttgccatggtaccacctctcgcagatgtcgcaaccaatccaaaactcatctgcgctgtatatcccaccgcaggttccacatagggtttcaccgtgatcgctgtcatcttcgccgtatgcttcgtctgttgctttttcgttattttctatctttactgagggcttggccctcccaccattgtccatactggacctctccttagattgtctcgcaccagagacaacttcaaaaacagttggcaattcgttaatcataccaaataaacgcttccggtcattccgattgagccgggcggcgtagtagaaggcaacggagaggagccaggagtcggagtggaccgcgacaagcgcgagccagtcgcggcggttcatgccgtcgcgcgcgaagttgatccccagcgccggctccggcagctccgttggcacctcctccgccggcagcgccacctcccacgcctcgttagcgtacccgtacaggcacaagttctccttctctggatcgcactgcgcgtagaagtcttcgacgtcgtgggtgagggcgcggaggatggcggagcggcgggcgcggtagtccttgaagatgtcctcggcagagcggggagggtagacgacgtggccgcggccggcggcggcgtcccccatggagggtggcggcgaggcttcctctcgtgatctccggcgaggtggtgggtgaggtggcggtggcgg

SEQ ID NO: 11084 - DNA, 1261 bp, Setaria italica
  Peptide Sequence Number=SeqID_77058
tttttttttttaagaaaacaaataaacataaacctctcgaattattgtcgcataaggtggtcaattcactttcggcacattacaaaggcttccttactgcccctattttcttctccggcaacatacagactaccgttaactctttccagggcatggagaaaccacaagaaagactataatcaatatgtgtgatcacattagcatcaccatcgtcgtcacacgtaagctaaatcgaaaagatacagtaaacgtcgcaagaccggtattgactcttgcacaaggagtaactccggaccctcctgcttgttcaggtttccatctatggcgggcgctcccgcccagcccctcctcctctagcgcggaggacgacggtgctacatcggcctaggtctctttgagcagcttgggcacttgtactgctttatgctctctgccttcgcgggggtgatcttcacgcacttgccgtggtaccacttctcgcacatgtcgcacccaatccagaactcgtccgcgctgtatatcccgccgcaagtcccgcatagggtttcgctgtggtcgccgtcgtcttcgtcatagccctcgtcgggctccctggtgttattttctatgcgtggctcgcttgtttgcttcactgacagtttatttctaccactgttgtcggaagcggatctgtccctctccctggattgtttcaccccaccagagacaacttcaaaaacagtcggcagatcgttcatcatgctaaacaaacgcttccgttcgttgcggttgagccgcgcggcgtagtagaatgcgacggagacgagccacgagtcggagtggacggcgacgagcgcgagccagtcgcggcggttcatcccgtcgcgagcgaagttgatcccgagcgccggctctggcagctccgtgggcacctcctccgccggcagcgccacctcccacacctcgttcgcgtacccgtacaggcacaggttctccttctctggatcgcactgcgcgtagaagtcctccacttcgtgggtgagggcgcggaggatggcggagcggcgggcgcggtagtccttgaagatgtcctcgacggtgcgcggcgcggagccgcccccggcgccggcgcggcggtaggatgcgtccatctccggtcggcgcctcgtctgatctccggcgaggcggagaggaggtgactgatcgcgatgccgtcgacgacctacgtactagaatactaccggacgaaggacggaagaaggaaggtagaactagaatacga

SEQ ID NO: 11085 - DNA, 341 bp, Setaria italica
  Peptide Sequence Number=SeqID_77059
ttgagagaatgtggcagatctggaaaagaatctttcctctgaaagggagaagattcagcagaattctcagactgtgaaggaaatggagtctatttataataaacatgtcaaaaggcaagaggaccttgagaataacatgaagtcctgcaaggatcagtttaaagagtttgagaggaaagatgtaaaatacagggaagatttaaagcatcttaagcagaagatcaagaagctggaggacaaagctcaaaaggatatgtcaaaacgtgatgactcaacaaaagagatggaggaatcatcaaatcttattccacagctggagggaaagataccccaaattgcag

SEQ ID NO: 11086 - DNA, 423 bp, Setaria italica
  Peptide Sequence Number=SeqID_77060
acaagcattactgtttttccatgtgaggaatttggaggttgttgagcaataaatctggcacctgttcagttttaatgatgttatgcccaatctgttcaggtccccatgacactggtgttcacaaaatgtgacaaacgcaagaagaagaaaaatggagggaggagaccggaagaaaacgtggaaactttccagagtctgatccgtgaatacttcgaggcggcacctccctggatcatgacaagcagcgtgaccaaccagggccgtgacgagatactgctgcacatgtctcagcttaggaattattggctcaagcattgagatgccatgacaagaaaaccgaccgaagcaaccgaaatggcatacaaggcccctgtggttcaattgatgcatcggcagccggcacctatgcaatcaggcctttcg

SEQ ID NO: 11087 - DNA, 1348 bp, Setaria italica
  Peptide Sequence Number=SeqID_77061
ctcccccgcccccgaaaaacccccgaccgccggcggcggccatgctcctccaccaccgcctcctcccccgccctagtactccttccttccacccacacctccacctccaccctcctccgtccctcgcgtttgccgcgccacctctccatctcgccccgcttctgcgcgctctcccacctcgcggtgccccagatcgtcgaccaatccgacaacgaggggacgccccacggggatgtgcaggtcaagctcccgctcgaccgcctcttcgtgcctcccggggcgacagtggatgccggggatcaggaggccgtgagcgcgcgggtcctcaagggttccaacatcgtgctaggcccgtacgcgcgcggcgatgcgcaggttgtcaacgcggatttcgtgaagagcagcgtgcgtcccgatgactgtccccgggacgggcttccggagtttgcgctcgttgggcggtccaacgttggcaaatcgtcgctgctcaactcgctcgtccgccgcaagcgcctcgcgctcacctccaagaagcctgggaagacccaatgtatcaatcatttcaaagtaaatgacagctggtatctcgttgacttgcctggttatggatatgcttctgcgccacaggaagctcgtacaaattgggatgaatttactagaaattactttctcagtagggagaatttggtatctgtttttcttcttatagatgcaagtatacctgccaagaagattgatcttgactatgctagttggcttggtcaaaagaaggtccccatgacactggtgttcacaaaatgtgacaaacgcaagaagaagaaaaatggagggaggagaccggaagaaaacgtggaaactttccagagtctgatccgtgaatacttcgaggcggcacctccctggatcatgacaagcagcgtgaccaaccagggccgtgacgagatactgctgcacatgtctcagcttaggaattattggctcaagcattgagatgccatgacaagaaaaccgaaccgaagcaaccgaaatggcatacaaggcccctgtggttcaattgatgcatcggcagccggcacctatgcaatcaggcctttcgcaccaactaatccaccttttgagctgttgattgtccaatatgcccccctgtacatgattacccaatcaacactctgggagtacagacaaggcgttaaaatcggctgatcctgggttttctattgtgtacacgtacaatcccaacgttttcccattgttctctcctgttataggcttctgtatgatgtggaataataaaccctagtgtcagctaatcatcagcgggaatctcactcttttgttagaaaaaaaa

SEQ ID NO: 11088 - DNA, 1005 bp, Setaria italica
  Peptide Sequence Number=SeqID_77062
tagaaacaacgtagaatgtcactcatacacccttcaaatacttatatggatttaaacatcggtattgctctctggttggctgctggtggggatggttgggtggatgggagtgcatgtcttatgcaagatggttctcgccataagtacaagtcaagatcaagagtcctaatagtcggttctggtgctgatgagcagtgtgctggttatggtagacataggactaaatacaggcttggagggtggaatgctctggacgaagagatgagactagatgtacaaaggatatggaaaagaaatatgggaagagatgataggtgcatttctgatcatggcaaggaggcccgtttcccatttcttgatgaacatgtgatcaaaactttattggaaattccattatgggagattgctaaactcgacgaacctgtgggaaagggcgacaagaagatcttgagagaggttgcaaggctgctgggcctacaagaagctgctcttcaaccaaagcgagcaattcagtttggctcaagaatagcaagggagtcgaaccgcaaaaacttcgggagtaaccgagctgcgaaccaggcatcagcaggcagtgtgcagattcaccagcatatgcaatgacagttctggtagcttgtccattgacagaagcttcaaggagagcaatctgatcaccagagcgcacaggacacatgccagccatttctccacagcaagactaagaatcattcatcaatcagcctgtcaatcttgcagtcggcaatgacggtgatgagatgacggtgatggtgcgccatgaacacctgtagctgcgacaaatggtcggcttccacacggtttggctttgtagagcccttaaactttgatgatggagcatcattgtcatgcatcacaattcacacatgctacaatctgtgctccctgtctgtttcagggcttgatagttctgctccttgctcgcaactaactgcatgtaacaagacaatgcttagaacttgaaagcgg

SEQ ID NO: 11089 - DNA, 857 bp, Setaria italica
  Peptide Sequence Number=SeqID_77063
taacaaacaaaaataaaagaactagaaatttagatcatgaaattttgcatggatctggaacataatatcacctatagctgatatttttttcagaattttcagcacttctacatattctttttaaggaattttcactgtttaaacaatttgaccaattgcaccccatgacaatacttgttctatcaaatttgaacttccgtggcttctatgtaaggattttgaaacagtggaattaacacaagttccagtagccccgcagatctccatttattagtcaacacatagcaatccacaactttaatgttgctctactggtctcagcttcaatggacagctgtgcaagcatcataggcatcacaaccaagggtctagtatgatttctaattcgactactacctgtcggaagtctctttgcattactaatgtttctgaagcttatcaatttgatggccatctttgacaagctggcaaacttcaaaacaaagtcccaagagactagtaacatgaagttggagaattagaaatcaaactagataaaatccttggtcatgttaccacagaagcttatgttactagtccattggatggacgaagccgctattgcaaaactgatggcggagattgctatatgtccaataagcaataaagatcttcgatgctattggacaggaaatttaggcggtagcctagcatgcaacatgacgcatgaaattggaagatcaaatatgtttttttcaggtaatgcggtcattacatgcaccaaagacgtactacaaatgcaaaaaaaaataatatacagcacaagaagatcagcacatccaaaactaaacttgtcagaagatttacagtgtaaattc

SEQ ID NO: 11090 - DNA, 262 bp, Setaria italica
  Peptide Sequence Number=SeqID_77064
tacggccgtcgcgggaaaacaacaaggacgcaggcggcggagccactcaccgacgggaacgcggcgctctgggcccagacggtgccgtcgtggccgatgatggcggcggaggtgaggtggtggccctcgatctcgcacatgaggtgctcgtcgacgtacgtctgccacgacatcctgccgtccggcgggggcttgctgctgctgtgacccgagggtgatcggcggcggtcggggctcgatctgtctctggtggtggtggtgg

SEQ ID NO: 11091 - DNA, 866 bp, Setaria italica
  Peptide Sequence Number=SeqID_77065
ttttttttttttttgcacgaaatacatacacattctcgtattacaaagaataggtagtaccagttcaatcacacatatatatattgttccgggttcacaaatcgacgacaaccaaatttgggagagaaaaaatcacaaaattatttgccaaaacgacaccaacaaatcaatcaatcaaacaaggaaaatattctctgatgatcggcgacgggcggggggcaggggactgaagaaatgccggaggtaacggagccacgcacaatcccgggcgtggggactaaaaatgcgtgcgtggacacagactactacgtgctggcggttgtattgttgctgatggatgcttcttcaaccgtggacgggcgatccgttttacaggccttgctctacgaggtagtcgccgagcctctcgaccaccatgttgcactgcccgggggtcatgggctcgtcgtagatgccgatcacgagggcctgcccggtcttcttcacggtcacgcctccagatcccttcttgccgcggatgacggcgccgggctcgccttggatgaccatgtacttggtggggccgaggaagaggccggtcggggccaggaacccgggctcgtcgaagtccttcatgatgttggccatctcctctggcttgaacgacgggaacgcggcgctctgggcccagacggtgccgtcgtggccgatgatggcggcggaggtgaggtggtggccctcgatctcgcacatgaggtgctcgtcgacgtacgtctgccacgacatcctgccgtccggcgggggcttgctgctgctgtgacccgagggtgatcggcggcggtcggggctcgatctgtctctggtggtggtggtggtggtggtaggta

SEQ ID NO: 11092 - DNA, 369 bp, Setaria italica
  Peptide Sequence Number=SeqID_77066
acggggcggggcaggagcaggattgcagtacaagccagtttttgcctttccaattcctggtcttttcttcgtcgtccttcttcttcttgtcctggtctgcttctgggatttggatttggatttcctactgcaaattcctgcttgcttcgtgccgttgcttcagctacaattgaagagagcgagggcgagagatctgttggtagttgtggttcagttgttccaggaagccgctgattgtccctgcttgtcctcttcacaagtcaagtccaaagccgggagaaatcttcgccgggatactcgcctctcaccgctctcgattccgcgagcggcgcggcgagcctccgcgcgtgcatgggcgcgggaaaggcg

SEQ ID NO: 11093 - DNA, 394 bp, Setaria italica
  Peptide Sequence Number=SeqID_77067
gccggcgggatgtcgtcgaggagctggaaaagcgccgctcgccaggagctcgcccaggccgcggcgtcgccgatcgacaggtgcataagctcgtttcccttccgaatggatggccccttgcctgtcgatcagggcgtatctcgctcctgaagttccgaagtcgatcccaaggtacaggggcgtgccggcggcaccatcagctcccggattctgccggctgagcatcgtaatccttgtcgtcctccgtggcactgttcggctctgaactccccggaaccccagtgaccctcgtcctgcggggtggtagtgacggtgagccagcggctccacggagagacggagatctggcaccatggatacgatgaaggaggaggaggtgattctgtgcccgccg

SEQ ID NO: 11094 - DNA, 417 bp, Setaria italica
  Peptide Sequence Number=SeqID_77068
ccatcacgctcgtcggctgcaccttctacggctacgtgaggcacctcatctcacagcaggccgccaccacgccaggcccgcgcacgcccaggggccgcatggagatgctgccgctcaccggcgagaagcaaggcgacaagatttagcagcagctgccgatgtcgattcgatatttactaggaaggaataaaccagcatacttacatctgatctaacagccgtttcagcacggatcatcaggagctttttggcacatagtagagaaccgaaatggcaaaagttccagtcgagttggtgtagagcttcgtaaaaaggttgctgattctttgtctttctttttggtcttgatgacgatgacaaatttggtcacccagattttggtgttgtcattatagcactactgttgcgttcaaaaaa

SEQ ID NO: 11095 - DNA, 858 bp, Setaria italica
  misc_feature (822)..(858): n is a, c, g, or t
  Peptide Sequence Number=SeqID_77069
agaccacgcctatcagattggcgcgagaccaccactgccaaagagtgggagagtcactcaactcaacagagcaccgagccgcagcctcttctctttgctctgtactgtggttttgtggtggtggtggtggtggtgaactggtgatggcgatggagtacacctctaagaagaaggctttgctcgtcctcttcatgttctcttgccttcttgttcccatggcttcctccgcggcgcctctgtccagaagcctgtccctgacgaacaaccgggtcccggagcctgccgttgtggaggtccctcttcagcagggtgaagagcgaaacctcggcgaggtggcggcgaggatggacatcgaagtcaacgactaccctgggtccggcgccaacaaccgccacgaacccaggagccccgggagagcttgaagcctctgcgcacgtctcggggaagaagaaggagaagaaggagaaggaggaggaggaggaggagaagaagagcacgggatcttgagagtttcgatcggtaggagtactcctagctataactatatgctgtagaggttaacgagtcttgtcgtccgtctcgtcggtagcgatcgatcgagcctgagctagcgtgttagggccgggtcgtcgccacccactgtcaggtcgatcaagtagtggctagaaccggtgtagctggctgcacctctcgatcgacgggagagaaagaagttttcaagtctttctacgcgcgtgtgtgtatgtcttcatgtaagctcaagtatgtcagtgtcgtttgtgactctgtttggcattgtacatgtttgttttagcgcgactnnnnnnnnnnnnnnnnnnnnnnnnnnnnnnnnnnnnn

SEQ ID NO: 11096 - DNA, 366 bp, Setaria italica
  Peptide Sequence Number=SeqID_77070
gtcgacggcggtgaactgctcctgcggcgcgcggaaggcgatcccccctgcggcggtcggggaggaggaagcgacggccgcggcggtggcgggaggcggggcaggggatggcgaatgcgcgaggcgcagcctggctgcgaagtcccgctccatggtgtcgtcgtcgccgccgaccgccatgggggatgcgcgggcggtatctatagggtcggggcgaggaggcgggcgcgcgggccgaggaaggcggggaggaggaggaggcggcgcggcctccgatggcggaggcggtcaacgggtggaaccatcggattcggcttcgaggggtgggaaagcgggcgcgggcggaatcgatgggactgcgacggc

SEQ ID NO: 11097 - DNA, 1666 bp, Setaria italica
  Peptide Sequence Number=SeqID_77071
gcacatttcgcgcccactagttaggcagggcagcgcctgggactgtacaactctagtaaacccacgatcaccatgaatgagactgttatctccttcgagcaaaattcacaggagatcgttgatataacttactcttttccatattatactactatgagcagttataagaattatgagtcgctacagctaaggaaggattttaccagatcaatgacaaactcatcactcctcacccaattcaaggtaaaaaagagaaacgaggaaaggaatagcgcgaattaagtaactgacgatttggtggaggcaataatggctggcgcgagcttgggcgatcggccggcaggccgacccgagcggcggtggtggcctagcgccacgcggaggcgacggtcaccacacgccccatccagcagagccggagcacgccgttgtccgccttgaacgtgatcccgggcggcgccgggccgacgcgggcggcgacctggtccacaatgcccgggccgagcgccaccgggcggaaacccgccatgccgaaccgggcgcgccacttgccgaagacctcgcaccgctccagtcggtcggggccctcgcggccgaccgcgttcgccgccttcctcgccagggccgcctcggccctggccttcttctccgcgctctcccgccccagcgtcgcgtccagcgactccaggatggcgccgtagtgcgcgcacgcgtccgtgaagcgcgcggccagcggggccgtgttcgtgttcagctcctgctcgacgagcgccaccacctgcgggcccagcgcgcgcacgcggcggaggagctcgtcccgggggttcgccggagagacgctctcgtcggggacgtgggagagcgcgaaggcgaggttgacggccagcgcctccccgggcgcgcaccccagcctggacgcatccagctctgcggctctgcagctgaccactttaaagcggtactcgatgcccgctcgctcggcgagctgcttcagctgctccccgatggcggagagcgttgcagttagagactgcgtctgcgtgaacggcgagcttgggtcgatgacggcggtgaccttcagggacgtgcccggcacgcggcggtcagcgaggtactggataagggccgtgtgctgctggaagctgacgtcgaagtcgacgaggtggatggcgcggtggtcgcccacagcttcgacgatggcggcgctggcggcgtggagggcgaggcggaagcacggggagatgtcgtggaggagctgggacccggcgcgctgctcggcgccacagagctcggcgaggtgttgagctagggcggaggcggtcgggacaatgcgggaggacagcgcggccaccatcatggcaatcagccgctgctcggcgtcgccgtgctggttggccgcgcgcttgagggcgaccaggtgggtggccgccgcttcgtgattgccgtcggcgagagcgaccgcggcttcggagagcagctgccgcgacgcggcccccggggtcgggggcgagcaggacgcggaggaagacgccgtggaggaggacgagttggaaggtgacctcgtcatccccgcgttagcgttgttgttgttgttcggggtcgccgacgcagggaggccccggcgacggcgcggcggtgatggagttgagctgctgtatcgtcctcc

SEQ ID NO: 11098 - DNA, 601 bp, Setaria italica
  Peptide Sequence Number=SeqID_77072
aaccggaatactccccgaagtcacccacacacatcggcgtgcgcgaggcgatcgaagcatcccgtcccgaggaggaagtccggccggccggcgacgcggcggaaggatggggaaggttccggtgcggatgaaggcggtggtgtactcgctctcgccgttccagcagaaggtgatgccggggctgtggaaggacatcaccaccaagatccaccacaaggtcaccgagaactggatctccgccgggctcctcctcggcccccgtcgtcggcacctaccagtatgcaatgtggtacaaggagcaggagaagctctcccacagatactgaatgcaagatcctacaagttgactgccacagcagttggaattttcgtgatgggttctatagtcctccaaggatgatttaacatttgctggatcaattttagttgtactccttccatctttccatgcatatacgctacctgtgccttgcaaacttattttgaggcttctgctacatatgggcatcttttgccactcaagttgttaaataaagcaaattaactggctgtttcgcttgtgtttattttcaagtaatcggttttggttttagttaaaaaa

SEQ ID NO: 11099 - DNA, 764 bp, Setaria italica
  Peptide Sequence Number=SeqID_77073
ctccgtggacgtgccctcttccgcggcgcgctcctcgcgcccgcgggcgaggacctggggttcacggaggtggacgcggagccggattacgacggggatctcacctcgatctgctgggactgcctcgagatcgaggacgccgacgagccggatctgccgctcgtcgtgggctcccccgccgaggagttcgagtgggaggaggtcgcgtctccttcgggtgccggaggggaccccccggagcccgagtgggaggtgctcgccaacgtgcccccgccggccgacgccgacgccgaggaggaggggttcgtgtacacctcccacaggggtatggaagaggtgctggtcgccggcggggacgggctattcctgaagagcaagccgcctgcggccagattggccgtggagtcgctcccttcagccgtcgtcgcggctggcgaggaaggggagggggatgagtgcgcggtctccaaggacggggtcgcggccgggcagcgcgtgaagaggctgccgtgctcgcaccggtaccacgacgagtgcatcgtgccgtggctccaggtgcgcaactcgtgcccgctttgccgctttgagttgcctaccgacgacccggagtacgagacctggaaggctgggctaaccgtggctgcctgaatcagcttcgcggttagagcaaaagctctactggtatggtttatagagttgtacggtttggttttgaatcggccgctccgattacaaggttgttacttacacagttgtatgaaaga

SEQ ID NO: 11100 - DNA, 788 bp, Setaria italica
  Peptide Sequence Number=SeqID_77074
gcgtgctgcgaagaatgagtgcaaccgcaagctgctgcgaagaatgagtgcaaccgcaagctgctgcaaaggacgagtgcgaccgcaagctgcgcgtgcttcgtaccgacaacggcggcgagttcacggcggctgagttcgcgtcgtactgcgcggacaaggggatccagcgctacaactccgcaccgtacaccctgcagcagaacaacatcgtcgagcggcgcaaccagacggtggtggccatggcccgagtcctcctcaagtagaggaggatgccgaccatcttctgaggaaaggcgatgctgacggccgtccacatcctcaaccgctcgccgaccaaggccctcgacggtatgacaccatacgaggcttggaatgggcgcaagccggcggtcgctcacctccgcatcttcggctacctcacgtacgtcaaggagctaagccacgtcggcgagctcgacgacaggagctaccctagaggtgttcattggttacgctgagggggtgaaggcctaccgcatcctcgactcggagacacagcgtgtgtgcatggcgcgcgacgttgtgttcgatgaaggacgaggttgggcatcgtagttgatggtggatgacagcttgacttcgacgtacgacaacttcaccatcaactacgtccacttcgaaggagttaggggagtggacagctcttcttcgcgagcgtgcctaccccagtccacgggtctccacccactccggcgagtactacgccggctgtgctggtggtggtggtggtggagagctcgtactta

SEQ ID NO: 11101 - DNA, 605 bp, Setaria italica
  Peptide Sequence Number=SeqID_77075
aaataagccaagccaaaccagaggccgttagccgcatcgatcccactcctacctcgctcttgaagatcttcactgactgagcaaacaagtgaagcaaccatgctgcagcagcaccattaccatggagcagtggccatggccaaccttcactgcctctcatctccaaacccagcattccacgctcactgccacagcaacatgatcgcgatgccggcccactcccttccacttctcgccttctacctttgaacctatccacgaagcaccggctgtcgtcagcaacagtccaggccggctctggcagtgccgaggatgcatacggcggccgcatggtgatggcagagggatgagcggaggcggcggaggatggtctccaaccgggagtccgccaggcggtcgcgcatgcgcaagcagcggcagctcacagagctgtgggcgcaggtcgttcacctccgtggcgccaaccgccgcctccttgacgacctgaaccaagcaatgaggggctgcagtgacatgtgctgcgagaacgcccagctcgagaaagagaaggccgagctcagtaccaaactcgagcgcgattggtttcttccaagcaccacaacgcc

SEQ ID NO: 11102 - DNA, 659 bp, Setaria italica
  Peptide Sequence Number=SeqID_77076
acccgcagaacatcaactttggcatgatggacggccacctcgacttcggcgcgtacaacgacgaccacgccacggggaccgggcacggcttcggcggcggcgtgtccctgacgctcgggctgcagcagcacgccggcgacgacccgcacggtggcgtgaacgtcgcgttcgcggcggccccgtccgcggcgcacgagttcctgttcatggcgggcggcgagcatcagcagcagatggtcgcgggtggcagcgtccacggtcaccatcagggccagttcggcgccggaatggaaggcgacgccgcctcgcactaccaccggggcctcagcgccgccactggattccagctcctccacgacctggctggctgaacgcgttggcatcacgggggacggacggacggaccggcgcgatcatcagagcggagtgctttaatttgctttggaggttcatgcgatgtttgacggggatgtgccaacggcagcagctagcggatggcattgggcattggcatgggcgcacgcgcatggtgcgcgcagcttgtgcgcctcttgtgtagggcgctttggatttttgtagggtttagattcctctcccttcaattcttggcagggcgtctctgtctgtctatatgtgtgtatcagtttcagcgattgcca

SEQ ID NO: 11103 - DNA, 1730 bp, Setaria italica
  Peptide Sequence Number=SeqID_77077
tttttttgtcagaggaaaaaataattgaaaacaggatgggggattgtatacatatattatgtatgagattaaataaagcctagcttaattgagtacagaatgcaatcttacagtcctcagaactatatatgctttagttcatatcgatccataggccctatcatttgccctctgtgctgcttgtatggtaccacctgtgtgttcccaagatgcctggcttgcatgattttcactaggattgtctgcttgcaagtagcctcttggtctaccaacagcatccagaaaggcagataagaacgccatcccaggcagtgcatctaaaccatacaggtgctccacgcgggttttgtagatgaaccctccacaacaaagtagagttgacaagataacgaatatgcatgaaataattccaaatgttgcccagcctttcatgagatcactctctttttcttgtgcgtaaccacattctttggtaagtgtaaactcaatcggatcatagccctccactgggatcaaaatattgacctcataaggactgcttcgagcaatttcacatctccaatccacattcagaactgtaggagacagggtagtaggcatggcaccattgagccctgatcctgtaagtgtaacactaagccctttcgctggattaaccttgagggtaggttttccaacaagacctgcgagggaagacatagcactaagatacagggagacatgaatctgctcggtttgaaagctaaaaccatgatggagttgctcaaatcccagctgagtcaatccattataaacaatttctgatgaccggggatggaatcccacagtgaaacccttgaatactcttggaccacttttagaacaaggaatagcaagttcaacaagcaccctgcacatcctttcatcgtaagatatgctacagatgcatccttgttcatctctgcaagctttatttgagcaatgtccacatttgatgtttacctgtgctgtacgacccatcattttgaaggtagtttcacagtgcactaaatctccattgtggaatctctgaatatagtcagtaggccctgaaccaaatagaaaagagcgagaactaacaaaacgtccaaattcaatgtaaccctcttgagatcttttctgcacatctttgcagaactcaacaaccaaatcagagcgttgcaaaccctgttcgttatattcatattcctttccgaccagatgtgtaaaatcaataaggcggctttcattatcaaaggtataacaattagaatttgggaccacgatgatagcagtggctggcacatgcacgtagatagctgccagtgccaacaaaactgtgatcaatagatgaatggtatgcgtaggacaggaagccacaggactcatggcagaaccgtcgtttgggtgtaatcggcgattcccgctgcggggtcgggcggccgaatctccgagggcgggcgggcgtcggcgtgggagagcaatggggagcgggagagcgcgtttatcctggaccggctccgctcgtcggttcgaattttcccttttcagaaggtgagaagggggccgtcgccgcgtcggccggcgaacggggccggtgcgcttgccgcttgcgccggggacgtgtgggccccgacgacggatggatgtctcggttttctcggagagactgggaagcaagcatgtgcttggccgcttgggtttgcaggagcaggacgagtcgctgtggaaca

SEQ ID NO: 11104 - DNA, 1256 bp, Setaria italica
  Peptide Sequence Number=SeqID_77078
cccgtctgcttgacgaccgagccgccccctttttcctccccccttcctgcctcgcagccgcgcgcgggcgcggcggcggaggttcccggttaccccggggaggcggcgctcggttccggcggggatgggcacgccggagttccccaacctggggaagcactgcagcgtcggcgactgccaccagatcgacttcctccccttcacctgcgaccgctgcgacaacgtattttgccttcagcacagaagttatacgacacaccagtgtccaaatgcaaatctgaaggatgttactgtcctcatctgtccactctgtgctaaaggggttcgcctcaatccaagcgaagacccaaatatcacctgggatactcatgttaacactgactgtgatccatcaaattaccagaaagtaacaaagaaaaagaaatgccctgtgcccgggtgcagagaggcactgactttttccaacacgatcagatgcaaagattgcaccaaagaacactgcctgaagcatagattcgggcctgatcacaagtgcccaggaccaagaaaagtggattcgggcttcccctttgtaaatatgctaaggagaagtcagaaagtggagacacgtccgaacagcagtaagaacaatagttcttcatggtggagctccagccttgtgaatgcagcaacgaatttcaaatcatcagctgaagctggaatgcagaaactgagcatcgctactagccaagccttccagaaggctaaggatgggatctccgcagacagcagcagcagcagcagtgagcttgtggaggaatgtgttcattgcccagctagattttccaccgtgggggccttaattgaacatgtcgagaaatcccaccagacaaaccagcaacctagtcgtggccgagtgacaattgatgtttgccccaagtgtagcaaggggttccgagatccggtgttgctagtggagcatgttgagagggagcatggcggaacgtcaagagcataaagctgctcgtgtgtactttataacttttttttcttctcatttcatccattgggttatgctctactcctttggacttcaaatttgcccatagaaagtatagtagtatgttggattgagggcaaagcggttgtccattccattgaacctaccttagtattttggtcgttctggattctagaaattaaagtatgatttgttaagataatttgcccataaataaaattttgttgcactactcgagttcacagcctccagaact

SEQ ID NO: 11105 - DNA, 247 bp, Setaria italica
  Peptide Sequence Number=SeqID_77079
ttttgttgataacaattcattctgaaatgaaaataaaaaccgtaaacccaagcaatgttcaagatcgagtgcagaatttatgtgatagtagtacactctgcatacctttgcagcaatgcgaggcaaaagtcatgataaaagcgtgagcgttcagacaacattaattgaaagggaaaactaagagccaccaggttccatcacattcgcgtatgcgccatgcgccagctagatgtttgcaacgccaacg

SEQ ID NO: 11106 - DNA, 248 bp, Setaria italica
  Peptide Sequence Number=SeqID_77080
tttcatctttatggagcctgttagaaaaggggctctcaaatccataggatgtagtccaaaattgaaccacatcctcaaaattctcagaccaattcctccctccaagcaggtcattactcattagcaactttactcatggactacaaatgcagaagagtttgggttttaaggcatagaagacaactccagatgccatttgcagctactgaaagctacatgtgaggaataaagctatatggatttgttat

SEQ ID NO: 11107 - DNA, 327 bp, Setaria italica
  misc_feature (310)..(310): n is a, c, g, or t
  Peptide Sequence Number=SeqID_77081
ccaatgcacaccatctcctgagatacctagctactgcagtcgttgtgaacaaaaggagaaggaatatgcttaaagagctgattaaagaattcagcaggagcagcatagctacaaggatcccataactgaatttctggaatgcttatatgtcaactatgattttgatggtgctcagctgaaactcatggagtgcgagcaggttatattgaatgatcctttcctgggaaagcgcattgaagaaggaaatttcgtcactacttgttccgtagagttagttagttatttgtgtagttttgccttcgtttctttntttttattttttcgttt

SEQ ID NO: 11108 - DNA, 1733 bp, Setaria italica
  misc_feature (1677)..(1733): n is a, c, g, or t
  Peptide Sequence Number=SeqID_77082
ctcctcccccgcgccgccagcccgccaccccctcgaaaccctaaccctagccgcccccgggaggctgggaggagagctcgcggcaccagccatggcggagcacgacctcaccgcgctgctggcggcgcagatggaccgccacctggtgttcccgctcctggagttcctgcaggagcggcagttctactcggagccggagatcctggaggccaagatccgcctcctcagcggcaccaacatggtcgactacgccatggacatccacaagtccctccacggcaccgacgacgtccccgaggacatggtcaggcgccgcaccgaggtcgtctccaggctcaggtcgctcgaggaggccgccgccccgctcgtcaccttccttcagaacccgcagctcgtgcaggagctcaggcccgacaagcagtacaacatccacatgctccaggaccggtaccagattggtcctgatcagattgaggctttgtatcagtatgctaaatttcagtttgagtgtggtaactactcgggggctgctgactacctgtaccagtatcgtgctctgtgcaccaacagtgagaggagtgtgagtgccctttggggaaagcttgcagcagaaattctgatgcagaactgggatgtagctttggaagaactcaaccgcttgaaggaaataattgattcgaagaacttctcatcacctcttaatcagctccagaacaggatatggctgatgcattgggctcttttcatcttcttcaaccatgagaatggtagaaatgggatcattgatctgttcttccaggacaggtacttgaatgctattcagaccaatgcacaccatctcctgagatacctagctactgcagtcgttgtgaacaaaaggagaaggaatatgcttaaagagctgattaaagtaattcagcaggagcagcatagctacaaggatcccataactgaatttctggaatgcttatatgtcaactatgattttgatggtgctcagctgaaactcatggagtgcgagcaggttatattgaatgatcctttcctgggaaagcgcattgaagaaggaaatttcgtcactgtccctttgagagatgagttccttgaaaatgctcgtctgtttattttcgagacttactgccgtattcatcggtgcattgatatcagcatgctttcgcagaagctgaacatgagctacgatgaggcagagttgtggataatgaacttggttaggagctcaaaactggatgcaaggatcgattcagtgtcaggaacccttatcatgacgaccaatcacgtcaatgtgcatgagcagattatcgagagcttgaagggccttaacatgcggacctacatgctagcaaagaacatcgtggagccagctcaagcaacacagcaggcaactcggtgaagcttgcagagtctacagttttgaggtgccaaggattagttacattagaggaagagctgtaaactgttggagctctgttgttggtcagtgactgtcatcagtatttgaacacctgggaggtggtttgcagtttgctacagcttatgcttacattttcagtattttgtactcggaatttcataacaagtgatccttctttatgtactactatagtgaatgatgcaaccggatgtatgtgtttggcgtttaggtaagtttaaaaaacnnnnnnnnnnnnnnnnnnnnnnnnnnnnnnnnnnnnnnnnnnnnnnnnnnnnnnnnn

SEQ ID NO: 11109 - DNA, 560 bp, Setaria italica
  Peptide Sequence Number=SeqID_77083
ttaaacaaactaccgatacattccgtcaagtactaaagctcttggtcaaaatcgtacagaaaaaccttaaagcaactactcaaattatttatatatacagtactacgtgttactagattctatgcatacgttattcctttttacaagtgaatctttacagaccagaaaagcaaaacaaacgccacgctagagcttcatcagggagtgggagtgacgaagccaatcctggatagcaaagcgaagggcgtggttgggcgtgagatttcgatgctctagtttctggccggtcaccggcgacgtccccttcccagtctccatccacttacgaatcgcccgcccttcgtacgttaagccatcagcgcacacctgaggatcatgcattatctccttcagaatagggcataggaaagaggagggtgctcgtccctcctccctcgtaaagcatagctgttctagatcttgtacggtcccaggagtcagctccgggcgatctcggctgctggtttcactacaactcagcccaaaatatgctagccttccagccacctccgtaggccacc

SEQ ID NO: 11110 - DNA, 277 bp, Setaria italica
  Peptide Sequence Number=SeqID_77084
ggcgtcggcgttccgccggaacttggccatgtcgccgccgtcatcctcctccagtgactcccggagcgtgcgcaccacctccctggcggccttcaggtacgccttggggagcaccttcccggccttggtcttctcgttcgggtcgaagatagacttgatggcgccgaggacgccctcctcgccaccgccgctctcgtcgtccgccctggccggcgccggcgcagccaccgccacgtccacgcccacgaggccgaggaggagggaggcggcgtgggct

SEQ ID NO: 11111 - DNA, 469 bp, Setaria italica
  Peptide Sequence Number=SeqID_77085
cgcatgggtggcgtgttcggcgccttgttcggcagccaccgccgtgccgggagggcgccggccgtcaggcaccgcggcctggccacgcagccgtcgtcggcctacgacggcggccgccggcgggcgatgctcagcaagaagtactcgtacatacccgacacctacacgtcgctcgaccaggtggcggcggcgctgcggcagcagggcctggaatcgtccaacctcatcctcggagtagacttcaccaagagcaatgaatggacagggaagcagtcgttcggcgggcagagcctgcacaggctcggcgacacgcccaacccctacgagcaggccatcagcatcatcggcaagacgctggcgccattcgacgaggacaacctcatcccctgcttcggcttcggcgacgctaccctgcttgattccaccgcacggttaataatatggcaacaacaatgcttgcttgtctcca

SEQ ID NO: 11112 - DNA, 374 bp, Setaria italica
  Peptide Sequence Number=SeqID_77086
tagttctttcttaagtactccattcgtcctaaattataagtcgttttggatttttcagattcataaatattattatgcatccagacacatggtatatctaagtgcataacaaaatctataaacgtaaaaaagtcaaaacgacttataatttgaaacggaaggagtattcggaggcaccgcagtgcaagtcatgcgtccgttcgttctcccatccatccgacggccgccaaataccgtgtcacagttgttccgccgcgacacaaggggcccccagaagcccacatcgccccacctcctcgctactgttgcctcttcgccgccgtgagtgccccccaaacaggcaaccaccagtgccgcccggtcccgtcctctcg

SEQ ID NO: 11113 - DNA, 1759 bp, Setaria italica
  misc_feature (1752)..(1759): n is a, c, g, or t
  Peptide Sequence Number=SeqID_77087
cgggctcgtcctcggccgcagcggcgtacggcgccggctccggcggtggccggcacggggacagggggtacccggacctgcagcaggcgcccatggtggcgccgcgcgtcgagaagctctgcacagcggctgagaaagcaagggtcaagagcaatgcactcgcgcgagaggcctccgcgccaaaggatgccaatggcaatattatctccgcacagactttcaccttccgtgaacttgccactgccaccaggaacttcaggcctgagtgcttcctgggtgagggagggtttggacgtgtttacaggggccgtcttgagagcacaggacaggttgttgctataaagcagcttaatagggatgggcttcaaggaaacagagaatttctagtagaggtcctcatgctcagtttgctgcatcatcaaaacctggttagtttgattggctattgcgctgatggagatcagcgccttcttgtttatgagtatatgcccttcggatcattggaagaccatttacacgatctccctcttgataaggaggccttggactggaacaccaggatgaaaattgcagcaggtgctgccaaaggactggagtaccttcatgacaaagctaatcctccagttatttatcgggatttcaagtcatcaaacattctgttggatgaaggcttccacccgaagctatctgactttggccttgctaagttgggtcctgttggtgacaaatctcatgtatcaacacgtgtgatgggtacatatggttattgtgcaccggaatatgctatgactggacaactgacagtaaagtccgatgtgtatagctttggagtcgtcttgcttgagttgattactggtcgtagggctatcgacagcaccagaccacatggagaacaaaatcttgtctcatgggcacggcctctttttaatgacagaagaaagctccctaaaatggctgacccgaggctggaagggcgatatcccatgcgcgggctttaccaagcccttgcggtggcatccatgtgcattcagtcggaggctgcttcccgcccgctgattgcagatgtcgtgactgctctatcctacttggcgtcccagtcatatgatcccaatgcggcccttgcttcaaggaagccaggcggcgacccacgaagcaagcccagcgagaacggcagggtggtttccaggaacgacgagacaagcagctccggccacaagtccccaggcaaggacagggaggactcgccccgagacctcccaggcatcctgaacaaggactttgaccgggagcgcatggtggcggaggccaagatgtggggcgaccgcgagcgcatggtggcggaggccaagatgtggggcgaccgcgagcgcatggtagcggaagccaagatgtggggcgagaattggcgtgacaagcggcgcacggagaatggccaggggagcctggattcgccgaccgggaacatctaggaaggggtgtaagattggaagagaaaagaaaagacgaggaggtcttcgtccatccacccatgcattgttccgtttgtttccaggtcgattcgcgttccggtggcggagtgggagggcagggagggttagatgtacattcctagggcgggaacgagggggaaaaaacggcagcgttgttctggatagtggatgcatgtggttgtacttgtaaattctcagaaaattttgtgagaatgaaaggacattttgagttccagctgtaaaatgttcgcgtctggctgcnnnnnnnn

SEQ ID NO: 11114 - DNA, 245 bp, Setaria italica
  Peptide Sequence Number=SeqID_77088
aaatcaaggcaacaaggcacttatgaatcaatccaccgtgatttacttgtcgcttttggaagttgggattttgatccaatgaatagtaccaacccatttcctcaaaatgagggttctgtacacatctggcaaggatacgaagacaggttggtgcttgttgagctgcagagatacatttccaagaaacttccatggatcaagtaccatgaagtcccagaaggtggacatatgttcatgctggtaga

SEQ ID NO: 11115 - DNA, 297 bp, Setaria italica
  misc_feature (285)..(285): n is a, c, g, or t
  Peptide Sequence Number=SeqID_77089
attctccctcactcccacagcaggcggcggcggcggccactcctctggaccactcgactcgcactcaagcgactcgcgaacggatggcaggaagctagccagaggacgaagggcttgtccacgcaccatctctgcacacgcggaggtgctggtaaggggagcatcaatcgacaccacgcgaggcaaggtctgggcactctgattccgttcacgtggactcgtggacgttccagcaaggagcaagccgtccatgatttgtagtaggctactcctgtacactggttncatacgcatacg

SEQ ID NO: 11116 - DNA, 640 bp, Setaria italica
  misc_feature (409)..(409): n is a, c, g, or t
  Peptide Sequence Number=SeqID_77090
cgcaatattaataaatatgtagttagactttagaatctagattatctactcagatctaattaatggcatctgacttaaaacaacgtatatactgcattcacctgagactgaactaacataagaacaagggttgtcgtcaattgtctagtataagtaatcaagtacatatgttaatggttatgtgaagtgagttagaacacaaaagtaagttggtcacatttagctaaaagtgctaaagatgattaaatggaagtagctgaatttaggttggtactggtttacaaggtatttggcttcatcctatggttatatttcatcttagattctaatgttatttaagttaccaatagttgaccaaaaagtacttaagatgttattaagcggcaaacaccataacagaaataaggcngggaaaaaaattaggttgagttatctcaataaagttagtctactctccatgtgagtccgtaaacatggttccagttcactgatgagtgatgaataagcctgttctgatagatttctaccattattcacgatgaatttgtgtttttaagctggtggttctggttttaatcatggcctttttctcatttgaaccaatataatgttcagttgcctgttattatttttggttatt

SEQ ID NO: 11117 - DNA, 266 bp, Setaria italica
  Peptide Sequence Number=SeqID_77091
gtttcggtcctttccctaccccccaaccggcgcagcgagaggggagcttcgcaagccgccgcggctcgtctagcctcgaatccccggcggccggtgcggaatttcgcggcggaccggaggtatcgctcgtgagaaaatggcctcaatcgcgccgccgtcctcggcgtggtgcgcacgcatccatggtcagcacaggacttctgggttgctttgtgatacttcgattctgctgagtgctacattaaacaatttaaggacaatcagat

SEQ ID NO: 11118 - DNA, 438 bp, Setaria italica
  Peptide Sequence Number=SeqID_77092
cgttcagcatgtatcccgtatagcatcctgtatacagcaaggcttgcaataacccgtacacctatgcaagccacctacactctggaaatctagcacaactgctcatcaaggcaacatgctccccttgcgatgctcttttgcactctgaactccaaggaacaccgtcaccgttacatatacgtccatgccttcattttagtcgtattaactagtattattgtcctattaaactatttcctagtaagggtctattacttgtcgtagtatttgtcttgtcttcaattgaagaagccgaacagctgcaacctgcttctcttctagcgactttggagggaaaacaaccagaacatttgatgaaccctgtttcacaggacttgctaaatatgcatattcccctcacaacacttcttggaaaaattttgtaatttgaatcatcaa

SEQ ID NO: 11119 - DNA, 233 bp, Setaria italica
  Peptide Sequence Number=SeqID_77093
tacagcacaacggctctcatcttgggagaaagcccatgttggttgaggaactcaagaaaggggcggtccaggtcctcctcagatatcatggcagcagcagcatcctctcccctctcatcagcagaagctgatgtggcagcaatccttgaagatgtcattcctcgcgcctggcacagggtagaggcagcccccccagtagaggaggcttcccctgtccacgctcttgaactcca

SEQ ID NO: 11120 - DNA, 410 bp, Setaria italica
  Peptide Sequence Number=SeqID_77094
caatagatgctcttttcagtccacagccacaggattcagatgggcatactgcgagattgctgctcaattgaagaagccgaacagctgcaacctgcttctcttctagcgactttggagggaaaacaaccagaacatttgatgtaccctgtttcaaagacttgctaaatatgcatattcccctcgcaacacttcttggaaaattgaatttgaatcatcagatggaacatccaaggtaggaattttgtatgaaggatcaattatcaaccgtttgcaagaaatatcctgaccagatgccaatctggcacctacaaaatgcttcttttcctcatccattaagaagcgtctagtcctacttggtcttatttccgttcttaacttactttattttatttagggttcttaccctttta

SEQ ID NO: 11121 - DNA, 466 bp, Setaria italica
  Peptide Sequence Number=SeqID_77095
gagccgtagaacgggttggggtcgacgtggaggaccgtcttcccggcggcggcgcaggcggcggcgaggacggactccgggagccccgtgccacagagcaccacgtcgaacgaggggtcgatggtggggtactcgtgcgccgcaccggcggcggcgggctcctccgccatggtttgaaacgccggtgacggaatcgtcgtgggtggagaagattagaattggttagaggctaaggagctgcgaggggatcggagaggttgccgcatactctcccacggccggatcgggatcttgctcgcgcgggatgggaggaggaagcggcgctgtgattggaggcgaacccggttgggggcggcggagggacggggcgatgtgcgaaggagaaaggcgacgggtactagacgatgcttcctgctgctgtgtcaggcctgtgtgccgcggttatcctatgatctgcccgagtcgg

SEQ ID NO: 11122 - DNA, 612 bp, Setaria italica
  Peptide Sequence Number=SeqID_77096
attttctccccacgctagtgcaaccgacttaaattggggaaccatatcaaagcgttcagcatgtatcccgtatagcatcctgtatacagcaaggcttgcaataacccgtacacctatgcaagccacctacactctggaaatctagcacaactgctcatcaaggcaacatgctccccttgcgatgctcttttgcactctgaactccaaggaacaccgtcaccgttacatatacgtccatgccttcattccgcgataatgttctcctctagaaagatggttttattccgcggaatcagagtcatcatcgccatgtacaggagctgaacttctaggcaagaattcttcatcaggatagatatctccgaataacttttttgtcgattccagtatgaacctgtaatccaggttttcatcaggcatggggcatgaccataaagaaccaggtgttgatgttccctgtgtgatctcttgaacatacacacagctccagattagtgttggcttcatatcatcggtgctttcactggttgactcaaggtggccttttcagtccacagccacaggattcagatggcttcgaaggccaccttgagtcaaccagtgaaagcaccg

SEQ ID NO: 11123 - DNA, 1085 bp, Setaria italica
  Peptide Sequence Number=SeqID_77097
cttcatggtcatgccccatgcctgatgaaaacctggattacaggaacatacttgaatcgacaaaaaagttattcgcagatatctatcctgatgaagaattcttgcctagaaattcagctcccccacgctagtgcaaccgacttaaattggcgaaccatatacgtccatgccttcattccgcgataatgttctcctctagaaagatggttttactccgcggaatcagagtcatcatcgccatgtacaggagctgatagtctaggcaagaattcttcatcaggatagatatctgcgaataacttttttgttcgattcaagtatgttcctgtaatccaggttttcatcaggcatggggcatgaccatgaagaaccagatgttgatgttccctgatagtgcaagacaggacagtgaatgtttaccagtgctgtgtgatctcttgaacatacacacagctccagattagtgttggcttcatatcatcggtgctttcactggttgactcaaggtggccttcgaagccatctgaatcctgtggctgtggactgaaaagagcatctattgcttttctgatgcactgctttctggcggaggcatcagtacagggagtagacagatatgccataaacattccagaagggcatactgcgagattgctgctcaattgaagaagccgaacagctgcaacctgcttctcttctagcgactttggagggaaaacaaccagaacatttgatgtaccctgtttcaaagacttgctaaatatgcatattcccctcgcaacacttcttggaaaatttgaatttgaatcatcagatggaacatccaaggtaggaattttgtatgaaggatcaattatcaaccgtttgcaagaaatatcctgaccagatgccaatctggcacctacaaaatgcttcttttcctcatccataagaagcgcagccactggcatccgcaacacatatagggcacccttaaccgcagcacagcgacagaaagcttgaggcagctcaccatgcccatacataggataaatgaaagcaccctctgcattagcaaatctcccaattgatgacaagtacagagc

SEQ ID NO: 11124 - DNA, 2171 bp, Setaria italica
  misc_feature (1)..(73): n is a, c, g, or t
  Peptide Sequence Number=SeqID_77098
nnnnnnnnnnnnnnnnnnnnnnnnnnnnnnnnnnnnnnnnnnnnnnnnnnnnnnnnnnnnnnnnnnnnnnnnngttttttcgcaaataccagcaaccagcagggattgctgctaacatgatcttgataatgctttgtatagtttaagacgatgcagatactaaataaaatcacatcaggtttgtttattccaaagtattcacatcgcaccacgaacgtatcaggtaagcagtttaactatctcaaggggaaataaaaagtctatagaatatccattttctcccccacgctagtgcaaccgacttaaattggcgaaccatatacgtccatgccttcattccgcgataatgttctcctctagaaagatggttttactccgcggaatcagagtcatcatcgccatgtacaggagctgaatttctaggcaagaattcttcatcaggatagatatctgcgaataacttttttgtcgattcaagtatgttcctgtaatccaggttttcatcaggcatggggcatgaccatgaagaaccagatgttgatgttccctgtgtgatctcttgaacatacacacagctccagattagtgttggcttcatatcatcggtgctttcactggttgactcaaggtggccttcgaagccatctgaatcctgtggctgtggactgaaaagagcatctattgcttttttgatgcaatgctttccggcggaggcatcagtacagggagtagacagatatgccataaacattccagaagggcatactgcgagattgctgctcaattgaagaagccgaacagctgcaacctgcttctcttctagcgctaaataaacagtggaaactgggtcaactaagagaaacaacaccaccatggctacatcactttggagggaaaacaaccagaacatttgatgaaccctgtttcacagacttgctaaatatgcatattcccctcgcaacacttcttggaaaatttgaatttgaatcatcagatggaacatccaaggtaggaattttgtatgaaggatcaattatcaaccgtttgcaagaaatatcctgaccagatgccaatctggcacctacaaaatgcttcttttcctcatccataagaagcgcagccactggcatccgcaacacatatagggcacccttaaccgcagcacagcgacagaaagcttgaggcagctcaccatgcccatacataggataaatgaaagcaccctctgcattagcaaatctcccaattgatgacaagtacagagcaatggtcttgattccctccctcgtcgtaattaatttatcagaaggctcaggaccatcttgatcataatctgccatggcaattgcatacagcacaaccgctctcatcttggcagaaagactatgttggttgaggaactcaacaaaggggcggtacaggtcctcctcagatatcatggcagcatcctcctcctctcccctctcatcagcagaagctgatgtggcagcaatgtgctcctggacaaccttcaagaacttgtaggcgacgaacttctccgtgtgcttgagtgtggtgtcgctgaagatggcacccctcgagcctggcacagggtagaggcagccttcccagtagaggaggcttcccccgtccacgctcttgaactccacatggtggctgccccccgagcgcagtaggaggtccacggcctcgtcggcgcagtacagcacccggggccccacgaggtcgacggtgaaccgcctcgccagctcggggatggctcccgaggtctcgacctccgagtacacagtgcggcggtggagatcgacgacggtgtgcgaaccagaggtagctgccgcggccacggtcgaggaggacggggaagggtcaggggagaggaaggaggcgagggagaggagcgggatggaggtgtagtgggagccgtagaacgggttggggtcgacgtggaggaccgtcttcccggcggcggcgcaggcggcggcgaggacggactccgggagccccgtgccacagagcaccacgtcgaacgaggggtcgatggtggggtactcgtgcgccgcaccggcggcggcgggctcctccgccatggtttgaaacgccggtgacggaattcgtcgttgggttggtagtaagtatttagtaatttggtttagtaggttcttttaaggtta

SEQ ID NO: 11125 - DNA, 217 bp, Setaria italica
  Peptide Sequence Number=SeqID_77099
gtattaattaggcttaatagattcgtttcgtgaattagcctccatctgtgtaattagttttataattagctcatatttagtcctcctaattagccttccaatattcgatgtgacataaattttaggaggtcctaaagatccaaacaccccctaagttatcatggctgatcgattgtttaaagcaaacaatgctatcttactgttagctttgtaatct

SEQ ID NO: 11126 - DNA, 483 bp, Setaria italica
  Peptide Sequence Number=SeqID_77100
ggctgtacatactttatcgtcttactttccctttatctatttgttttttcttcccagttgtatgtgtggaaacttcatgctactttgtaagacatgtggactgttagctttatagtctgagtagaagggtacaacaactggctggatcagaaatgtcaacactaacttagctgtctggatcagaattctaaagcaacaatgctatcttactgttagctttgtaatctgaacaacaactggctggatcattgatgtcagcactaacttagctggctagatcagtttcctgaagcaacaatgctatattcctgaattacaactttaccaaaaacttaaccaacaaggggaaagaaataatatcacccattagcacccttgtatcctgataatgttaacagtttgtgtttcattttcacggctaactatcagttaatattcactattttgtttaccagtactggatgagccattgagatcttggaa

SEQ ID NO: 11127 - DNA, 272 bp, Setaria italica
  Peptide Sequence Number=SeqID_77101
gaagaaagcagcgcagaacagcgagagggagagaaatcgatcagccaaaaagccaaaaagccaacagcaacgtcaccgagcagagagacggagagcgctttgcccttttgccgtctcgattcgcatccacctctgcgccgggcggcaacgacggcgaggcgccgcgatgaacgcccacgtgaggagttcttcagctgcggatgccgcggcggcggcgcccagcaccagcggtagcggcgggacggcgtcgtacccctacaccgccgctacct

SEQ ID NO: 11128 - DNA, 252 bp, Setaria italica
  Peptide Sequence Number=SeqID_77102
gaaaggaatttgttaaattatagtgccaaaataacctgaaatgcggactactaaaccatacatcagtacatgatttattgttacataaactatgtaccgtgttgtcctatgcactatcgcatccataatgcggtagttgaatatatgttcttctgtccacaagagcactggattgctaccattcccttcctagcatatatgacacttactgtgtgcgcgtatgtaaccatgtatttttggttaagttggagt

SEQ ID NO: 11129 - DNA, 277 bp, Setaria italica
  Peptide Sequence Number=SeqID_77103
taaggccgccggaaggcacctcgttagtcttctcctctgccagggccgccgctgccgcctccgcggtctcctcctcgtcgccgtccgcggtgccggcagctccgagcacgaggtcgaggatcccgagcagctcgtcgggcgcgacgagctgcgggaagtggccgaacgagtcgatggtcaccatggcggcggcgcagcgcgccaccagcatgcgggcctgcatgtaccggccgacgtacggcggcgcggcgaaatctcgggagacgtgcaccagcgt

SEQ ID NO: 11130 - DNA, 811 bp, Setaria italica
  Peptide Sequence Number=SeqID_77104
cagttactaacaatggaatttgcctaaaatctgaaaaactgaccttccttaactagtgcaatacttggatacatggagttgaaggctcttactaaagaactaaagaaagtatttggggggtacatttcaatactttcagtacacacatatagtttttggataggtgaccatgggactctaaaaccacctgaatttgtactttctcttccaaacgagttagtctcaattcaataaatcgatacttctgggtctaaagcaagatgtagttgcatggcagttgtttttgtggagctttttattgtgcatgttgctggccgttctttcatttgttctccatgaccttgaattgttgtgtcgtttttttcctgttgaattccaattgttgcttgatattgttatccctttagttagtaaccattttcccgctgaattttccactgatttgacttctgatctacaaaatccagtttttttattagataccttttcttggactatttgtttctttagatcccaagaaacccatatttagtaattccacgtttgagaagtgattcttgcatgcctttgctacaaaaaaggcagtttttttgtcagatttcctttcttgtagtaatttacttgtacagatccctagaaactgtatcactaatgcctataacatgcccttacaaagcttactgaaaacaaaatttattccttgctcatgctacatcattaaacattgcatattgcaagtagtgacaaagcacaatatgttgaagtattgtacctacccaaagtgctcttagctgtgccttaatcttttaag

SEQ ID NO: 11131 - DNA, 250 bp, Setaria italica
  Peptide Sequence Number=SeqID_77105
ggaatggaacagagggagagatgcggcagctcgtttattttctgtgaaacatgattttgtctatctgctcgcataattcgagcgtaaattcgtagtcgttcatccgtgctgttcttggaacaaagaacacgggcactttgagccagtttggttcaacccagattgcaaatttacgtggaggacatgtgatactgtagagagagagagaggaatcttcgtgctcaatagaaagaggtgaattgttatggta

SEQ ID NO: 11132 - DNA, 1485 bp, Setaria italica
  Peptide Sequence Number=SeqID_77106
ccggccggcgaccgcggcggcggcggcggacggcgacggcggcggcgcggccaaggccagccacgtccacgacgcagcagagacgaggtatctgaatgctagcaatcgggagcttggtcatcattttcagacaaaccatgatggtgaaaatggtgttgatgcatcaattgaaaagaaaacaccccccaagctacttcagtttacctttcaggagttgaaatctgccaccattaacttcaggccagacagtattcttggggagggtgggttcggttatgtcttcaagggatggattgagccaaacagcactgctcctgcaaaacccggcacaggtgttactgtggcagttaaaagtttaaagcaagatgcccttcaaggtcatagagaatgggtggcagaaattgactttttgggacagttgcatcataaacaccttgttaagctgattggatactgtattgaggatgatcaaaggttactggtatatgaattcatggcacgaggaagccttgaaaatcatctattcagaagggctcttcccctaccttggccaaacagaatgaagattgctctaggtgctgcaaaaggcctagccttcctccacggaggtcccaaaccagttatttacagggattttaagacatcgaacattcttcttgatgcggagtacaatgcaaaactgtctgatttcggtttagcaaaagctggtcctcagggtgataaaactcatgtctctactcgggttgttggcacctatggttatgctgcgccagagtatgtaatgacagggcacttgacatctaagagtgatgtctatagcttcggagttgtgctactcgagatgttaacgggcagaagatcaatggacaagaagcggcctacaggggagcagaacctggttgcgtgggcaaggccttacctaaatgatcggcgaaggctctatcagctcgtagatcctcgcttggggctgaactactctgtgaaaggggtgcagaaagttgctcagatctgccattactgccttagccgtgatagcaagtcccgtccatcgatggatgaagttgtcaagcaactcacaccattacaagatctaaacgacatggcatcagcatcgtcgaggcctcgctcaactcagcgcggaaaggtgcatcgatgacggacggttctgctgtaacagaagagcgtattggtgattcttctggtcgctagacgcttgtttgctttaattgtatagcaaaattagctttgatgttaactgccgatatacctggggatatgacatgcatcccccagatgtctcgctcggcccaatcacactctgtctggctgtttgccaaagcgagataacgatgtatctgattgcagcatgtaataattataataataatcatgggtagaatggttggtgtgacgaaaacccaaaaaaaaaaaaaaaaaaaactactaaaaaaagagaactagaccaaaggacacaacagggagtag

SEQ ID NO: 11133 - DNA, 633 bp, Setaria italica
  Peptide Sequence Number=SeqID_77107
atgagcaccacgtccagcgtcccgtcctggtaccgcacctcgatcaccggcatccgcacgccgccggcaccgccccccacaggcgcggcggcagcgccggcgccccctttgccgccgccgcggccctccttcctacgcttcagcgcctcgatccgctccttgagctgcttgatgtacgccgccgcgctgtccagctgatccagctgcgtcaccgtgtccttgttgggattggacgccgatgcggccgcctccgagagcagggaggcgtgcctggcggcgggcgggatgagggaggagagcttgaggcagaggcccttcatgtgcagccgccggttcttctccacgtccttcctctccagcttgcaccccccgccgccgccgctgctgtgcgtgttcccctcccccgcggccgtggcgccagccgagctgcccccgctgctctgcctccggctcttcatctcgatctcgacgggttcagtgtctcctcagctcagttcgctgctcctccggccggcgcacagcctcgagtctcgagacaggatgcgcagcgtctgataaactgagctatggagtccgagctggttgtcttggccagagctgtggcttggctgctcatttatacaggagggaggc

SEQ ID NO: 11134 - DNA, 547 bp, Setaria italica
  Peptide Sequence Number=SeqID_77108
tgcgtttcttttcttattatcttctgcttcagcatccttgctttctagcttcatttatcagattctgctagcgccttctccattcgctcttcacggaatcttcaagcaacccccaatgtacttccggtgctaccagagagaatatcggtgccacagccccaacaataggatgggcaggtttcacacgcagagccggtgatgtgaggatgatcccctccagtttctctctgatatgagggtacaaagatgcctgccaagttgtaagctagtgatgagcacaatgaaagaagaaacggacatcaaacgtgtaaaatgagaatctgcagccaaaccatttttcaaccaggctactttgttaaggttttgcaccatttctctgcccgtcagggtatccattgttcacaggcccagagaagtagggtcagtgtctaaaccttgcctaaatacggtagataaatactgttcaatttcataactgcgtaccttcaagactacagctccaccggtagagtgacccagaagaaaacaagggacccctggattctcc

SEQ ID NO: 11135 - DNA, 897 bp, Setaria italica
  Peptide Sequence Number=SeqID_77109
tagaccaatggtcggagattttgcaagcagagcagctgggtcgcggggacacgggggatgcccctcttgtttgctcccttgaactggaacttgggtgctaccagagagaatatcggtgccacagccccaacaataggatgggcaggtttcacacgcagagccggtgatgtgaggatgatcccctccagtttctctctgatatgagggtacaaagatgccatttttcaaccaggctactttgttaaggttttgcaccatttctcttcaagactacagctccaccggtagagtgacccagaagaaaacaagggacccctggattctccatcataattttgtcaagaagtacttctatgtcttcgataacataatctagtgaaggcacatagccgtgcaggccatcactcccaccatgccctatccaatccattgcatacactccaaagccacatgctgtcagttgctcagcaaagtgcaataccttccactgtgttcattcagaccatgtatgatgaccaaaatgcccctgaagtaagagaggaaagactaatcagttaagatttcacaggaaagcaattgcataactgtgtcacaatgggacatacaattagcactcagaacaacgttcgaaggttcaaatcatacttcacatttccaatgtactacaaaagaggataaatgagatgttcgaaccacgtcatcagatgatgtaacaataccaaacatagtttaaccagaaacattaggagtggtggattacctaaaccggtttcctgcctttttttcagtttttgttggtggacatttgactatggtgttataaaattgagaacatagatcatgcaactaggcacagaggcatgacagaataagtcccacagatgatctggataaaag

SEQ ID NO: 11136 - DNA, 1063 bp, Setaria italica
  Peptide Sequence Number=SeqID_77110
gaatgcatactcctctccccgttattatactgatagttacagaacacaaattgcatccatcttgcatcttggaacagatatcatctcttcccgcttgcaaattcaaaagagaatcacaacaccacacccaaatctatagatcactttctgaaaaacaccaccaagaatgaattgcgaaaaccaccgtgcaactgccattcacacggcctgccgccggagcatcccgtccatccagccgatgatctcggcaccgatctcgtcgcgctcgggctcgaagagcaggtcgtgcaagaacccgtcgtacagcctcaggtccttgtgccttgacgcggcctccttgtagaggtcctgcgaagccagcgggtccgtcacccggtccgccgtgccgtgcaggaccatgaacgggatggtgaccttcttcaggttgtgcagaaggtaggaggagatgcgcaggatctcatggcccgtccgaaccctgatcgggcctgtgtagaccaatgggtcggagtattttgcaagcagagcagctgggtcgcgggacacggggatgcccctcttgtttgctcccttgaactggaacttgggtgctaccagagagaatatcggtgccacagccccaacaataggatgggcaggtttcacacgcagagccggtgatgtgaggatgatcccctccagtttctctctgatatgagggtacaaagatgccttcaagactacagctccaccggtagagtgacccagaagaaaacaagggacccctggattctccatcataattttgtcaagaagtacttctatgtcttcgataacataatctagtgaaggcacatagccgtgcaggccatcactcccaccatgccctatccaatccattgcatacactccaaagccacatgctgtcagttgctcagcaaagtgcaaataccttccactgtgttcattcagaccatgtatgatgaccaaaatgcccctcatctccttggaggccggcgcccagagccggcagaagagcgcgttcctcctggcaccggcgacgaggaacgtgtccgacctttagtta

SEQ ID NO: 11137 - DNA, 2354 bp, Setaria italica
  misc_feature (1)..(82): n is a, c, g, or t
  Peptide Sequence Number=SeqID_77111
nnnnnnnnnnnnnnnnnnnnnnnnnnnnnnnnnnnnnnnnnnnnnnnnnnnnnnnnnnnnnnnnnnnnnnnnnnnnnnnnnntctagttttttttttaactaaaataataattttacacgatgtaatgtaattacctaataatgttacaatattacactcgcgctatgaagtatctgcagtgctttctggtcacagatcccttataaaaatgttaactctataataagatccacagtcaagtacacaaaatgtcagcttactacttgatgccacaacgaaacaattccagttgtcttctagaaaatatatagcttacgactagctaagcgagagcgcaccggatgcaaacagaagattccttcgagagaaccgcaggctataaacaggagtagatttcgtagggagagctttaagaagcctcagtcggttagctgaaccacctttggtgtcctccgtcttcagggcctttgtgctggaagcgacatcccagagttttacagtacagtcagctgatccagatgcaagcattgccccctcacagctgaaagcaagtgtccacacacaagaaccgtgtcctagcaatggtgaaacacagcgaccagttgagagatcccacatcatgatggttccatcttcgtctccagaggccatgtatcgtccatcgggtgacattgccagtgataaaaccatactcctatgaccaataaacatccgtatacattcacctgtctgtacatcccatagtcttacggttttgtcgctagagccggtggcaatgtagttacagtttacatgccactggacacaatcaacatcggaaagatgcccagccattattcgcaaaggttgaattttatccatcgaccagattctagcagtcctgtcatgcgaagcactagcaaagtaatggccaactggactaaattggacatcccaaacagggtagttgtgtcctttgtaacagacaagattggcgttcagcttggtgctccacagtctaattgtcgagtctgaagatgatgataggagaaaatccccaaatgggctaaaggccgcggaataaactggtccagaatgaccttggaatagtgtatagggtctttttccctcatctactgttgatacgcgaacaccctgagatccagtctccccctgtgaactagatgtttttcctgattgaccaatctttgacatatcccagacctttactgaagaatcagaaaatccacccacaaccaaagatccatcgtgtgatatcgatgagcagttcaatccattatgtgtattaaggaatgtgtagaagctaacagagggcaatgccatactattcaattgtgcacggttcctcaggtcctcaagaattgattgttcaacttcaataggcgtcgttggaagagttagctccggcttcactcgaggtgccacagaaaccatgcttgtttcagttctgacattttttccagttgcacctacaagcttatcctttttggtcttcttattagaagcaccttgctttccaccttctgcgtttcttttcttattatcttctgcttcagcatccttgctttcagcttcaattttatcagattctgctagcgccttctccattcgctcttcaacggaatcttcaagcaacccccaatgtacttccttctgatttatctgttttgccaagtccttacttgtcccaatcagagcaacaacatccgcatcatcagagattaatgagggctgcccaggagatacttcaaaagttatgtgctgattgattactcccagcaccacaaaagcttgtgttttctggagatactggagaagcaattgatatgaatactcgcacattttaattttaaatttattttgccttaaagatcgggccagttccatttcctccaaatgtgaaggagagaggacaccttccagcttctgaagatcccttgaatgcatcacttcatgatcttctcgaaatgtatggaaaaatgaccgagcttcttgcatatgtccctctgccactagatccatgaagcaatggataaaaactgggtaaaggacacgaagtaattcgtgcttgtattgatcaagagaactatatgcccatgttcttagtttactatatccatcatggtatcttgccggatcattgtcagacctctcaagcgcaacgtcggagatgactgaggtggagaggcggttgcgctcctcctgcagcgcgagctcggtgaggcggaaccccttgcgctgcaggtactgctgcaccttcttctccatctcctcgtcctccattgccgctgccagcgcggggggagcgagccgagccggcgagctctagggtttaggggcccgactacccccc

SEQ ID NO: 11138 - DNA, 1048 bp, Setaria italica
  Peptide Sequence Number=SeqID_77112
gtgcctgtgttatctatcttgctgcccaggaatgacctccagaaaaaccaatcctgaaactgttattctcctcctagtgcagtatgccattatctgtagtgtctaaagtagttctgaatgagaaaagtctttccttcgatcaaaattacacctcaagcaataagttacgctgcaagctgctcgttctcagcacaaatgactcacagaaatctacatatgtacagcgaccaattcggataccatacccctttcatcagacccagttgttgggcagcgagaaattatggaacctgaaggacacgtctccggcggtgtccctctcgtgccgagttgccgcggcagaactcgtctgcacccgctgctcgacgtgcgcaaacgagttctgccgcggcaactcgtcgaacgccggggacggcaatggcagcggcagcgggcagggctcccgccccggccgagccttcgcgtcggagttgccgtcccacatgaacacgtggagaaagatcgggcgcagggcgtggcggtgcagggacagcttctggctgagggagacggtgtcgaagcaccggatggcgccggacgtggacaccatccatggcaggaccttgtggcccgacaccctcgagatgatcagcagcttggacgcgcgcttcgcctcccggtagaggtcgcggagccccgaccgcgtcgacggcaactggaggtcgccgtcgtcctccatgacggatgagacgtagatgaatccctcttcggtacggctgatggcgaagccaagcctggtgtcgctctcctcgagagtgatctccaccggcatttctccgcccgcggccgtgtaccagacgcgaaccgccttcacgacgccaatgtccacgccgtggtagtcctcgaagccgtagaggctggcgttggcgaggttcgggaggtcggccagtgagcccgagttgaccgtcgcggaggctgtctcgccggagatcttcttgagaagggcctcagtttggacgttcaagaactacgtattgggtctacgtccggtccgtccttgggtacgtag

SEQ ID NO: 11139 - DNA, 1442 bp, Setaria italica
  Peptide Sequence Number=SeqID_77113
aaagcgcagcgcgcgtgggttagactgcacggccatacgaactgccgaagccatccatggcccccatgtcggcgtcggccaccctcgcgccgctggccccgccgccgccgaaggcaacagccaggagcccggcgcggcgcgcgccggctaacgccgcgtccatcgccggctccgccgcattgctgacgttgatgccggccgcgcccgccgcggcgttgtccaaggaggacgtcgccgactcgctcaccaaggtggtggacacggtggaccaggccatcggcgtcggcggcaaggtcgccgagcaggtctcgggcgtggtcaaggcgctgggcgaggccgcgaagccggcgctcccggtgctgaagagcgccaccgacgaggccgtcaagctcgccgcgcccgtcgtctccagcgcctccaagcaagccacggaagcgctccagggcgccggcgtcgaccccgctcccgttctgaccgccgccaagaccgcggcggagcagggcacgaaggtcatcgacgccgccaagcccgtcgcctcggcgaccgtggagaccatcacgtcgttggcccccggggactacgtcgtggccgccggagcggcgttcctcgcgtacctcctcctgccgccggtctggtcactggtctccttcaccctccgcggttacaaaggtgaactgacccctgcgcaagctctcgacaaggtcaccacaaaagactacgtcctgatcgacgtgcggaccgacaaggacaaggccaaagccggcgtgccgcagctgccctcgaacgcgaagaacaagctcatctctgtgccgctggaagagcttccgagcaagctgaaggggatggtgcgcagcgcgaagaaagccgaggcggagatcacggctctcaagatttcctacctcaagaagatcggcaagggctccaacgtcatcatcatggactcgtacaacgacatctccaagaccgtggcgaagacgctgaacagcgtcgggttcaagaactgctgggtcatggccggcggcttctccggccggaaagggtgggcgcagagccgcctcgggacagactctttcaacctctccgtggtcgaagtcgtgacgccgtcgcgggtgatcccggcggctgctggccggatcgggacgaccgctggccgcatcgggaccacctcttcggcgtcccgagcgacttctcgcaagcttcttcccggcagcgcagactgatgagaggagctgaaacagcttcggagtgtaaatccaatgttcgtttcattttgagatgcaactttgtggtctatgtacattgacttgttctgttacagtgtagcacaatcttagtgtccaaaactggaacactcctgtggtctggttcaaaggtcaagggagcattttacatgccttcttataagaaagagtacagatgataagagatttagacaagaagac

SEQ ID NO: 11140 - DNA, 866 bp, Setaria italica
  Peptide Sequence Number=SeqID_77114
tgcgccggcgggggccgagctgacgcgggtggagcacccgcccaagaccgaggggtcgctcaacatccttgccgtcggcgactgggggcggcgcgggcagtacaaccagaccctggttgccgagcagatgggactggtgggggagaagctggacatcgacttcgtcatctccactggcgacaacatctacgacgacggcatcgccaacaccagcgacccgctcttcaaggaatgcttcaccaacatctacaccgccgagagcctccagacgccttggtacattgtccttggaaaccatgactacacgggcaacgcgctggcgcagcaagaccctgccatccgcgaagtggacagccggtacctctccattgcaaagtccttcatcgtcaactcagaaatcgcggacttcttcctcgtcgacacgtcgccgttctacctcaagtactggaacagcagcaagtacgactggagaaatgtttctcctcgcgacacctacatcgaaaccctcctcaaggatctggacgatgcgctgacgctatcggaggcgccctggaagattgtcgtcggccaccaccccatcagcagcggctgcgagcatgggaacaccacagagctccagcagctgctccgaccaatcctcgaggcacgcggagttgacatgtacgtgaacggccatgaccactgcctgcagcacatcagcagcaggagcagccctgtgcaatttatgacgagcggcggcgggtccaaggcgtgggcaggcaagttcaagaccacctccgacaaaatcgagttcatctacgacgggcaagggttcctgtcgatgcagctgagcaagacggaggcgcacctcgtcttctacgacgtcg

SEQ ID NO: 11141 - DNA, 406 bp, Setaria italica
  Peptide Sequence Number=SeqID_77115
gtaaaattacttcgtctgccggtaactctgtgcttctgtgtgctcatcatgccaatggatggaagcctggaacctgaccaaaatgcctgtctgctgaacgtgttcgctgactgacatgaatttttcacttgctttgttcgcactggtgtatgtaggttaggggcctgcttggggagctggcgatggtggaggacgagatattctacctggagaagaaggtcgaggacctgcggctgcgcctgcgccgggagcagaggtggacggaccagtgcatccagcagcagcagcagcagcagcagcagagctggccgcagagccgccagccccggcactccgtgtccaggagagagcgtccagctccagggcgcccagcagctgccgaagctgccctgcccaagcagcgacg

SEQ ID NO: 11142 - DNA, 257 bp, Setaria italica
  Peptide Sequence Number=SeqID_77116
tcccggttccggtcctagcgcctcgcttgttgttgttgagcgctgccatgtgcggagtgggccgatggggaggatggaggcaggggagtgctgggtgaagatgtccggctcgagatcggcgaaggtgttgcagaggaggacgtccgccttggcgtcggcggcccacgcgctggtggtgaggtagtggaagaccatgcgctttttgcgcggttgcccatgtagttccaggagaggaaggtcgcgtccattggcgccat

SEQ ID NO: 11143 - DNA, 223 bp, Setaria italica
  Peptide Sequence Number=SeqID_77117
gccgcgcaggaggtgtttgacggaatgccacgatgattgggaggacgaagatgactgtgatcatgatcagttggaggttgtgagtttagttaggaggagatggaaagatgacgacaacgatgacgacgacgtttgtcgatgtagggactgcggtcggagaaagggcctcgaaagctattacagtggtgaggacgcatacagtggccagcggagggagaggagg

SEQ ID NO: 11144 - DNA, 1113 bp, Setaria italica
  Peptide Sequence Number=SeqID_77118
aaggagggcggaccagaggaagccgggtggcgggagcgcgcggcgggtggttaagatcgggaggggatggaaagatgacgacaacgatgacgacgacgtttgtcgatgtagggactgcggtcggagaaagggcctcgaaagctattacagtggtgaggacgcatacagtggccagcggagggagaggagggatgtggatgaggaccggcgcagtttcagggattctgaccggagaaggcagcagcagagggagtaccatgatgatgaggatgaccttgacttgaagcggcggaggcggagatgggaagggagagataagagggattttgactttgatgatgcagtagacacgaggaccgttgaaacaagaaggtatcgtggtgatggaagggaatatgaccggagaagagagaggagaggcttcgactctgatgatatggttgatgtcaggagggctgatcggcatgctgaggatgtacagagatttgatcagagaagcgagagtagggattttaagattgatgataaggttgatttgaggagagaagggaggcgccttagtaatgatgatcacagatatgtttcgcggcacgagagaagtgaagatacagatagagaagatatctcactcttgagatcacgtcgtcggaacaacgaagagattgattatgatgagcaagaccttgctgagcgaaggtactactctggggggcgatctcagaagtctgcaagagcatcttcattccatgaggatgattcaaagagggcttcaagttcgaggagcacagttgatgcaagacgtgcaaggcatgaggaaaattcatcatcaagggtgaggtggcatgacaatgtagaccaacgaactgagcagacatctgaagagagaaagcgacgtcattcagtgggttggtcaaatgatgagagagatacgcatgattatgatgatgcacggtttgtcaggataacagatgctaggacaagtatgcaagatgtcaaggttataactgaggatgatactaaattgacatccagttcaaagaaagcatccattttgaagcacagtagcaatgtagatcagcaagctgcagtacataaggatgaatcaaggaagag

SEQ ID NO: 11145 - DNA, 2456 bp, Setaria italica
  Peptide Sequence Number=SeqID_77119
acagaagagctgtcagccaacattcctttaccagtattaaactcaccagaatcctttgccgtgatactggatgaagtagcagttttatgttctggtaaatgtcctatcgtgacatctaccaaagttggcatgctatcatctctggtatttcttttgggtgattcgcccacatcagattgttttattctctcccttgatatatgtagatcatccttagaacttctagccaacaagtctccctcagatctacctaattgaggttcaataacagtttctgatatttgcaaaccctgtgtactagagttaaaatatccctcctctgacgttgaagccactccaggttctgattctccactgtgcgactttatcaactgctgatcttttgtttaattttcttccttgtgccatcattatcacgttcctgactagaaagccaaccctctgtactctgagaattactggatgaacttttcttaactgatttgtcactagaatcaggagagtcaccacgttgaatccaaccaagacggattatgtcagcaacataagcccagagtgacttgtgaacttttctagcaagagcagattcatttttgggtgtctgggaggctgaattagtagctccatcagctgatgaaccttcctccttgtcagccgtcttgaaggtctcttgagaagaagtactatggacatcccacatctcatcagctggccccttcatcctagaccttgatgaagaccgtgttgtaccttccaccatggatttctcatttttctttgttgaagtagtctctgcatctgagactcccttttgaagctcatcaacaaaccgtccaacatgaaaggtagatgctttctctaatcgagcagctgattctagcatgctttccttgacaggctgtccggcacttgaactacttggcataatacttcctgcagtagtttcacttcttacttcttgctcattgcttcccattattgctgctccttgtgccatatccacattaaccatagatgatccctcttcagtgctctctaacagcaaaccagtagtgtctttgtcatcagagatcctgctggtgtctgcctgctgccagatcaaatccatgttctgatgtgtatcttctgatcttaccatcctatatcttgagtcatgagaggattcagaaaatttgcttcccatttcatcattcctttctgtacttgaaacttgtataatttgccaatcattctttccttgtttctcccttggccaatgtgcagctgatgtcctatgaacttgattgccatttctagtcacaagaccttgtgaactgctggcaactgtagcatcactagcatggatgttagaatgatcaatttgttctctcatactgccaattgtatttacagctgaagtcgcctgaaactgatcatcgagatgactgcccgaagtgctagctacaacaacattactagcattgccaatattaagttcaacttgttcttgacttttctttgtgttgtcagcaatattagcggatgacgatgagtgaaactgatcgtacagtccagtctcgagatgactttgtgaacccctaaccatggcactattactagcagagatcttattttggtatacttccttttcctggctccttgtgctattaatgaagctcatattcgaagttgagttcacatctgatttagtttccgagtgactttgtgaacttctagacgtggaagtatcactcgcacgaatcttcgaaacatcaacctgtgtaatattctgcatatctatatctgtttcatgtattatttgctggttcacaatcctcttcttatctcttgtaacatgaattatattctgtaaggaagtagacctgtcatcaatatctgcctggtttacttcatcataatttctctgggagtgagaggccctgctgacattgtgagtgctatccgttgttacatttatgaggttctctgagtgtttacttgattcagtgagtgagaccaggttctggttcacctcattgtgctgatcaacttgtcttctactgtcgctaaccatattcgcagaattttgaacagaagaagacatattctcaatatagtttcttctatcttcctgatgataattctgtgatctcgaaccacgttcagtgcggttatcttgcacttctgatatatccattatcttctgtgagctcttccttgattcatccttatgtactgcagcttgctgatctacattgctactgtgcttcaaaatggatgctttctttgaactggatgtcaatttagtatcatcctcagttataaccttgacatcttgcatacttgtcctagcatctgttatcctgacaaaccgtgcatcatcataatcatgcgtatctctctcatcatttgaccaacccactgaatgacgtcgctttctctcttcagatgtctgctcagttcgtggtctacattgt

SEQ ID NO: 11146 - DNA, 1620 bp, Setaria italica
  Peptide Sequence Number=SeqID_77120
caaccccatcaggcatgcaaggaaacagggccaacgactgaaagcggattgcgcacaccatttcttcttcagtcgtgggcagaaaatgcaacacctgcagacctggtgtctacacattggaataccatctgcagcccttattagcacaaggaaatacaacggctgacgacggtttccttatctcacaatacaaactgctgatacctacaagctctcagtagaaaccacttaatgtgcagaaagaaatacgttaactctagacttccttaataggaaaatcggaaaaactgaaaaaagaagtgcaaagctactacaagcagaagatcgtgccaaacatatggtgcatcttgctgaagaacttgacaggatggtggtgcccctggtggtgggcgcgaggtggcgattgcggcttctgcttctttcggcgcctcagctggaagaattgctgcattatctccgagcactcggctgacagcacaccacgcctgatggttatcttgggatggaaagggtggataggccccgcggcctggctctggtttgctgaatccagagtgcttgtttgtccatccccagggaacagcctaacccagctgccatcggctccgagaagcttgtttggagcaccccatactacagtgtcgattctagcttgaagaatagctccagcacacatggcacaaggttccagtgtcacataaagtgttgtgtctgccaagcgccatgtcttgagtttgttagaagcttctcttatacaaacaatttcagcatgtgcagttgaatccctgagatcttcaactaggttacatccacgagcaataatttcgccattttgtactagcactgctccaacaggtacctcccaaatatctgcagctctctgggcttcaagtaaagcttccctcatgaataactcatcagcttttctctgctcagcgtcacgctggtatgcttcctcccattcatcaaatgtctccttcaatacctgtttatttctttgaaacatcctcctcttcaattccgcatcttttccccctgttttaataatttccggagcctcttgcacaacattcttctcttcaaaccttatacctcccacacgtactgctggtggttcaaggatgccagttgaggtactttcatgtggcattgcagcttgcgtttgagggtgacggtaaggagttatagcacctgaaggatcattcatccaatcagctccatcaccactgcgaccagcttctgttgcactaatggccacagaagagctgtcagccaacattcctttaccagtattaaactcaccagaatcctttgccgtgatactggatgaagtagcagttttatgttctggtaaatgtcctatcgtgacatctaccaaagttggcatgctatcatctctggtatttcttttgggtgattcgcccacatcagattgttttattctctcccttgatatatgtagatcatccttagaacttctagccaacaagtctccctcagatctacctaattgaggttcaataacagtttctgatatttgcaaaccctgtgtactagagttaaaatatccctcctctgtaaaaaatttaaattaacccttaaccttaacttaagaaacaa

SEQ ID NO: 11147 - DNA, 239 bp, Setaria italica
  Peptide Sequence Number=SeqID_77121
cgcgcgggggctgctcgccgaggccgtcgacctcgtccgcagccagatgccgtactggaatcgctccgccggagccgaccacgtcttcgtcgcctcccatgacttcggcgcctgcttccatcccatggaggatgtagccattgccgatggcataccggcgttcctgaagaggtccatcctgctacagacatttggtgttcagggccatcacgtatgtcaggaggtggagcatgtggtca

SEQ ID NO: 11148 - DNA, 1082 bp, Setaria italica
  Peptide Sequence Number=SeqID_77122
aaagagtagatgcattgctgtacagagcaaactttgatactgaagtgaattatttaaagaattcttttggtaccatggaggcagcctgtgcagatttaagaagcagcaagctattcttgaagttgcttgatgcagttctcaagactgggaaccgaatgaatgatggaactaatcgaggcgaggcgagggccttcaaacttgacactcttctcaagcttgcggacatcaagtcgactgacggcaacacaacagtgctccatttcgtggtacaagagatcatccgatcagaaggcttcagttctgatcaaacagcagtggtaaatcctgtcagcaccagcaaggagcagttcaagaaggacggcctgaaagtgcttgctgggctcagcagtgagctctcaaacgtgaagagggcggccacattggagatggatacgctgatcggcaatgtctcgaggctcgaaaccgacctcgagaaggtgaagctgatcatgcagctcaaggagacatgtcccaatcagggtgcaagcgagaagttcttcgaggcgatggacgcgttcctcggaagatctcgggtggagatcgagagcgtgaagacggccggggagagcgcgctgcagcgcgtgaaggagaccacagagtacttccacggcgacgccaccaaggaggagcctcatccgctgaggatcttcatggtggtgagtgacttcctgtcgactctggaccgcgtgtgccgggacgttggcaggacgccggagagggtgatgatggggtccggcaagtcgttccgcgtctcggcgggcacgtccttgccgccgcgccggtacgagccgcggagggagccgagctcctccgaagaggacagctcgtcgtcttaaagaggaactagtaggaaacatcgctttttgatgtgtaggattagttgttcggatttgagggcagtgattcttgcagagttgagcatgtgtagtcgatatcagaactcaggagataaaagtcactgtgtaatagttttttttacaaaggttaaatgatatatagctgtacaaaaaaaaaaaactaaaggtacttaaaaaaaaaaaaaa

SEQ ID NO: 11149 - DNA, 1410 bp, Setaria italica
  Peptide Sequence Number=SeqID_77123
gtccgctgtacatcaatctatcgcggaaccagtgcccgtgatctcgaccaagacttcctattcagttccgcgaagatagcatgcagttgcttttcagcatctgaatctgattcgctagtggacagccttaatgaagtaaccactcgaaccaatcattgcgccttcggacattatttccctgcacttccaatatatcagaaccacgaatagcatctagtatatagttggtgtctaccaagcctgtaaatgccctcatccgattgaaccccaagattaggtcaataggtacccatccttgatcattcatatgtctcctcaagaatgtgtcatggcatagattatttgtgctaaagtagaactctatctgattcctaatatcatcttggaaatttggctgatcctgaggaggaggaacccatgcaggctgcatggccggccggacaagatgcatgttctgaaactgttctactggtgggagatagacagggtaatgttgcacatcagcagagtagggaaatggaggaacataaaaatgctgtggcaccatgaaatgggcagcgtgtggtggcggcggtcggtgaaagggcccaggctggtaggcaccaggtggctgctgctgctgctgctgatatggcattactggaattctgggaaagttcctaggggagaaattacctcctctctcatggtcacggcgaccccggtagccaccacgacctccaacaccattgttactgccactactatttcgaggattattgttccagtggttgctgctgccaccactattcgtattgtttccatcaccactaccagtaccattactgctgctaacaccaacacctcttatgttgtggttccactggttattgccaggagcacttctgctgccttcattgacattcccactggaaccaccaccagggacattatcactcaagttactggaaccattgccattgctgctgttgcaaccgctgcctgtaactaggcttccatcattccagtggccatcaccgccactgccactgctcccatcacctccactactattggcagccctgcggccgccattgctaccatttccacggctgccacctccattatttccactattgctgccactgcgccgaactggatttggctgggttgcggaaccgttccgctgtgaagaagccgcagcagttgcattgggaggaggcatggaggtagggtttgagccagtggggatcggattaacctccacaactggatgagcaggggtcaccgacgaagcggtggaatcctcctgctgggatgggacggagccatcggagagggacttgagggagtcggaggaggccgacttgggccacgcgcgcgccgactccgcgagcgccggccaagaggcgtccccgccgatgatacccg

SEQ ID NO: 11150 - DNA, 1199 bp, Setaria italica
  misc_feature (1)..(34): n is a, c, g, or t
  Peptide Sequence Number=SeqID_77124
nnnnnnnnnnnnnnnnnnnnnnnnnnnnnnnnnnccttcgaataaacccaggtaacaccaaaatcgttcaacaggacctatcatccatgatgagaaggcgggtaattctttttcgacaaaactatacagaccaaaaaatgatttatactttgtggaatttatttcctgttattggtgtcttcccctcaataatggcctttcaaatgtgcctgccatcacgtctgacctaaacaaacaaaatcttttggctttcagttgacccgtccgctgtacatcaatctatcgcggaaccagtgcccgtgatctcgaccaagacttcctattcagttccgcgaagatagcatgcagttgcttttcagcatctgaatctgattcgctagtggacagccttaatgaagtaaccactcgaaccaatcattgcgccttcggacattatttccctgcacttccaatatatcagaaccacgaatagcatctagtatatagttggtgtctaccaagcctgtaaatgccctcatccgatggaagaacataataaagctaatggtgaatgtaactagttagaagaacatagacgaatagcatctagtatatagttggtgtctaccaagcctgtaaatgccctcatctaagaaggaacataataaagcaatggtgaacgtaactgttagaagaatgcatcttgatcattacatagtacgtattgatccaatccgtgccaaagcaaaaattgaattcgcacacgacttcaaaacagttgcaaaccaatcaacttcatgagcatctgtgcaacttaattgataccaaattatctgcagacttttttcaaaccctttttttaaaaaagattcattatctaagtcccaaatccatgtaattcatattaccaaacattattgagaaaatattccagattatttatctccaatgtctaaaacttgaattttagcagacagaacctgtactagtgcgactgagtcggattcggtatgcaagtttctgtcattcaatcatcattaccaaatgcaagttaatttgccagccattctgggcatctccaaatgttttcaacagtatgccatattgatgttaccctcttgggaattctttcaatatccggacttcccctcaatatttcaggtagtttcacactatgcagagatcagatctagacattgttccctactaaaaacgatgta

SEQ ID NO: 11151 - DNA, 321 bp, Setaria italica
  Peptide Sequence Number=SeqID_77125
ccctcacccagccatcagtcgcagcaacactccacacctccgcaccccgactagggtttccgccccgcaccccgatccgaccctcgaccccaccacccgcaccggcgatgtccaccgcggcggcccagggcggcgacaagccggcgctccggaagcccgtcttcaccaaggtcgaccagctcaggcccggcaccaacggccacaccctcaccgtcaaggtcgtcagcgcccacccccgtcccggccgcgcgcgcccaggccgcccccgcacccgcatcctcccgcgcgccgcgcatcgccgagtgcctcggtcggggatga

SEQ ID NO: 11152 - DNA, 440 bp, Setaria italica
  Peptide Sequence Number=SeqID_77126
gaagccttgctgctatcattgttcagttcatcactgatgcaactgaactcaactgatccaaagccgcttgcttcctgttgatcaccacctggctgagaattggtaccatcaggcaaagcctcatcgttgaactgaagaaccggtgaatcttcatcgtctgatatccatttgcagcaatccaagtcaccaatatcaaacattctgctaacaagcccttctcgccaagaaatccgagtctctgccatgaccggtttcctgaaactcgtctcatcccccttcaattctatgtcacgtggagacctcttaaaagaggacaagtctatggattccagaggcgtcggagctcctacaaactggaagctaagctgaggcaatggtgcaggcagcgcaccattgtcgtagtaatcgtccccgggccttggggacaaactcatcatctc

SEQ ID NO: 11153 - DNA, 429 bp, Setaria italica
  Peptide Sequence Number=SeqID_77127
gctgccgaccacgaccgccgctgcggcgaagtgcgggctggaccccgcggccatagcggcgctgccgaccgccgtgtacggcggggaggcgggcggcgagccgggcgcctgcaccgagtgcgccatctgcctcggcaacgtgcaggaaggggaggtcgtgagggcgctgcccgcctgcggccacgtgttccacgtcccctgcgtcgacacgtggctcgcgtcaagctcgtcgtgcccggtctgccgcgccgaggtggagccgccgccgatggaggagggcgcggctcggctggtgcaggagaagctgcaggacgccgtgaaggaggaggcgggcagctgcagctcgacgccggagcgcgggatcagtgcctgcgcgtcgctgatgaagatgctgagcagggagaggccggcgccgcgggaggcccaacg

SEQ ID NO: 11154 - DNA, 647 bp, Setaria italica
  misc_feature (622)..(622): n is a, c, g, or t
  misc_feature (625)..(647): n is a, c, g, or t
  Peptide Sequence Number=SeqID_77128
cgtagacgagctcctcctctgctctgataaggcaaggtcggcggaagaagcgcgcccgcattctcccgtcgtcgctgccgtctcctgccaagaggccggcgggatatactacactgttgtgttggcggtatcgacgatggggctccccctactggcgttcgtggcggcgaggggggctgatgcaggtgttcaacctctcggcgccgcacgacctccggctgccgatcgcgcgccacctgcccgaggtatgcgccgtcctgttcggcgtcctcgcctcgcacgccgcgtgggtccacgaggccctggagcgcggcgccgtcgcctggaggcacagagggaacagtgacgccctcgacgactacgtcctccgagccatgctcagcatctccgactgatgagcgccggcggcggcggcggcacgccaatttgcccctttgctagtagtttagcttaattgtccatccgctcgtcttgtttcttgttggtcttggtatagttcggtcttggtatagttcaatttcagctagcatggaaagagttgggagatttctgtaaatgtgattggtaaatacaagtcaattttctacggaaaaaaaaaaaaaaaaaaaaaaaaaaacaaacngannnnnnnnnnnnnnnnnnnnnnn

SEQ ID NO: 11155 - DNA, 421 bp, Setaria italica
  Peptide Sequence Number=SeqID_77129
accaccaccaatctcgtatatcttcaatgggactggcaaagtgcatacttgattacatgatgcttaatgcaccgcccaaagtttacaatgatatgaaatacatctcagtagagattagctcctctcttgctgcaaagcaattggaaactgtcggcgaagtgcaaagccatttatcaaagtttacggtggagcaccgcgatgcaactaacagacttggatggggccgcaaggatcctcgtccatgttgggtcctaatgcttgaggtacttgacaatctgccacatgaccttgtctattcaccagatcaggtctctccatggatggaggtgtggattgaaaaataatggcagttcacaagcctctgaagtctataagccactacaagacccattaatttcccgctgtgttgaaattattggca

SEQ ID NO: 11156 - DNA, 661 bp, Setaria italica
  Peptide Sequence Number=SeqID_77130
aacctaactaagaaagtaactaataaagaccaactaacaaagacccattaatttcccgctgtgttgaaattattggcatgaatgaagagaaagcttctgtcagtgaaaaactagcatttgctgcgaaaggagttttatcaaaagtatttccaaagcctcgaagagcttggttgccgactggatgtttgaaactaatggatactttgcatcaagctttaccaagcatgtcccttgttgcttcagacttcagctatcttccagatgttagcatacctggtgacagagctccactggtttcatcaaagaaggatgggaaaacatcagatcattgcaactacctggatgctcagggtgacgcagacatcttcttcccaaccgatttccggctcctggagcagatcgaccatcactgctctggcttctcaaaagagcagaagaaccctggcgcatttaaacccgtgaagaagaggaggacaatcatacttgatactgcagccttcatggaggagtttggcctgccgttgaagacgaggaccaaagatgggtataatccgcttcttgacgatttcaagaacaccaagttctatctcagcgttcctacccacaaagcaagtagtcatcctctgctgctgcgtcaagttcgccggtcaggaaagacatc

SEQ ID NO: 11157 - DNA, 1065 bp, Setaria italica
  Peptide Sequence Number=SeqID_77131
cgcaagcgccgccccgccctcccctccctctcccgtcgcgcgctctactcaccggccgccacgcacgccggcgccgtccgctccgtccccacccctgcgccggcagccgccgtctccctccccgtcccagtaaaaatggtgggactttcaagtgaagaagccctggctcatgatgaagtcgtcatggatgatgttgattctgatgtggaagaatcggactcggaagatgattcaggggaagaagcccaggctaccccttcagacaaagctatatacaacaaggaggctattctagagaaacttgaagacatagcctggcccaagaatgtcgactggaggcacaagctcaccattgagcatgatcacggggagaaagttgatgtgaatgatgatcttgcccgtgaacttgcgttttacacccaagctttggatggcacaaggcaggcctttgagaagctgcagtcgatgaaggttcggttcctcaggccaacagattactatgctgagatggtcaagactgatgtgcacatgcacaagatcaaggggaggttgttgtcagagaagaggaggattgaggaggctgaggagaggaagaaggctagagaggccaagaaaatagcaaaggaggtgcaggcagagaagaacaagcagcgggctaaggacaagaaggagcagattgagtcagtcaagaagtggaggaagcagaggcaacaggggggattcgccaagggaaatgatgacgtgccagatcttaactttgagggagaagaaggatttaaacaatcaaaaaaaaagaggcctggtgtttctcctggtgacaggtctggtggtcttgctaagagaggtaaagaagggaagaacaggaggtcaagagatgccaagtttgggcatggtggtcgtaaagggctaaagaagcaaaacactgctgataccacgaatgatttcagaagctttaactaaggggggtcaatctcaaaacaagaagagaaagagatcttgatccgatatcttaagaatttttgctcagttctttttgccgttattactattcttgttgcaactttg

SEQ ID NO: 11158 - DNA, 207 bp, Setaria italica
  Peptide Sequence Number=SeqID_77132
tcttagctttgctccaagaagccgcaccagctcgtccgagaatcaagccgacgatggccatggccacgcaagcctccgccgcgacgcgccacctcttggccgcggcgccttcgccgctccgcgcggccgccgaggaggcccccgcggcggcgacccaggaggcgcccaaggggttcgtgcccccgcagcttgaccccaacaccccgt

SEQ ID NO: 11159 - DNA, 273 bp, Setaria italica
  Peptide Sequence Number=SeqID_77133
ctcttagctgcgtgcctgcgccgcgcccctccactcctcatctctcctcgccatcttgctcttagctttgctccaagaagccgcaccagctcgtccgagaatcaagccgacgatggccatggccacgcaagcctccgccgcgacgcgccacctcttggccgcggcctggtcgccagcggcgaaggcgccgcggtcctcgcagctcgcgctcccgtcgtcctcacgcgggccggccccgctccgcgcggccgccgaggacgcccccgcggcggc

SEQ ID NO: 11160 - DNA, 416 bp, Setaria italica
  Peptide Sequence Number=SeqID_77134
gttgttactggaaattggaatttggaaagtgaggggctcattgtgacataggaaaaaacaaccttctcgaaataagattaagttcatttttccatttgctggatgggtttgcctcaaattcctatggtcaaggaggaagttcctactacactgagtacacctgcaaccagtcctcattccagtgttagtggcccctgcaatttggataaacttcctgtaggatgctcaaagagtgcatttcccccatccaccagtgatttcaagagaaaatctgcactgagtgcatcgaatggattcaatagccatttcagaaccagccacgcaactgatggtcctgcaggctgccaacgcctaaatcctgaatcaagagatccgagttatagatcatgccataaattcagatctactgtccagat

SEQ ID NO: 11161 - DNA, 639 bp, Setaria italica
  Peptide Sequence Number=SeqID_77135
tggtcagaagagggagagggaggaagggggtggatcctgccgctgagggcggcgaggcggcggcggaggaggaagcggcggcgggctaagaagccgaaggtggagggggataccaaggaagaaaaggaggaggagacgaaggatgataaggagggcgtggaggggaagggagaggaggcgaagggcaagcccgcgaagttggggccgaaagagttcgccacggccgtcgagatgttcgactacttcttcgccctgctccactcgtgggcgccgcagcttgagttcaataagtatgaacaaatggtgctggaggacttgctgaagaaaggccatgctgagcccgctaagaagattgggccaggaatcgaagcatttgagatccgcaaccaccctgtgtggcagagccgctgcttctttgtccgcagggttgatggatccgcggatgatttcagcttccgcaaatgcgtggacaacatactgcctctccccgaggacatgaagattggcaacagcaagaagtccggcggccaccacaagggcggtggtgggggccgggtggagggcgtggaggagggggccgaggtggttggcgcggtgggcgcggtaggggcaggagaggcgggctagggtagttaacga

SEQ ID NO: 11162 - DNA, 360 bp, Setaria italica
  Peptide Sequence Number=SeqID_77136
gcgggagcaggagcgacaccgcgaggagggcggtgatgcggcagcgcaccgtcggggttggggattggggacccagagggtcatcttatcaccttgtgcagccaaccaaatatgagtatagcaaatcaggatatctttagccacccaactaaacacgagcactttgcattggtttagcttggtcaaaattggtctgggttagagttagcctggaactagtgcagcctaccaatcactaccatagtgttttcaagtgactgctaagtggtcagtactcccattttaacacttcaggtgaaatagatagaaaatgatttggcgtcgtccctcaatggaaaggtcaaaacagagtactcacaa

SEQ ID NO: 11163 - DNA, 436 bp, Setaria italica
  Peptide Sequence Number=SeqID_77137
tgcctgcaagttgtggcatatacttcttcaaaaatagtaaatccatatagacagaattcccagctatcaatggagttgcagaacctatatacttcctaataaattctaacacttgtttctctgcatcatgctcagaaatctcactctttagtacttgttccgccagtccacttgccacatgatggacttgacaccattcattcatgccatccaagcattccttactctgtcttataaccaaatctggaccctctattcgtttggtaagtttaccatctgttataatgcaagcaatctccagtatgcgatctttagtgatgtccaaaccagtcatttccaagtctatccacaccaatggcatcctgtaatcacttgatgatggagcaaggttttccccatcataatttacaatcatttctttgttctggctgctttt

SEQ ID NO: 11164 - DNA, 713 bp, Setaria italica
  Peptide Sequence Number=SeqID_77138
tagtaaatccatatagacagaattcccagctatcaatggagttgcagaacctatatacttcctaataaattctaacacttgtttctctgcatcatgctcagaaatctcactctttagtacttgttccgccagtccacttgccacatgatggacttgacaccattcattcatgccatccaagcattccttactctgtcttataaccaaatctggacccatctgttataatgcaagcaatctccagtatgcgatctttagtgatgtccaaaccagtcatttccaagtctatccacaccaatggcatcctgtaatcacttgatgatggagcaaggttttccccatcataatttacaatcatttctttgttctggctgcttttttcaggctttctgggagcagcatcagcttcaggtttgctggatgttggcttctccgcttcctcccggtcgtcctcggcgtccagattcaggaccgcaaacatgttggcgaggttactcatttatcccgaatcgagatgaacggcaggtagtaggacgttgtcgacgaggtccgccaaccgctgattccggcccgggccctccagaggcggccgctgctgcctgcctccgcggaagggcggggggcggagggggagggcgggcggttggcggcggcggcggcgagctttgtaggcttgagccggcgtgacaagcacccgctatgcagattatttt

SEQ ID NO: 11165 - DNA, 1094 bp, Setaria italica
  misc_feature (1043)..(1094): n is a, c, g, or t
  Peptide Sequence Number=SeqID_77139
gagattgcttgcattataacagatggtaaacttaccaaacgaatagagggtccagatttggttataagacagagtaaggaatgcttggatggcatgaatgaatggtgtcaagtccatcatgtggcaagtggactggcggaacaagtactaaagagtgagatttctgagcatgatgcagagaaacaagtgttagaatttattaggaagtatataggttctgcaactccattgatagctgggaattctgtctatatggatttactatttttgaagaagtatatgccacaacttgcaggcatattctctcatgtgatagttgatgtgagcagtataacagctttgtgcagccgctggttcccaaaagaaaggaaagctgctccaagaaaggagaaaaaccatagagcgttggatgatatcagagaaagcatcaaggagctacaatactacaaggagaacattttcaagtcgcgaagatcttagtagcttatggtggtggatcatgagaacgcatccccagttaattatgtcagaatcggtgatttgctgagtgttagtgcatcgggagctggtacaaaattgtcgatagttccattctagggccaattggaaattttagtttggtccgtatgacattgatgcacgtattaaaagactatctgggaccaaagattgtcaatctgaccattgtgtagctgcataatgctgcgctggatgtaggttgtatcgtcttgagcgcttactggttcgggatatgaggcaaatattgttaaggattgtgggtagaccggtggatcagtcactgtcatccgttgtagagccatgtcgctccagctatgtgatggtcggtacagaaagtttggatttgttcgctgcgatgtccattggagaaagagcttgtcttgctagatagcacaatttactgaacttagtctaaatttgattaccatttggttgacacccaaatgatcaaaagttacacattggcagctaaattggccatctcgacttttgaatgcctacgactctgtttaataaaccttttnnnnnnnnnnnnnnnnnnnnnnnnnnnnnnnnnnnnnnnnnnnnnnnnnnnn

SEQ ID NO: 11166 - DNA, 884 bp, Setaria italica
  Peptide Sequence Number=SeqID_77140
acctagaccgctgtagatccgctccactcgcagtttgctggtcgcccaaatttgtcgatcgatagatctctcgtctatgcgtcgcgttagcttctgggattcgatcgatctggtgcgagcggaagaagctagctaggggtttcgctacgaacgcgcgcgatcgagacgtaccacggctagctccgagctggatcatcgagaaatggcgacggacatggcggtggacttggagaaggggaccgaggagaccatgggtgctctggatgctcaacttccggttccggccatggccggaggtggagaaaaggagcttctgagtggggatctgagacgcctactgccggcgaagcacatgccggacttggagaagggcatggatactcacgcaggtcaagttcaagcgatggccgaagatgaagaacaagaacatctgattcttaaggatctgagatatcaccaggttgagggggtgcagtagctggcaagatgaaccctggcaagaagaagtggctcccatactactggctcctcgtcgctgctgcttctgtgattgttctcaacaaccacatccacgctgccccaaaggaccagctgttccctccagagcttgccatgttcactgtgctcctgtgtgcaatctgcctcattcttctctccatgaagcagatgatgtgagagtgcattgagcgcgttcatgcctagctagcttaccttccgatccagagaccctactcttagtatccgtgctgcaacatgcatggtagaacggtttcagcttacatgtgcctgaacaaagctgtatgtgtgtaataattccaggatatgttggactactgaatgccgaggagcacctggggctcaatctttttgttgtagaaaaaaaa

SEQ ID NO: 11167 - DNA, 500 bp, Setaria italica
  Peptide Sequence Number=SeqID_77141
tcaatatctccaaatctaactgtgtctagacgcagtactgcctccagggcctcatcaccacatgtcaactttcctcctgaagtagatatttgatacaaaagggagcactgatccgcctgacagataaaatagaaatctgatctggtggccattttgcagaagtcaagggctactacacctggagcaggctcaggctttccatttagaaactccctgcagcaagtaagcatttctgagaatttttcaacttgggggcagtagaactgtcttgtctctgaaagatccgagggatgaaacttggctccacgatcctgacacttctgcaagaaacagaaggtgtcatagcatgtgtctccagatgcattgctcttgagcatgtctatctggcggcaggtggagtgcaggatgtcaacaccattgggaacgaagcagccaaattcatcagtgacgcctgtgacgcggaatgttgtgatcagggcatgccgtgtggcacacccaca

SEQ ID NO: 11168 - DNA, 477 bp, Setaria italica
  misc_feature (250)..(250): n is a, c, g, or t
  Peptide Sequence Number=SeqID_77142
aacaaaatgaacttggagcactatcaaatgactaaacaataacctataatcgaactgcttgataagaaccaattagtgaaatttaaaataacaaataaagagaaatttggttactaaaacgaaatcaaacctgcagcaagtaagcatttctgagaattttttcaacttgggggcagtagaactgtcttgtctctgaaagatccgagggatgaaacttggctccacgatcctgacacttctgcaagaaacngaaggtgtcatagcatgtgtctccagatgcattgctcttgagcatgtctatctggcggcaggtggagtgcaggatgtcaacaccattgggaacgaagcagccaaattcatcagtgacgcctgtgacgcggaatgttgtgatcagggcatgccgtgtggcacacccacacagctggtgcatattgatccaaacagcacacaacatacggccgcctacgtgctccacga

SEQ ID NO: 11169 - DNA, 907 bp, Setaria italica
  Peptide Sequence Number=SeqID_77143
ttttttttttaaactaagaacttaaaagttggtaaaatcattccaccagctgcacggtaaaagacatgtaggagcaatagagtaacgaaatggtcaattgcctgcctggtattatagctcttaacttatggcccgatattgttcattcaactctacaaccaactcttgatgatgctaagggaaatgccttcaagcaagggaaatgcagcatacgcctgatcatctacttcaagcaagggaaacaaaacttgacacccccaaaactagcaatctagcaggctgagaaccagcaacagttataatgataacttccctcaaggaaggaatgaaggaaaacagggcatactcatcaagtggcagcagcatgtcacggtagagctgtgctgtgctgtgctgcagccttcctctggcagccttcaaggtagagctgcagaatggcaagccttgcggtctcgaaggcgcagtagcctatggccgcaaagcaggcgctgtgcagcaccctggggccaatgccacggtacaggcccacgagcccctcctcggcgacgacccccctcatggtgcccagcacggtgcggctgccctcggtgccgacccttgtcatgaggcgcgtcttgacgacgtccagcggggtggtgagcgcggcggatatggccccggccagagccccgcagagcacgctctccccgggcgtgagtctgtccttgccgcgagtcctgagggtgaacgccttgaggtactcgaaggaggagtaactgagcaccccggcggggaggttgcggaggagcgtggcggcgtagcccgcgtagaggccgaagaagccgtcggcctggatgatctgcaggaggacctgccaggagcggcctgtggcggcgccggactggaggcgctgggtgatgagctcctt

SEQ ID NO: 11170 - DNA, 847 bp, Setaria italica
  Peptide Sequence Number=SeqID_77144
cagatcctgcccaagccaacatgcggcaggcacgtctccgccgccgcagtgctctgcgccgccggtgccggatgcgaccacctcgactgccacgggggtcccttcctggtggtgtgtttgggcatcagcgcaacgcacggcggcgtcgtcgacgcgcacgtctactcgtcggaggctggctcgtggggcgcactggcctccgttcagctaggcctcgattcctacggcaggatgaactgcggactcgttattagagatgaagtctatttcacgctcaagttcagtgccagaattctcaagtacagcttgggtacgaatgccttctctctgattggcgttccggtcgacatccaatttgttctcacacggactgaggacgattcgttggggctggccagtgtaagagattcaaacctttacctttggtcgaggaaggataatctagagggggttgcaggatgggtaaattgcagggttatcaagcttcaggcaccattttccacacatgatcgttttgcaaccagcgttattggtttcgctgagggtgttgacgtcatcctcgtgaccgcaaatgccatgtttgcggttgagctcaagtcagggaaggtgacaaaggtaggcaggcctggggactactattctgctttgccgatcatgggcttctacactccagattgtggtagacgcaatcaccggcatggacttgctgatttctgatacgtcactcggtattaagaccccacgaaatggacggaccgatcatcttaagtctgctgcccgttggcttcttgctgagccattacattcaagtgtttgctgttctcacttagttacttacttttacgta

SEQ ID NO: 11171 - DNA, 640 bp, Setaria italica
  Peptide Sequence Number=SeqID_77145
aataccttttacaagaatttctggagggactcctcctcagtcgatttgtccttacaattgtgttatcacgctggccccggtggggatcagggatgccccgaccttgaggtgcgaattattgccttactggggtcgtaaaggtcaccaccaaccacgaaccctccttttcgctcaattaattgacttagttttacaaaatgtggcatttaaaaattttggttcaatttattgagctacaatagtgctactttcccttaggatttccctcctcaataactcctgttcccctataataataatacacatggcgaatgggtgtatccaaacaagtttagagcaactccaagagttccctaaaaaaattcttccccaaaacaagatattgtagctatgctaaaaaaaatttcacctaaaaacatatcagttcacagcggattgctaaaaactatccctaataatttaaaatagtatttttttccccaccgtgaccaggagcccacagcagtcctgcgccctcgagtcgacaccggcaggccctgcgcacggaggacaagtcacgccggcagtcacgccggcagtccctgcgtcctgctccctcaatgtctaaggcagtaggttacgtagaaaaagaggtagtcct

SEQ ID NO: 11172 - DNA, 540 bp, Setaria italica
  misc_feature (17)..(17): n is a, c, g, or t
  misc_feature (26)..(26): n is a, c, g, or t
  Peptide Sequence Number=SeqID_77146
tctctctcgatcatgcncacttcgcngtcaaacgtgtcaacgatgacagctgagaggtgacgaccatcctgagttatcacttatcagggcattacgaaggctgatggcagtgcggagacactagatggtgcgctgttactgtagcagcttggacgggagcagcagctgttcagtgttcagagtgtacagctactgcatatatgtgtcataaaggcctggcatcgactaaactctctgatttcttgagaaaacaaatggacagagattagtacactgctccgcatgaggagtacgttggttgatatactccgcctggactgtctttaaaatctcaactttgcattactcaacacgccctaagattctagacggttctactgactgtggtggtgtatggtcataccaaatttgccagaacatcttaatttacttgcaaaattctcgtcagttattgatactgtgtctacgtgtgaccgtgtgctccgaattggtatcgtacggcgttgttacctgatctaaatatctgatctcgtggagtta

SEQ ID NO: 11173 - DNA, 286 bp, Setaria italica
  misc_feature (258)..(258): n is a, c, g, or t
  Peptide Sequence Number=SeqID_77147
cggctagcaacgccgcccccttcgccgtcgaggaatacctcgtggccacctgccatcttacccctgcgcaggcgctcaaggcctccaaggtgctctcgcacctcaagtccccctctaggcccgatgcagtgctcgccttcttatcgggcctcggtctctccgacgctgacatcgccgccgccgtcgcctacgacccgaagctcctctgctccgaggtcgagcgcacgctggccccgcgcctcgctgagctccgggacntcggcctctccccgtccagatcgcccgc

SEQ ID NO: 11174 - DNA, 237 bp, Setaria italica
  Peptide Sequence Number=SeqID_77148
aaggtcattcaacttgaggcaattatcatatccatacctatacatgcacatacacatacgcttgcatgcatttgagtattttgaaaagattctatggttctttcatgtgaatgaaataagggtgtcagagacccatttgattggattcaatgtgtaattacttgtcagcaattgtatatgagcagtttatgtgtgcgaaagaattccaacaggaattttcacaaaagtccattgtag

SEQ ID NO: 11175 - DNA, 567 bp, Setaria italica
  Peptide Sequence Number=SeqID_77149
ttacttcgccggagtttgtttcgggtgcctgcttactcttcctattcagggccacaatgctccttggaagcacactatggaaggacctgatgacatgccagcacatattaaatcgtcaatgtttggttgtgccctgacgattcctataactgatggacgtctcaatatgggcacttggcagggtatatggctgtgcgaacaccgtgatcatgccagccctcgcaaaattgtgattactctcaacggagtctaacttgaaagatcttatatgctggcaggaaattgagcaaatgcaatttggacctgaatgatgtaaaattagggctctgtttcaagtgtaccatgtactgggttgaacggttgactgtaacatatatatggaagctagaaattccaataagtttgctgttactgtttcctgtgtgattcttggcttaggagatcattaccaggctgttgatctttctaagtttttttttaaaattctgtgtgatcatgcactatatttcgcagatttagtaattgtcattttccttgtaaattttgttgtaattcttactaaaaaaa

SEQ ID NO: 11176 - DNA, 347 bp, Setaria italica
  misc_feature (292)..(292): n is a, c, g, or t
  misc_feature (324)..(324): n is a, c, g, or t
  Peptide Sequence Number=SeqID_77150
ggcgcatggagatggggggaaatggcgtctggatgggcatctgaatcttggccagagcatcgtccggtccagttcagctgcgcatatgattaggcaatttataatgtcggcggcattgtggcgtccaagtggagaaagcgagccggagctttggtgagtccgagatggcggcgattccggccgacgaaaagaccaagacttggggacctctccagcactagcatcatccgtacctcaaggctgaggtgagcgcttgttcttggctggagcggcgatcctcgcgatacccggnagcagggaaggcaccatccagatctgccggtnacagtaggcgacaggttgtcttg

SEQ ID NO: 11177 - DNA, 414 bp, Setaria italica
  Peptide Sequence Number=SeqID_77151
tctttacttttagtcgattcatgctgcgtactattgttgccccccgtggttttatcttttctcgagtgaaatccagtagatatagtagatatcgtagcattaggttttaattcaatcgattgattattgtatcatcaaaattgagaagttcgaatcatgcctatcatgctgcctcaaccgaaatcctgtatattgaagtttcaattcaattgattgatcattcattagattcaaccaaaatctagaaggttaggatgcgcatgtcatgctgcctgcgtagtttacctttgatctgtttatgattaccttatcagtaggatatttgtgattttgggaagtagcactaactgattcatgctgacatgatgttccctttcagattatactgttgagtcctatctaattgatgctttg

SEQ ID NO: 11178 - DNA, 662 bp, Setaria italica
  Peptide Sequence Number=SeqID_77152
cttaaaaatccatcatgcctagtcctctctttgggaggcagccggggcatctctgatagtgctgctgctgacttcgtcttggtccgaaatgtcggtaacaccggtgacacagcttgaagacgacggctgctgccgttcggcatctccccggtgctgcagcggcgccgcgcggtgtgcagtggaggcgcggtttcccggatttttgccgtcgacatccctgttcggcctgcttcttggtctgttcttcagaaagacccggcacacgacccactctcctcccggctcaacaacgcagtcctgcgagtcattggaacgttgtggattgcaagtaaaaaattaaataaaccctccaaatttggagtaaaatgcaagttacagtgaactatcgcgatcgaggtcgcaaaacggatcaagctacttcagaaggaggcaagattctcatatctgcagtatctgaaacattactgtgtgtttatcagtcgctgttaagctgtcacaatctcaagttgcctaaagcaaggggaactttctggtttccgctgcgaagcaggtgttaacgaataatcctagcataagcatataagctgtaaagtagagaatgagcatagaaccacaataaacctaacgtgcaaatgcttcagagcctcgacttcttttgaaac

SEQ ID NO: 11179 - DNA, 1029 bp, Setaria italica
  Peptide Sequence Number=SeqID_77153
cctgcagcaacgtacaagggaattcaactagttagctgcattcttacacaccagtgggccattgcagctcctgtctaagttctgtagggaattcaaaccgcagctgaaccgtagtagcaactactgctcctgattagttcaggttacccaatcttacaagttccaactgataccgatgtggcagctgtttgataaccttggatacattcttgagctggacttgccttacacctaattacctgatgcttgactcatcactatacggtaccaaggaaaagtacaggcgacaacggagcaagagaaagagagggaggaaacaaaaacttaaaatccatcatgcctagtcctctctttgggaggcagccggggcatctctgatagtgctgctgctgacttcgtcttggtccgaaatgtcggtaacaccggtgacacagcttgaagacgacggctgctgccgttcggcatctccccggtgctgcagcggcgccgcgcggtgtgcagtggaggcgcggtttcccggatttttgccgtcgacatccctgttcggcctgcttcttggtctgttcttcagaaagacccggcacacgacccactctcctcccggctcaacaacgcagtcatggcttgcattcttcctctgctcggccgcgccgccgggcacggcgagccggtactcgtgcatgacccaaccggtccgcgacgacgacggctcgctgcgatggaaggcgagcgccgtcttgacgcccacgagcagctgccgcttgccgccgcactgcaggaacacaggcttctccttccccgtggccttccagtacccgctgccagctctcctcctgcggccgccgccgcggcccatcgccggcgctcgacgcaggctgaagaagtacccctccccttcgctcgctccagggaggtcccatggatccagcctggcgccgtcgtggacgacggggatgacggcggccggcagcgggcgggacagggccttccggcggaggtactgcaccaccagctcctcgtcggtggggt

SEQ ID NO: 11180 - DNA, 391 bp, Setaria italica
  misc_feature (388)..(388): n is a, c, g, or t
  Peptide Sequence Number=SeqID_77154
gctggcaatggtgaaatggagtggtcgtcgctgtcgccggtgtatttgccgcgacgcagacgaaagaaagagcgaaagaggggaaggtaggtgctgcaggtggaggagtagcgatcaactcgagtagtgatcataattagcctccctctccgattaatacagtaataaagtccatcgtctggtgcccttgctgacctgacagagaaagaactcgtcgtcgcgcttgccatgccggccatggcagggtaccagggggattgattactagtagtatatgctttgcctgcagatattatctgaggcgtatctatgtctaaggcacgtctagaacacgagcgattattgttcatggattattctatggaggaaattgaattgctataaaatnttc

SEQ ID NO: 11181 - DNA, 833 bp, Setaria italica
  Peptide Sequence Number=SeqID_77155
cgccgtcttcgccgcggcgctggcgggcgtctacgtctccatgccccactccgactacagcttcctcaagctgccccacaacctccaggagctccgagtcctcaccgaccatctggagggctacaccagtgactacaccatccaggtgctggtgggctactgcgctgtgtacatcttcatgcagacgttcatgatcccagggactattttcatgtccttgcttgctggggccctctttgggcagctcggtggcctggccctggtgatctttgctgccactgccggtgcttcttcctgctacttcctgtccaagctggtcggcaaaccactggtctcctcgttgtggccggacaagctcatgtttttccaaaagcaggttgcaaagagaagagagaagctgcttaattacatgcttttcctgagactcactccaacactgcccaatactttcatcaattttgcttcacctatagtggatgtgccctaccatatcttcttcttagcgacagccactggcctcatcccagctgcctatgtgactgtcaaggctggaattgctttgagcgacctgagatcgttgaacgacctatacgatccgaagtcgattgcggtgctgttcctgatcgggcttgtttcggtgacgccaacattgctgggcaagaacgagacgcgaggcaaagcaccagcagacttggcagctagcaccaccaactgatcacttgcacgccacccaagtcctcctctcctgtagatacttgaaactcatcgtctggtggtggctccatgacttcgaaccaaatggagcctgtcgctggccacgaacatggcgaggg

SEQ ID NO: 11182 - DNA, 265 bp, Setaria italica
  Peptide Sequence Number=SeqID_77156
ttttttttttgttataattttttcacaatttattacgctgtaggaacagctgaaacatgtttacatgtatgatacaatacattagtatgagacaacatgatacattggacattacattcctcctagagggaggagaaaactccaacttaaaaccccaacttgtttatgcacatcagcatacacctcccatgatctgacagcccgtgggtgctccaaaatctaacaaaaactagatcggacgaagcacaccgggtctgtcaaaaat

SEQ ID NO: 11183 - DNA, 235 bp, Setaria italica
  Peptide Sequence Number=SeqID_77157
cgcaagcaaagcaaagcgtatcgcgagcaaaagggcgacagccacttggcgagagaaagagagagctcgagaacacacagcacagcagcaatggaggggctgatcccgttcgtgatcgacgcgatcaggaggagcaacgagcggagcggctaccgctccgtctcgtccgacggcggcagctcccgcggcggtggcagcaggcggcacctcatcgactactacgagctgcccgacg

SEQ ID NO: 11184 - DNA, 953 bp, Setaria italica
  Peptide Sequence Number=SeqID_77158
ttctaatatgtttgaagtggactatagaaattgcactgaggttcccttacgattacactcaatgactattgaacctgatgatgatggtaagcagctctgctcagtgcaacaggtcagtggaatttccaatggacatgcagttattgctcctagtgaagaatacaaaggaatattttcagtcaatccacgggctagcaattcaaacttccatttaggtgaaatttgcctgaactggtcaagggattcaagacttggcgaggctcaagagagacgtgttattatgaaacaaaggttacctgaggtcagcgttgaggagccaccgcttgttgtgagcatggaatgccctccctatgttatccttggaatccctttcactttctatgtgaagatccacaattcaacgcctttacttcaagaaatcaagtactcccttgtggattcccagaatttcgttttttctggtgctcacaatcatgctgctttcattctgccaaaatcagagcacattgttagtcataagcttgtcccgcttggttccggctcccaacagctgcctaagatcacagtaacttctgtgaggtattctgctgcattgactccttcagcctcagcagcgactgtttttgtatatcccagtgagcctaaattcaatttggaaactagctgttcggcatccgaccagtgtgtgagttaaaagatttgtagagaacctcaggcctccgcactcctgactcacagcttggctccagactggaaggaggtatgctactgagaactgagaagaccatcagttttaccttgatgtcgatgttgaagagactagaatcagattcccattggcgaaaagcaattggcgccttgcaaaagttttggcattcttttgagttgtcgattttgtagtccttttggattaaccacatgtctgtaacttatgattgcttcatttgtttttg

SEQ ID NO: 11185 - DNA, 316 bp, Setaria italica
  Peptide Sequence Number=SeqID_77159
cgcgagggggacgtggcaggcttgtggcccgtgcgggtgcggcggttgcagcaaaggcggatgcgccgtcgggtgccgcggcccccaagtccgacggccatgaggtcttgctgtttgaggctcttcgtgaagccttgatagaagatatgaaactggatccaacagtgtgcgtgtttggtgaagatgttggtcattatggtggttcttacaaggtgacaaaaggtttggctgatatgtttggagacctccgagtgctggatacccctattgctgagaactcatttaccggcatgggggttggagcagcaatgaaagg

SEQ ID NO: 11186 - DNA, 561 bp, Setaria italica
  misc_feature (503)..(561): n is a, c, g, or t
  Peptide Sequence Number=SeqID_77160
taagaactaggatgtagcaagtcattaggtgctggcaacgaaattggggcaggctggaacccgcctgtttgctggcattactgacatcgtaccagttttgagctgttccatcaattgtgtggtttcaggatctgtgcacatacttttgtgccatgcctgtatgtacgcaggcgctgggaatatgggtagtcggaagtcgaggattcccatttttgtggtttcccctgctgttcttttttgatttactagttataagtaccgctccaatttccatctgtaggctgcctcaaggttcaagggtcctcagcaaactagatctgatgctgagtcagtgagtcgtgttctaccggtgccaggtctggatcttgttcgaaagtttccgaacattacatttcatggccccttacattagtctgcgggcgtgctaaactgcttggttaatctgagcagtgcatatttgagccgttgcctagaatgtgtaccactttaaacttggttactannnnnnnnnnnnnnnnnnnnnnnnnnnnnnnnnnnnnnnnnnnnnnnnnnnnnnnnnnn

SEQ ID NO: 11187 - DNA, 244 bp, Setaria italica
  Peptide Sequence Number=SeqID_77161
gacaggagagccaggatgtctccatcttcagaagtcatggccatgcacggaacttagtagctccttaatgtggaagtgccctagagcgcccctggcggatgttcgtcgccggcgaagcgcccgtcgctcgacgaacaacgggcagcgcaactcgccctgtcgtcgccgctaggaaaggaagaccggggccgagagagagaacagagaagtcgtgggaagggagggtgctgccgcaccagccgga

SEQ ID NO: 11188 - DNA, 418 bp, Setaria italica
  Peptide Sequence Number=SeqID_77162
caaaagatgtaacaagggttaagtcgcaaccggaatgaacacgtctccaagcagttaaggtctgcagtttctaactcagttggttatttcagatctccataaaaaaagacgtatccaacccgcttagcaaaacaagtcaagaatctctgcaagggctagatttagaaatggtgtccatggtccacataagctatgcaaaggcaccaactaaaacatcctgtcttttgttcaccatcatctactcttaggcgccaccagacccgtatgtcttgccaaacatgatcacctggagcttgtcatacccagcaaggacaccagcaccagcgacagcacggaggatgttcgcgccagcacccttgaagagggacttgcggccctcctttgcgacaatctgctttgtaaagtctattcctaaggt

SEQ ID NO: 11189 - DNA, 338 bp, Setaria italica
  Peptide Sequence Number=SeqID_77163
tagaacgcttatatcgccaataccagccacaattcagcctggggtacagtgatccctgtcggatgttcgtcgccggcgaagcgcccgtcgctcgacgaacaacgggcagtgcaactcgccctgtcgtcgccgctaggaaggaagaccgaggccgagagagagagaacagagaagtcgtgggaagggacggtgctgtcgcaccagccggactcgagctgcagctgggcaggggagcgtggagggcggcgcacgggccgagcgatggaggcgatggaggcgagcggcgggcggcgtgcacggattgcggccgccgatgatgaggcggctgcaggcggcag

SEQ ID NO: 11190 - DNA, 1160 bp, Setaria italica
  misc_feature (1)..(36): n is a, c, g, or t
  Peptide Sequence Number=SeqID_77164
nnnnnnnnnnnnnnnnnnnnnnnnnnnnnnnnnnnnggttttctatgtaatagggcgtctgaacgtgctattttccagctgccggcgtttatacaccataataaaagttcgactaaaacattaccaacacaacactaaagttacatctgcagctcctaagatcagtatttgatataacatgagttttcaactacaaggcctaagaacatttaaaaatggcaaggctccataggcatcgacttctggcttggatcccatgttgtccgctgttgagctgcccagcatgttcagctagcccatcttcctctttctgttgcccatagcatttctcatgtcggtcttcggcatattggtgccgggagttcctacaaactgcataggagacattgcagatgcaccacctgttgccacggctggcatagatgatgccggcgcgggaacaggtggggccacaggtgtcggtactgatggtggtaggggcatcactgcaggtccttgtgaaggtgccgcaggagctggttcaggaggagggcgtggtaagatgtgcttcattctattattcctgtagtttttccagaagaaatattgctgcctgtgagcaagctccttgcttgctggatgtgccattgcattgcggaaattggcattttggaggagctcaagaaagaaaaggcagtgtggatacattatgtatttgatatactccggacgctgccaatattttaggtacttgaggtatccgataaatgcctcatcctcaaaatatctattctgtgctagatagtgaatgtaggtagggttggcgaggcactgcacgaactccaactcgagttcgaatcgcggaggcggcttctcgcccttctcgccctcaccaggggcggactcgacgtcggacacaggggcggacccagtataggacatggtcggatgttcgtcgccggcgaagcgcccgtcgctcgacgaacaacgggcagcgcaactcgccctgtcgtcgccgctaggaaaggaagaccgaggccgagagggagaacagagaagtcgtgggaagggaggtgtgacgaccctagactacgcgcggcacgccagcgagctttggtcggagaatcgccgctgccggcggcttggggaagaagatgagcaggaagggttaggattcgggt

SEQ ID NO: 11191 - DNA, 522 bp, Setaria italica
  Peptide Sequence Number=SeqID_77165
ccatcagaaagtcaaccatgaatccagaaaaacttttctctttgggggcagaagcgaagaaaggggaggacgtcatgactgatgggagcccaacagttgcatccatcccatgatatgacctcaggggcacattgtaagcagaatgcacattgctgaatacagggttattcatggcagaataagaagagattctactcaacaacacgggctgcccatggaccctctggatcccagatgaagaacgtagttcatgctccatttttcacaagccagaagcaacccctgtcggatgttcgtcgccggcgaagcgcccgtcgctcgacgaacaacgggcagcgcaactcgccctgtcgtcgccgctaggaaaggaagaccgaggccgagagagagaacagataagtcgtaggaagggaggtgtgacgaccctagactacgcggcggcacgccagcaagctttggtcggagaatcgccgctgccggcggcttggggaagaagatgagcaggaagggttaggtttcggt

SEQ ID NO: 11192 - DNA, 1836 bp, Setaria italica
  Peptide Sequence Number=SeqID_77166
cagctgcagttgcagaagtactgaacgatcatcgagcttgcatagcaattacaatcagttataagtcttctgtagataatagcaacaattgctatgtaatccggtacataaggcaccataaataggcggttcctcaaaagctgaatgccagcagcgactcaaattcaatatcccatggagatggagctaccagccgcaccaggcattgtgcaccgagccgatgactgcaaaatgttagcaatcgttcgctgaacctagttgttttggaggtcgtcgcaagagattcagaattgttgattggtggttgcaactgctctgtccctgccgaatggagatccggatggagcaatcaggccgagactttgcatgatcctgatctggcgcgcgctaagttgccccggtgtcttcaccactgcttccctgctatgggtcgtatcggtattccctttcttggtttctggacttgttgcttgcaaggagtcctcagttgcttcatctctacgcctttgcctgacattgcttgactcaccctcaactccactaccactctgcttgacgcctcgtccacccttcgtagaagcagtagcaccaccactcatgatgtcctcagtagcaccacaaattccattaatcacttcatccacgtaagccatttcagcatcatgctccctgtcaataatatctttgaacagaatatccctgaccatagcttttatttcagtatgaggagctgaagttccatccagcattgaagctccagttgcatcttcacctgcatgcctatcagtgagtggttctgaactgtcttcagctgcatccaagtattgcttggcatcagaacgagctgatcgtctcaatccttcccttctgtccactgaagcactttgaacaccatgcttctgtctcttattccttaaaccttcagctgaactttcactagaagctttgtcaatggcatcataagtagaacttgattgtctcagacgtccacccttccttttccgagcagtaactccagtagtttcagtgctcccaacatcttggtcttcctcttcactatattgtggcttcaaaccttgttttctgacttttctagacgagttcttctttgaggtccctttggtggaaccaccttttgagttgacagcttcctcatcataaacactgggcgagttatcacaagacagctccttctcaatcacctcacggaatgtttccattgcgctcttgttttcttgttttagcatcatttcaaactctgagttagacttccaaggatctacgtacaagtattgacatgtgccataaagccgaactaggcaatcatacttgtctttcttcttaggcttgctaccaacacatgattcatcaatgacctgggctggccaccatgaagatccatcaagcttaacccatgttacatctcccaaacaaaaattgtgccgtaacttaatttctggaacccgagaagttggtgggcttccatcaacatcacgatctttctgtacactttcattcaccataacgatcagtgcaaacccctgtcggacgatgttcgtcgccggcgaagcgcccgtcgctcgacgaacaacgggcagcgcaactcgccctgtcgtcgccgctaggaaaggaagaccgaggccgagagagagaacagagaagtcgtgggaacggagggtgctgccgcaccagccggactcgagctgcagctgggcaggggagcgtggagggcggcgcacgggccgaccgcgtggagagcggcgcgcgctgggggagcgaagggagaagatgggtcgcggggaggaagaagaccgcagcggacgccgtcgcacgggc

SEQ ID NO: 11193 - DNA, 394 bp, Setaria italica
  Peptide Sequence Number=SeqID_77167
ctcagaccgggaggcatggcgattgtcatagtctatttcaatcttatcccgtgtggtgccagcatcagtcctcctcttcctgtgcttactcttgctcctgctacggctactgccactacttgctgaagtgctcgaggaacttgccgatctccgtgccttcctcctcttgcgatccctctctctgtccctccccctcccttttttcttgtgaacatctctggactggctcctgggtggtgggctctccaagctctcagaagcgctgccactgcatgtggaatggtgccgagctatcgaggaagggctgctgctgctactgaggctgtggcttgggctaaggctacgccgccgacgtctgcggctgctgctgctaaccttgctccttctgctcttt

SEQ ID NO: 11194 - DNA, 436 bp, Setaria italica
  Peptide Sequence Number=SeqID_77168
gccgatttttctcgcctccgctccgctcctctcctccgccatcctctgggctcacccctgctcgtggattcaagatgtatctccagtactacatcaacgagaagggggacaaggtttacaccaccaagaaggagtcgcctcttggggtgccgacgcagtctgctcacccggctcgcttctcaccagatgacaagtacgctcgccagcggtacctgttgaagaagagatttggactgctgccaacccagaagccagcactgaagtactgaagtttcaactgtcccaccatggatgttgtggagaaaacccagaagccagcactgaagtactgaagtttcaactgtcccaccatggatgttgtggagaaaaccgtctgtttgctgcctgctggttggaatgtagattagcagtgtttgatttcttttctcacatagct

SEQ ID NO: 11195 - DNA, 471 bp, Setaria italica
  Peptide Sequence Number=SeqID_77169
taaacttaaagggaaacctcctccgccatctggcggaggagaggagcggagcggaggcgagatgtatctccagtactacatcaacgagaagggggacaaggtttacaccaccaagaaggagtcgcctcttggggtgccgacgcagtctgctcacccggctcgcttctcaccagatgacaagtacgctcgccagcggtacctgttgaagaagagatttggactgctgccaacccagaagccagcactgaagtactgaagtttcaactgtcccaccatggatgttgtggagaaaaccgtctgttttgctgcctgctggttggaatgtagattagctatgtgagaaagaaatcaaacactgctaggcactaccatggtgtctcccagcagattcagacactatgtaatgctatgctattaatggatcgcgcttcctaatattatgtatgtgtccctcagatcatttagacctaa

SEQ ID NO: 11196 - DNA, 573 bp, Setaria italica
  Peptide Sequence Number=SeqID_77170
gctgaactgctgattccttctcgcctccgttcctctcctcccttctcccctcctccgccatcctctggtaactttgctacccctccgcaacccctgcgcgtggattcaagatgtatctccagtactacatcaacgagaagggggacaaggtttacaccacgaagaaggagtcgcctctcggtgtgccgacgcagtctgctcacccggctcgcttctcaccagatgacaagtacgctcgccagcggtacctgttgaagaagagatttggactgctgccaacccagaagccagcacttaagtactgaagttccaactgttcaaccatggacgttcaggagaaaatcatctgttttgctgcttgttgtttggaatgtagattagctatctgaaaagaaaccaaacactgctaggtgctaccatggtatttcccagcacattcagacgcaatatgtaatgctatgctatgctattgacatatcgtggttcctaatgttatgtgcgcagtgtgtctatcacttcatttaggccattgacactatcatccaggatgaagcggctccacatgatgctgtc

SEQ ID NO: 11197 - DNA, 640 bp, Setaria italica
  Peptide Sequence Number=SeqID_77171
ttttttttttaaaaacttataagagtacttgcattggttccatccagagtttcaggccttgaagaccaacaagctcagttataacctagctacttggaataccaagatgacagtacgtaaccaggaccaaaatcaggacaagtccaccataggaactaccaccatcaaccactgctcaccaacatcttggcatcccgatcaaaaaagagaacaccccatcattaagcaaaaagaaagattgcacgccaaacttggaggagttcagcagtagaacataacgtccttgacgttgtccttgatcttcggaagttggcgtacctccacaggaccctcacgagctactgcttgtccgctgctgccaggggttgagccaccgtccgagctttctccttccacatagtagcgagcacggaaagcagcaaggtgggcatagtaggcaggcgggaccactgacacagcacgggtgcaacgagcataggtgtagcaaagattgttggtcagtgactgtagcgcatcagcagtaaaacgattctcatcataaaggacatggtaatgggtgggccgacttgttccctgaataccagcatgactacacaagtagaaatcgaactcagtaggatgacaaatcttttggtcaaca

SEQ ID NO: 11198 - DNA, 375 bp, Setaria italica
  Peptide Sequence Number=SeqID_77172
gaagaaagcacacaaattaattttcacaataaggacgcacacaaccaaccacgtgtgcgcgtcgcagcgggctgggcgaacaccctcgctaccagctcggtctgaaggtgacaagaaaaaaagccaaattaaaggggcccggccggccggcctctatctaggttgttccatcccatattcccatcatgtatatggacgcctctgactctctccctatatataatattaatatatatataacaacaaataataataataataatatataagctactgtagctagctagctagtcgaactggacgatggagctgtagacgctgtctggctgccagtccgccgggatgacgttgtccgccaccagcgtcttgccggac

SEQ ID NO: 11199 - DNA, 738 bp, Setaria italica
  Peptide Sequence Number=SeqID_77173
gcggcgcggcgcgggctcgggtggctgcggccgtcgcggctgagccgggtggtgccggcgagcgagagcgggcgtgtgggccccacgtgctggttcaggttcgggaacaaggacgccgagggcgccggcatctacggcagccaggccagggacgacttcgaccgcgacgacgtcgagcagtacttcaattacatggggatgctggcggtggagggcacctacgacaagatggaggcgctgctgaaccaggacatccacccggtggacatcctcctaatgctggccgcctccgagggggacaggcccaagatcgaggagctgctccgcgccggcgccaagtacgacgtcaaggacgtcgacggccggacggcgctcgaccgggcctccgacgagaccagggagttcatcctcggcttcgccgccaagaaggcctgaacaattgatcatctcctgatggatgaaggttctttggttgtaaattttcgtttcgattcctggggttggtatgtacttggtagacacagttagccgggagattcaccagctgtttgcagaggtagctttcagtaaccatatgtatcttcttgcgttgtcacttaattctgagtgtggtgttcgacctgccattgctcaacaagaccacgctttgtttagagctgtcgatctatgaattctgaaattcaaacagattgcactgtcaatcataaagtctgaagaaaatcagagctttgtgaccag

SEQ ID NO: 11200 - DNA, 918 bp, Setaria italica
  Peptide Sequence Number=SeqID_77174
cgttagtgccctatttaccagcaattacctcacatttacaagatgcgattgccccgcgcagaggaaggccatctctcgaggcaatttcttgtgtaggaagctttgcaaaagctatgggtcctgcaatggaacctcatattcgtagcggactgctagatgctatgttttctgctggtctttctgataaacttgtagaggcactcgagtctataagcatgagcatcccgtctttactgcccacaatacaggagcgtttattggattgtatatctcaagcactaccaaagtcatctataaggccaggtgcttctgttggtcgagcaagccggtcaaacagtttgcagcagcttgtggattctagtagtcctgttcttgtgcaacttgcactgcggactctagcgaacttcaactttaagggccatgagctcctggaattcgctagagagagtgtcatcctctatctggaagatgaagatagcagtaccagaaaagctgcctcattgtgttgttgcaaattagttgcacactccctttctgcttcctcgaagttcacagttcagttcaaataggtcaaatcgtatgggaggagctaagcgccgccgacttgtagaggagatagtggagaagcttcttattgctgcagttgctgatgctgatgttggtgttagaagttcggtcttcaaggctctgtatcggaatccagcttttgatgattttttggtcccaagctgacatcttgacttccatttttgttgccttaaatgatgaggaatatgatgtcagagaattggcaatttcggttgctggcagattgtctgaaaaaaatcctgcatatgtactgcctgcccttcgtcgctatcttatacagctgctcacatatcttgaccagagcatggatagcaagtgtagagaggaaag

SEQ ID NO: 11201 - DNA, 197 bp, Setaria italica
  Peptide Sequence Number=SeqID_77175
cttcttgttactgatgactgtcaatggccttacgtgaaacgagatagagagcagaatgcagccaaggatgacttgccggatacatgctacatcgccaagcctcctgattactcaaactgcaaagtagcactgccaaagatacagcaataacattaatgtatatctgttgttgtctgatatcatgtgataatgttatt

SEQ ID NO: 11202 - DNA, 271 bp, Setaria italica
  Peptide Sequence Number=SeqID_77176
ccagttctctccctcccagtgccccctttctctctccagatctcacccgccatggacctcctcgacgcgggccaccgccacgccgcccccgccgccgacatggacggcgccgtggcctccgcgctcccgctcgccggcgccgtgtaccagccctacgtatccgagcttctctccttctccatcgagcgcctccacaaggtacgtacgcctacacccacacccacgccgcctaccagccccctgattggcggtggttgtgatcccgtgacgt

SEQ ID NO: 11203 - DNA, 379 bp, Setaria italica
  misc_feature (43)..(43): n is a, c, g, or t
  Peptide Sequence Number=SeqID_77177
agtgttcttaatggtaatctccatatttttcactgaccaaggngaagtgcttctagatctagggtttctagaagtctgaaggctcatgtctaagtattccttattctaaggacaccatttctgactatagaatagacagtatttccataaggttattcctttgtgagcattatacataaaaaaggtgcagtcctgggactctagaagctaacatctgtttcgagtcatcagaagcagccagaggacttggatcctcaaaatcctcttttcacctttctttgagttgctagcagattttggtgctactgctgttgtatctgattcaataggtttatttattatgatgtaaagtctcatatgtcgactagtgcgactgagt

SEQ ID NO: 11204 - DNA, 1403 bp, Setaria italica
  Peptide Sequence Number=SeqID_77178
aattgcaagaagcatgctctccacccttctcattattgagggtaacctctgagctccacgaatgagtgatccaggaagaggatgcacaaggcacaattcgggtggtaaatatacatagtatgttttgtcaaggttctctgagaactctccattggtagcttcagaatgctcaaatctaggagaaagtagattcttgcaatatgaaacaccacgtgcccgtatgagaggttgtttcttataaattagctcaacaccatacttctgcttgtagtaatcagcgtacgagctgtactccagtggacccaggtagccctctttcctggggaatgaattttctgcgttcatgttgtagcaaatactgtccacgtagaacctctttcctgagtgggctgccgttacaaccattccagcaagatctttagcatcccaacatgaatctgccatgaacaacttgccttggttttgataatcattataatgccccctatcacgagcaggaagtaatccagatgctttgacaacatcaaaatcagcaatggcgcctctaataccataagtaggatgggccttctgtccaaaagcagttccatgacgcaattttccgaacccatattccctcctatctccgccaagagtcctttcattggtgcccagatagacatctgggcgtgccctctgtagagggttgttccaggcatcagagttcacaatactgttaactaatgtccaatctatctctctcaaaacatccatacatttctcagcccccacaggaacaaagaggtatgcttttgctggatcccaaggtgttgttgagggatcaacatccacatcaagtacaatgctcatgagcctaacatgaaagctcttcagcaggaccagctgactttctgtaatttcaattggcccacggaatacgagagatgcctttgttatcatcgtcctagcaacaaagagatccatcgtcgtcgataaaacctctgcatccagctcattgccaaaaataagagcaaaatttgaaagttgtgtaacaaaggggtcctttgaagtcccaatgttcacacagttcacagaatacatatataacttaataaactgggagctttggcaaccatctcttccagataaaatccattctccccgcaaaatttcagcaaccccttcaggatagaattctctatggcgtgctgttccagggagtggatcaccttcatcattctgttccgtcttctctccttccccacttcctctatcaggtaaaagcatatctgtgaaggcacccatttcatgtagcttcttacaagcagctaaacaaacagcctgttgtgccagacgtattgaactgcatatagggccttcaagcttctcaaatggagcattacaagggagttgaagcttgcaag

SEQ ID NO: 11205 - DNA, 988 bp, Setaria italica
  misc_feature (12)..(12): n is a, c, g, or t
  misc_feature (112)..(112): n is a, c, g, or t
  Peptide Sequence Number=SeqID_77179
cactttcctacnctcggccctcgccgtcgccccatgttgtccctgaactccctgttcgtcagcagcagctggaccttgcccacgcagtcgtccaggtcgcccggggtgaagnggaagctggtcttgccctcctggtcctctgggataatgtcggggatcccgccggcgcgggctgcgacgacggggactccggatgacatggactcaaggaccacctggccgagcgtttcagactctgatggcatgacgaagacgtcgccgctggcgtatgcctgagagagctcttcaccttgcatcattccggtgaacactgcgggcattccctcaaacatcttctctagctccgtcctgtatggtccatctccgataaatgcaattctgactccaggcaacctgtccattacaatcttcagaaaatctaaatttttctcacgcccaaaacgtccgacgtgaattatcaatggtttttcaggttcaccatcactgagcctaactcgcatctcatgactgcgaaacctgggatggaaactagcagaatcaacacctttgttccaaaggcgtattctgttagctgatataacatgggcggtttcaaaatccttgctgatagcagcagatggcaccaaggttaaatcagcagctctgtgaaggaaccttatgacttgccacattggctctacaagccagctaaatgtatatctcggtatgtatactgggacatgtgtgtggtaggacatgactaggggcacgctaagcagcttggcaatagctagagccccaaaaaccataattccaggtgaagatgcatgaataatgtcaggtttgaactttgcaacctctgaaatgatcctaggactgagtgccagagaaagcggaacttttccatacatgggacatgggaagctccatgagccaataaccttggcgccatgaaattcttcaggaactccttcatgattggtcacaacaatgaattgttccccatttc

SEQ ID NO: 11206 - DNA, 922 bp, Setaria italica
  Peptide Sequence Number=SeqID_77180
tgctaattcgagggcgccacgccgccgccgcagagaatgaaaggactgcctcttcgtgttttatctggatctggaggctagtagaaagccgacagaggtttgaggacattttttataggttaccatgcgaatgatgatgtgcaaataacgtacgctggaaagtcatttcacaccagccggagctatcatatatcaactgaaaagaaaaatgatgcacttatttactggtcatcttcaaggtgccttcctcacagagacaagcttgcaaaagatttcctcacattggtgccacaccattcctttggcagatgtttgaacaatgttggtggtcctgacatggcgctatctatgtatccagtttgctccaccaatgataatggttcaccacactggtgggatcacctacactgcgcaatgtcacattacaagtttgttcttgcaattgagaacaccaagacagaaagttatgtgactgagaagttgttctatgctttggaggctggatcggtgcccatatactttggggcagccaatgtctgggattttgttcctcccaattctattatagatgcttccaaattcagctctctgaaagaactggcatcatatgtgaaagcacttgcaaatgaccctgtagcctatgcagaataccatgcatggagacgctgtggtgttctgggtaactttggcagggcccgtgaaatgagccttgacacgctgccttgccgactctgtgaactagttagcaagagaggtggtaagagtgcggatgcattgtgattggcggtgattttttggcttgtatacctcgatacattgagaactgaatgacttacaactcagatatgtgagatgctaatggtatgtcaaactgctcgtgctattcagttcaagaagtgctcttgactacagggtgaagatt

SEQ ID NO: 11207 - DNA, 557 bp, Setaria italica
  Peptide Sequence Number=SeqID_77181
cattgaaccttgctcttgaattgtagtgaatatgtcgccatgagttagagaagggaaatgaagtagtaggtgcactgatggacataatgtcaacagcatgagctagataccaaatagccttgcatgcctcacatgcagcaggtaccatgttcgtagaacctgatattatgtctgaacctgaagctatcaggcattcacacaagagctccagtaactgcgacctccttgcgtgatcaataatcttgatgagactttcatcaactgcctttgggccttcggatgacatacctgctttcaacccagagataacccgggataacatcagagcaaggcaggcagttgactcacgagaaattcttccagatggatccactgtagaaaccaggatctgtgaataaagctcatacagagagcaccagtggctgtcataagaacttaaaataatttcatcatttgtatccagcagttttcgtgcaattgccaggcacttcactacaaggccataagcatctgaaagcttcgttctgataatgagatttagtaaaattacaaagaaa

SEQ ID NO: 11208 - DNA, 455 bp, Setaria italica
  Peptide Sequence Number=SeqID_77182
cagatgatagaccatagagtatctgataagttcatgggtccccacttgtcactgatgggaggccacaagtcaacaaataagtcattgaactctgggctagtgggcctgtacatgatgtactcgatgcatcaagtggaatttagatgaaatgattttttattgcatcagcttgatacttgacttgttacttctgatgatctgctagctcagctggtttgatgtgtaggaactttggtgtgagacgaaagcatagagggagagtgcagtgcaattcagggcttcaggcacaataaacaagcactaaccacaaggacggactagaaaagagtagcgtgatgcagaggagaatcagagatcggaaacgtactctccaagctgaactgggagtagtggaggccaaaggcggccgggtcggcggacggcagcagcggccgccggccttccttgacgtagag

SEQ ID NO: 11209 - DNA, 423 bp, Setaria italica
  Peptide Sequence Number=SeqID_77183
ccgctcatggacgcccgcctggtgaaggcgctccgcatgtcgtgcccgtcctcgggcggcagcgcccgcgtggtggtgcccttcgacgtgagcaccccgttccagttcgaccatgcctactacgccaacctgcaggcgcggctgggcctgctggggtcggaccaggcgctgtcccaggacccgcggaccagggcgatggcgcaggaactcgccggcaacaagacgcgcttcttccaggcgttcgtggccagcatggaccggatgggatccatccggatcaagaagggcaggaagggggagatcaggaaagtctgcagccagcacctgcttgcagtctgatctccatcgtcgtcgtccccggcttgtatccgacgatcccgtacgtcgtcggtcagtgtcagttgatcagcgagtggcagcata

SEQ ID NO: 11210 - DNA, 854 bp, Setaria italica
  Peptide Sequence Number=SeqID_77184
gttgctgtagagtgacgtgtcaagtgtgcatggcaagtcatttcgtcggtactgagcgcgtaattatatctttgtttggacctcgaacgtgctcggctcagttgttggaaaaggatgttcatatgtagtgtcggcagggggggtggcttgtgagttattggaccattattgttgaactgtttattgttctactgaagacgctttttgcagaaatagtctgttgatcatattgccatcctttagcataggaccattttttaaaggcatgcccactatttacaaatgcgtgcccttttttcaaacaagaaacattattgttagttggagccttggagctttcctatatatgcataagattttcagggcctttaatttggaggactagtgcaaccaatgattgatgtagatgtgcaagtgtgtgtgactaacgctagtcatcttaattttctcttccttgtagccctttccaactatgctttccatgctataaaaataagcaaagagcaaatgaacaacctcgctctatctctacatcccattcattccgcaccacatgggtttgcagattagttaggaaaacttccacatgtctaacagggacaggatatatgatggccaattcttttatgaacagtggtatgtactactatgtagctgattattcgtaaataaagatttctattttttcccctggatgaaactgcaggacaatgtgactgattgtccagtcgaaactagaagttatagttaaatgaaccctggtagttgcacgttagttatcgttcatttagcaatcaggaacacatgtaagctacagtcagcaaagacaaggaggacacaccattcctgggggg

SEQ ID NO: 11211 - DNA, 423 bp, Setaria italica
  Peptide Sequence Number=SeqID_77185
atcaattgtgttgtaagcaatccccttgacactatcctcactggtatttatgcaattattttcatcagccttcttgctgtttgcacttaagaagctcagtataccatctaaaagggccaaccattttgcttcgttcaattgcaatgtagcactctgtttactcttctttgtccttgtttcttgatagatttcatcatctacggatttccttttattggaaaaaatgagtgtcacatgctttggttcaagtatatcaataccccgaggtgcgaaaggtaccggttcagcacattcaacggtcttcttgacatgtaaagcacgatgatgtgatggccaactcctaagtattaaatttgctacagaaaggcatgcaacttcatcacgaattgctataagcacctccaataatttctccatgctacg

SEQ ID NO: 11212 - DNA, 1144 bp, Setaria italica
  misc_feature (1100)..(1144): n is a, c, g, or t
  Peptide Sequence Number=SeqID_77186
cccggcgctcgcgttccacgcgggcggccacaccgtcgcactcccgcaccaccacgacatcccggcgccgccgaggaagcccgggcccgtcgccgtcggcgcgcagatcctgcgctccgagggcgccgcggcgctcttctccggggtctccgccaccatgctgcgccagacgctctactccaccacgcggatggggctctacgacatcctcaagacaaagtggacccaggagaacggcggcgtgctgccgctccaccgcaagatcgcggcggggctggtcgcgggcggagtcggggccgccgtcggcaacccggccgacgtggccatggtgcggatgcaggcggacgggcggctgcccctcgccgagcgccggaactaccgcagcgtcggggacgccatcggccggatggcgcgcgacgagggcgtccgcagcctgtggcgcgggtcgtccctcacggtgaaccgcgccatgatcgtcacggcgtcgcagctggccacatacgaccaggccaaggaggccatcctggcgcgccggggccccggcgccgacggcctcgccacgcacgtcgccgccagcttcaccgcgggcatcgtggccgccgcggcgtccaaccccgtcgacgtcgtcaagacgcggatgatgaacatgaaggtggcgcccggcgcgcccccgccgtacgccggcgccgtcgactgcgcgctcaagaccgtgcggtccgaggggcccatggcgctctacaaggggttcatccccaccgtgatgcgccaggggcccttcaccgtcgtgctcttcgtcacgctcgagcaggtgcgcaaggtcttcaagggcgtcgagttctgagacccgccagccaccgcgacgacgacgacgaagatgatgacgacagccaccaccaccgtgttaccaccgcgtccgctgctacgaataatcgctgctaccctctagaagtcggagactatttacgcctcggcttgcattgcatcccgtgtcagcctttgcgttaatcccttcctgcattctattgtccgtggatggatttgagtatttgaccaaatgttcaatggaaatttcaaaaattttttaattaaaaaaaaaaaannnnnnnnnnnnnnnnnnnnnnnnnnnnnnnnnnnnnnnnnnnnn

SEQ ID NO: 11213 - DNA, 1036 bp, Setaria italica
  Peptide Sequence Number=SeqID_77187
cagatcactgaagctgagcgcaacgaagaattagctgctttacaggcagaagctgacctaccactggatgatattctcaaaatgtatacagaaaccaaagttagcagggaaagcagtccagacagcaaagacatgttaagtaacttaggctcgaagaatttgattgtagattcttcgaaccaggccaatggctgcgatcatgagcctgctcactcttcaagtgacgatggcaattcttctgaggaagaagacgatggccattcttatgctgaatttgttaagaagaatcatggaaaaagtaatggcaacatctcttctatagatgagcaggaagacaaagattatgttgctgctgatgaaggaaaggatgatgaagcaactttgtctgaagaggaagagttagcaaagaaagaagttcctgatcatctggaagagattaagttattgcaaaaggagagcgagataccactagaagaacttcttgcgatgtaccagaaggatggctatgcagatcatgaaacagcggagttggagaattcaccctgtattgttgaagagactaatactgacatgtcgttggatgatcaatctgcaaagattcttgaagtgaacagtgatacagttgtgggtcacctatccgcggatgtgatgaaaactgagcataatgtggctgctaattctatgcaatcagaaatagtaccagagccttgcgcacaacagaattttgtggaagagaataatctcgctgatgttaacacggtcaatggagataaaagtgacgatgtaattgctgatgctgcagctgctgccagatcagcacaaccaactggtaacaccttcttgacaacaaatgtgcgcacgaaattcccattccttcttaagcattcgcttcgcgaataccagcatatagggttggattggttggttgcaatgtatgagcagaggcttaatggaattctatcagatgaaatgggtctaggcaagacaatcatgactatctccttgcttgcacatcttgcatgtgagaaggggatag

SEQ ID NO: 11214 - DNA, 399 bp, Setaria italica
  Peptide Sequence Number=SeqID_77188
gctcaacaaggccgacctggctgacccgtccgagaccgagaagtgggtggcgtacgtgaagaagcagggcgcctgcccgtgcatagccgtcaattcgcacaacagggaaagcatcaaggagttattgagtgttgtgcaatcgaggatctgggagatcaagcatggccagagagattgcacaggaacggtcctcctggtcggaattcctaacgttgtgaagtcggccattgttaacgcaatgcatcaaattgggaggattggggcagcagagaagggaaagctgaagcattcgattgtgagcagccatcctggagaaactagagacataagtggatacaaggttgctagtcatccgaatatatatgtgttagacactcctggtgttctatcgccgagatt

SEQ ID NO: 11215 - DNA, 625 bp, Setaria italica
  Peptide Sequence Number=SeqID_77189
aagacaatagacgaattagtgagcagccaatcctggagaaactagagacataagtggatacaagacactcctggtgttctatcgccgagatttgcaaatgatgattctggtcccatactagctttgacaggagcaatcaagggatcctttttagaggagtatgatatagcacattttcttcttgcggtcgtgaactcgacgcatgaatatatgaaatgggagaacctgaatcaagtgggagatagcagcttttatagtggtaatgcaaatacctccaggagccacaacaagaaaagacaatatgtttcagatcatactcaggatttcatcgtgaaggctgtgcgccaagtgctttttgagactatatcatcttttaagggcgatcttagaaaggaagatgaattcagaagattgatagactgccaatttacatccttgcaggaggttttcaaagtttccattgaatcaagtgaggatatatgtaaatgtgtagctttgaaactactcaatctctatcgaactggaaggcttggccattataccttagacaatgttccagatgttgttgcataattatgtactgttctattcaaaagaaaagaaaaaatgtcgttgcacagaaaaa

SEQ ID NO: 11216 - DNA, 584 bp, Setaria italica
  Peptide Sequence Number=SeqID_77190
ggaagtacggcttgcccatggagcccgggttgtaccagtcctggaggcggcggtgctcggcgaagcccatgagcgccatgttgaagacgaagagcgtgtaggagtccgcccagtagttgtaggtgcccgccggcgggatgacccccgtcttgaaccacggcagcgccgtctccggcgggatgaggcccagcttgccgaagacctccggagcgatggcgcccgcagcgcccagcatggcgaagcgcccgttgatcacctccccgtaggccagccacttgggctcgatgaagccgccggtgccctccgggtcggagaggcccagcgggtcgaaaccgtagtcgccgggcagcgtgccatcgaggtaggagagggattgcttggacgcgaaccacagctgcctgtcagcgccttgcttggccggagggctggagctggccctgacgacgaagggcgccttcctcgcggacgaccgggagacggcttgcacggggcggccgagcagctgccggccggagaggagagcctgagccgccatggatcacttgcttgttgcttgtgttcagctgccgactcggtggtatctg

SEQ ID NO: 11217 - DNA, 591 bp, Setaria italica
  Peptide Sequence Number=SeqID_77191
aagtaggacgccttcatctcccgctccgccgcgttcttgccgttgtcgtcgtcgaactgatccgccccgaacgagactatggccgccttcgcgccgccggtcccgatcgcgcagaggtatatgcccgcaaagaacaccagccgctggctcagggtcgccggggcgcagtacgtgccgccgtgctcgcacggcggaggcctcagcgacggcagagtagccgatgtcgtgatcacggccatcccggcaagagatatggagaggccgacgagcaccgtcttgtacttgccccagtaagaatcggcaatggcggcgccgatcacgggcatcaggaagcttgcaccggcccaggaactgacggccgccgcgttggaagcactgtccccatggagaacgtcacaacactatattggacgccctggagtagagattactactatccttgcccagttcctgttcctgagctcccagcagtggcactaggctctgacctgaactagacgcctgggcctcccctggaagcggcggcgggctcctccgctcgaggccggcgtccatgccggcaggcggcagcgtccgcttccgctggcctct

SEQ ID NO: 11218 - DNA, 654 bp, Setaria italica
  misc_feature (522)..(522): n is a, c, g, or t
  Peptide Sequence Number=SeqID_77192
tttgtacgttgtgagttttttgagacacacaagctctttgcaatcccaaagtctgtaagatgggcctcgtaatctttgtcaaggaggatgttctttgattttacatcccgatgaattattcgcggactgcagtcatggtgaaggtaagcaaggccttgagctgcaccgagcgcaatccggaggcgactctcccagtcaagttttttctcttggatgaactttcatgtaaaacatcccaaaggctaccacttttccatataatcatagaagagaagattcccaacaggtgatagtgagtatccttgaaggctgactagattccggtgtttgatgctaccaacagtctcaagctcagtctcaaattccttcaggctccaatgatgtatttctcactcaagttttcagtcatcctcattatatcctcgtacgcatgaagggccatgttcatatgaagaattaccagcttggggggaccattgctcactgcaacagcatgcatatctggtttgcttacagtgacanctttgaaaacaggtggacggtgtggcctgcaaacagctactaagaatacaatacaaggaaggaaataaaactaaaagttaacctaaaccctaaactaaagtaaactaaaaatttaagtaacctaaaagttaa

SEQ ID NO: 11219 - DNA, 814 bp, Setaria italica
  misc_feature (802)..(814): n is a, c, g, or t
  Peptide Sequence Number=SeqID_77193
ggcttcggcttcgtcacgttcgcgagcgagcagccgagcgcgacgcagcagccatggcacgcaccgcagcccgagctcgacggccgccgtggcgtgcctcctcctcgcgctcgcctcctccgccgcggggaagggctcgcactcccctgccccggcgccggcggtggactgcatcgcggccgccgcgggcctggccgactgcctcaactacgtctccccggggagcacggagaagagcccgtccaagacctgctgcggggaggtcaagaccgccgtggccaaccccgccgtcgtcgactgcctctgctccctcgcgggcaacaagggctttcccatcgacatgaaacgcgtgctcgcgctccccggcgcctgcggctcgtccaacaccgtcttcagcaagtgccacatttccgcgggtcctcctgccgaagcacctggagcgtctaccgggggatcaccgagcggcggagcgaccgcgtccccgccgaaagccgcggcgagctctcggatgacggcaaccgccctcgtggccgccgtggtggcaccgctgctcgcctactgctacctgctctgagctgagggataccttccgcgcatgctgcgccgtcctggctgagtgagagtgaccgtccttttattgcgattatcccgtcttgctgcgcgccgtgattcagttacctctgttgttgagatgtactgctacttgagctgttttatggagtattcgactgacttcccgtgcttccctacaaaaaaaaaaaaactaaaaactactagagactgccaaggcacacagggagtnnnnnnnnnnnnn

SEQ ID NO: 11220 - DNA, 3580 bp, Setaria italica
  misc_feature (1)..(81): n is a, c, g, or t
  Peptide Sequence Number=SeqID_77194
nnnnnnnnnnnnnnnnnnnnnnnnnnnnnnnnnnnnnnnnnnnnnnnnnnnnnnnnnnnnnnnnnnnnnnnnnnnnnnnnntttttttttttcctaacaaaagcaacaggagctggtagttttcatgcagatggaggtcagtcaccctcccttggttcttccaacacggcaaaaggcacggaaaagaaaagatcatgcaggagcgagagagatgaacaatgcagcctcctcctaagttagaccaaggcaaaatggtaaaaagaagaggaagaagctctagagacacgactttttacagttaacaacaccctactgagtcacttgttaatcgatctcctgcattaccagtaacaagcccggcacatcttccacaaaatgtcagtcagctactacttcactatctgcaccctccaccgccgccgcccgaactcttcagacctcttccctactccgtgttctgcgagatggcctcgccgaacttgaggaacagctcggcgtccgaggtgctggtcgagttggcgcaggagagcgcgccggtgccccgcaggctgacgtactcgttgatgtagctcgggacggacgacggcgggggcaacggtgattggccggacggctgatgggcgggcggcttcggcggcgggtcggggttcaccaggcagtccaggacgcgcaccacctcgtgcatcgtcggccggtccgacggctgccgcttcgtgcagagcagcgcgagctggaacaccttcttcacctcgccgaggtccttgcaggtgtctccgatgtcggggtccacagtctccatgacctcattgctcgccgtcttcgataggatcaagtgatggagattgcactcgttgtccactggcttcttgccagtcagcagctccagcagaacaatgccatagctgtagacatcagacttttcgttgaggcgggaagtgcgagcgtactcaggatcgatgtagccaatagtgcccatgacataggttgacgtgtgagtttttgagacacacaagctctttgcaatcccaaagtctgtaagatgggcctcgtaatctttgtcaaggaggatgttctttgattttacatcccgatgaattattcgcggactgcagtcatggtgaaggtaagcaaggccttgagctgcaccgagcgcaatccggaggcgactctcccagtcaagttttttcttcttggatgaactttcatgtaaaacatcccaaaggctaccactttccatataatcatagaagagaagattcccaacaggtgatagtgagtatccttgaaggctgactagattccggtgtttgatgctaccaacagtctcaagctcagtctcaaattccttcaggctctgcgggtagtgggcatacaacttttttattgccactggtttgcagttcttcagaacacatttgtaaactgtacttgacgccccatacccaatgatgtatttctcactcaagttttcagtcatcctcattatatcctcgtacgcatgaagggccatgttcatatgaagaattaccagcttggggggaccattgctcactggtttgcttacagtgacatctttgaaaacaggtggacggtgtggcctgcaaacagctactaagatcatcaggaggataacaagtccacccacagcaatgccaagtatcgcagcccttgagattggtggtttctcttggtggttggtggaacgacacgaagaaccaagccaatatccacagagtccaggattacctaaaaagctgtcaggtgaaaaccgcgagaagttattgtcagtagggacaacaccagccaaattattgtatgatacatttaagatattgaggctgaagcagttcatcagtgaagagacatctccagtgatattgttattttccagttttaacaacatcagattttgcaacattccaagctcttgaggaatcaggccaccaaggtgattataggacaaatcaatctccatgacactcctcaagttaccaaactcagcagggatgaatccaagaaagccattcttgctcaagttaagtctcaatagatgctctaagctgccaatggctggtggaattggaccggtcatcatattgcaggataagtccaaggtgtccaaattgttgatccttgatagctcaataggaatagggccactaagaaaatttgatgacagatttaagtatgtcatgctttcaagtttccgcaacgaaagaggaatggtcccatttaacttgttgccataagcattgaagctattgagattcacgcatgaacttagattgtcagggatcggtccctcaaggttgttatttgcgaggttcaagtcaaataagcctgtaagcttcccgagctccggaggaatagacccagtaagttgattatcattcaattctaagtaatgaagcgttgacatatttcctagctcaggcggtattgaccctgttaacctattgccttgcatgtacagcttttcagtgtatgtcaagttgcccagtatcgatggtatagggccagacaattggttgtaactcagatctagaacagcaagagcctgcatcagaccaattactgatggaattggaccagtgaacttgttcccttgcaaggacagtgtggccacttgtaggaagccaatgttgaacgggattggcccggtaaactgattgtaagacaaatccaagacctgaaagctcgtacagtttccaatggtgtctggtatcaccccggtcaagctattgttcttcacatcaaagtaccaaaggccagtcagctggcacatatcaggagagaggcttccttctaaatgattgccacgcagtcccaagtactgaagaacctcattccaatagataagtcttggaatctccccagtcaatttgttttgagccaaatccaagatcttcaaattcgggagctgcgacagcgttgatgggattgcaccaaccagctggttgttcttcaatatcaagttctcgagctgcttcaactttgatatcgaaaatggtatgtcgccatccaagttattgaaagacaagtccagtgtcctgagcgacgaacaatcaccaatctcatcagggatctgcccggacagcccatttgacttcaaatcgatggaactgaggctcttgaggctgccgacagctggagagatctcgcccccaaggttgagtccggagaggttgagagcagcgacggcgaaggtgacgttgtcgcacacgacgccgcgccaagagcagtagtcatcgccggcccaatcatacagtacgttgccgacgttgcggaaggacttcttgatctccagcagcgtcgacccatcgtcggcgacggcgacggcgacgaggaggagggcgacgagagcacgcgaggtggccgcggccgtcgtcctcatggccactgagctgcggacaagcatcgggggagtgacattacagggagggaggacaacgacgatggagtgcgaagcgtgctgcagcaagcctgcctgccttaatgggggcggagctcttggttggtttcgtgggttctcgcgctcggctttgcgcacttgcgccgctgcctcagtgacagcgagtag

SEQ ID NO: 11221 - DNA, 318 bp, Setaria italica
  Peptide Sequence Number=SeqID_77195
ctccgccattggccatcgggctcggctccatcgaggtggatttggctttgctgcctgcctccctctaggtcccgccgtcgccggcgatcgattccttggtctcgccgtctcccgccccttcctctctccttggatagattatattactgtattatgaaaagaaaaaaatgtggtggtggggggagggaatggattggagaggaggaaggtacggacggacggactggagtggaccgtaccgtcgccttcccttcccttcccttcccacgacaagcaaagcagcgaagggccgacgcgaggaagacgacgacgacgatg

SEQ ID NO: 11222 - DNA, 471 bp, Setaria italica
  Peptide Sequence Number=SeqID_77196
tacaaaccaagtagaaccaaaaaccggaagtagcgccaaataagaaagaatttcaaccacataaagttcagcaccccataactgatgatgaagatctcaaacggggataactgctgccataatcggcttactacaaaggcattgtagtggaaaaagtgtgtcatgccttccataagaaggaaacttaagatccacctcagaccataccaagatatttgtgcaaatgaataatttttctgaggtacttctaactgagcagcaaatgcattatatccaacaataggaccagcaatgtagagtggagcatatgtcaagtagcataaatatgtgaggaatgtgtatctgtcaacactgagccctctctcctgcaaagcaaagtagcatgtcttgccagaataacaaacctggcatcttctcattttgatcacaagaaacatatgcaaaaaagtcatgtctgttattttgtttatt

SEQ ID NO: 11223 - DNA, 542 bp, Setaria italica
  misc_feature (528)..(528): n is a, c, g, or t
  misc_feature (530)..(530): n is a, c, g, or t
  Peptide Sequence Number=SeqID_77197
gtgccgggcgatgcgcaaggccggcaagagcgtggagcaggccacgtacggcggcgttgggcacgcgttccaggtgctccacaactgccacctgtcccagccgcggacgcaggagatgctcgcgcacatcaaggccttcgtctgcgccaggtagcagcagcagcagcagccaaccgtcgcccccgttcgcccgtcgctaacactcgccgtgttaatccacccgcctcctaatccaatcgaagagtagatgccgtgtaagcaaccttgtgaagtagtagtagtagtaatactccagtgtatgtgactttgaactacgtgtactccagttcagctgaaaagcgtccaatgcccaactccgattgttgtagcggtgtcggaaagcaaaaggcttggcagaaaccaaacaaacagaaaaacagtgtacgacgtggtcgctccatggatatatgaatatgattgctgtgcatttcttattgacacaagcaaaaaaaaaccaaaaaaaacaaaaaaacaaaaaaacaaacaganancacgacgacaca

SEQ ID NO: 11224 - DNA, 501 bp, Setaria italica
  Peptide Sequence Number=SeqID_77198
tttttttttttactttgaacggctgcattggaatttcttcagcgtccacgatcatttacagaacagggtacaaaacacaggcagccaaggcaactgcggaaacggcatgtacaccaacatattcctcttgctacatcgataaaaacaccttcaggagcatattcctcttgccaagcactacacacaagggtacactgacagtctaggctacacatacgcatcgcgataagacgccttcaggtatgaactgagcggcaggaaaactggcaattggcagtctagggccaagtacaagtagatgggaggaaccactaagaacccggcaagctggtacagaatctaaaaatccagctgaaggtgatgatgccacagaagtctacaatccggcagagaccaatccatgcagtgtaatgatcccacaaacgacattgttgtcgtcgacaacaggcaagaactgcacaggtgaaggaggtgattccatcttctccatggcttcgactg

SEQ ID NO: 11225 - DNA, 335 bp, Setaria italica
  misc_feature (259)..(259): n is a, c, g, or t
  Peptide Sequence Number=SeqID_77199
caattgccatggcttgaatgagagccatgtcgtttgcatgttcatctcttactttgaccgtctgagatattaacaagaagtgagcttatcatagactcgtagttccacaaaagcattggacagataatatataagtgccagtgattgcagtacctccttaagaattttctcaaatatttccccaactttcataactatctcctggggaacttgctgaccatttttatcaaatagggcatagctgaaaaaaaaacccccngaaatgtaagagaagtttgcccaccaacttatgagagactagacacaatgttcattatggattatgtatacctcta

SEQ ID NO: 11226 - DNA, 243 bp, Setaria italica
  Peptide Sequence Number=SeqID_77200
cttgttctcaatgccaacgccaagatcagcgattgctgaaagtttctctcttggtagctcaggttcaaacttgatgatatttgccttaagtacaccgagagggacagttattatggcagcatctgcaacaaaacttgcgccatcttccacacaaacaataaccttattataacgctgaatgatctttgtgaccctgggcaacacataaaatagatattataagctaattaattggggttcgat

SEQ ID NO: 11227 - DNA, 330 bp, Setaria italica
  Peptide Sequence Number=SeqID_77201
tccaaaagaaatagtcagtgtgcacacggccaccaagtcggtccctcgactctaagagcgtgaccttaaatgaagcatttgacaaagcacgagcggctgcaatgcctgaaatcccgccccctattacaattacagaagggggagaagagttttgcccatcgatgtgcttgaaaaaacctgatggcaaaaatgaaaggtatccagtgaatgagagccatcaagtttatagaaacttcacatattaaagccaataaagcattaaaactgtaactagtatcacatgtttctcacccatctacctgaataagtatatagcaaacgctccattca

SEQ ID NO: 11228 - DNA, 285 bp, Setaria italica
  Peptide Sequence Number=SeqID_77202
gccggtggcactgtagcccacggcagccaagacgcagcacgcagagacgacggccagccaccaccgccaccagcgagcaccgccgctcctccggctggcggcgctggcccaccgccgccggacgcaggcggcgaccagcgcggaggcgtacgcgacgaggagcgccgcattgacgccagtctatgagggtccctctgcacgcacggcgacgcgacggtgacccccgcgcaagcccacgagcctgctaagaacggccatggccggatctactttaccggccattgt

SEQ ID NO: 11229 - DNA, 282 bp, Setaria italica
  Peptide Sequence Number=SeqID_77203
tagctggcctagcttctccgccacagctcccacgggccacggcgcagctaccgcacgcgggcgacgaaaagccaagccaccagcagagggtggagggcgagcaaccgaaccgccccttcccctctctcttcgcccccggatctcgcatgcgcggtggcggccgccgccgcgcgcgacgggggagggcgaggagccagtagggggcgggcccctgagtggccgacggcggcgcgatgaggggagcgcagctggtggggaggtgggtggagtcctacacgggga

SEQ ID NO: 11230 - DNA, 331 bp, Setaria italica
  Peptide Sequence Number=SeqID_77204
cgctcgtagtcgtggcctcgtgggcgcgtccatcccttcctgcgcacgcgtgcacctccccgcctccttcctccgctccccgccggcgatgtcggtgcccccggccggcaaccgccaggtctcccttcgggggtcgagcgcgagggagatcacccgcgacgcgctcctgcagaaggtctccgaggagcgccagctccgaagccacctccgccgcgccgccgcggcagccctctccatccagcgaatatggagaaggtactatgttataagaatggtttcagagcagctccatgaagactggagactattaatgaatgagcctaacatcgta

SEQ ID NO: 11231 - DNA, 394 bp, Setaria italica
  Peptide Sequence Number=SeqID_77205
cttcgtcctccctcccttccccagttcagatctactccactgccacctcctccctccctcccgagccgcctcccatggcgtctcccaccggcaaccctaaccctaaccccaatccaccattcgagctcgggaagctcttcaggccaccgaaccccatgcccaccgccaccgccaccgccgccaccatcttccccggcgctgccggaggccccgcgggcccgccgccgccgtccggtccctactcctaccctccggtgaccccgcccttccaccgcggaccctacctgcactacccgcaggacccccacgccatgccccgccccgtcgtctccttccccatgccaaacccaaacctcaaccccaacccgaacgctaaccccaacgccgccgtccc

SEQ ID NO: 11232 - DNA, 327 bp, Setaria italica
  Peptide Sequence Number=SeqID_77206
tttggcttctcttctagcatccatgccaaaagaggagctggaagaccaggtctttgatgttcttttgctatgggctggtccttttactggaaatcctgaatcgtaccttcgtcatatacaggattgggcatcagaactgcgggttctgtcagttgcaatcgaggcgcttactgccttcataagaagttttgtttatccaactatcacaactgttgatggtggaatcttgcttaatcccgtactggcctacctcggtggagctctgtcgctcatatcttcgttgagatcgaaacactgcccgatgtaaagtctgcactggatctattt

SEQ ID NO: 11233 - DNA, 274 bp, Setaria italica
  Peptide Sequence Number=SeqID_77207
ggggagggctgggaagtggtgggaaggagtggacttggaatttttttctttggatattgtagatatataagtagttggtaataatttattacaaaactctctccatcacctaatgaatggtgctctgttggatgcagatcattgaactgccctctcacaagttcttcatcggcgcacaattccatcctgaatttaagtcgagaccaggaaaaccatctccacttttcttaggtaatgcaatcctactttgcaaaaaaaaccgctattctcgaca

SEQ ID NO: 11234 - DNA, 371 bp, Setaria italica
  Peptide Sequence Number=SeqID_77208
ccaggttgtgccacatattacagatgaaatacaagattggattgaacgcgttgcaatgaatccagtcgatggcaaagaaggacatcctgatgtttgtgtcattgaacttggcggcactataggggacaaaatcttttcgccgcataacgacagtggcattcttgatgcaggggacattgagtcaatgcctttcattgaagcattaggtcaattctcatatcgtgttggacctggaaacttctgtttggttcatgtcagtcttgttcctgttctgaatgtagttggtgaacagaaaactaagcctacacaacatagtgttcgagggcttagaggacttgggttggcaccggatgttttagcatgtcgcagta

SEQ ID NO: 11235 - DNA, 495 bp, Setaria italica
  Peptide Sequence Number=SeqID_77209
acaacaatataaccaacaggaaaaaatactatcaggctgtcattaacaaagaaagaagaggtgactacctgggaaaaaaccgtccaggttgtgccacatattacagatgaaatacaagattggattgaacgcgttgcaatgaatccagtcgatggcaaagaaggacatcctgatgtttgtgtcattgaacttggcggcactataggggacattgagtcaatgcctttcattgaagcattaggtcaattctcatatcgtgttggacctggaaacttctgtttggttcatgtcagtcttgttcctgttctgaatgtagttggtgaacaggtaagttttactactatatgaaaggtgtgagatgcttgcatttttgttagcgttgatgtcagattgtagtattgtactatgtagcaaaataattatgttccaaaagatgtagaaagtttaagcttacgacttagcaaatttaacttatgcaaaaaactttaatagaca

SEQ ID NO: 11236 - DNA, 492 bp, Setaria italica
  Peptide Sequence Number=SeqID_77210
tttggatattgtagatatataagtagttggaaaaatttatttcaaaactctctccatcacctaatgaatggtgctctgttggatgcagatcattgaactgccctctcacaagttcttcatcggcgcacaattccatcctgaatttaagtcgagaccaggaaaaccatctccacttttcttagggctgatagcagcggcatctgggcaactagaacctttgcttcaacgcagctgcaacaatacgacaaagccaccgactaaagtcccgaaacggaaactgtacccaactgtgcctgtgaagaatccactaaacagcttggtaaatgggtactacccaaatggcactggcattcacacctagaagcacaatactaagcgagggcttgattgatatttgctcctacggttttgcttgtactctttttcatcttcttttttggtttgcatttatctctgatcaactgagaaggctaggggccgcttggtttgctt

SEQ ID NO: 11237 - DNA, 2658 bp, Setaria italica
  misc_feature (2585)..(2658): n is a, c, g, or t
  Peptide Sequence Number=SeqID_77211
cttcgaactccgctgagcgcctgagcccgcctccagctcccgccccttggcaccacactagcctagtgcctagctcgcccgctcctccctccctgtcgtgcgcaggagcagagccgaaaaaacccgtcagctctttgggggcgccgaggcggcaagaacggccatgaagtacgtgctggtgaccggaggggtggtgagcggcctcggcaagggcgtgacggccagcagcatcggcgtcgtgctcaagtcctgcggcctccgcgtcaccaccatcaagatcgacccctacctcaacactgatgctggaaccatgtctccatttgagcatggcgaggtctttgttttggatgatggtggagaggtggacctggaccttggaaactatgaacgttttctggatatcaaattgacccgtgacaacaatataaccacaggaaaaatctatcaggctgtcattaacaaagaaagaagaggtgactacctgggaaaaaccgtccaggttgtgccacatattacagatgaaatacaagattggattgaacgcgttgcaatgaatccagtcgatggcaaagaaggacatcctgatgtttgtgtcattgaacttggcggcactataggggacattgagtcaatgcctttcattgaagcattaggtcaattctcatatcgtgttggacctggaaacttctgtttggttcatgtcagtcttgttcctgttctgaatgtagttggtgaacagaaaactaagcctacacaacatagtgttcgagggcttagaggacttgggttggcaccggatgttttagcatgtcgcagtactgagccactggaagaacatgttaaagtcaagctctcacaattttgccatgttccaatctcaaatattgtgaacctccatgacgtgacaaacatttggcacatccctttgttgctaagggaccagaaggcccatgaagctattctgaaagttttagaacttcagtatgctggaaaggtacctagggaacctaagttggcggagtggaccgaaagggccactaaatttgacaaattgaagactccggtcaatattgccatggttggaaaatatactggcctatcagattcctacctgtctgttctaaaggctcttctgcatgcatcagttgctatggaaagaaagcttgtagtcgactgggttccttcatgtgatctggaagattcttcagctagagagacccctgaagcccacaaaaaagcatggaaactgctgaagggtgcggatggtatactcgttcctggaggcttcggagataggggagttcagggcaaaattcttgctgcaaaatatgcacgtgaaaacaacgttccttatctcggcatttgcttaggaatgcaaattgcagtgattgagtttgcccgttcagtcatgaaattacgtggtgcaaatagcacagaatttgacccagctgcaacatcgccctgtgtcattttcatgccagagggctcaaaaacccatatgggggccacaatgagacttggatcgaggagaacatatttccaagtcactggcagtaaatctgcaaagctgtatggcaatgccacctctgtagacgaaaggcatcgccacagatacgaggtgaaccctgatatggtcccagactttgagagggccgggcttcaattcgtgggcaaggatgaaagtggaacacggatggagatcattgaactgccctctcacaagttcttcatcggcgcacaattccatcctgaatttaagtcgagaccaggaaaaccatctccacttttcttagggctgatagcagcggcatctgggcaactagaacctttgcttcaacgcagctgcaacaatacgacaaagccaccgactaaagtcccgaaacggaaactgtacccaactgtgcctgtgaagaatccactaaacagcttggtaaatgggtactacccaaatggcactggcattcacacctagaagcacaatactaagcgagggcttgattgatatttgctcctacggttttgcttgtactcttttttcatcttcttttttggtttgcatttatctctgatcaactgagaaggctaggggccgcttggtttgcttgctggctagcctagtctctccttaccaagcaaggcaaggctcgctagcggaggagagccattccagctcacccgggcaagcaagaaaaaatcttgctttcatagaaatcgaggcaactgtcaaactatccaaacacatgagacgctgcgctccttgcctggctaggcgaggcaaggtctgtcaaaagatccaaatgtgcccttaaagattcagcaagcccggccccagctccagcgacacacggttccgacattttaacgaggaacgtcctccggtccgttgaagcaggactagctatagggttgggagttctagtgtgtgtgtgtgtgtgtgtgatgtttcctttttttttttggcctagaattatggctggaagtgtcttcgtagctttactagagcccggaatctctccctcctatttgtacaatgtacattatggaagaacttatctaaggactgaatatacaaatgcttggaaccnnnnnnnnnnnnnnnnnnnnnnnnnnnnnnnnnnnnnnnnnnnnnnnnnnnnnnnnnnnnnnnnnnnnnnnnnn

SEQ ID NO: 11238 - DNA, 1140 bp, Setaria italica
  Peptide Sequence Number=SeqID_77212
tggcgttggactcttcaaggccaatcagtcatactcccacttatagccggactccaatcaatgaagaaaccaagggcaaaagatccaaataagagggacatgacaatagatgagaagcgtaagcttagcgagaacctccagaatttgcctccggagaaacttgatgctgttgtacaagtcattaagaacaagaatctatcagttaggcatcatgaggatgagattgaggttgaaattgatagcatggatgctgagacactttgggagcttgacaggtttgtagctaactacaagaagaacctgagcaagcaaaagagaaaggctgagcgtgcaatgcttgccagacaagatgctgaattgcgtgcacagcactttgtacaacaaccacaaccaactcagttcacccaagaacctaatgttggtgaaaaatctccgaagcaaattgagaaagattctattgcaggcgagcaacaggcaatgtctgcgctagagcaaaatggtgagaatagagaaaatgcgagtagttcaagcaattcaagcagctccagcagtgattcaggatcgtcttctagtgactctgatagtgatagctcctcttcagatggatccgatgctggcaaatcttcttgaggtataaggttcagaggttgctcgagcagacagtaactgtctaattagcatttgacatgacaatggctccgtaaggttgtacatgtttagaaaaaccccctgtagtttaagtagctttgtatgtggattcacccgctgaaggcagtaacttgtaggttccagggtataccgcctaacaagactgggcttgttgctgacactcctttgtcactgtacaccgttgttgctaggagccccctggctggctcagtagtctgtacattagcggcatcttagttttgtttagctgtgttgattgaagtatgtaggaaggtagttgctgtcttgtgcagaatagcaggtaatgctcagctccaagtcattttgattgacgttgctgtgaattcgtttgttgatgcctgctgacagagtttgttggtgcagctggtgttagcatcatgattttattttgcgggtggtgttagcatcacgttcctgtttcaaatgttacggagtggggttcttttttcc

SEQ ID NO: 11239 - DNA, 2206 bp, Setaria italica
  misc_feature (2165)..(2206): n is a, c, g, or t
  Peptide Sequence Number=SeqID_77213
gccgcgcggaggccgggggaagctgctgcgcggcccgatccggtcgcggctgcctcgaccctcgccccagcgaggcctgggggacgcggtgccgcttccggggacccctcgtcggggaaggaccgggatagcagcggcggcggcggcgttcccaacggccacggcgacgaccgggcggctgagaaggcacggaagcgcagggtgaggagcgagctgcggcggcggctggcgggggagctcgaccaggtgcgcgtgctctccaggcgcctcaaggaggctgccgagaccctggcgcagcaggaggcttccgcgcccgcgtctttgcccctggtggtggtgccgcagcaccaggtggtggacgttgggtatccgcagcagccgcagttctccgccggtgatatggtgacacacatgtcagcgcaactcactcctgtggttccacctgtccgctcgctgctcccgcgcagaccgctaaccgtttcggtcgttcataatgaagcctttgagaaggagaaacggacgccaaaggccaatcaattgtaccagaactccgagtttttgctcgctaaggataggatcccggcctcagattcacatgggcgcaagaaatccaagcaccacaagaagaagcacaggtcccaagaatctcgtggcgcagactttgatgctgagcggaggttgtactctcatgcattcaagaagtcctcatctcttctgagccgactaatgaagcacaagtttgggtgggtgttcaacaagcctgtcgatccagttgctcttggtttgcatgactatttcacaattattaagcacccgatggatcttggcacgataagggcacggctcagccatgggcagtacaggaacccaaaggagttcgcggacgatgtgcggctcactttccataatgcaatgacatataacccgaagggacaggatgtgcacttcatggcagagcagttgtcaggaatctttgaggcacagtggcctgagattgaggctgaggttaactatctcgcatcgtgtcctccattgccaaagaagtttccacctccaccgattgacttgcgctacctagagaggtcagattccatgagacgccagatggcgttggactcttcaaggccaatcagtcatactcccacatattcccggactccatcgatgaagaaaccaagggcaaaggatccaaataagagggacatgacaatagatgagaagcgtaagcttagcgagaacctccagaatttgcctccagagaagcttgacgccgttgtacaagtcattaagaataagaatctatcagtcaggcagcatgatgatgagattgaggttgaaattgatagcatggatgctgagacactttgggagcttgacaggtttgtggctaactacaagaagaacctgagtaagcaaaagagaaaggctgagcgtgcaatgcttgccagacaagatgcagagttgcgtgcacagcactctatacagcaaccgcaacaactgcaacaaccgcaaccaacccaagtcacccaagaacccaatgttggtgaaaaatctccgaagcaaatggagaaagattcgacggcaggcgagcaactggcagcgtctgtgccagagcaaaatgatgagaatagacaaaacgcgagtagttcaagcaattcaagcagctccagcagtgattcaggatcatcttctagtgactcagacagtgatagctcctcttcagatggatctgatgctggcaattcttcttgagatataggttcagaagttggagtagacagtaactgtctaattgtatttgacatgacaatggctccgtaagattgtacatgtttaccttgtctggcttaggaaaaccccctgtattttaagtagcattgtatctggattcacccgctgaaggcagtaacttgtaggttccggggtgtaccgcctaataagactgggcttgttgctgacactccttgtctctgtacacagtgttgttgctaggagccccctggttggctcagtagactgtacattaatcgtgtttagctgtgtcgattgcagtatgtaggattgtgattgctgtatgcattgacaagccattgttttcttcctttgtgaactggaaaaaaaaagatgacaagccatattgccaccctgttcgcctttttcgaaannnnnnnnnnnnnnnnnnnnnnnnnnnnnnnnnnnnnnnnnn

SEQ ID NO: 11240 - DNA, 563 bp, Setaria italica
  Peptide Sequence Number=SeqID_77214
tttacttggggtcgtaaagatggattggttgcaggtgcagatcctgtaactggtggtttgtgatctgggacagtttgaccagtggattcctttggaggagatgcatgtggaacatgatgcttcttgagatttgcaggaggggaaatatttgctgggggtgctgtgtttccattcttatgctcacttcttggagcctctgcctgctgtcgcggtgcttgtactacaggtgatgcaatcggaggatttacatgtggaactgaagcggaaggagggatagcaggaaaacttcctgaaggtgggtatggcggaacgtcatttgctggagggggcaatgcaggtggttaatgaggtgggactgacccaaccggcctatttggttgattgttcacagatggaggtggcacgactggtggaataggcttgagggcaacggacggagcaggagcctgaacagaaggtagcagtgcaggtgccccaggaagaattggagtgggattttcagctgcagcttgtggaggagctaccggtgcaggaacctcaatccgtgggattacaaggtgcaa

SEQ ID NO: 11241 - DNA, 422 bp, Setaria italica
  Peptide Sequence Number=SeqID_77215
tcgtcccttccttcgtcggtcgcgggggcgccgacgcgtccgtccacgagtacgccggcggcggcttcgcgccccgggccaactccttcttcttccacggagggagcgaggggctctacgcctccgacccgtcctccaactcctccgcatccttcatcaggtttgacactgtcattttccgccggaccctggagtcagcatctaggcatgaggagatgcagcaaaagacaggattggtggaggctataattgttgagatacaggacagggacaaaattggaggttcataccttcattctgatgcaatatgctgcacccctgagcttgataaggagaaatcttgtagagtaggtgaagtgatcatacgtccaaatcctgataatcctgaatggcctaaaagactccagacattctttgagggt

SEQ ID NO: 11242 - DNA, 1825 bp, Setaria italica
  Peptide Sequence Number=SeqID_77216
taaaggaaaaggaaactaaataaaattaagttaagaagaataacaaggaacaagggacaaaattggaggttcatatcttcattctgatgcaatatgctgcacccctgagcttgataaggagaaatcttgtagagtaggtgaagtgatcatacgtccaaatcctgataatcctgaatggcctaaaagactccagacattctttgagggtaaaaatgaagaaaccactatgttacctcagttggtgtcaataaacaaaacagggatgtattacctctattttatgttctgtgaccctcaacttaagggattgaagattacaggcaggactgtttggagaaatccacagggttatctccctggtaaaatggctccaatgatgacattttatggtttcatgtcacttgcatatcttgcacttggacttctatggttcattcagttcgtgcggtgctggaaggacattttgcagctgcactaccatataacagctgtcattgcgcttggcatgtgtgaaatggctttctggtattttgagtatgctaactttaattcaactggaaccagacctatgggcattaccttgtgggcagttacatttactgctgtgaagaagactgtatctcggcttcttctattggtagtttcaatgggctacggcattgttctacccactttgggaggaataacatcaagagttgctgctcttggtttcatctattttgttgcttcagaagctcttgaacttgttgaaaatctgggaaatatcaatgacttctctggaaagacaaggttattcctagtgttgcctgttgcaatacttgatgctacctttatcatctggatattttcatccctctctagaacgttagagaagctacagctgcggagaagcatggcgaaacttgaattgtatcgaaagtttacaaattctctggctgtgtcagtgcttatctcgatcgcttggattggctatgagctatatttcaacgcaactgatccattgagtgaactttggcaacgggcttggatcatccctgccttttggaatgtcctttcttatgccctccttgccatcatatgcatcctttggtctccatctcgtaatccagcaggatttgcatattcagaggatgcaggcgagggggttgatgaggaagggctctctctcgtaggcagtgcaatgaaaggaactggagatatggtaaacatgcatatctttccggaggataaacgtgcatgataagttttggccccaaatgcagctgtactcctggcggaatgctatgtgaagtaccgtttcctctggattcacgactagctgacatgttcaaaagcttgcttaagattccagatgtacaggtggtaacttgttttgaacgatttgaccaagagattttacttgcccagttgtgactattcaatacaaaaggttggcgtaataaactatatcagtttgagagcatacgagggttgtctttgtaatccttaatggtggtgtagactcgtagctggtagaaatgtagcgttgccagagctgaaatgcatcgcgagttagggcctgtttgggactgctccgctccaaaaaaaatagctccactccaccaactccaccttttgtcagatccactccaccaactccagaaaaatagggagctgggtacctgtttggctaccggatccaaattcagctccaaaaattataggaacaagtgggaatagtcgtttttgcccaaaggttttgctctgtgctacagttccgcgctacagtaccatgctacagtgctgcgcccaccgccaaactacggccggccgcgcccaaggcacg

SEQ ID NO: 11243 - DNA, 452 bp, Setaria italica
  Peptide Sequence Number=SeqID_77217
cgcggttcgagctccaggaggacccctccttctggaaggacaacaacgtgcaggttgtgatccgtatccggccgctcagcggcagcgagatatcgctgcaggggcagaagaggtgcgtccggcaggatagtagccagagccttacgtggactggacatcctgagtctcggttcacgtttgatcacgtcgcggacgagcatgtcacgcaggagaatatgttcaaggttgctggagtgcccagggtggaaaactgcatttctggctacaacagctgcatgtttgcttatgggcagactggaagtggaaagacacatacaatgcttggtgatatagaaaatgggacacggaggaacaatgcgaattgtggtatgacgcctcgagtgttcgagcatctctttgctagaatccaaaaggaaaaggaaataaggagagatgaaaagctcaggtttaca

SEQ ID NO: 11244 - DNA, 706 bp, Setaria italica
  Peptide Sequence Number=SeqID_77218
ctgtgtccgcgggcatttcgtcgagtacctatcggtggttgcttaagtgctccaatctgcaggttgtgatccgtatccggccgctcagcggcagcgagatatcgctgcaggggcagaagaggtgcgtccggcaggatagtagccagagccttacgtggactggacatcctgagtctcggttcacgtttgatcacgtcgcggacgagcatgtcacgcaggtcctcttgacactctcgattcccaattattcgcatctatttgcttcttctgacttatttatttgtgcaaaatgtataactgatcctcatttggtgctcttcaggagaatatgttcaaggttgctggagtgccaatggtggagaattgcatttctggctacaacagctgcatgtttgcttatgggcaggttagcaacacgtttaacttgatgctgcagattctcaagttttttgggtcccacaggcacaggttgtgcataattctctgtttatctttcaacgctttgtatctgcttttgctagactggaagtggaaaagacacatacaatgcttggtgatatagaaaatgggacacggaggaacaatgcgaattgtggtatgacgcctcgagtgttcgagcatctctttgctagaatccaaaaggcaagtctctacgatctgttgctttttggatgcctcattttggcagacatgactagtgcgactg

SEQ ID NO: 11245 - DNA, 2975 bp, Setaria italica
  Peptide Sequence Number=SeqID_77219
aacaaataactaggactaactagaaggggaattttttaatactagatttggtatttggtggagaatgatagaaagataactccacgagattacctggaaattgcactgaggcctcttgaaggcagaggaaaggacatatcttcaaagaatgagatccgtgaatccatccgttctctctttcctgatagagaatgtttcacattggtgcgcccattgaacaatgaaaatgaactccagcgtcttgatcaaattcctctagagaaattacggactgaatttcaagctggactggacgaattaacaaggtttatttttgagaggacaaggcctaagcaagttgctggtacaatcatgacgggaccagtactagctggcgttacacagtccttcctggatgcactaaataatggagctgtgcctaccatatcatcctcttggcagagcgtagaagaagcagaatgccgcagagcatatgattctgctgcggagatctacatgtcatctttcggccacagcagattagctgaagaagatgctttaagggatgcacatgaagctgctttaagaaaggcacttgatgcatacaacgctgctgctgttgggactggtatttcacgtgctcactatgagaaagttcttaacaacttctgcagaaaggcatttcaggattacaaaaagaatgctttcttagaggctgacaagcagtgctcaaacgctatacaaaacatggaaaagaagatccgagcggcatgcactgctcctggagtcaaagtttctgctgtgattcaggtcctggaagcttcacttgctgagtatgaaacttcttgtactgccccagccaaatggagaatgcttgcagcttttttaagacaatgtttggaagggcctatattggacctctgtttgaagttaataaatgaagctgaatcagagaagacttcttttgctctaagatgtcggtcaaatgaagaccaactggaacttttaaagaagcaacttgaagctaatgaggcacacaaatctgaatatcttaagcgctatgaaactgcgataagtgaaaaacagagaacatcttctgatcttagtggacatcttgctaacttgaggaccaagtgtagcacattagaagaacgctgtgtaagcatatctaaagaactcgatcatgtccgacatgaatgcactgattggagggcaaagtatgagcaatcttcttctcagcagaacgctgagcaagatagatatgtcgctcagttggcatctcttgagactagatacagctccgcagagggaaagttgggagcagctcgtgaacaagcagcatctgctcaagaggaggctgtggaatggaagaagaaatatgaaactgcttctctgcaggctaaaactgcattggagagattagcatcagtgcaagaacaaattaacaagattgcacaagaaagagaaggtgctataagggcagaatttgccacacatttggaagaaaaggaagaggaaataaggaagttagttgcaaagattagacaagcggagagtgaagaaagtgtgttgactgagcgtttgcaggttgcagaatcaaaaacacagggccataacaaggaaactgcaggcttgaaggatgaaatcaaagaactaatgagcaaattagaattccttagagatagagcagtatcatatgaaaagcaagctagaatgcttgaacaagaaaaaaagcatcttgaggagaagtttgtatctgaatgtaagaaatatgacgaggcagaacaaagatacaagtctgcagaaagggatgcaaagaaagctaccgagttggctgatgttgctcgagcagaggctattgcatcccagaaagagaaggatgaggcacaacggttatcgatggaaaaggtagcagttattgagagaattcagagacaggttgacagactagagcaggaaaaagttaatctactaggtgaagttcagaggatgcgtaattctgaatctgatgcctggtccaaggttactttgcttgagagtagggttgctgagagggagaaagaaatggatgatttactgagccgtagcaatgaacaaaggtccagtactgtccatgtccttgagagtctgttggcaacagaacgtgcagctagagctgaagccaataagcgtgcagaggcgttatctctgcagctacaatccacccaaggcaaacttgatatactccatcaggagctgacatctatccgtcttgttgaaactgcgcttgatagcaagctccggacaactactcgtggcaaaaggctgcgagataatgaaataggcgcggactctgttcaagatatggacattgatcctccggagaggagcagaaaaagaaccaaaagcaacacaagcccgttaaaggctctctatgaggatggtggttctgttcatatgggagaagacagcgtcacagttagtacggatacgaagggtggcaatccagatggttacaaaaagttcaccattgcaaaactgaaagaggagctaaccaagcatgggtttggtgcccagttgctagagctaaagaatcctaccaagaaggatatactcgcactctataagaagcatgttttgtgcgagtaaattgccttgtgaattcattcggtttgaagtgtacatttatccaaactagtgtggggattagtatagagtagcctgtctcctagaagtctatatagtaaacaaactgatggctaattgtttccagggtattcggttctgctgattggtttgtttttggtggtgcagttgcgtcgattggttatggttactggtttgtgcctaggcttgtgtatttggtagcttgctgattttgttgggttatgacatcaggcttgtaaattggtgctagcgtgagaagctgggtcataaatgaccccaaaaccaacgctgaatctttgtcaggtttgtcaaacgcctggtggatgctttgtttgcgtggtatgtggagt

SEQ ID NO: 11246 - DNA, 351 bp, Setaria italica
  Peptide Sequence Number=SeqID_77220
ctggtgacctcggcaaggacgaggaggacgagcagcgcgtaggcgccgtggcggacgatgtagcggcaggtgaggaagacgaagagcgtggcgaggtggtgcgcgatgaagaggacgtctccgggcagaaaggcgaggtagtggagcaggtccatggtgaagtaggcgacgctgtagtcgaggacgtgctcctgaaggcgctcgttgggcgcggcgaaggagcgggaccccgcgggcagcgcgaggatagccccggccgccgcgagcgcggcgggggtcccgtggaagagcgagatgagacagctggcgccgtccagccgctgccgtggcgcccaccgccggaacacgacg

SEQ ID NO: 11247 - DNA, 460 bp, Setaria italica
  Peptide Sequence Number=SeqID_77221
ttttttttatttgtcaaactgaggataattaagggaagaccaagcgtgaaactgatacatacaactgatggacgtaattctaatgagaaatgaaaagaaaatgactccttatgatcacaactgttaacccgcacatgtcccgcgaagcatacgtcaatttcagtagctctgtgaatcagtaccacagatttcttgtccaaacaacagccacaacagtgcgaatgcaattctaaggcactccttttcatccagcaattccaacagtaaatttgcttttcttcaaatgatgaaatctgttccattcagtctttaacagaacctgcttaagcacaaatacaagaaataccatcatcaacatcaagagaagaaggtttgtgataaaattcggttaagtttcaaatccaaaacaatgcgagcagtaggaatgtatgataatgttgaaggagcagataggaaaagt

SEQ ID NO: 11248 - DNA, 435 bp, Setaria italica
  misc_feature (102)..(102): n is a, c, g, or t
  Peptide Sequence Number=SeqID_77222
ggtcgactgcacacacgtttcagtcattaaaacggtttacatttcatgacaagaaattagcatcatctagattgctgcagctcttctcatcacttcctcacntaaaatggaagtaaaccttccaatttgcagtcataacatccttttaggaaactttgttcttgcttcataaggtttcccttagcagtaatttatgtttttcatcattttgttttggccctagtctttacgagatattctggagtttttccaagtaaagtaaccttcattcaacattcatagttttgtgctactatcatatcagttatctactcaactgtcacatatatctagattccataaaatctgtttgcgtagtacatcttgcaacgaaatgatatttttgggatctataaggaaaacaaagcaagaaaaccaaacatcaacaaaatccta

SEQ ID NO: 11249 - DNA, 355 bp, Setaria italica
  Peptide Sequence Number=SeqID_77223
atatccctccttctggcatttgaccctcaaggttgttgaaggacaagttcagaagcttcaaagaattgaaggattgaaaaaaagtttggaatttgtccactcaagttatttcgagagaggtcaatctcagcaacacctcccaaattgatgaatgactcaggaattctgccatcaagaaagttaccctccaggtgaagggactctaagcggacacacgcacccagactaactggaatttgcccagaaagatggttgttggaaaaatttagtaggccaatattgatcaagccaccaatatcctgtggaatttgtccagacagctgattgtgggacaaatcgaaaccttctgttaagg

SEQ ID NO: 11250 - DNA, 306 bp, Setaria italica
  Peptide Sequence Number=SeqID_77224
gcactcgctggcttgctgcctctccggcctcctcgcttcctcgccggccatggccgccgccgccgtagccgctgccacgttccgcaccctgcaccagcccgcgtctagtggcgtccccatcccgctccccagcgtccggttccagtgccttcagcgccaccgcgtcggcctctgcctcttcgcgtccccacgcggccgccccgtcctgctcccaccctccgccgcggccgccggcgaggcgttctcgtctgacggagaggagttcgacggggaagaggatgagtactttgatgagggagagagcga

SEQ ID NO: 11251 - DNA, 253 bp, Setaria italica
  Peptide Sequence Number=SeqID_77225
tctatcaaagttaggtaaggctcgtatgacctttcacaaaattcagggtactttcaagtttcaaccaaagctttagcagtacagaggactggtccatctcttccgaattactgaatggtgtaggcggttcaacacttctgtacgaacaagatatcctcgaacctcatgcattgtaacttcacaaaattaatcttatcgtttcagtgaatacagattagtgtaaacaaacgttagcatcaaattttggccgtga

SEQ ID NO: 11252 - DNA, 626 bp, Setaria italica
  Peptide Sequence Number=SeqID_77226
aaaagtcaatcatcagctattcgacagcaagatcaaggttattgtacacagcagctgattcaaaatcaacgccacacacatctcctatgatcattttagctggattgaacccgcagttgcttctttggctgatccaagcactgacattaccagcctgaatcctgcatatgcaaagcataatgctgcccacgtctgacaggtcatggttcatctaatttcaagtcaaaatgattacagattatgtgattaaagcttattatgacacctgcctaccatcctccaacaggaacagcatggcatcggctgcaaggctccttgacggtcaacttaactctagcgggaactttatcctcgatgtgggttttgatagcctcaagcgctctaggggcttccctcagaacactcttgtccctgaattggcacctgccataatatttgtcggaacacctaaaaccataaagggtgtccaatgtaagacactcgagtggcactgcgttcttgaggatatgacatgttagttcaactaggctcttcgcagagctgaaccttgtgatcttcacattcttgagggagcaggagtggggttctgccagctgcctcagaggtgaggaatgtccaagaaccga

SEQ ID NO: 11253 - DNA, 642 bp, Setaria italica
  Peptide Sequence Number=SeqID_77227
cgtcggcgtcggcggcaacaagctgctggccgggtacctggcgcacgagttcctgcggtgcggcacgctcctcggcgagcggaggctcgagccgctgggccggaaggagaaggagcccgccctcgccgcccccgcgcccgagccgagcaggcggtacgcggaggtttcgcggctgctcatggcgggcggggcacgcatccccggcatcgtcaacccctcgcagctcggccgctggctccggatcaaggagtgaccggtcggccatgccgtgaggccgcccgcgggcggcattgcctgctggctcgtctcgcctcggcggccgatcaacctgaagaacagcgggtgctcttgaacacagcaagcgggtttgttactttgtcctgtcttttcccttcgaatttttcgtgtggtaattagcaaatcatctcccgttgtggaaaatctagtgtagttgttggatgagaaactgtggaggcgctactgctagctgttgcctcatcggttagcagcatgcatgttttcccctactgaaatttctcagcatcggcaaaagtctgtgatgatatgcgtggatgaatcaaccgtcgatgtaaatacaatgttaatgctttggaggtagcttgtgaagtactctacatgttt

SEQ ID NO: 11254 - DNA, 245 bp, Setaria italica
  Peptide Sequence Number=SeqID_77228
tgaaacatgttatgcaacatccatggaggataatgtcctaaaataagcattgcaactccgctgaaacaaaagggatgctttgtagtatgccattgtagtgcaatttcttcttagtaacatgtacgagtaagtcttaagggtgagctactattaagaagaaagtgtttttttaatatgcatttgactatcaactatgtctcttgcaattcctgagagagtaatggagctttaggtgaagcaaatga

SEQ ID NO: 11255 - DNA, 1404 bp, Setaria italica
  Peptide Sequence Number=SeqID_77229
agtcacgcacacgtacacacgcttgcattaggataaagaggcaataatgtacatgcatattgtatactagctctaggcagtgctgaagattaaagcaaaagatacatgtctcactcatcatctctggtacactacactacctaaaattacgtggcggatattacacatgcaggtacacacacacatagtcgagcaaaccggctggtggtactactagggacagctgacatcctttttttacacagctcaccgtgcacgttaacagttactgctacaaggtaagaagaagcttcgccctgcgtgccacgtcatcacgccgcgtggcgtggcaccagcctcgcctccagcggggcggccatctcgcacgacagcctcagcacttcggataggtcgacgccgccgtcggacggcgggagccattccagctcgtggaggagggtggcgagccaggacacgacggtagccatcgcgagggacttgccggggcagctccgcctgccggacccgaacggcgcgagcctgaggtccgaacccatgatcgggaactcgtcggcgtgatccgacgagcccgccaggaacctctcgggtttgaactccgtcgggtcggaccagacggccgggtcgtgggttatggcccacatgttcaccatggcggtggtcccggcgggtaccaggtacccgcccacgtggacgtccgacgtggcgaggcgtgcccaggagaggagcggccccggcgggtgcaggcgcagcacttccttgatgaccgcctggaggtagacgagcgaggcggtgtccgcctccgtcacggccttgcccggcccgaccacccggtccagctcctcgtggaccctccgctgcacgtcctggtgcagcaccagccgggccagcacccactccatcagaactgccaccgtgtccgtgcctcgaaagatcatctcccagaggacggcgatcatgtcggcgtcggagagcttgtcgctgccctggagggagagcaggacgtcggtgaagtccatgacggcggcgacgccgccgccgagggcgtgccgggcacggtgctcgtcgatgatgcggcccacgaagcggttgacccgggggacgagggccgagcacctggcccggatcctctgcaggtcgaagcgggcgagccaggggaggtggtcggaccagttgagctggccgaggaggtcgtagccttcgtccaccaggctcttcagctccgccgcctcctcgctggccgcctgcagctcgtacctccgcccgaacaccgaccacatcacgttgtgcagcgacgcgcgcttcaggaaccgccgcgccgtcacggtcccggcggcggcggcggggcgctccgtcttccttccgccatggcgtcgaccaataactaaggaacgaaacgaaacgaaa

SEQ ID NO: 11256 - DNA, 360 bp, Setaria italica
  Peptide Sequence Number=SeqID_77230
tttttttgtcatagtgcatttcgctttgatcacccatatccgtataggaagaagcctggcattgcctgacgcctcaactccttcctaaatggctaaatgatcatcagttccagctcgatccattcaggtcaatcttttcgcagttgcgaggccttcgagtgttcctgtcgttgatgttcagatccagctcttgctgctcatctgtggaacctctcctgccagtgccagactcctcgagaaacaggaactcctcgcagcagctcgtgctcgcccctcctctctcgttgcctgatgacctcgccgcctcaaaagggtagccgccgcctctcggagtcggagcaggcgacaggccgattggac

SEQ ID NO: 11257 - DNA, 298 bp, Setaria italica
  Peptide Sequence Number=SeqID_77231
agtagaaattgactgtcatgtcgttattgatcaaattgaaggaggttattatatgcaattcagtaggaattacagcagcttacctatcctgaactcttgatcatactactagtacaagcaagttggtatgagctatagtctgattaaaagggtatacttgacacttgtctacagagattgtttcctcagattttaccgtgaacaaattaaccgggagagggagaaaatacagtaagatctacatggctgtaccatttgggccgtcggaatgtgcgccgccgccatgcacccgtgcgcc

SEQ ID NO: 11258 - DNA, 323 bp, Setaria italica
  Peptide Sequence Number=SeqID_77232
aatcatgttgatatcttattatcttgttagcggaaggcaagcctcacaatctgcttgatacagcaagatacttggtatgacgggcctgtgccatcaattttcctgtctttttcttcctgaaatcgacagagacaacaccaacggattttccagaattctgtatctatcagaatttaagtgtcaagggtggttctgtgatgcatattgctctatccatttcgttttcacttgacagctatgatcagattatacatttcgacaaaggttgtgtctgggttgtaagttgtaacttcactggaaacacagtaaaccatccacaattc

SEQ ID NO: 11259 - DNA, 905 bp, Setaria italica
  Peptide Sequence Number=SeqID_77233
ttcgtctcaggattcaggaatttgcgtgccgtcttgtctgcctgccggcacctcgtcggattcaggtggcgcgacctcctctccctctcctcgccggcccggcgcaccgccgaccatggacccggaagcggtgcggcgaagcctcgagcccaccgcctccgcagaggaaatcacgggctccacccctgcccgcctccacttctacgaccccttcgtcctccaaggcgtcagcatcgagtcctccgagcacggccgcctcctctgctccttcgtcgtcgccccgcgccacgccagccccgcggggtacctccgcagcggcgtcacggcgacgctcgccgaccagctggggtcggccgtcttctactgcagcgggctcccgaggagcggggtctccgtggagatcagcgtctccttcgtcgacgtggctaccgtcggggaagaaatagaggttgagggaaagttgttgcgtgctggaaaatccgttggtgttgtctctgtcgatttcaggaagaaaaagacaggaaaattgatggcacaggcccgtcataccaagtatcttgctgtatcaagcagattgtgaggcttgccttccgctaacaagataataagatatcaacatgattgcggcgaaactctccattaccatgccattattaatcggcaacaatcatacaatgcttatagtctctctctttttcagaattctgtatctatcagaatttaagtgtcaagggtggttctgtgatgcatattgctctatccatttcgttttcacttgacagctatgatcagattatacatttcgacaaaggttgtgtctgggttgtaagttgtaacttcactggaaacacagtaaaccatccacaattcatatcaaatcctttaaatataaaaaaatcaaaaaa

SEQ ID NO: 11260 - DNA, 1286 bp, Setaria italica
  Peptide Sequence Number=SeqID_77234
acctgaaatttcatgaaaaccctacaaatgatccgggctggaaattggatccagacaattttgccaatatgattttcttacatgcacctcaacgattatattcctaactcttgacatgtggcacgtgcatctccactagtttatacaaaacatcacgtgtgtccaagagaaccattcttccgtcacaacgcacaagggccaacaaacctcccaggttctttgttaaaattgacctactcaatcccgtagtaatctactgtagaactaacgcacagagtggccaaaacaaaaggcgtgacgttcagctcgccacacaagaaaactagagacgcggcaaacggctcgatgagaatggaagcaagcagttatacatccacttcaggcgtgacacgacgatcatcttgtctggcattcccatgtcgagctttgccagatcaaaaatgtcttctctcaagcttaaccattcccctgtttcttttgcgtgtgactcaacagctttgcacagcctatcaagggtgtaaagtactaatccaaacttgtaccgtgcctcttcctccattccgttatctctgtaatgctgaaactccataagccttctctctacatcgacaagaagcagcctccgttgacatcgtgcaatattacctcttccctctgcgccatggtcacgctgaatccatgttcgcagtaacatgagcagcagaagcgaaagaccaaaagcaggaagagctgcaagaacggcaaagtttatagcatttgccctaagaatctgatccatttccagaagtcccgattcaagatccagtttaagcttttgaatctgaataagcatggcacgggctaattctccactgaacagatttttcattgggtgtatcaattccttttcatatctcttcgtgagaatctccaacattgcctgcacagatgaatcttctggcaacttttgaccttctgtttgctcacagaaggctactagcatcctgcgcaatgaatcttcagttagttggacttcttgattttccattacacctttatctctttgcttgaatgtctcgaaaagctcatctctaatggaaatgataggtttttcaacatgctcatcccaaaatccagccacagactccttagcgtcttgaatccaattatcaatatcaggacttcccatcaagctgctatggcgtaaaagccatagagaacatacagagagacccaatgccccacatgtgtagggtaaccagtatacggtcaatttgtttggtcttttatggcttgtgagctgagag

SEQ ID NO: 11261 - DNA, 579 bp, Setaria italica
  Peptide Sequence Number=SeqID_77235
cgggttccttccccgccgccgccgccgtcacaggaggaggaaaggaatacatcgtcatggcggccaggctcctcgcgaatctcatcgtcatgggcgggagcgtcatgggcagggccatgctccaggcctatcgcaaagccatcgtcaatgcgaaccaaactggagctgcccaagaagctataaatggtatcagacgggctagcaaggtcatgactgagcaagaagcccggcagatactgggtattagtgaaaaatcgacttgggaagagattgttcagaagtatgacacaatgtttgagaggaatgcgaagaacgggagcttctacctccaatcgaaggtccatcgcgcaaaagaatgtctggaacctttatatcaaaagcctgatgtaccaaactgagattggcgtagatgcctagcatccgtttgaaccattacgcttaactgatcagtttgccgatgtggctagagatcattctgtttttgagttatgctgggtgcatcaggttgattggttgtaaaagggacctttgctggactcagaataatgtttaacaaagatatgagattttgtctgaatt

SEQ ID NO: 11262 - DNA, 1331 bp, Setaria italica
  misc_feature (1)..(51): n is a, c, g, or t
  Peptide Sequence Number=SeqID_77236
nnnnnnnnnnnnnnnnnnnnnnnnnnnnnnnnnnnnnnnnnnnnnnnnnnntgtttttttatttttgttaaccctaaatccgcaacttcatagctcatggttgctgacaaaaatacattacatgtcaagagcaggaggtattcgctgtgtcagcatcctcaactgcgcattacaccaggatctaatgctagacacagcatcctcaactgccctatgtgatcgccaactcacaggatctctctcgttagtcctcgtccaccatatcaagagcaggtattcgccggaagcgtcctccgtgccttaagccgcctgatatgcccggcgaccttacctcaacccttctcttcttaggtgcagaatgttcaccagctattgattcaaaaagctctcccatattcgacatgttcggcctcttcctatcagcctcctctttcaggaaactctcccggattattttaaatgtttccatagttgcataaggcaaccccgtcttcggatcacggtatttggcaggaagtccagtcaccacacagacagatttttctggataaggagctgatgtcgtacacagttcggacccaaatgatgccccatttatgaattccagacgtgattccccatctcttgagaaaaatcgaattgtaggaccatcataagtgtccttatgaacaacagctttttcttgacttcctcctctcttgccagtacacgttctagatttctcaagttcatgatctctgtttcagctgcttccaaaagcatctcctcttgtgtcatccgcttttcttctccctccttctttttcttaataattggcttggctgttgcttctttttcagcacgtatggcttctctttcagcttgtctgacgatgacggacgttctggttgatttccttataatcttctcagtctccaattcatcaggaacatctactggcgtggatggacttgccttgtccgcggacttggcagctttttcatcatcttctagttttggggtcaccttcttcttgacattggtctttctcaatgtcttgccagggaacattaggcgctttttgattggtaatctctcacgttcttccttttctggctcatcatcaggttcaggttcatcttgatcaaaatcactgtcgaattcgtcaccggcatcctgctcttcctcgtagttgtcatcgtcttcctcatccttgagggcgtcttgattccagaagacctcatcctgctcgacctcgtcctcgaggagcttggttatcctcttgcctcgggtggcgcgggaggcgcggtccaggaggacgggtggctcgtcgtcgccggcgtacatggcgg

SEQ ID NO: 11263 - DNA, 1365 bp, Setaria italica
  Peptide Sequence Number=SeqID_77237
ccaagcagcaccgcgccgccggtccctccctctactcttctcccacctctccgccggatcctcgctccgccgccgccacccctcgtctctctaggtctcgtgttgtggagatacatctggacgcggatcggtttttctcctgttggtcactggtaccttactaagttcaggaagatgagcaaaggcccagttcccttcggcaacatcgggaagagagcaaaagatctcttgtacaaggactacaactttgaccaaaagttttctttgtcgacgtctagcagctccggtttgaatctcacggccactggtgtgaggatcaatgaagacttcattggtgatatacggacacagcataaaagtggtagaaccactgttgatgtcataattgatagtgattctaaagtgtcaaccacagtcactgttgatgaagcactcactggtttgaagacttcattcagcttcaaggttcccgatcacaagtctgttaagcttgatctgcaatacgctcacaatcgttttgcattgaattcaaccattggtttgacatcagcacctttggttgagctggctgcaactgttggcacgagtgaacttagctttggtgctgaggttggatttgacagtacttcagcttctgttaccaagtacaactcggggatcggatacaacaaaccggatttctctgcttctttactattagctgataaaggggagactttaaaggcgtcatatattcaccttttcaatccgaccaatggtgctacagtggcggctgaggtaacacacaagctgaaaacaaaggagaactatttcaccattgggagctcccatgcccttgattcttctacatcacttaagacgagattcagcaactctgggaaggtcggacttctctgtcagcatgagtggaggccaaagtccctcgtgactctttcagccgagtatgatccgaaggtggtgcgttcgccttcaagattcggcgtggccatatcagtcaagccttgatgagtccgacttatctcctgtaaaacagtacaagcgtcacatactgtctccaagaacataagctttggagcaatacctagaacagctctcccattttagcctttttggaaaccgtctgggagttggacttgttttgtggaatgcttccatcagagccaactccacaccgagaattgaaaatacagaggtttgtattagagcagaagcttttactctttgcgatgtttttccctgttttgctattcaaggcaaattgattttgggggcgattaaacgcctaagggcttgtgatcatgaggatagttgacaactctgatgataatggggacacttgtacccagcgaccaaggagtaattact

SEQ ID NO: 11264 - DNA, 309 bp, Setaria italica
  Peptide Sequence Number=SeqID_77238
ccctcaacaagctcaagcttgtgacgatggtgctgcacgagacgctccggctgtacggcgcagcgacgctgatcaagcggcgggcgacggcggacgcggacctctgcggcgtggtggtccccgagggcacggtcctgctgatcccgatcgcgatgctgcaccgcgacgaggaggcgtggggcggggacgccggcgagttcaacccgctccggttcaaggacgacgcgggcagggcggcgccggcgcacccgggcgcgctgctgtccttctcggcgggcccgcggtcgtgcatcgggaaggacttcgcga

SEQ ID NO: 11265 - DNA, 404 bp, Setaria italica
  Peptide Sequence Number=SeqID_77239
ttgcagatgataatgatacttatgatcatctgcaaacatctttgcaatcatttaccttgcacaatcagaattctgccgcacaacatttgccggagtcaaatcgtatgacatttccttttccgattcgttctcagagtcttctatatcttcatcttcatcttcgtgcactgatttctgctcctgatggccaaacttcagcctttgcataacattatttgtttcagcagcatcctgttgctgaagccacttttggtggagttcattacgcttatcatgatctacttctttttcttcatagccagctgctatcagatcattaaaaacttcattttcatcacttccatcatcctcatcatcatccttaaatctcatcatgtcattatcactatcatcctcttcctcag

SEQ ID NO: 11266 - DNA, 258 bp, Setaria italica
  Peptide Sequence Number=SeqID_77240
gcggacattcttaccaacccactccacagcagccccaaatttctccttatcacccagtaaagccaaggtatccaaagagtcgataagagtaagtgcataaccaccaagggagtcttcaccttggcaacttaagggtcgcagctcatcgagtgggaaagcatacttcatgtacccatcaaatgcatgatagaacatatctttcacctcgtcgcggagccggcgcgcttcggagggcgtgacgccctcggcgacggcagt

SEQ ID NO: 11267 - DNA, 400 bp, Setaria italica
  Peptide Sequence Number=SeqID_77241
ggcgttgcaaatgcgaggggtggatttttctggtgttgttgagtttcttgcacaggagttatttaacccaaatgcttcaatggtcgtgagaaagaatgtgcaggcttgcttatcgctgcttgcaagcagaactggcagtgaagtctcagaattgcttgagcctctctatttaccgttgcttcagccactgatttcacgacctcttcgctcgaagaatgttgagcaacaggtgggcaccgttactgctttgaacttctgtcttgcactcagaccacctcttctaaagttgtctcctgagcttgtcaattttttgcaagaagcgctgcaaattgccgaggctgatgaaactgtgtgggtcaccaggatgatgaatgcaaaaatagttctgacatggaacaaa

SEQ ID NO: 11268 - DNA, 357 bp, Setaria italica
  misc_feature (4)..(4): n is a, c, g, or t
  Peptide Sequence Number=SeqID_77242
tttnttagttctttctttttcgtttctttttcgtttaagtttaattttgttttgtttagttcttaacttagtagcaacaggtgggcaccgttacgtctttgaacttctgtcttgcactcagaccacctcttctaaagttgtctcctgagcttgtcaattttttgcaagaagcgctgcaaattgccgaggctgatgaaactgtgtgggtcaccaggatgatgaatgcaaaaatagttctgacatggaacaaactgagaaccgcgtgcattgaactactctgtactgcaatggcatggggagatctaaaggctcaaaatcacagcgaattgcgagcaaagattatcgcaattgtttttc

SEQ ID NO: 11269 - DNA, 974 bp, Setaria italica
  Peptide Sequence Number=SeqID_77243
agttgatgatgacaggaaagaaggaaaagtaaacagaagggtttggctatcattgcgattaagccagctgtacaagggactttctctggatgccttgcaggaaggaatggtacttgctgcccagttaaaagtgttgaggaccatggttacattcttcattttggagtaccttccttcagtggatttatgcaaaaggctgacaaagaaaatgtgaagattgagcccagacaactgatacaatgtgttgtgaaggctatcgacaaaactcgggctattgttcacttgagttctgatgaagacttggtttctaaatctattattaaagatctgaagggcctttccattgatcatttgattcctggtatgatggttaatgcacgtgtccattcagttcttgaaaatggagtaatgttatcatttcttacttatttcagtggaactgttgacatctttaatttgtcaaatccctttccctctggtaattggaaagatggttacagtaagaataagaaggtaaatgctcgcatcctattcgttgatccatcaacgagggcagttgggcttacattgaacaaacatttacttcatcttgaagtgccccctattaatctaaaagctggagatatctacgataaatcaaaggtgttgaggatagataaaaaggctggtctttttcttgaaataccttcttcaactccatcacctggatttattagtatacatgacgtgtcagacaaagatgtgaagaacttggagaagaagtttaaggaaggcagtagcctacgcgtccgtatacttggagtgcgaaatcttgaaggagttgcaataggcactgtaaaagacagtgcttttgaaggatctgttttcactcatgatgatgttaaacctggaatgttagtgagagctaaggttgttactgttgagccatttggtgcaatcgtgcagttttccagtggtgtgaaagcacgattgca

SEQ ID NO: 11270 - DNA, 991 bp, Setaria italica
  Peptide Sequence Number=SeqID_77244
gccggacgtgcgcgccgccgtgcggtacggcacgagcttcaaccaggccagggacgccgtgctgtgctggcgcgacttcctcaagctcgcctgcagccacccgctgcgcgacgtcgtggcgtcgtggccgcgggagcccgcggacctgaggggcgtcgcgtccgcgtacgccgcggcgagccatgccctgttcatggagctcatggaggcggcgctccaggccctgggcatcgcttccggcggtgtgctgggggagctagcggcggggtcgtcgcacatgatgacggtgaactgctacccggcgtgcccgcagccggagctcacgctggggatgccagcgcactccgactacggcctcttcaccttcgtgctgcaggaccacgtggaggggctccaggtcatgcacggcggacgatggctcaccgtcgacccgatcccgggatccttcgtcgtcaacgtcggcgaccacctagagatctacagcaacggggcgtacaagagcgtgctgcaccgtgtgcgcgtcaactcgacgcggcctcgcatctcggtggcgtcgttccacagcctgccggcggagcgtgtggtcgggccggcgccggagctggtggacgaggccgccggcaacccgccgcggtacatggacaccgacttcgccaccttcctcgcctacctcgcctccgccgacggcaaggacaagaccttcctccagtcaaggatgctcgccctatagcttaatttggtaccgcatatatatataattattaattgctagcttaattaattcttgcttattaactattactggtatttttgacaaataaagttagtagctcagcgtgcgttgacttcttgcattattggttttcattcgatcggctaggaataatatgtactgtatatgaaacgagtacgtacgtaattaacgtactcaatgatgtattgagagtgaactgaatgaatgaatgaatgaattgtaactaaaaaaaaaaaa

SEQ ID NO: 11271 - DNA, 409 bp, Setaria italica
  misc_feature (55)..(55): n is a, c, g, or t
  Peptide Sequence Number=SeqID_77245
aattgtcgattcagagtacagaagtgtagtaagctaaagtggatgagcaatgaanattgattagtgctggatgccaggatactctgactgtctgaccttaatagcaatcaggacaccaaaggttttccttcttttttggatactaaagaagtcgtgagtcataaacccactaatagcaaaactagacgattacagacctattacatggatacccataaacacaagtacaacaaaactagtaagacaataacaggccagctaaagaaaccaaaagacttgtatttgacgacaataaccacactttcaaacctgcatttagtgcttactaaacaagtaaatatagcaatatgtatgcccagtctggtcaaataaatattcagtgggatccattagttcactagtagcgaaa

SEQ ID NO: 11272 - DNA, 325 bp, Setaria italica
  Peptide Sequence Number=SeqID_77246
ctgaaccggccgaagcgaaggaggccctgggcgaggccgcgcctagcgtggcgagggtcatcctcggcctcctgccgatctgggcgatcctgcttatcttcgctgtgatcttccagcagccgatgacgttcttcacgaagcagggcatgctgatggaccacaagctcggtgccttcgtggtcccgccggcgatgctccagagctcgatcacgatctccatcatcctgctcgtgcccatgtacgaccgggtgatcatcccgctgttcaacgccgtcacccgggcacgagggatcacggtgttccagcggatcggcgtcggcatggt

SEQ ID NO: 11273 - DNA, 455 bp, Setaria italica
  Peptide Sequence Number=SeqID_77247
cgcgtggcggggccctgcggctacggcgtctgctacctctacctccgccgctccggccgcgacggctgggcgcccgagtgggtgcaggtcgtccagcccgggccacgcagcggcgacgcgccggccacggccaccttctacttcggcgacccgctgcccgacggcgtctggtacggccacgaccggtgccccaagtccaaggcctccaccgacgacgaccacccggcgaccaccaccggtgcgccgcgcgccagcaactcctcggctccgcctcaggaatgatgatgaaaccgaaccgccggggaattttaagcggagctgcacgaccattctcgagcctcggtgtgtagttagtccatggatgtgttgggatttggattattggtgcatcgtatagctgggcctttgtttgtttgtgtggatcaataagcgccaactatttgatgaataaaaaa

SEQ ID NO: 11274 - DNA, 464 bp, Setaria italica
  Peptide Sequence Number=SeqID_77248
atgctgaggagctcgaggatgaagagcttacgcatctcccgccagtagtcgctgtaggggctgaaggccacgtccaggaagtcgtagctcagcaccctgggacctgaagatttttcgtgtgcttactgatgaaacaaaaatgttcaacgagctagatgttcaggagtgtggtgttagtgatttatactagttggtactcatcttagtcaaaaaattaataactccaggtcgagagttcaaatttcgtgtttaaacactgaagaaaaagtttaaagatccaacttgctagctcaaagttgctgtatggtagaacatttttttatctgcgtttcattttaacctataactttatttttgaagtgtgagaatttggcagagttatctctaaggcggcaaacgctctgacgagacctttccttatatacaaaaatcgatgatttgtataagatgatgcttcaatttcg

SEQ ID NO: 11275 - DNA, 572 bp, Setaria italica
  Peptide Sequence Number=SeqID_77249
ttcaatttgctctggtaagaaaagtaaagacactaatgcagcaagagctatacaggggttgggatgatgtagagcatggcaataatggatgcggttgggaagggaccatggtccggtgccagattatatttctcgtggaagcaaattttggatgccaatttctctttcttcatattggtcaaacgtttataaaaaacaagttcaataatttggataaccaccgtataattaatctcaaaatggacctcggcccggagcacgtacgttaatttgctagttacagacactagaacataataattcggcatcagtagccaatatacttgcctggcgagttggggcggctgcagcagtgctggtcgttggtccggaggaggtccttggcggcctccggcgacgagacgaccacggtgcgcacgcggccgagccgcacctccacgacggggccgtacctccgcgccaccgcctggaagtagcggtgcggccggctgccgatctgggaggaggttgcccagcaccggcagctgccgtccgggggccccgcggcggagctctccttccatcatcggctg

SEQ ID NO: 11276 - DNA, 247 bp, Setaria italica
  Peptide Sequence Number=SeqID_77250
aaagcagaaggaagcggctaggctccaggcacaagcagcatctgatggaggtggaggtaagaagagtgataagaagctgagaaagaaaactgccacggatgagaatcctgaggatttcattgacccagagactccttctggacagaaaaaactgctggcatctcaaatggcaaaacaatatagccctgctgctgttgagaaatcctggtatgcttggtgggaatcatctcagttattgaagcagatg

SEQ ID NO: 11277 - DNA, 333 bp, Setaria italica
  Peptide Sequence Number=SeqID_77251
aggaggaggagcgtgcgctgctggtgggtgtggacgtcgtcgaggacgcgtggcgacgacacgaagaattggcggacacagtcgcggtcgaagtcgaactcgtcgcgagcagaagaggagagaggggaggcgtggcgcgggaactcactggttatgaggtcgggtggatagaactcgtcggcactgctggagccgtcgctctcggaggcgccaggcgaggctgggctgctaccgccgccgctgctgttgtcgtagccgccgccgccgccggactccaaccgggcctcggcaatgatagtcttgatgcgcgcgtacatggcgcacggcggcaac

SEQ ID NO: 11278 - DNA, 453 bp, Setaria italica
  Peptide Sequence Number=SeqID_77252
cgatgaagtactcggccaccccgccgcccccgccgccggaggagacgttccaggaggagtcgagcagcgcgccgagcatggagtcccggccggcgttggcgagcgtggtggtggtcgtctcgaacacctgcccgcccacgttgaaccgcacgcgcccgctgcccgccatcgccggcgcttgcccaagaaccgatccttacaccgtcccagcttggcgcggcatccggctcacaatctccgatcgaattgcgccgcgaatccggtggggatcgaattgccggacttgcctcctctgctgcgctgtacctggcggttggggaggccgcggcggattgggcaattactactggccgcgtctgtacgaggtcgcggcgtgtatgtatacgagctagtatcaactggttggttggatcgctgcctcggcctgatttatggcgtaacggcagcgcggag

SEQ ID NO: 11279 - DNA, 426 bp, Setaria italica
  Peptide Sequence Number=SeqID_77253
gacaagaaagaatacaggaaagtagatgaagcatgaaggtgcaactgagtattacattgctgtggaagctgtagaacaatgcactaatgatggatcaagagcagtcaaggatggcaatgttgtggaagaaaaggacaaggtggcggagcaagtagttgctgttggcattctgtatgcagctaaggattgtgctactggggaatcacaagaggtgcgggcttctatagcttccgaagtagtgtaatactcagttgcccttcttgctccagtacttcttgatcttgcgcagcattatcatctgcggatgctttcaattgattaccagtgaacagctccaccaccttatgctgatcttgcacagaaatgctgtcctcactttgctctgccaccaccacatccccctcctcttgtgattccccagtagca

SEQ ID NO: 11280 - DNA, 412 bp, Setaria italica
  misc_feature (395)..(395): n is a, c, g, or t
  Peptide Sequence Number=SeqID_77254
aaacaatgtacaatctgccaacaagcaaaacaatgagaacacccactccaagtgatttgctgcaacctcttcccattcctcaaggtgcttggcaggatatatctatggattttatagaaggcttgccactgtcagaagggtttaatgtcatattggtggttgttgataggttcaccaaatacagctattttattcctctcaaacatccattcaatgcacaagcagtggcaaaagtagtacttgacaatgtggtcaaattacatggcatgcccagaacaattgtctctgacagagataaaatcttcacaagtcatttttggacagcactatttaagttggtggacacaaaattgctacggagttcagcttatcacccccaaacggatggtcaaacngagcgagtcaatcagtg

SEQ ID NO: 11281 - DNA, 258 bp, Setaria italica
  Peptide Sequence Number=SeqID_77255
tgttcggcccccatatccctcctccgtcgccgcctcccgtccggtcgtttccgagcctcgttgggtggcacgccggcgccggcattggggatagcctcgccgcctctgtccgtgttggctgtgattgtgcgcaattaatgtccttggagctgattgatctcttggatgaatgagcgtttcttttaaatgatctgtgttgaccatggcgatgaaccaaatgcagggtcttcgcatttaatgggcttgacgcggtacatg

SEQ ID NO: 11282 - DNA, 977 bp, Setaria italica
  Peptide Sequence Number=SeqID_77256
ggtcccttggaagctctggccggccggggagggatcgattctttttgtacagcgagctacgagtaggccggtagtaaaatagccgtcgttcaacttcaaggcgtattgtcaatctgtcattggatgagtcaccataaatgtgacggaatgatagatctgcggtgtgtgggctcctttgggccatttcaattgcgatgcgtgtgggctgaaatttgaaggaccctgtaccctttttggggtgctatttgtggccggcctgtggggcgtttcgtgttgccggttaagcgatgggtgaggttttgcatttgctctaagaagagaagaaagacttaagcttgtacaaccagagtacaggaccattgcatgcagatacaccgccagcagaatgggtttggactttggacctctacactacgacatcctacagaagattggcttgtaatctaggcgtaaggggagaactgatttatcccattgtgcccaactgttaatcctccattaactcctagcctgtacgttcttcctatttctgcagtactactactctgtatgaaaagcttcataagaacacagtagttgtttgttctggtgaacaacatttcggatgagtaccttaccgacaatggtggctgcaaatgcgagttggattgcaaggtttggaacttgcttcctagggaacatatcagactgacacccaaactgtctagcagtacttcggcatggagcaactacaggccatgtcagtcagttactcgtagcacgcggaacatactgcccaaaattacactccgccgagaagtgatcacctgctactgttggtgtccccttcccggaatccaacgccaacagtcagctggctaccgaccccatacttccgttagtttaagccagtttgcagcatttcctacttttcatttttttgttggtcaacagaggcataataatctgcttcgacttatttttttttctacttggaa

SEQ ID NO: 11283 - DNA, 538 bp, Setaria italica
  Peptide Sequence Number=SeqID_77257
actcagtcgcactagttacctgaagaaacctacaaacttctggaaaattgtgaactacttataatggatgctctaagacctgatcgttcttcatcaacgcactttggattacccagggcccttgaggaagttaggaaaatcaaaccaaagaaaacactgtttactggaatgatgcatttaatggaccatgagaaagtaaacgatgatcttgccaggctgatggagacagagggtcttgacatccaacttagctatgatggtctcaggatacctgtaaggctctagaattgttatatatacttctttttggaacacacccattattttatctgttaggtgctgctaattgatgcttgcggagtttctttagttccagttgagtaaaatcatagccaaatgtaatctgttgagctcggtgctttgagacttaacttttcattctctcccctcaaaagaggaaacttatgtagcaaagttacaccattgttatccagcggaataaagtcagactattgatttttatgagaccaaaaaaaaa

SEQ ID NO: 11284 - DNA, 432 bp, Setaria italica
  Peptide Sequence Number=SeqID_77258
cccgcgtcgccagctcgacgccgcgggggacgtgcgccagcacctgcacaccggggtaccgccgccgcgacgccgcgggtcgtacaccgtgagaagcctcccccgcccttgccttctcctcctccctcccgctcgataattgtcgtattgcttgtgttatggttggatcggtgcatctccggcgtaggcttgtataattcgtcgggaggatttgggttccgagttcggcctgcgcgcaattctgaatcgttttggttaggcttttcatgatcccactggcaccgccatgttgaagaagaattgaaatgagcctagctcgttgtattggtgtatgtactatgtagtagattttgttcgcatcattgcttatggtcttaacccacacttttgcattgctagttgtggatatactttgtggcaagtaggcgtttg

SEQ ID NO: 11285 - DNA, 690 bp, Setaria italica
  Peptide Sequence Number=SeqID_77259
ttttttgcagaatgttgacaacccgcctcgactctgaacatatccccatggttgttaggcaactctttttcggacaatacattctcataggggcagagatttccaacgtcgatgctttctccaggaggataaaaaccaccatctttgagaatagatgagacgtgttcatgtacctctttatgggatacacgcatgttatggggcacctgcacatcatatttatcttttttgagacatgagtgattatgctattgtgataggtcagtgggtcacgtgatgttgatgatgcagtgatgaatcaattgataaagactgtcatgaaacactaacataaccattggcagcatagatgacagcaaattggtatgcaaaagttttcagataaaagaaatcacattgccatagccgtacacatgtatttttgttaataaagtatgaaacatgttaactacatcggatccttgtagcatatcagaacacgtcccaaaactagtccaggttcttgtgaagactctcatccacgcaagaggggcaaccgccggccttccgcgcagccaaggactttctgcaccaggtagatctccgaccaccagactcccgaagtcccgctccaccgcagtcgcatcaggctgacgcctggcggcctgatttgtgctggtctgtgctcagtgcgccccagaggaagaggaa

SEQ ID NO: 11286 - DNA, 996 bp, Setaria italica
  misc_feature (916)..(916): n is a, c, g, or t
  misc_feature (955)..(955): n is a, c, g, or t
  Peptide Sequence Number=SeqID_77260
atttacggtatgaatgtttgataatcagttcctgaatgcaagctacaatttgagtaaaatggtctccatgttttgttcagatccctgttcaaaatgatactaaagtagttgcagttgcataacagtagtacaaatttaaccagactgtggacacatcagcccatgatgcttgagtaaggctactccatgcatagttagcaaaataagtagcactctagacaagctagtaaggttgcttatcagttcctagtcaccggcaaggttacacccgaagcagatcttggacaagtaagcacgagagcaggaacctcttccactcacgcatttctgagcaccttcagcagtggcaatgcagcactacaaaacatccttttgggttgatgtttactaaattgataagcccttcccagcagaccaaggttgggattcagaatcggtgaagatccaagacctgctgatttaccccgagacttttcaagcccttcgagactgcgtttgtcatctaatcggatcatcttaaacatgacctggctttcagaactgatctccaaaatgggaaaaaacttctccgtgcgtatttgagttcccatcctctaggtatcctgtttctcacaaccttttttgcagaatgttgacaacccgcctcgactctgaacatatccccatggttgttaggcaactctttttcggacaatacattctcataggggcagagatttccaacgtcgatgctttctccaggaggataaaaaaccaccatctttgagaatagatgagacgtgttcatgtacctctttatgggatacacgcatgttatggggcacctctggatgtgatcgaatatatgcatcaaggtcttcaccaactttgagaattgcacggacaagcagtaatgcagcagaagtaagctttttcnccatctccaaccccttattttctttttctttgacccgtntctgtctgcaccaccaagttattgtgcgggtatgaatacgg

SEQ ID NO: 11287 - DNA, 671 bp, Setaria italica
  Peptide Sequence Number=SeqID_77261
atgggcacgcacgacgagctcatggccaagggggagcaaggcacctacgccaagctgatccgcatgcaggagcaggcgcacgaggcggcgctggtgaacgcccgccggagcagcgccaggccgtcgagcgcccgcaactcggtgagctccccgatcatgacgcgcaactcctcctacggccgctccccctactcgcgccgcctctccgacttctccaccgccgacttcaccctctccatcgcccaccaccacgactcgtcgtccaagcagatggccttccgcgccggggccagctccttcctccggctggccaggatgaactcgcccgagtggggctacgcgctcctgggatccctgggctccatggtgtgcggctccttcagcgccatcttcgcctacgtgctcagcgccgtgctcagcgtgtactacgccgccgacccgcgctacatggagcgccagatcgccaagtactgctacctgctcatcggcatgtcgtcggcggcgctggtgttcaacacggtgcagcacgtgttctgggacgccgtcggcgagaacctgacaaagcgcgtgcgcgagaagatgttcgccgccgtgctccgcaacgagatggcctggttcgacgccgacgagaacgcgagcgcgcgcgtcgccgcccggctggcgctggaccg

SEQ ID NO: 11288 - DNA, 268 bp, Setaria italica
  Peptide Sequence Number=SeqID_77262
ccctagtcggtccccaggactcaaatccagagccagccatggcagagcacgcacagggctcccgagcccttctcatctgcctctgcctgtgcctgtgcctcctcctatcatcctcggagcacctggcgatgagcatggacctcgacgacgacgacttcttcgacgacagcttctacgacgaggtggcaccggcacggcgcctatacgatgaacgacgcctcaacgttctgaacagcaacacctcctccaacaggtccggtgcggcctt

SEQ ID NO: 11289 - DNA, 289 bp, Setaria italica
  Peptide Sequence Number=SeqID_77263
aaaaactgtacaatctctggatgaatgaacatcttgtcaggaagccggggcaagcagggaaaacttgacgtgcagcgagatcctcccattgtcgacgtcgagccttgcgccggtgaccagccagtacccagggctgtcctgcggccccatggtcacctgcgaggtgtccacgagcctcagcatcttctgcgcggccaccggcacaggcggcccgccggcgagcatgccggagtcgatgttgacggcctctggtttactcggctgctgcctgtccttctgcgaaccgcca

SEQ ID NO: 11290 - DNA, 327 bp, Setaria italica
  misc_feature (21)..(21): n is a, c, g, or t
  Peptide Sequence Number=SeqID_77264
gggaactttaagatggtaagnacgtgtccagcgttccaacctttccatgtgacctccgagatcgtggaacccatataattgcactgccatcacgtgagcaggtaacaatgttatgagtgaaccaggaatttctgaacttaaggttattttcttccttagagatatgaccggaatcagatgaaaaagatcttgatgccaccgcacatccactaaactgcacatagtttacatcattttcatgcccagataatagatccatctcatgattcggttggtcatgttcctcagaagaactcttgcaagcattccatacccttgcaaaggtgt

SEQ ID NO: 11291 - DNA, 355 bp, Setaria italica
  Peptide Sequence Number=SeqID_77265
tttgggaccccaacgagggacaagaggaatcgcgcggcggcggcggcgaactcctgtggcgcggggccgcgcgggatggaggcaccgcggggggcgtggactccattgctagggtttggatcggcggggagtgaggccgagggagatcgtcggatcgagacagggaggaggcgaggagcgggaggagggcttgctcaagtttcgtacaggcgaatcttctacaccacttccagatggggccatcctgaacggtgaggggccgggccgcccgaggcttagagtttttgcagagttgactttgtactgcccccaagaatcaagatcgcatctccagtggaaggcttggcgattaaaa

SEQ ID NO: 11292 - DNA, 459 bp, Setaria italica
  Peptide Sequence Number=SeqID_77266
gaacctttaactaacccgttctagcaaccaccaatccaccatgtttacatttaggactttgagcaacactttataccaaaacgccacgaaatttcaaaaggggagcaaaatatgtcaacatccgccaaaataaaatttaataaggacctaaaaattgaatgctgtgagaccactgaattcagaataaaactcgtatctttcagacttcagagcatgaacttgacaccgattgatgaacacgggatacggtaccgacctggcactgggagcgcggcggggcacctctagctcgaactcgacggggagccccaggaatccatggaacctattgaacgtgacgtgcgccacgtgctgcacgtccgtgggcaacccaatctccatcccgcagccgccgcgttggacctcgccggcgccggcgcccaccgttctgcacccgagcagcgacttcaactttactta

SEQ ID NO: 11293 - DNA, 1537 bp, Setaria italica
  Peptide Sequence Number=SeqID_77267
acctttactatctgaagattcaggcatttcataatttaggcatcgtccagatgtatgtacaaatgaaaacatcaacatctttcattcactcagacaagtaatcataaggaagatacaaaagttagtgatggcgagaagatcgaatccgaaaataccatgaccatgatacatcaaagaaatgatagacatagaaaatgcaaaatgtgcaagcaaagcagtcgagggtcctatgttcaggaaacattgggtcagtcatctagtacacaacgacaatagaaatggtgtttcacttcatctccatgcttcaatccgttcaaccttggagtttattcggctcacaatgcttacacctcttgatttctcagctgcggctgtggcacgtgtaccagactgacccttaccgtttctagctctcctacgattcgggcttcggcttgccttgccttgaagagaatttgtagcagttgcactggaagcatcagcagccggacaagcaattgcaggttgcgagcagctagtagagtcctccatactccttatgacttcacttgcctgggcactgaaagcagcagtgactccttcagtggtattagtttcattaggcttatcaccagtgctgtgtgcaggactgttcagaaggggctcttcgttggcaaaagaggggcgcctggatccttcctcaaggagagaatccagtgtcacgctgggtttctgatgcccattttcatcagatggatccttctgggacagcaaaacatcctctggattggactcccctctatccttgagagtcttttgtaccagcatcttgagaaaattcatcacttggactgcatacatcagtgcagtcaaaggatctgccatctgagtcatattcggtgcaaaaaccatagcaatattgcgatcattcatcttgtttatctgttcttcttggactacatcagccatcagattaacagcccagtcaagcaaagctgcttcagctggtggaagacatttcgcagcccgagcacaatcctcttcagattggcattgcatcacctgttcaggtgggatagggtccagcaccccacttggcatctccctaaaccaggctttgattagacctgccaaacagtggacatcaatgccatctggaacaattccactgtttaactggtctctcacaagctcctcctggctattctctgcgttaatacggaagataccttctgcctgaagtccgccttgttcatataggcgtctctgcatcatcaagaggattgttgggacactgtttcctctcgaatcgtaggaacactgcattgattctgttgaaactccgaagacacttgcactggcactgggagcgcggcggggcacctctagctcgaactcgacggggagccccaggaatccatggaacctattgaacgtgacgtgcgccacgtgctgcacgtccgtgggcaacccaatctccatcccgcagccgccgcgttggacctcgccggcgccggcgcccaccgtctgcacccgagcagcgactccgcagcagctc

SEQ ID NO: 11294 - DNA, 252 bp, Setaria italica
  Peptide Sequence Number=SeqID_77268
acgtggctggcagacgcttgtggtcttaaaagacaacagtttgatattcaacagcaagcattgaagcttactgcaaatagcatgtatggttgcttgggcttttccaattccaggttttatgcgaagccacttgctgagcttattacattgcaaggaagagagatcttgcagaacaccgttgatctggttcagaataatttaaatttggaggttatttatggtgacactgactccattatgatacatactgga

SEQ ID NO: 11295 - DNA, 535 bp, Setaria italica
  Peptide Sequence Number=SeqID_77269
catattgcacaaaggttacccgaaagccagtttaaagatactatgggattttgaagtatatacttagtcaaccatgtccattgatgccatacagtctggaaaatggggcaatactcctatgaagatgcttcctttcattgctaaattgcttataacaagcaagagattttccaaactcgtggttgtgggcagaggtaagccctgcagtacccacaagctgagcctattcccattgaagccatttttgctcaagacctctagtaaatcaggggactccaaaggaatatgaagcaagacacaatttcgcgatacttttgctccagatcctctaagccgctgagtcgctgtactgaagacttttcctggtgacacatcgtacagaacagatagcctaggccagctcagcctgtaaggacgagtgtccattccatctgtcaacaaaacaatctgtctaatatcttccgaattgctaatcaaattctgtaatttgtcatcaatatatctggttgtcagcctataatggtcttggcaaggc

SEQ ID NO: 11296 - DNA, 274 bp, Setaria italica
  Peptide Sequence Number=SeqID_77270
gttgttgacctggttgtagagtgaagtggcggtggaggtggtgggaaggggaagaaggctggagagaggagctggggctggcggtggctacggcggaggagccggtggaggcactggcggtggatacggtggaggtgccggtgctggaggtggcgccggaggcggctatggcggaggtgccggttcagggggcggctatggtggaggagctggtggaggcagtggcggtggatacggcgggaggcgcgaggtgcgagggaggtggcgcgtggga

SEQ ID NO: 11297 - DNA, 2297 bp, Setaria italica
  misc_feature (1)..(104): n is a, c, g, or t
  Peptide Sequence Number=SeqID_77271
nnnnnnnnnnnnnnnnnnnnnnnnnnnnnnnnnnnnnnnnnnnnnnnnnnnnnnnnnnnnnnnnnnnnnnnnnnnnnnnnnnnnnnnnnnnnnnnnnnnnnnnngttgattagaagaactaaagtcaggcaagcaatgtgcatgttgcattgacagtaccaactcaatgcagactttaaaagtcaccaaatatacatacataaactcaagaggtgagtacaaacacaacagaaattatccaaaattactcccaacaggaggttcacgacacaggttatatgagcttgctttctacttgtgcttctgttgttctcatagggacgatctttcgagcaactgtatacatgcttcatcctactggattcattttggcctgcactcgctccctgattttagtacaattcaccaatgttgggatcgcttggagttttcactttgtgaagctcatattgaagtactggaagtgcattcggccaccttacttgcgcgatgagctctgtcccctgtgctgaaaatggttgaaattttccatacttgtccatcctgtgtgcgacccgattcctcagataatctgaaaaaagggtcccctctaaaacttccagagtcaaagggtccaaaggaaactgtggagtagaataagtggcacttgggtgcgtgaatatttcattcagcaaagggtttgattggacatcagttcgccaagtagcgatgtaattgagctggcccatggctcgcataatagcatctctctgaaatgatttgagcactttcaaacgctcatgcatcctcatgtacttgccacccctgctagatagtgaccataaagaagcatgaatccgaaaaagcgatctcttatcatgctcattttccatcatgttcagaagatgttgaatgtcttgcgggattggcccaaacagaaggaatgcatcttcaataattttctttgcagacttgtagttgagcataagctgtcccggttgcaacttttggcgcttgacattgcgcagtacagccttacgccctctgacatagatgtttgaagcattgaagtcctcaaaacattcacctagctgctccacttcccatagagcatccagtagggagctgcaaaatacctttccatcttctgtggcaacctgttttgaaaagggaccttgttcccgtggcaaatccaacagtgtcatgggaccaagattatgagtcttgaggacctttgtgaatgcagagagacaatctcgcttaaggagatattctgccagagatacagagctgtctctcaagtgctgaccattatgataatccgaatagccatcatatcttatgaatggtaaggcttttctttctgtgccatcaagcgggactattaaatcggagacgatggtaccaaaatgaatattcatgatagagggtgctgatttagtcttctctcaagcttgttgtcccatgttttttatggtagcaatcatggtagagtcatccattgcatccgtgattggattaggtccattgatcaatgtgcaagttaacattgtggaccgagggtgaggtgctcggcgggctgtggatgtgggagagtcggtgatgtgatcccggtgggcagattcagcgaggtatcgtggtagccggcggctggagtcaaatggcggacgaagacgtggtagtcaggacggcggcggaagtgggcggcggaagtgggcggcggaggaagccgtgggcggcgggacagcacccggcgccggtggagacactccccggccgccgcctcgctcctcgaccccgaaccctagacctttttgcggcgtgatctggagggtggcgggcttggtggtggctccggtggaggcggaggtcttggtggtggtgccgggggaggtggcggacttggcggtggaggaggagctggggctggcggtggctacggcggaggagccggtggaggcactggcggtggatacggtggaggtgccggtgctggaggtggcgccggaggcggctatggcggaggtgccggtgcagggggcggctatggtggaggagctggtggaggcagtggcggtggatacggcggaggcgcaggtgcaggaggtggcgctggaggcggctacggtggaggagctggcggtggtgccggtggtggctacggcggaggtgctggaggtggcgcaggtggaggctacggtggcggtgctggcgcgggtggtggcgttggctcgtctggcggcggtgggaggctatggtggcggcgccggagggggcatcggcggcggtgtctgattcggcctttgcttgacatgcat

SEQ ID NO: 11298 - DNA, 866 bp, Setaria italica
  Peptide Sequence Number=SeqID_77272
ctgcaacttagcttacagggtgtgcccctgctaaagggattattcgaaggtagtagcattatctctcttaagaatgaaaaaagtgatattgaaaagttggcttttcatcattggcatggacggaaagtaaatgtgaactaccttttgcattgaccaagacatgctgatattatcactccagcaaaggtaatttgctcctagtgcttttcgatccctctaaatagaagactgcagtcaattgcagatgaggtttctttcgttgtggaattgtggggagcaggttagcagctgtgagagtcagagatgacccttcatcacaatcgtgattcgtgagctgaagctataaatacgaccttcaacacctctgtaaaagtggaacaatggcaagacatggacattgagacgcttacagatctccgtctgttcattatagttgaccataagaaattgaagtcctggatgcatagcggcaaactgattgacctttgtgcacatttgacaaaaaaagtgtagcgccttacaagctccacagcctggtgaaaagaagtgcaccactgtgaacttatctccagccatcagaagctgtttatcaaattctcttgagatttggtattcttcatgttgctctccatgtccttctcccaccactttgtgcgaataccctaatatcatgactaaatatcagtgccatctttgtcgtgcttgagcatgtgtttgaatgaatgtttaagttgtgtcatttttttaatgaaactgttaaatttctctgttttgatgcaaattttactgtaagcttagacggagaaggcattttaagccaacaactttttagaatttcaacttttcattattgcataatatatctg

SEQ ID NO: 11299 - DNA, 1693 bp, Setaria italica
  misc_feature (1633)..(1693): n is a, c, g, or t
  Peptide Sequence Number=SeqID_77273
tccctgtctcagcgttcgttcgacccagcagcaggagaaggaagcccgcccagccaggccaggcaagcgacgcgacgcaagtcttctatacaggaactggattctgctgttagtcctcttgctattgataccatggatgtctctgatgagaagtgtgctcatccatcggacctgcctagtgctgttgatgtcatgcaatctgacgatggcagatctgaacatttgggatctgctgcagtcaatggagctattggaaatgaaggttattcaggcatcaattgttctgagcagaccgatgatgagcatggtggaggtgaagactctgttgttaatgttggaagcactgctgataaacaagagaatcaggaaaagattccaatggaagaaacagagatgagtgatggcacctcgatcacatcgatggaagatgccctggaaccaaacaatgatctccattcagagcctgaagatacgagcaaccacactcctgatctgtcaaatggcaagtcttccaatggaaacagtaacgtattccagagtgcaaagagcgtgttgacttcgacgaagaaggtgaagaaaacttcatctgcgaatgcacggaagccgctgcaatctactaacagaggtaatcaggatgatgggaagtcatcgattggaaaggccacagttccagcaggcccagttttccgttgtactgaacgtgccgagaagcgcagagaattttacatgaagttggaggagaagcaccaagctatggaggaagagaagattcagttggaagccaggctgaagaaagaacaggaggaggctctgaagcagctgaggaagagcctgaccttcaaggccaatcccatgccgagcttctaccacgaggcggcgccgtcccccagggccgaagtcaagaagctgccgacgacccgccccaagtcgccgaagctgggccggaggaagacgacctccatggagacgtcgaactcctcgtcggagagcgagggcacgaggccctgctgccgggccaaccgcgacggcctcgacagcaactgcaagtgcagcggcggcgccggcagcagaagcagcaaggcgctggcaacgaacgccaagcctgcggccgcggcggccaagaagcagaagcagccgaagcaccgcgcccacaagatcgccggcgagagcgccatcaacatcgccgtccactagctgctgctgctgctgctgctgctgctgcaagatggcaatggcgtttcctccgaaacttcttgccggtttcttccggccgcttgcttgcttgcagggtgacgacaatggcgtggaaatcttttttctaagttatgggagtgcttgacggcttgtggatttgctgtagataataagttatccgtgatgaagaacaaggggctccgctgcctgccatgggtggtgactgtcagagagaggtggtgtttatttaaatcatgctaatttttatttaatctgctgtgctgagggtgtgcgagggatggcctgtgctttgccaatgtacagggccgtttgtttttgctttccgtaatttatgggatgtggtaaggaagattgagtgttggatgaaagttgtacaaacaagaacgagggtttgtggaaaggaactatttatctaagnnnnnnnnnnnnnnnnnnnnnnnnnnnnnnnnnnnnnnnnnnnnnnnnnnnnnnnnnnnnn

SEQ ID NO: 11300 - DNA, 430 bp, Setaria italica
  Peptide Sequence Number=SeqID_77274
ggctcgtcttgggcgtggcacggctccgtcgcgccggcgccgggctccgaggacggtgacgatggcgactcgaacgcggcggccaatgcagcggcggcctggacgtccttgggggccgcggacgcggcgcgcgggagcacctcggcgaggtcgtgtctcaggaggtgcgcggcacggcccttgatggcgagcgcggcgacgtcgtgggcgcgcgcggccatctcggcggtggggaacgtgccgagccagatgcgcgacttcttgcggggctcgcggatctccgacacccacttgccccacgcccgcatccgcacgccgcggtacgtcgggtgcttcccctcgctgctccgcttcctcttcttcttcgccgccgtcgccttccccgcgaactcttcctcctcttcctcctccccgcccacctcggcatcgg

SEQ ID NO: 11301 - DNA, 419 bp, Setaria italica
  Peptide Sequence Number=SeqID_77275
ggggctcacacccgcacctcaaccccccgatctgattgtatccgagcaggagcagcgccggcggcgacgatgggcggcgaccatggcggcgggcacgggggcggcgacttccgccagaaggtctggagcatgacgggcgggccctactgccgccccgtccactggcgccgcaacaccgccatcgccatgttcggcgtcttcctcgtctgcatccccatcgccatgaaatccgcggagctcgagcaacgcccgcatcacccagtccgaccaatcccatcgcaactgtggtgcaaaaactttggcaagaaggagtactgaaggaccttctccaactagcatggaatgagggtacctttgctattggcttctttttgtcaaaacttgtgctcagcgataacgctggatgaagtgttatgggc

SEQ ID NO: 11302 - DNA, 710 bp, Setaria italica
  misc_feature (676)..(710): n is a, c, g, or t
  Peptide Sequence Number=SeqID_77276
ttttcagttcttagaacaatataaatgttccaattattacttttatgtaaagcagtaacacaaatgcatgccaaaaatgaatatctgcatgattgaaatgatatacctatgtaatacaatcaggaactgctgtttgtgtaatatggttggggttgcagagttggtcctgtcactaagaggcatgcatattgatttaatgtgccaatcgttttgttttaaaatagattgtggaaatatcagtgctaacaaatgtaatacttctatgcagcaacgcccgcatcacccagtccgaccaatcccatcgcaactgtggtgcaaaaactttggcaagaaggagtactgaaggaccttctccaactagcatggaatgagggtacctttgcttttgccttctttttgtcaaaacttgtgctcagcgataacgctggatgaagtgttatgggcatattctggaatgcttcatgtaatgtcttttgacactttttttctctcaatcatgttatatgagtgcctgttgaactcaaataaactggtgattcataagcctctgatgaatttacttgaggggttttatgctgtgatgtagacatggcattttacctttgccccacttaatgttgaaggttccttcttgtatatgtgatggactgatagtgatgctatgccttaacaaacnnnnnnnnnnnnnnnnnnnnnnnnnnnnnnnnnnn

SEQ ID NO: 11303 - DNA, 298 bp, Setaria italica
  Peptide Sequence Number=SeqID_77277
gggagacgaaaaaggggatctggggatggggcgtgggcggcggccggagcggggtcctccgctccatcggcccacgatgcggtagcggcctagcacaggcggggacggcggagcatggggctcccctgctgatctgcgcgggcgtcaccacccgctgctggggatggccgccgcggtgctcgtctaccagagggcgccttattaccaagccccatcctcgctgccctccactccctccttccctctcgacgccctccttccctcctgccggtccactcccgcgccatccgccgccggg

SEQ ID NO: 11304 - DNA, 2255 bp, Setaria italica
  Peptide Sequence Number=SeqID_77278
aggattaagaactattggatattggtcaaatttttcaggtctctcagttgttgctcctgaaaagttaaatttatcatcactgaactcatcaaccaacaatgtacagctccatagtgctatatggcctggtcagttttactgagacgcctcgtggttgggtgttttcatatcatgggaagcctatgaggattggagtacctctccgaacaagctacaaagagtttgttatgcaagatgatggacctgatggagtaaagggatttgcagttgatgtctttaaagctgcaataagcctgttgccatatccagtttcatgcaattttgttttatttggagatggtttgaagaatcctagctacagtgaccttgttcagaaggtttctgaaaattactttgacgctgcaataggggacattgctatagtgacgaatcgaacaagacttgttgattttacccagccgtatatcgaatcgggtctcattattgtagctccagcaagggagattgaatcaaatgcttgggcttttctgaaaccatttaccttccagatgtggtgtgtcctaggtgtcatcttcctctttgtgggtgcagttgtttgggtacttgaacaccgcactaatactgagttccgtggacctccaaggcagcaaattatgactgtgtgctggtttagtttctctaccatgttctttgcacacagagagaacacagtcagcacacttggtagattcgtgctgctgatctggctctttgtcgtgctgattattaactcaagctacactgcaagcttgacatcacttctcacagttcaggagctgacatcagggattcagggcctcgatagcttgatctcgagttcaagtgcaattggctatcaagttggatctttttccagaaactaccttgtcgatgagctcaatattgctgagtcccgtttagtgccactaaatagcccgtcagattatgcaagagctctagagctagggtcaggaaatggtggtgtggctgcaattattgatgagcttccgtatgttgagatcttcttgtcaaaatactgcaaattcaagacagttggtcaggttttcacaaaaagtggatggggatttgccttcccaagagactcacctctcgccgaggacttgtcaacagcgatcctgacactatcagagaatggcaatctccagaggatccatgatgaatggttaagtgggacagagtgcagtgcagacaacaatgcggccgcgtcgaactccttgagcctgtcgagcttctggggcctcttcctcatctgtggccttgcatgtctccttgctcttgtgattttcttccttcgcatattttgccagtacagcaggtacagtaaccaggtggagcagtttcctgagccccagattgtaaatcgaccagcaaggttaactaccatcaagtcattgatctcttttgttgataagaaggaggaggaggtgaagaatgctctcaagaaaagaccaaatggcagtcagcatccaagcataggtgacagtcagcatccaagcataggcaatacagctacagaagaacaatccacattaccaacataacaccttgcaccactgcattactaactatatgagaataatgcgcaaaactgcactgaagtggaagttttcctaacacagaggcctaattggcgaggaaggggttttcttggctgtggtttgttatgacttctgactggaaaacgtagcgttgaaagcagcttcggagtattgcctcctggtaaagtgcaacagagtttgagttttattttttccaacagcaacaaatctggatctcctagcagcaatttctgagagaagtagcatcctgttgcagcttcaacttctggcaagttggccttcttcgttttgaagtaactcctacagaagttcgtgtagcaaacatctgaagcatctgcttcctaataagttgggaagttagaatctttgtttggtgtggtatgtggccagttgtgcatgacctttcatctttctgaagacgtaacatatctaccccttcccccttccactgcggcagtgcaaggagaccatttcagagcagaatctctgacctcacccattttgtcagactcacatccaccctgatgcaacactctgaactagcattctgttctgaatagaagcattgagatcagggaaatttctctgtgatgtactgcctagataaagagaaaatcgatgtacactactttgtaatcctaaactcaaaaatacatc

SEQ ID NO: 11305 - DNA, 927 bp, Setaria italica
  Peptide Sequence Number=SeqID_77279
tccgtgctcgccgccttcgcatccggcacaacccccacctcgtcttctcccctctaaacccacgcctcttcccccgccgccatggccatgcgggtggtgcgggacctggacctggagcggtacgcggggcggtggtacgagatcgcgtgcttcccgtccacgttccagcccaagacgggcaccaacacgcgcgccacctacacgctcaacccggacggcaccgtcaaggtgctcaacgagacgtggaccgacggccgccgcggccacatcgagggcaccgcctggcgcgccgacccggccagcgacgaggccaagctcaaggtccgcttctacgtgccgcccttcctccccatcatccccgtcaccggcgactactgggtgctccacatcgacggcgactaccagtacgcgctcgtcggacagccttccaggaagtacctctggatcctgtgcaggcagccgcacatggacgaggccgtgtacaacgagctggtggagcgggccaaggaggaaggatacgacgtgtccaagctccgcaagacggcgcaccccgacccgccgccggagagcgaggagagccccagggacggcgggatgtggtggatcaagtccatctttggcaagtagtgcatgggtgctgcccgctgcggcgccgaccaggcggcgagatggccgtgacggtgttcagaatcagagtccggtgttaccactagttactgccgtcgtttacggtttaccgcgtgtacattcagtactgtacatcaggatcgagttcgttcgtcgtcgtcgctgccgccatcttgcaaatggcgagcatgtgtctgttaggttggtgttgcagtttgaattaaacttgggcttggagtggatgcttaagatttgaatactactagcattttgtggtgaagaaaaaaaaaaaaaaaaaac

SEQ ID NO: 11306 - DNA, 224 bp, Setaria italica
  Peptide Sequence Number=SeqID_77280
cgcaagcacaatgaggccaagatcgtctgccgcaagtgctatgcgcgccttcccctcaggactacaaactgccgcaagaagaagtgtggctacagcagcgagctgaggtcaaagaagaagttcatcagcaagtattccatatgaatcatttggaaagcgagagaagtgacattctggagtgccatctgaaagcgtcatgcatcagttgaaccaacttatcttag

SEQ ID NO: 11307 - DNA, 471 bp, Setaria italica
  Peptide Sequence Number=SeqID_77281
agtgacttttgtggggagcctttctctaaagaagctctgaggatggagttggcatacggaaagacaattctatagggatgcttcctcaaacagttcacataagacatagtgcaaacaagcttctgaggtgagttcaatagaacacaggagaaaatttcgaatttcaccaggcagctagtttttaaagtccacctgcaacctaatttatccagaatggttggacgacaccttaaaccacatagcagcaactaaggtaatcaggcaacatgaactctatgctcgttgactatcctgaaatgaacgaacaaaatggccatcaattcttgtgcacgaatctatggaagctacaaagtaagtattaagaatattgaacatggaacggccacatgttcctggtaactaattatcatctttacgctcatgaatctcatggagattatttattagtaaacgcccactaatcaatgcttc

SEQ ID NO: 11308 - DNA, 441 bp, Setaria italica
  misc_feature (1)..(30): n is a, c, g, or t
  Peptide Sequence Number=SeqID_77282
nnnnnnnnnnnnnnnnnnnnnnnnnnnnnntttttttttagagaaaattggacaatgtccagcacctattcattcgagatgatcgaatatcaggttagacaaccaagtactaaacgaacccctatggttcgagaaaaaccgaacattttcaccaaaatggagcaacaatccggtcactcacggcacgccgagcaaacgttggccactggaccatgaggtcctccaggaacggatcaattaccatgtaaaactgaaggctacaaaagtggaacttgacataggtcccaaaggcaatggcagtaacacaatgtcggtgataggtgtcagatggtctgaaggcataacacacggacgttcttgccgctgcacccgcgtaagcaaaactcctaggcgccaagtacgttagtatgcagttctgcagttctgaaggctaacgaatta

SEQ ID NO: 11309 - DNA, 1814 bp, Setaria italica
  Peptide Sequence Number=SeqID_77283
tttactttaaatttttaacctttaattttgttttaggaaaaccgaacagcaccggtcactcacggcacgccgagcaaacgttggccactggaccatgaggtcctccaggaacggatcaattaccatgtaaaactgaaggctacaaaagtggaacttgacataggtcccaaaggcaatggcagtaacacaatgtcggtgataggtgtcagatggtctgaaggcataacacacggacgttcttgccgctgcacccgcgtaagcaaaactcctaggcgccaagtacgttagtatgcagttctgcagttctgaaggctaacgaaatttaccctacttgaaagtcccagaagcatgaattaacagcactgcatagtgcttcccagttcaatgccatgcgacttgataatcctagcagctcccaaaagaatatcttgttcggtagataaccactcatcttttctcatgttttttaggttgcatccaatagtgagctctccatatgaactttccaatcttgagagatagcaataaggaacatcactatcaaaggacacatttggattggaccttaacataacctttatctcctctgatactgaaggaaccttctcaatatcttcaattcttataggaatctttgtcacactagctcgccaattggctcgtgatctgttcactatcatctgactggagaacaaagagttgggtactatgacagggagcttttctggattgatcaatgaagttgaagtgagtcctatttcaaccaccctgccttctattggccctgcctttatgtagtcgttaactgaaaatggcttagaaaattgcaaggagaacccactgagaatgttgccaaggacatctctagcagcaaaagcagtagcaacacctcccacaccaccgacagttaatatcgattgaacagctacaccacaagcttcagcaagacccattactcctagtccaatcagtcccaacgaagaaaccttatcaaatgctgatatcttatcgtggtccaaacttgaggcatctgggttggtcatggctttagcaatgaagttggttttccacctctgaaggaaccatacaaaagacagaacaaatgcacccctccatgcctgcggaagataagtggatatgcttggtgcaataagtgttgccatctctgaaaatgccataaatgtgacaagatattttgcaggatcctctaatgcacaccagagactagtttggtacgaaacatcattcttggttgagttccccaaaagtgctgatataggactttgtgacgcgtacttgtgaagcctcctaagaatgataggcatgaccaaccatgccatcattgtaccacatagtgttccgccaagtggaacaactaccttttcaagatttggatatgtatcaaatagctgctggacatgaggtgtaacagcatcagtcagctccttaagtttcttgcctgcatcagttgtagcatctaccgtagacttgcgagcactgtccaagatctcaatccaagaacccccaccaccacctgcagtgccaacctcagagctttctgtagaaggaacattagagacagtactctgagaagcttctggcttgattccagtatctgaggagtatccacgatggaagcttgaaatgcctaagaatcctggtaaagcaccatgtctgggctttgaagtaatcaaccaattagtgtccacacgacttgaaaggggcaatcttctgatccttgtcacatgattcactgtggaataccgatccaccaccttaatctggttaacaacagaaatgtcaggttttcttga

SEQ ID NO: 11310 - DNA, 1163 bp, Setaria italica
  misc_feature (1115)..(1115): n is a, c, g, or t
  Peptide Sequence Number=SeqID_77284
agttcgaatcagattgaaatacggtgacgaaaggttttgagggtggtgtatcccatcggcatattgctctcaagcataatactgaaggaaacgaaactgaaaaggaaagcagtggtcggtcggaagatcgaaaatacttgcatgcatgctccgagcctgggttctcaaatgctgattgtgatgtaagaacctatccacatcaggaggagatagatgaaaaagatcagattgaaagtgaggatgaagacttttgggaggatgaagacgagttcgacactgatgaggaggaggaggaggaggaagagagggaggaacaggatgtgcaatattctgttgctgaaatgacaaaacctgggcagcggttgatcatagcacgaggaggggaaggtggactggggaatgcttttatcgtgaaggagatgcgcccatccaaggcatacagacaagagaagatagcccgcttgagtaccggaaaaccaggaaccgaaaccttcctcgtcttggaactgaagagcatcgcagatgtcggtctggttggattgcctaacgctggaaagagcacattgctgagtgctctctctagggcacagccagagatagcggactatgaattcaccacactgaggccaaacattggcagcctaacctatgaggactacttctctgtgaaagtggctgatatacccggtctgatcaaaggagcccacaagaaccgtggtctgggccatgctttcctgaggcacatagagcgcaccaaagttctcgcctatgtgcttgaccttgctgccacactcaacggcaggaagggcatcccgccatgggagcaactgcaggatctggtcatggagctggagcattaccaagaaggattgacaaggcgaccatcactgatcgtcgcaaacaagatagacgaagagggagctgatgaaatgtatgaggaactgaagaggagagtgcagggtgtcccaatatttccagtgtgcgctatcttgcaggaggggctaccggacctgagagttggcttagaacctaatggatgattcaggtccccagggcattgatttgagaaaaataactgtataatgagtctgcatgtttctttgtcacccaaaagntactgacacagaggacaagtgtgtttgcgattttcgcattcagaacca

SEQ ID NO: 11311 - DNA, 884 bp, Setaria italica
  Peptide Sequence Number=SeqID_77285
ggatgattggggagaatgtcacccagttgggtaagcttgtaaaactaccacggtcacctactgttgatgatattctaaagagatatttggagcaccgggcaaagaaggataacaagataaatgactcctatgctgaggttttgaaaggattacgctgctactttgataaagcattgcccgcaatgcttttgtataagaaagagcgagatcagtatactgaagaagttaaaggtgacgtctcaccctcaactgtatatggagctgagcatctattgcgtctttttgtgaaattgccggagttgcttgcttttgtcaatatggaagaagatgcgctgaacaagctacagcagaaattgctggacattctcaagtttcttcagaagaatcagagcaccttctttgcctctgtgtatgatgatcgtaaaagtgctgatggatcaaaatccaaatgatggatctgaatgttttattatgtaacatcttgtgctggacttgttgcgtaggttttagtctgccattgttgtttgttatgggcatcatttaggactctgccatatgaacatcgtcaactagtgtgcattcaaagttgtaggatagcttctgtagatgtgtggaatctggtacttgaactgccatatgcatgttgtaatttcttgaaatgttgtttgagctaagatggctgagttgtattgtcattttgaaggtggccaatggagactgacggaaatcctccctccctacaatgttatacagagatagggttgtattattatggtcatttgccaccctaaacgtgtttgcgatgggggaatttttttaacattgatgcatcctgttcttaagtgaagtagttgtagtttagtttgttaatttagtaaaaaaaa

SEQ ID NO: 11312 - DNA, 896 bp, Setaria italica
  Peptide Sequence Number=SeqID_77286
cttcctcccccccgtcctctccccctgtccggctgacccctgtcccctcctccgccgctcccactccgctcccctcccctccgctccggtgagaggcgaatcgaatccatggggagctcctccaacaccaacgcgagcggcgggggcagcgataaggaggagaagaaggaggacaagggcaaaggcaaggactcgtcggagccgtccttcaaggagggcgacagggtcctcgcctaccacggccccctcctctacgaggccaaggttcaaagaatcgaaaatctggaagatgaatggcgctacttcgtccattatctgggatggaataagaactgggatgaatgggttgcaaatgaccgcttattgaaattgacggaggaaaatgtccgcaaacaacaagagcttgaaaagaaccaggttgttgacaaatccatgaagtctggacggtcgacacagcataaactgaaaggcgccaatgatgcaaaagctgataaagacgacactaagagtctcgtaaaggggaagaaacgcaagagtcagcctgggactgaggaaaaggaaagaagatcatcagagagtctcctagtgtcacagtttcctttgacactgaagaagcaacttgtggatgattgggagaatgtcacccagttgggtaagcttgtaaaactaccacggtcacctactgttgatgatattctaaagagatatttggagcaccgggcaaagaaggataacaagataaatgactcctatgctgaggttttgaaaggattacgctgctactttgataaagcattgcccgcaatgcttttgtataagaaagagcgagatcagtatactgaagaagttaaagtagtaattgttctaccctagtttgggttaagtctttgtttaaa

SEQ ID NO: 11313 - DNA, 369 bp, Setaria italica
  Peptide Sequence Number=SeqID_77287
cgagctcccactcgtcatgcggcctggggagggtgagggcctggaggacggtcttgcggaggaggtaggccttgtcggcgtcgtagtggccgcggagcgcgctcgttaggcgcggaagcggcgcaagcatcccggagtcggatcgcggcgcgccggcggcgggagggagggggacgggggttttggaggaagggaagggacgaatggtggagcggggaggcgatggcggcgcgatttcgggctgtcctccttggatggcttggacttctgtttggatcgcgtcccactcccaccgaggccggacttgcgccgcacggaagccgggaagcgccggcgcacgggggacggtggtcgtgggctggtggccgg

SEQ ID NO: 11314 - DNA, 489 bp, Setaria italica
  Peptide Sequence Number=SeqID_77288
ccagcgtgccggttgtcggacacgaggaacaggttcgacatggccacatacggccgcccgcgcagcaccagcaggtcggccgtggaccgcgcgtactcggcggtcactgtcgccttcgcctcacgcaccagctccaccgcgtcgcccagcgagccgccgagcagggcctccacggtgaccagcaccgccatgggcacgcacgcgttcccgtaatagccggcgggaagccccagctccggcaagcccctgatgttggagatgaacaccaggcgcacgtcctcgtccggcgagagctccagcgcggccgtgcgggcgcgccagagcgccgccgtgagcacctcgaaagtcgtgaccgtgtcccggaggttcggtgggaggtccttcctgatggcgctgatatcggacgggccaaaggtgaacgtccgcatgaccatatcacccggcggcggaggcggcggcggcggcacggcgtcgaattcgcggtgaggg

SEQ ID NO: 11315 - DNA, 525 bp, Setaria italica
  Peptide Sequence Number=SeqID_77289
tgtaactttgtctaccgtccctaaaaaatttaaaattccttagttcctacgttagtcttcttgactgctgtgtgttatcgagggtgtgatgcctctagtactccattccacccatgccacccattgccggtgcgggtgcctcttccttgggggatctctacaatgatggattccgttgtggtcatcagggatgacacgctagcagcatccaccaaggcagttctgatgacttttaagtggatcgatgataccggccttcaccatgtcaacatattcacctttggcagcatcataaccaaggtcagtatttccttgctccaaaagcttgcccaccaccactgctccctccacaccagcattggaagcaatggtgtgccacaggtgtcttcagggcgttctgaatgatctggacaccaatcttctgatcaaagttcgcggtctgcaatttgtcaagctcctttgccgcatggaaatactgaccttggttctgatgacttttagtggatcgatgataccggccttcac

SEQ ID NO: 11316 - DNA, 466 bp, Setaria italica
  Peptide Sequence Number=SeqID_77290
cctgtaagttggctttcttggtgtccccaaaaaccaggagctttgaccgcacagaccttaatgcctccacgaagcctgttaagaatcagggtacccaacacatcactttccaaatcttccacaacaataagcagaggtttttgcttcttcatagccaactccatgacattggccaccgcgtgcacgtttgatattttcttgtcgtgtatcagtatcaagggatcatttagttcacatttctggttcttttcgttggtaataaagtacggggagatgtaacctctgtcgagcttcatgccttccacaacttcaagctcattatagagagtgttgccatccgcaatggtgataactccctctttaccaaccttctccatagcttttgcgattagctcaccaatctccctttccccattggctgatatagtacccacctgtgctatttcctctgatgtactgatcattc

SEQ ID NO: 11317 - DNA, 403 bp, Setaria italica
  Peptide Sequence Number=SeqID_77291
tttttttttaccgttcaaatttttatttactgcgggcatgaagtcaacccaattcagtttacaaactgccattatattccataaacgaatccgaacaaacaagctgatgcaaaaaagcagaaactagcacgacatacgtgacaaggagcgagttttgcaacaccagacatcactagcgatttttattcacttgggagcagacgaatagttgccgcgacaagaaactcaccggcatcgccgtcaggcatcacgaccacgagcccctcgtcgccgccgctcacgatgccgaacgacacgttgcacgggcttgctgtccctgagcaccatgtccgccagcccgagctcctgccactgggcaacctcaaagcttgtaactgtccgccgccgccgcaagctgctgtca

SEQ ID NO: 11318 - DNA, 366 bp, Setaria italica
  Peptide Sequence Number=SeqID_77292
tttgtgtcacatgctctaccctcataccaagtgcagcatatggcgagccacacgattgctgcatgggatatcttccagcttcggctctatttgctattcgtggattgtgagtcaactttgtattgaaaaaaagtatgacctgcaagcaacatgcttcttacacagcgccatagctatagcctacagcaagaactggaagaaggctgtgagaatttcagcacccttctcctggtactgactacttgttcttgtcaagccactcgaggatacgtttctccgactctgtgcgctcctcttctttcttctctctggccgggccctcgatgagcccgaagtagtccttgtaattcctcttgtaatagtcat

SEQ ID NO: 11319 - DNA, 390 bp, Setaria italica
  Peptide Sequence Number=SeqID_77293
ggggaggggtcttggccatggtggtgtagaacttggcgctgagcccaaggtagctcgtggcgaggctgacggcgacgcggctgtcggaggggaagttcttgatgcagaggaggtagcacacggtgttgatccagcagatgccgttgccggcgagggaggtgagcacgaagaggtgccagtacgcgagcccgggcctctcgaggaagaggaactggacgccgtagccgacgaggccgaacgcggcgccggtgagcgccaccgcccagagcgggaggtgcagcgcggccaccccggcgaaccagccgaagagcttcccggcgtcggaggcggcggcgaggaagttgagccgcacctgggagatgcccttgatctccttgagctgcgacgagt

SEQ ID NO: 11320 - DNA, 642 bp, Setaria italica
  Peptide Sequence Number=SeqID_77294
gggaatgctgctggctcacataaccagaggtcatgctttcagtgtatgggcgtcattcctttctctcacaatgttccacatgtatgcaaattataaggcagtcaagtcactttcactcactacgctaaacgatgagagaacttccatcctactacagcacttcaaggaatgtggcgaaggtgagtgactagtcaccactgctatgggttagacttatcatgattgttgaatgatctcaattttgtgccaatgtattagaataataaccacacaagatgctccacaattttaccaaaatttctagttttccccttttcctagttcttgcaccgcaggaggtttctcagaaggaacatattcttcctttttggtcaagctggaggaaattaattagaattaaactgccacatgagcgtgtgcacttaggtgctaaagcctctatgcttacacatactgacatgttggagattgcaaaaacaggatcccactatgaaaacaccaactaccttttgctggataaggaaggcggtgttcacattttcatccacaagcaggcagcaccagctgtattgttttgtaagttcctttcttaatttaactaattagggtaactttacttaattagtcttaagtacttaagta

SEQ ID NO: 11321 - DNA, 633 bp, Setaria italica
  Peptide Sequence Number=SeqID_77295
tttgttttcctttcatcattgatagttataatgtgcttaggcagcctatctaggtcattcagtaagttaatttacacattgaacttcagaacttattaagaggaactttctgagaggatttttttgggctaatttattgtttctgtgtcctagctggtgttgctagtggagcaactagagcagcattaacacagcattttgcacttgcaaaaaatgcagctgatatttctgcgaagaagcatattcaacttttcaggagggcagtcaggagacacttgctacaatggtagggatgggattgggaatgctgctggctcacataaccagaggtcatgctttcagtgtatgggcgtcattcctttctctcacaatgttccacatgtatgcaaattataaggcagtcaagtcactttcactcactacgctaaacgatgagagaacttccatcctactacagcacttcaaggaatgtggcgaagttcttgcaccgcaggaggtttctcagaaggaacatattcttcctttttggtcaagctggaggaaattaattagaattaaactgccacatgagcgtgtgcacttaggtgctaaagcctctatgcttacacatactgacatgttggagttggaaga

SEQ ID NO: 11322 - DNA, 3044 bp, Setaria italica
  Peptide Sequence Number=SeqID_77296
gcgggagagcgcggaggcggacgagccgctccactcctcgaccgtcaaccacccagtctcggcctgcgccttcgtgcccgagggctttcctgggagcgtgactccggattacgttcctttccagatgtgggatacattgcaagggctctccacatacatccgtgcaatgttgtctacacaagctcttttaggtgcgatcggagtcggagaacaatctgctactgtcataggtgctacttttcagtggtttctgagggatttgacaggaatgcttggagggatattgttcaccttttatcagggatctaatcttgatagcaatgcgaaaatgtggcgtctagttgcagactttatgaatgaccttggaatgttgatggacctcttaagccctttgtttccttcatcattgatagttataatgtgcttaggcagcctatctaggtcattcactggtgttgctagtggagcaactagagcagcattaacacagcattttgcacttgcaaaaaatgcagctgatatttctgcgaaggagggcagtcaggagacacttgctacaatggtagggatgggattgggaatgctgctggctcacataaccagaggtcatgctttcagtgtatgggcgtcattcctttctctcacaatgttccacatgtatgcaaattataaggcagtcaagtcactttcactcactacgctaaacgatgagagaacttccatcctactacagcacttcaaggaatgtggcgaagttcttgcaccgcaggaggtttctcagaaggaacatattcttcctttttggtcaagctggaggaaattaattagaattaaactgccacatgagcgtgtgcacttaggtgctaaagcctctatgcttacacatactgacatgttggagattgcaaaaacaggatcccactatgaaaacaccaactaccttttgctggataaggaaggcggtgttcacattttcatccacaaagaggctagtcgatggatggacgagaagtccttcatacatggactcatgctagcaagttcggcgtggaacgtcaaatctcagcatgcagaggctagtcgatggagataaagtggtatacttctcgtccatccatcgctgcaggcgaagggttactcaacagagcgccttctgtcgcattcaattgtttggagggcacgctggcttcacggcacgctggatgaaaagctcaagtaggaggaacgaagccctacgggcttatcgtccaaatctaacttgggtgagaccgcggtaacatgaatacatgacaaaagacagacgcatgagtttcactaagaccagcaaatcttgttttccctatcgacaatgtagcaaggtcttcactaccaggtgctggcctgtatgctcaagctcagcatggtacgtttaatgattcacattaggtacagccttacaggaaatatccaaagagtgtatttgcttagtaccgggtcactcagtctagcatcatttattgatgcagtcctacaaatcactgtgatgggaactcttcgctgcatacaacgcacctacaggaaatgctcttgctatccggatgatcacctgacgctctggtaggcagagccgcgcgaccttcagaggatgcgcagacgcatctcaccttaccattcccttgacctgcgctgtcattcaaggcaattcgaccattcacattcggccttccagtggtgatatctgctggagaaggctctggtgatgctcgcctgcctctctttctctgatgcatctgtttattaggggcctgctcctgaaacttgtcgggcaagaatgcatgctcggggaattcagttatgtccgaaggcccacggtacagatctgaaagccgcctaatctttggaacctctcgctcctctgagttatcatcgtgttcaacttttacctcattgtccatgatttccatttcatcttctttcccagctttttccattgaacatgcagcagatgcaaaagaatatagtgtttgtttctctgtggccttatcagcagcaggcaacacaggctcttttttcacttcatgaagtgcagtaaatccaggtggaacttccattttaacaggccttgtaacatttagagagaacctaatgaggggcttcttttcagtgccaggggtacaagcacgagttgctggtccagcaggtagtcggcgatgagcttcagtaaagccaggaggaatatctgtaggaaatcctggaggagtgtccaatatcagactgggaggtgcattggcaccagacacagcagcagcttcgatcggaagccgacagtgagctttcgtgacgccaggaggtacatcaagagaaaatccagggggtatgtccagcatcaagtctgagctagctgaagatctgtaagcaggctggcatgcggaatcttctaagctaaaaatgctcttgtttgcagagtcatgactgcaacatccgttaagaagagaagcagcaggagctgaacaactggatgcagggtttgaatcaggagttccgaccactgccatgcagtcattgactctatcagtctccttgccccctgtcaaatccaataacttggcaataccctcataattgtccctccctctctctttgttttctgtgacatctgttggattgcctcttgcacccaatgttatgccaatatcagattcattattctctgtccctttgccttttgtgacattcaatcttgcgcctacctcctcatatttgttacaagagtcttcatttgactgactgggattgctgatcttcacattttttatatgattgctgggttggcaccgcttcttcctgatacgcttcccaaaaacaccccaaaaatataattcaccattttttctctgatagtttggtgacagcaacaacgatgaaaatattgccaattcagtatcaccaactttggtcaagagaccagtatgtgaagcaactttttcaagaagatgatcgaaactcctgtgaggcctttcatgactgctcacaaaccatagtccaataatacccccccgtaccga

SEQ ID NO: 11323 - DNA, 1220 bp, Setaria italica
  Peptide Sequence Number=SeqID_77297
gaattttactccatcttcttactttcagaacagctcattcctgggatcttctcgtggacttggagtgaattctaattttctgagactaagaagaaaaaagaacaagtgcaacaacatggctagtagtgttagtagtgtgagtagcacttctgatggaagtgagcatgcagttgctactgaaggcgatcttttagctgatgctgactctatggtacgccgtcagtccgatacgccttccaacaatgagaatgctggcagcaagacggtatctaagcggccccgctctgaaataaccgaagtttcttctcatgctggcaaagatgttagtgaaaacgtacaaggtgcaaatggtcaagtcggacgcccttggggctgggatgatgagggtgttgtgatggacatcaatatactgctctcagaatttggagattttagtgacttctttcaagaagaggagttagattttggtgagcctccaggtactgctgaatcacacgctctcgtaattcctgcttccgactgtggagatgtcacattcacagatagtccgtccacagcaatggatatccctgaacaaagactttctcctgttggtttcacatctttggatgcatttgaccaacaaattatggcccctgctcaggatgccgtttctaaagttcaagaacctcagaaagatgttgcaactcctgcacaatcccagtctttagttttatcgtctggaagatttgactatcttaccaaagctgaagcaatgctcacattcgctccagaatatgcagctgttgaagtttctgttgctgaggtgccagcatcattgttcacaaatccgtacttgcccagatcaaagaaaccaggcagttctagttttagctcaagagtttattcatatgatgttacacaaagttctcaaatcgagtctgcaggagataagcctgagaagccttctaaatctggtaatcctttacgtgatgttgattcatcaaacttatacacacttgtccaaggtgggaagaaagagagtgacaagagcttaaacagtaccgacatacagccaactaagggaggaacatcaccacctatttctggtgtgacttcatttagttcttctcttgtttcacaaaagaagagtgatagcatgtttaatgctgggtattttttgctatctatgaagactgctcttgcaactgaaattgaatgcatcacattccaggctgcca

SEQ ID NO: 11324 - DNA, 229 bp, Setaria italica
  Peptide Sequence Number=SeqID_77298
aggacggtgagctcttcctcgtgctgcgcgtgaagcacaaggtagagtgtagtttcaaggggagtacgtatgcaactacggagaatgccaccaaatcttgtgaaatagctgtcgatcccagctgctacattcctgtgccctttctgcttgttcattgccatgttccctgtaaatgtgaatactagatttttactgcagagattcacctgtgtctacagcacatgatcat

SEQ ID NO: 11325 - DNA, 269 bp, Setaria italica
  Peptide Sequence Number=SeqID_77299
cgcgtgaagcacaaggtagtgaacaagcagaaagggcatacgtatgcaactacggagaatgccaccaaatcttgtgaaatagctgtcgatcccagctgctacattcctgtgccctttctgcttgttcattgccatgttccctgtaaatgtgaatactagatttttacggcagagattcacctgtgtctacagcacatgatcatgcttatgtatttcactagctacagaaatacataagcatgatcatgtgctgtagacacaggtgaatt

SEQ ID NO: 11326 - DNA, 423 bp, Setaria italica
  Peptide Sequence Number=SeqID_77300
tggtccttctttcttctacatggaacgtctgcaaaaacggcaatcaatgtgaacgatgtgttttacgagattgcgaagaaattgcttcaaggacaacaggttcagaacccacagggtggaatggtcctcaaccagagaccacctgagaggacggtgagctcttcctcgtgctgcgcgtgaagcacaaggtagagtgtagtttcaaggggagtacgtatgcaactacggagaatgccaccaaatcttgtgaaatagctgtcgatcccagctgctacattcctgtgccctttctgcttgttcattgccatgttccctgtaaatgtgaatactagatttttactgcagagattcacctgtgtctacagcacatgatcatgcttatgttatttctgggactagtgaaaacaggtctagacagattcg

SEQ ID NO: 11327 - DNA, 447 bp, Setaria italica
  Peptide Sequence Number=SeqID_77301
ttcacggtctttctctctttttgccttttcttcctccctcaaacgttctttctctttaacctttccttcaggtggacaacacactcttcaaaaagctctctagcgtaagtctcactgtccaaggccctgaactcttggctgtcctcaaatagctgtttagaatcatcccacgttgaagcagctgatatttcctctagttgtgaggctggcaacaagggatcgaatcctggttctcaataaaatagaaagaccggtatgttccacatggttgtggtgctatagcagtgtgcgggtagtagctgccttttggggccttttctcaaccttaaatgaaatgccttcgggatgcctctcgcattggtttgagttaaaagaaaaatttaggtggcctcagaatggattcggaattgcacgtgattgagtacagaagatctagtaaaaattttc

SEQ ID NO: 11328 - DNA, 409 bp, Setaria italica
  Peptide Sequence Number=SeqID_77302
gggcggcaaagtctagcctggtcctccggtttgtgaaaggccagttcgtcgaattccaggaatcgaccattggtgcggctttcttctcgcagaccttggcggtcaacgacgaaacagtgaagtttgagatatgagaggtaccacagcttggctcccatgtattaccggggcgctgctgctgctatagttgtctacgacatcaccaatgcggcctcttttactcgtgcaaagaaatgggttcaagaacttcaagcacaaggaaacccgaatacaataatggctcttgccgggaacaaggctgatttgttagatgagaggcaggtgccagcagaagaagcaaaggcgtatgctcaggagaatggcctcttcttcatggaaacgtctgacaaaaacggcaatcaatgtgaac

SEQ ID NO: 11329 - DNA, 264 bp, Setaria italica
  Peptide Sequence Number=SeqID_77303
tggcggccaccgccggcggcaacaagatccgcaacgccaagctggttcttctcggggatgtgggcgccggcaagtctagcctggtcctccggtttgtgaaaggccagttcgtcgaattccaggaatcgaccattggtgcggctttcttctcgcagaccttggcggtcaacgacgaaacagtgaagtttgagatatgggacacggcagggcaggagaggtaccacagcttggctcccatgtattaccggggcgctgctgctgcta

SEQ ID NO: 11330 - DNA, 332 bp, Setaria italica
  Peptide Sequence Number=SeqID_77304
cacaagaggagtttgttcgttcgtgttccaagatcctctcgctcgcatgcccgtattttgatccccacccacccaagtccatctccgccccctcactccggtggttcgttgttcctccgatcccaaatcgtgatccactcgatggcggccaccgccggcggcaacaagatccgcaacgccaagctggttcttctcggggatgtgggcgccggcaagtctagcctggtcctccggtttgtgaaaggccagttcgtcgaattccaggaatcgaccattggtgcggctttcttctcgcagaccttggcggtcaacgacgaaacagtgaagtttga

SEQ ID NO: 11331 - DNA, 498 bp, Setaria italica
  Peptide Sequence Number=SeqID_77305
gttcctccgatacccaaaatacgtagaataccaactacgaataggacggaccaaccgccggcggcaacaagatccgcaacgccaagctggttcttctcggggatgtgggcgccggcaagtctagcctggtcctccggtttgtgaaaggccagttcgtcgaattccaggaatcgaccattggtgcggctttcttctcgcagaccttggcggtcaacgacgaaacagtgaagtttgagatatgggacacggcagggcaggagaggtaccacagcttggctcccatgtattaccggggcgctgctgctgctatagttgtctacgacatcaccaatgcggcctcttttactcgtgcaaagaaatgggttcaagaacttcaagcacaaggaaacccgaatacaataatggctcttgccgggaacaaggctgatttgtagatgagaggcacaggccagcacaggagacaaaggcgtatgctcaggagaatggcctcttcttcat

SEQ ID NO: 11332 - DNA, 473 bp, Setaria italica
  Peptide Sequence Number=SeqID_77306
ggcgaggagccaacacggcacgccaaaccaaaaccacgcgctccaaatttcttctgcacaagaggagtttgttcgttcgtgttccaagatcctctcgctcgcatgcccgtattttgatccccacccacccaagtccatctccgccccctcactccggtggttcgttgttcctccgatcccaaatcgtgatccactcgatggcggccaccgccggcggcaacaagatccgcaacgccaagctggttcttctcggggatgtgggcgccggcaagtctagcctggtcctccggtttgtgaaaggccagttcgtcgaattccaggaatcgaccattggtgcggctttcttctcgcagaccttggcggtcaacgcggaaccgtgaagtttgagatatgggaccacgccagggcaggagagttccccagcttggctcccatgtattaccgggcgctgctgctgctatagttgtctacga

SEQ ID NO: 11333 - DNA, 596 bp, Setaria italica
  Peptide Sequence Number=SeqID_77307
tcttgccgggaacaaggctgatttgttagatgagaggcaggtgccagcagaagtatgttactgtgcttcctaagttacatgtttaacaaatattcatgtgctgctgcatttgttttagtagttgccatcatctttattcttcagagatttctcatgctttgcattcattactgtttattagtcaaaactatgtacacaacagagtgtgttgagtttggctgctgattctgatacagccttgttaggataggaagttttggcatcttctaaaaatagtaccggagttattgaccgcacaaggtacatagaaagtagagacaggctgatttgcatccagtttgatgccaaactaagctaggaccctgggagcatggcaatgttggggaatgggagcagcagtgaagcaaaggcgtatgctcaggagaatggcctcttcttcatggaaacgtctgcaaaaacggcaatcaatgtgaacgatgtgttttacgagattgcgaagaaattgcttcaaggacaacaggttcagaacccacagggtggaatggtcctcaaccagagaccacctgagaggacggtgagctcttcctcgtgctgcg

SEQ ID NO: 11334 - DNA, 486 bp, Setaria italica
  misc_feature (476)..(476): n is a, c, g, or t
  Peptide Sequence Number=SeqID_77308
tttttttcaccaaatcgtcagtgtgagtagtcaattgaacttcacgagaaaaaggtaaacatgttttaagtcaaataacacaaaaggaaacagaaaagtattaaaataaggaatggttgcaccaggccctgctgatatactggcactaaacacgtttagtgataaaatacactaaagctggtgtttgtaggcttaacacgacaggttgtatgagcaatacagtcagagccacatccccagtgtttagcttgttttgcacggaataacgaatgttataccttcctagatttcttgcgatcactggtatgcctccgagatttcttagcatcatctttatcatccctttcagaactagcatcatctgtgtcatggtggcgtctcttatgtttcttttgtttatctcttttcttatcttttgaaccatggttctccacatcagcacgatcaaggagagatgaaactgatattgatggtgntgatgtggag

SEQ ID NO: 11335 - DNA, 889 bp, Setaria italica
  Peptide Sequence Number=SeqID_77309
ttttttcgtctggttcaagtactcattgaaagcttgctttctctctccaagagttttcaaagctccatatcttttgtcatttatgatgactctcatagtctgctcccatgtccaatcagactcaacatttactgactcgagcagggacttgaatgcattttttgcctccgtcttagtggcatagactacaggttcttcttcacttgttttctcctccagtggagtgacattaatcttccctgcaactggcatggtctttttggcctcctccaaatcttcagcagatgtaccatcttctatgtccgcaccagttgttacagatgaactttcattattgtttctgctggtccctgcatcggttgcaactaatttaacttctgtgcttgttggaacaggaacaacagcagtacttgtaccaccattttgcatgccaatagtagaagaactggaagtgttgtccacattatgtgatgggacaggaccaggaggaacagggtttgctgatgcatcatgcgcgctgggagcaattaaaccaactgcagttgaagactgattagcaggtacagtagaaggttcagaggcagcagatccaacaagagctgcagctgttcctgtttctcgatccgattgttgatttgatgccttctctgccaattcacgtgcagcctttaactcatcaggaatagtccattttgattgctttgttactttgttgaaatagtactttcgtccttctggagtagtaaattctttccattcggttgaggcgtcagccctctccaaaggtgtcatcaattcgacaggtttctcccaacttgattgcctagtcttcttattatagtagtacttcttcccctcagccgcagtgtgttcttgccaatctgaagag

SEQ ID NO: 11336 - DNA, 295 bp, Setaria italica
  Peptide Sequence Number=SeqID_77310
gagctcgccaagctgctcctcagccgcggcctcaccgtcgtcatcgccgtcccgaccccgccggcctccaccgccgacttcttcgcctcctccgcctccgccatcgccgcgctcgctgctgccaaccccgccgtctccttccaccacctcccgcccccggactaccccatcccggacccggaccccttcctccagatgctcgacgcgctccgcctcacggtgcccgccctcgccgccttcctccgctccctcccctccgtcgccgcactcgtgctcgacctcttctgcgtcgacg

SEQ ID NO: 11337 - DNA, 392 bp, Setaria italica
  Peptide Sequence Number=SeqID_77311
agctgttcatcctagcaggtaggagaacactagtcagagcagtcctttcttcacagctgatttactacctctccgtcctgaatgctccagcgtcaatactagaagaaattgacagacgacgaaagcgtttccttggactggcacatacgagatcgcgggagggaagtgcaaggttgcatggcacacaccatgcaagccaactaaattgggtggcctaggaattctacatctaaagaagttcgcaagagccctaagactacgctggctatggcccgaatggaaagagccgcgcaaaccatgggtcggcataccaacaccgtgtaatgagagagacaactctgttcgcttcagtaacgccatcatgttagaagacggggagaagggctaaaatt

SEQ ID NO: 11338 - DNA, 425 bp, Setaria italica
  Peptide Sequence Number=SeqID_77312
ctggtgatgagtcaaagctcctcgtgtacgattacatggacaacggcagcctggacaattggctccatggcaacaccctctgcacagggcactccatggtgaggccgcagtctgtgcagcgcgtaccgctggactggccgacgaggcttatagtggctgttggtgccgcacagggactgtgctacatgcatcacgactgttcaccacctatcattcaccgggacatcaagacgagcaatatcttactggactccgagttccaggctaaggttgcggacttcgggctggccaggatgctggtgggggcaggggagcccaacacgatgtctgcagtggccggatcgtttggctacatggctcccgagtatgcttacacgaggaaggtgaatgagaaggtggatgtctacagctttggagtcgtgctc

SEQ ID NO: 11339 - DNA, 508 bp, Setaria italica
  Peptide Sequence Number=SeqID_77313
gggagacggcggcagcggcggcgcgggagacggcggcagcggcggcgccggcggcggcaccacctgcagccacatcacgagcaggtaggcgccgtatcccaccatagccagcccgaccgccatgacgatgaggttgagcagcttgaggaggcactcgaagaagccccggcacgccatggccgacggggcgggtgggcaggcgggcgctcctccccccacgcgcacagcaagtcaggaaccgcgcctcacgccggaatctccacggcccgagggcgcatcaacgatggcgggcggcggcggattcggcggaaaggaggcgcctttgggcgatcccggctacggaattcggcgctcttggttgatttaggacaggagggaggagacctcgaccaggacgagggatccggcggaggagagcagggggttgcgcttggattattatggaagtttgggtggatttgggactcgtcggaggagaagatgaagatggaattgcggttagggggtg

SEQ ID NO: 11340 - DNA, 256 bp, Setaria italica
  Peptide Sequence Number=SeqID_77314
ttagaagctcagcaaactacgtttcacaatagcacttacacctaggtaaggggtccattcaattaccctgaccagtttgctatgcttgatcaatgaaatagaccacacacaaaatggtctgccttctcagcccgtccatcccatttctagtaggtaagcatcaacttatggcgtgcacaaccagtaattgtaaatctcgacagtgatcacctactcgcctgattaagtgatcacctacaaagctacaagtttcggg

SEQ ID NO: 11341 - DNA, 929 bp, Setaria italica
  Peptide Sequence Number=SeqID_77315
tttggtttttttttgtttaagtttcttttgttttgtttttcttttaaagtaattaattgtatactattccactcatatgaaaatttgttcctttgattttcgactgaaatgctagagtttcactgtcaaaggctattttgattgatacatatcaggtgagggtccctacaactttttttttggcacatagaactgcctctacgtgcagcagcaactctccattaccaccaagaaggctaggaatattctgcctgtgtgggagtaaccagcaacccttcatcaccaccaagaaggctaggactgtttctgcctgtgtgggagtaaccagcaactcttcatcaccaccaagaaggttaggactattctgcctgtgtgggagtagcagggggaggtgacgtaggtgcaggtgtgacaattgttgctgaaggttcccttagagtctttggccccttatcatcagtgacttctgttgcagctctctccttggctttttgggctctttgaactacttcctcctggaactcctgcacctgcttctgctgctcggcctgccactgcccgacgacgctgaacacctcgcccaccaccgactcgacccgctccgtgagcgcctccgcgaaggccttcccgaggaagaaggcgtcgaggacggccttgctctcgttgtcacctgttttgggctccgggcgtgagccgccgctgctactcctggccgcgaatctgggaagcctcctggtggaggaggtggaggcgcggcgggggcctggggcggggaaggggacgcagcagacgagggagagggacgcggcgggtggcgccatggttctcgccttcgtcttcgtgtgtgtctgctttcgccttgcagcggcgcgggtgggggttgggtgctcgacgccccccggcagccaccggcggaagcgaggccgagg

SEQ ID NO: 11342 - DNA, 890 bp, Setaria italica
  Peptide Sequence Number=SeqID_77316
cagaagcatcttcactactatttggtatgtcgagatggaagcaaattggtaccagaatcggttctgccacttctcaagaattctttagctatatttgcaagcttcttcaacatagtagtagcagtctagtgcctccacctccacaggctcgatttcatgcttttggagctcctactcttccacattgttgtctttggttgccatcgcctcatcagcaaggctagacaatctcctgacgtcattgggatctatggatagctcatccagcttgtctagttccttgtccctaacatctaaccttctaagtactgccttcagctctaggtcttttgagtcaagtgctttataggcaactcttaagtccatgtccttctgttgtaaggattctttcagcatgtcgatgtcagcctccagttggttatgtttatgcaaattggactcaagggctgtacctgtgtttaaaatttcattatcgagcaagttataaatgtcaaattcttgaccttctacagaacctataagattgccagtgagctcaactatcttttgcaccacagattcagcttgtgagcatcctaatctcatcttatccaattcaccctgcattaattgtatacgttgctctttatcatgtagtttggttctaacctgaacaagttgatcctccttggtacttatcatctgctgaagttcaacaacttcattgttaacttcgtcaagtcttcgttgtgtctccagaagctccaaatccttcttatgaaccgcaaattgtatggagtccaccttcagtttcatatcttcgacttcgtgtctgacctctaacaactcactctcttttgtatcgactagcttttgtgaattgaagtactcattttccttctgagctagct

SEQ ID NO: 11343 - DNA, 242 bp, Setaria italica
  Peptide Sequence Number=SeqID_77317
ttcctccctgtctcagcggaagatccaggccgccgtctcatccaagcccatcgtcatgagggctgagtacgcccactgccccaacctcaccatcatcgacaccccaggtttcgtgcttaaggctaagagaggtgagccagagagcacaccagatgagatcctgtcgatggtgaaatcactagcgaccccaccccaccgcctcgttctgttcctccagcagagcagcgtcgaatggtgctcgt

SEQ ID NO: 11344 - DNA, 646 bp, Setaria italica
  Peptide Sequence Number=SeqID_77318
ttttctctatcgatgttccatgaacaagaatttctctttttctctaaattaaatggggaatcgagggtctattatatcgttctaccttacaattttgctagatacaaagcataaaaataaataatatatatacaaaaaatacggatgttgatgaaattcgattttttgtggtacttttcgtagattttactctgtttatcctttagtttaattcagtttgaatttcgatgtattctgtaatgtaaatagaatgaaatttattgtgtaaaatgcaatttcaataaaataaaaaaggagtcttcatgtcccgttatcgagggcctcgtttaaaaaaaatacgccgtctgggagctttaccaggactcactagaaaaacgcctaaatccggaagtaatcagaaaaagaaattccattctgggaaaaaagagcaatatcgtattcgtcttcaagaaaaacagaaattgcgttttcattatggtctgacagaacgccaattacttagatatgtacatatcgctggaaaagcaaaaagatccacaggtcaggttttactacaattacttgaaatgcgtttggataatatcctttttcgattgggtatggcttcaaccattcctggggcccggcaattagttaaccatagaca

SEQ ID NO: 11345 - DNA, 1060 bp, Setaria italica
  Peptide Sequence Number=SeqID_77319
caacctgattaccacctgaccgccgccgccgccgccatggccgacgagaccgacaccaggcccacgtccgccggctcccggggccgccccgcgccggacgacgacgacagagaggagggcgagatcgccgacgactcctccgcccccgcaccgccgctccagcccgccacgcacccgctcgagcactcctggaccttctggttcgacaacccgcagggaaagtccaagcaggccgcatgggggagctccatccgccccatccacaccttctccaccgtcgaggacttctggggcctttacaataatattcaccaccctagcaagttgattgtgggagcggacttccattgtttcaagaacaagattgaaccaaaatgggaagaccctatttgtgccaatggtggtaaatggaccatcagctgtggcagaggaaaatctgacacaatgtggctgcacactctattggcaatgattggcgaacaattcgactatggtgatgaaatttgtggagcagtcgttagtgtacgtggtaagcaggaaagaatagctatctggaccaaaaatgctggcaatgaagctgcccaggtaagcatagggaagcagtggaaggaatttctggattacaaggactccattggattcatcgttcatgacgatgcaaagaagatggacaaaggtccgaagaaccgttacacggtatgatgctggtgctggaattcccagagagtagcaatgcagtgcagagtttcggtgcctgtgctgaagggttatctgtttacataatctaacatgttgcatctattcctgtactccataagtcagcgactcaagttttaatgtttttgtctcactgtttgcgcttttgccatcatgtatgggagattcttgtcattgttgagttcgtaaaacggaattgtgggaatagtgaatgtagtagtgtatgagctttgatctggaccgcagcatgaatgataggtttgatgaaagcctcgaagtacatgcttgatgcttgccaacgcataaataaagggtaaaaagatgtgaagcaggccaaaaaaaa

SEQ ID NO: 11346 - DNA, 669 bp, Setaria italica
  Peptide Sequence Number=SeqID_77320
tactcttgatttgatttacgcttccatctttgttttcatttatccccagtttacagagatagtccatgggctgaatgacccatttacaaatgtaactccatgcacacatcataacgagataagttgtttttcaacaaatgcatagcattgtttacaaatacacaaaagatggaagcgtaaatcaaatcaagagtaagtagtattttatcatgccatggaaggggaaagtcctcctttgttggcataagccacttcatatttccaccagctggttgccttggaactaaaacacatgacatatatgtggtgtatcattttccttacaacctgcagcacttatatgagctactgataatatccactgactaggggaggcggagcaactgattgacagccaaatctaatgaatcaacattttttcgtagagtctttagttgcatagctaagctttccaagcctctcatttcctcatttaacctcaagcacgaattgatgtatttatttccttttgaagatgcttcaagtgcggattcctggaggcggccgacgacgtcgcccaagcattcaatattctccgccgacgtcgaggtaaccttcgtttccgcgcgtcgcagcagtaagattcgggacgcgtagctctcggcgatggcggcggcgtccctctccaca

SEQ ID NO: 11347 - DNA, 498 bp, Setaria italica
  Peptide Sequence Number=SeqID_77321
accgccggtgatcacccctgccataatttgaggacgccgccctcgtccccaacacctccattgacgccctgacgggccgtcagggtcagggagggagggaggaagtttggcaggaaggtggaggatacaaggatttcgcgtcgtctgggtgggcattgagctagaggacccgttcttacaatcgagcacggcgaggttctgagaagcatggttgaggtcttgaggatgacctgggactgccgcctgccatcgtaatttgattttgggcttgtgggttcagactctgactggaccgggtgtactccatttggttcatgcacccacatatattccaatgcagaacatttgcttcctggcacaccaatgccaacttgtccactcacctactccacttgcactatagtactgcatactactctaatgccactagtatatattacatgcaattagctcacctagagcaagcctattgcagcacaaatatgcaagctaagtcta

SEQ ID NO: 11348 - DNA, 292 bp, Setaria italica
  Peptide Sequence Number=SeqID_77322
ccgattgaccttcttcttcttcctcttcttcctcttcttcctcttctccagatcgcagaactttctctccccatcttggttgctcgtcgctttgtgagtccgttcgcgtgagatgtcttccttgctgcatcacgtttcgtcattggttaaggtagatctgtgagccacacagtagatgccatgaataatcgtggcgttcgttgatcaatggtgtgcatctggcttcttacagcatgccgatctctctagcttctgtggtcaacagctacttgcgtttcatcaattctcagct

SEQ ID NO: 11349 - DNA, 316 bp, Setaria italica
  Peptide Sequence Number=SeqID_77323
ctctctcgcacttgcaggagtccagccgtgagccgtgccgtgccgactaccaggctccaggctaccagccagcaatccgccgcaggggaatctaatcggagtccccgaggcagccccgcggccgaccggctctccgcccctcgccgcgccgcaccgacgactctctcagtccggatcccgatctgcgtggccgcgtgggtgagcggatggaggcggggcggcagcagcaggaggaggcggaggagggttgcccgtgcggcggggcggaggccgaggccggggaccagttcgaccggctccacgacgcggtgctgct

SEQ ID NO: 11350 - DNA, 1031 bp, Setaria italica
  Peptide Sequence Number=SeqID_77324
aggtgtgcctcgcttgcgtgcccgatgcccagcgagccgccggtcgcgacgaggcctctttggccacagctacggcggcatgtcagcgtgtgccgtgcgcgtgtgtcctgcgccccctcctccgcaatccccatcggactcggcctgcaatcagcagactcggcctggaaatctccgttgctctggtgaccgcagcatccttcatccagaacctgttcgtccctgacgacgcccttatctaggtaagaacgagttgaaaaacgagttgcctggtgcccgcagcatcctccatccccaggagaacctgacgctgcccttctcaaggtacaaacgaattacccgtcgcctgctgctttgtttgtcagttaacagatcgcaatgttcctgaacatgttctcatactctggctctgatctgactaacgttgtattggatttagatgactcttgagctgaaactatttggagcagtgcagcaacaaacaataagtacatatgatcgttttttcttaaagaaccaatgacatgcataatggacaacttaaagtcagcagtcagcactaattctttgtcttagtctatctgtttatatgtcagcaaactgtacgacaatccgcgcatcttatggtagagctacgggaaggactgtagaggaagtggcaaggctggcagttgtggtcactgacactggacatcgtcacagcagaggatgggttggtatctctgctcatcgtgacggcaaggctatgcagggagacagagctagaggtttaggaattgcattttcagtagattttgcattttgtacatatatagtatatggtctccaaaatgatgatagctgaagtaattggagcttggggaatgttcctgaatttctgcttctacgatgtatgtcatgggagtttgttccggttgagatgatgaagcaagaccacattacttagattggtagaatttcatttgtgttgtattccttttaccccctttggcccttgcccttctctcaattgtattttgaacattgtttgg

SEQ ID NO: 11351 - DNA, 262 bp, Setaria italica
  Peptide Sequence Number=SeqID_77325
gggttacgtcagtgttggccttcctcaggtcgtcaatggccgcctggagctgctcgttgtggtactgtgcgaaggcgttgtagctcttgaggcagcccctgtcatcgaggtcgccggtgccggacacagaaaagagggagaggtagctcggcgagcacccgatggggaagttcccggggatgatgatctgggtcgctcctagctcaatcacctccttggcaacgttcattatggtcttgatgacctgtgggacgtacggcgg

SEQ ID NO: 11352 - DNA, 2468 bp, Setaria italica
  Peptide Sequence Number=SeqID_77326
gaacaaacttacatttaggaaaagtagtgaggagaatttgtagttctctgagattgtgtgttggaaggagggtttgtgagggttgaattgtggaatgtcgaaggcgaagaacagcaatggttatcttggcgtcaccgagccgatctcgcttagtgggccgacagagaaggatcttgtgcagacagctgaggtcgaaaagtacctttcaagcgcaggcctgtatgagagccaagaggaggctgtctcgcgagaagaggttttaggcaagctggaccagactgtgaaggcttggatcaagaaggctaccaggatcagtgggtacggagagcaatttgtgcatgaagcaaatgcaaagatctttacatttggttcataccgtcttggggtacatggtcctggcgcagacattgatacactatgtgttggtccaagacatgcaactcgaaatgagtacttcttcaggtggcttcacgaaatgctcgctgagatgccagaagttacggagttacatccagtaccagatgctcatgtgcctgttctgggattcaaaattaatggggtctctattgaccttctgtatgctaaccttgctcatgcagtgattcctgaggacctagatctttctcaggactcaatattgtataatgttgatgaacagactgttcgtagtctaaatgggtgtcgggttactgatcaaattttaaaattggttccaaacattccgagttttcgcacaaccttaagattcataagatattggggaaagcgtcgcggggtttactcaaacgttatgggatttctgggtggtataaactgggcaattcttgtcggtcgaatctgtcaactgtacccaaatgcatcccctagcatgttgatatctcgttttttccgtgtctacagcaagtggaagtggcctaatcctgttatgctttgccatattgaggagggtcctcttggtctcgctgtgtgggatccaagaagaaattacagagacaggggccatcaaatgcctattattacacctgcttacccttgcatgaattctagctataatgtatctgttagtactaggtatgtgatgatccaagaattcacacgagcatttgagatttgccaggccattgatgaaggaaaagcagactgggatgcattgttcgagccatttccattttttgaatcatataaaaattatctagaagttaatatcacagcgagaaatgaagatgacctcaggaattggaaaggttgggtggaatctcgccttcgcactcttgtattaaagattgaacgatattcacatgagacgatccttgcacatccgtatcccagagatttctcagacaaatcaaggccactacattgcttttacttcatgggtctttggagaaaacaaacagtgcaagctcaagaagctgagcaattcgacatcaggggaattgtaaatgagttcaaaagcaatatttgtgcatatcaacactggaaagagggaatggacattgaagtgtcccatgtaaaaagaagagaaattcctttgtttgtttttcctggtggagtgcgtccttctcgttcttctagaacagcacacaagaacagtcgtactgttccagcttgtgacgtttcagctggtcaggtagaaaatgtattgtgcacagtcagttgtagtgatgctcaacctataccatataaaggcagctatacaaaacaaccagaaccagataatggctgccttcagttgctgggaagtacttctgtgttgccctctagtttacccaataaagaagctttgaatggccatgctaattttcatgcagaatctgttgagcgtgaacatccagaacactatcaggaaagtacatttgctcctgtgcaaaataatgtgtgccatgcagtcaagcaacataacattttgctgcctaattccaacaatggttggcaatcatatgggcctggttcctctcttaacagttcacaaagagaatgtgcagacagtgctgcaaacaacttgcccagtttgccacctgctattccagctgaacctgatgaacttgatgagctggtgtcctatcatcaagttaaagctaatcaggtagatataaatgctgatcagaggccatctttggagggctcttctgaagataacctggaacaaccatgttctctgaggccccaaaattctaataatccgaagcgcaaagccactgaagagcttgagccacttgagcttgctgcgccatcagttggagctgctcctgcgtcggcatcaactgccccaagaaaaccacttagattgaggttgacgactttagccaaaccaaagccagcagaaggaagttcctgaatcctattgcacaggggccgacatatgaagattgttttccttgtattgaagcaaggttccgtggaagcacagggctttcacctagtgtctttcacgcttcgtcctgaaagtaagagagagagaggccacc

SEQ ID NO: 11353 - DNA, 760 bp, Setaria italica
  misc_feature (684)..(684): n is a, c, g, or t
  Peptide Sequence Number=SeqID_77327
tgctccaccgcatccagtggcgcggctgggcatggaggaaggcgagtgcgccctgggcgccgccgcgataggcgaggaaaccctaaactacgacggcgatgacgtcgagatggccgacgcggacgaggaagcccctgcagctgaggtttccgccgccgccgccgccggaggaggaggaggcggcgcgcaggcggagaagagcggacaacaggataggaataagaggaagaagaagaggaacaaggggaagaagaagaacaaggggaggcaggacgggccgcccaccaacatcgcggacattaatcgatttgttcttaacacttgcaagcgcttgaaggagaagaagtcgtaccttgtctggaacgctgttggctgccttggtgtcactgctgtcagtgatcttgtcagagaggtggaggctattgagaagtgtggtggccagactattgctgatggaagccgtttccgcactggtggtggaattctctggaacatcttaaagtcgcgggaacccaaggcttataaagaaataatggcaaaggggaaggaacttgagaagcagtttaggtatacgaaccgacaagagatgagaaagaacaaagaaaaacgaaagaatagacaaagtttacaacaaggggcagtgcgtttaattgatgatgatatcgaagcgcaagagcaaaaatnaagtgttggatgatcctgagcagttggatgatgcggagaaggcacctccatcagacaataaagctcaacgcaaacc

SEQ ID NO: 11354 - DNA, 898 bp, Setaria italica
  Peptide Sequence Number=SeqID_77328
tctaggtacgggtccgtccctacctaactattcgtcggtactatttaattcgtattttgtttctttaactactttgtctaagtcgtctttgtaaggtagtaagtaagttcgtttgaaggagaataaggcgtaccttgtctggaacgctgttggctgccttggtgtcactgctgtcagtgatcttgtcagagaggtggaggctattgagaagtgtggtggccagactattgctgatggaagccgtttccgcactggtggtggaattctctggaacatcttaaagtcgcgggaacccaaggcttataaagaaataatggcaaaggggaaggaacttgagaagcagtttaggtatacgaaacgaccacagatgagcagaaacgaagatgcaagttcacagggcagtgcgttaattgatgatgatatcgaagcgcaagagcaaaatgaagtgttggatgatcctgagcagttggatgatgcggagaaggcacctccatcagacaataaagctcaacgcaaaccactagcggacagaattcgtgttcctgttgcttatgatgatctatttgaagagggagagatacacgaaggagaaccacaaaatggaagcatttgaaagatttgcctcgacatgaaatgcaagccccaaaggaacggcacataatggcaaagaggattatgtatgaactagtgagccatcgttgcagtgtagcaattttccccctaaacataaaccgtgaacatgcagtgatgtgtgtgacggatgagagttttgttacgccaattagaaccaatgatcggcctgaattcaacgttcaatggaaaatgatgttatgcaagtattggtgtataaatgtgtattcatcattattttttcaccatcactggtagggatattgag

SEQ ID NO: 11355 - DNA, 1147 bp, Setaria italica
  Peptide Sequence Number=SeqID_77329
acggcgagccccgagtggaacgacgtgttcgcgttctcgcgggagcggatccaggcgtcgttcctggacgtggtggtccggggcaagggcttcgccaaggacgactacgtcgggaaactgcgcttcgacctctgcgacgcccccgtgcgcgtgccgcccgacagcgcgctcgcgccgcagtggtaccacgtcttggacaagaacggcgagcgcaaaggggaggtgatgatggccgtgtggttcggcacgcaggccgacgagtgcttcccgctggccgtgcacgcggacgccccgctcgccgtggacgccaagctcgccgcgcacatccgatgcaagcagtacaccgtgccgcggctgtggtacgtgcgcgtcaacatcatcgaggcccgcgacgtcgcgttcgtggacaaggcccgcgtgggcgaggtgttcgtgcgctccaggatagccgggcaggtgcacaagaccaagacgtgcgtctcccggctgccgtcgtacggctggaacgaggaccacctgttcgtcgccgccgagccgttcgaagaccacctcatcctctccgtcgaggaccgcgtcaaggtcgacaaggaggaggtcatcggccacgtccacattccgttcaaggaattcgaacgacggtgggacgctcgtccaattcgcccaagatggttcaatttggtgcgggccagagggagccgccaagatagaaaagttctctaccaagatttgcgtccggctctgcctcgaaggcggatacagagtgctgacagagccggtccactacctgagcgacgtccggccggcggcgagggagctgtggcacaaccggccgcccatcggcctcatcgagctcggcatccacaacgcgttcggcctgagctccatgcgcacgcgcgacggccgcggctcctgcgacgcctactgcgtcgccaagtacggcgtcaagtggttccgcacgcagaccgtcatcgacagcctcgcgccgcggttccaccagcagtgctactgggaagtgcacgaccactgcaccgtgctcaccgtcgccgtcttccacaactgccaggtcggcgacaagggcggcctggtgaccggagaccccgtcaaggacgtcctcctcggcaaggtgcgcatccggctctccacgctc

SEQ ID NO: 11356 - DNA, 972 bp, Setaria italica
  Peptide Sequence Number=SeqID_77330
atcattccatttaagaaagaagataaaagtaagtgatacaacgacgggcctaaaccgggcacacgcacacgcacacgcacacgcataataaagagaagagcaatacaattatttgtttcaggtgctttcactgaccctactacatgaatcaaaagctaccgtgaagtttccgcaacattcagttttgctttgatgaaatcttgcacaaaacttttcagagaacgccctgacgatccaccttcctgaattgcgctgtgtgaagcctcccgcagtccttcagctcttcttctcatctctaggctatcaccatcacccagatccataagctttgtcacagcagcagacatcgcggccctgctgacagcgccatcctcccttctctgttccctcaagttaatcccaatcttccattcatcagcaacaagccgggcattcaccagttgatcccaagcaacggggaacgcgagcacaggcactccggtgaacacggcctccagggtcgagttccacccacaatggctcaggaagccgccgacagaggggtgggacaggaccttcagctggtcacaccatggcaccaccaagcccttgtcaccggagatctgctgtagagtggtggtggtggccttgtcccgggccacccagaagaacctgactgcgctgtcatgaagccccatggcgacctcttccaactgtgaggatggcatcgaaacatagctgccaaatgagacgtacatcactgattttttcggttgggcatccagccagtcagagtatttctcatgctgaatcttgtctgagttgccttctggtggcatatgcggaattgaaggaccaaatgtatatacggggcatgggagcacttgtgatattccattgatggcaccagattcaagctcataaaaggaggtgaagatgacacactgtgctttgcgcacgttggagaacacttgtacaactcgtttcatcggc

SEQ ID NO: 11357 - DNA, 1645 bp, Setaria italica
  Peptide Sequence Number=SeqID_77331
ttagacaaacctgtcagttcctctgcagttcctcaccaattcgaccccccctcctccccctgtatatcacctacatgtctaagacaacaacaatcatgggtcccagaggtttccaaaaggtacaacaactctagctcccagagtctgcagttcttagttgtacaactaaattggccatcagaatgccaacgtgaatggggattagctgttcaaaccgaaccacaactgaagtcatcaaccattgtatctgccctgtccacctcagtagagcttcgtgaactcagcgttttggttaggttctccgagcctgaaggcgtccctctcgaccaggacctgtaacgagctcattgtcttgaccaaagatgcccagatcaagggcgcgcagcagaatgcgtacacaaacaccgctaaggccctgacgacaccgtttagataccatgggaaagacatcaccaagagagtgccaatgatcccgaaccacgtcgtgaggacggagagtgggtggaggaggaatatgttgatcacaatggaagaaagtgagaaagaaccgagcaggtacagaggccatccaagcagcggatgcacagttcttgggatgatgaagaagggaatggtgtaagctgcgagtatggaccatgctgccactactctgagcagggagagcaagaacatagtgcttttctccattcttctgttgtagcacatcttggacaagctagggcgtgccagtcgggtcactgctatgactccaacgtacagtacagcctgaattaatgccactggtatctccgacgagtaccctaggttttcacgacgttgttcatgccaagagagccccaaaggtaaaacaggccaagaccaccaataccatggcttaaaccatggagcacttggaaatgtaatcacactgtttggcccacatggaatactccagcgaagcttcagatagtagtaagatgcatccatctggtagcctagagggaggcgataagtaccctcaagtttggtaccattagctggtggatggaacattggctgatcaagcaagtccgggaaataactagcaaggaagccttggtctgcaccatctgggttttcacgtccaacagctagctcatgtagcatattcttaaaaacatccattgaaggctgaagtacaaagaggcctgtatggaagatacatggattgatgaagacagcacaaaactgaccacactgaaataactcatccgtattctggaggaaaatgttgtcagagtcaagcataacaactcgctcatacgaaactaagctccatgcatacagcttgtttaaagtcaacttgaatcgcatgttgaaattttcttgtttctcatagggattcttcaaattctcgacagagaccaccttcacaccatcatctttcagcgcctggacccagcgcggcgggacgtcgagggacgcgatcacgacgcggtcggcgctggcgcttagcctccccagggaccgcatcatgacgcgcgtcgccacgtagaactcgtagtcccggggcgtgcccatgtacatcatcgccgcgtacgcgtgccgcctcggcggggccgccacccccaccgcgacctccccttccgcccccaccaccaccgccaccgcagccgtcctacgtagt

SEQ ID NO: 11358 - DNA, 1296 bp, Setaria italica
  Peptide Sequence Number=SeqID_77332
tctaacttacgtaagggtaccgtacgtttagtagcgttgaaccaagtgtcacagactcgtgaagtcatcatggctttggataagacgatatctgacatcgagatgcgcctggctgctgctagagccgcccaggcgatgagccagggcatgtcgccaagtgattcagaggaggaccagggaagcatgcggcataggatgtcttttgtcatgggcgttttcaccacttttgctaaccgtaagaggaggaactcaataaggcagacatggatgccgcaaggtgatcagctacggagattggaagagaagggcgttattatccgttttgtaattggacgcagtgaaaatccaaatcctgacaatgaggtggaccgtgcaattgatgcagaagataaagaatacaatgatattttgagacttaatcatgtggaaggccatggagggctccctatgaagattcagatgttcctttcaactgcccttaccatgtgggatgctgatttctatgtaaaagctgatgataatgtccatgtcaacattggtatcaccagatctattttggcacgacacaggatgaaacctcgggtgtacattggctgcatgaaatctggacctgttgttactaaaaatgactccaagtattacgaaccagatcattggaagtttgggaccgagggtaacaactattttaggcatgcaacgcggcaactgtatgctgttaccagggatttagcaacctacatatcagcaaaccggcatatcctgcacaagtattcaaatgaagatgtatcatttggctcttggttgattgggttggaagtcgagcatgttgatgagagaagcctttgctgtggtactcccccagactgcgaatggaaagcgcaggccggaaacccgtgtgcggcgtcctttgactggaattgcacgggcatctgcaacccggtggagaggatgacggaggtgcatcggcgatgctgggaaggccgcggcggaaccgaagggcacgcacagttttgacagccaggggacatggcatcgttgtaccatttcttctgtagggctctgtaattagtcgagaaacgcgcttggtatgcaatggtccagtttttcagatgtgcagcaacatatgccatcttttcctggccagttgcatgtggaagatgggagagggtgaaagatgaggaccatgaaccagtgacgagacctcactggattcttgccttggtatattggtagactgatctctgaagaattttcgatatatgaagttctctagatttaatttatcttcttaaaaaa

SEQ ID NO: 11359 - DNA, 543 bp, Setaria italica
  Peptide Sequence Number=SeqID_77333
cccggcgctgttcgtgggcggcgcccccgtcggcgggctcgaggggctcatggacctacacctcagcggccgtctcgtgccacggctcagggaggtcggcgccctctgcgcctagctagccacctcgccgtccgccgggcgcgcgcggctgggctcgctcatcaatcgccactcctcagtttcacccaaggcgggggcctcgcatggcatcgcgtcgcgtccatgtacatacgcgcggcccctgcgattcggagaagcatcagggtgctggatgcaaagtacaatcgaataataagttttaagcaagtggtagtactactacgccgccggggcgggatgcttgtgagggggaacattgttacagggggttttgcgagaaaacggcaggacctaaatgtgattacttaggagtaacactgcttcttccttcttccttctctccgtctcttttccttcctttcacagcagcaagcaagctagcaagcaagttactacggcagtgatcttgcattgcccctttgttcctaaactattggtagtctt

SEQ ID NO: 11360 - DNA, 1352 bp, Setaria italica
  Peptide Sequence Number=SeqID_77334
atattggtagaatatctgcggactttctggttgaagcggttgccaggcaagatgcgagataattccccccttgtcagagcaacccagaagtttggaggaatatagcaactgattgcacctttcacaaaacccacaaaaaaaacaagagcaatggctaacaagaagcctatgtaaccaaagagagaacgccgtgttgaatcgcctgaagggacacgatcaccatccattacagcaatccatccaccagaagcaagttgttgtgcatccatgtgatggtacctcatgccattccaggcatttctacctttctttggctcttcaatcccaagttttacagggacctctttgtattcttccttggttagcttttcaactctgtataacttaaccctccttccataggtaccactgcaatcctgacctgggcgatacaatgatccttcaaatatgaagagcctcccaccatttcgagctcccaaacttttgtctgatttgtaaatagggtttttcttgtgctcggtccaaggaccaagaggagagttactgtaccaaatctcaagttctgcattcttctcaacaccataccgtgtaaaatcagaagcaaataaccaccagtatccctcaaattggactagtgaggcatcaataagtggcttattgacaagcaccttctccaatgtccattcaaggggaaacttagtagcacgataaaggcgcagctccttctttttgtttccctctggcatcatataaatctcattctcatatttgaacacaaatggatatgacagatgccatgcctcatctaaagcaatgcctagaaactcccatgttgcacctttatcgaagcttcttgcaactccaatatcaccttgcatcgaggctgttgtttttgtttcaaagaaaagatatagtgtatccccctcgacgtagaggaatgggtcggcgacgaagttgctcgggtaccccgcctccgtcggggtcgcgcaggtcagcacggggtttgccaccggccacgccgagctgttcccattgctcctcccttccagctcgatgggccgtagctcgagggggctgctgccgtagaacatcccgaccgaccacgacccctcgccgtcggggcggcagccggcggcgccggagtcggggaggcggaacgacgagaccaccacccagaagtacagaccgcccacgaccgtcgccgacgccgccacggccagcaggaacgaggcggccggcgaacgcgcgacagccgcgcgcatgcttctacccggcggcctcatagctcctcctcgccgcgcagcttggccagccatgccccgccaccccgcgaccgttgcatcgacccgccc

SEQ ID NO: 11361 - DNA, 1748 bp, Setaria italica
  Peptide Sequence Number=SeqID_77335
gtttaaaactacgagctgcaaccaaatttttttatgttacaaaattcgttttaaaaaaaaatgaaaaactatttatgttacaaaagaagcgaaaaagaatcacacaacacgcgagcccaatcttgggggagaaaatgtacacaagctacagagataaaggaacccaacgatccgaacttcccacccattatgcagtttccaaactcttcttttgcttcacattttactgcactgcatttggtctatttcaacattagcttctaaaggtttgaacaatgatccaccttaatctacacagttctaggcttctagcggaatctaataggtacatcacaaaccagggcattttctaccagaaaggttataacttctccccatgctacataactttacatgggatcaacaaataaaaatcttcaccaagcatgtgtgtttgtttgttcagtactgcgcctttgtcgcactatttatcccaaccatcttctcgcatgccaaactcccatttctgagggagggggccatatatggaagaaaacttcgacaagcaatttgttctgatatcatagtgcttctgggtgtttcggctgattgcagcagaagaaagcttggatgtgtcaatagcccatgccgggtggacatactccacggtcctgaaggagtctgtggtcctggaggagcttgcattagcatacagaaaattcatgagcacgtcctcacagttgaagttcttgtgcacatagtccctcccttcacgagcttcctcgctccagtacttcttgaatgcaaactcgctgtccatgaaagcagctcctgtaaggatcagattgtatcccttcttacccctagcatatctctcattcctgtactgcaaagggttgccatctatcatccgagggtaaaagcctaccatccgctcagggtgttctctccagaccttaaaccctttctccaagtcagtgcaagtcatcatgatatcatcatccagttcaaaaacagctcgcgtctttatcagagggtcaaccctgaatcggttgttaagagaattgatctcttcaactcgtatcctgacaggaacagtagaatcaaaggcatcactgcttggaggattacctttgttccaaacaacaactatctcccttactgactcacatctggagtagtgttcaacaaatagcttcaggttccagagacgagcttcatatgtcattgttaccattgtgaattgagagtgttgcccttgatatgtgtatgcctcttcagcaccattgccgccgcataagaaatgcacagcaatgcacacattcacgataccaattagagcaactacccaaaagaacagcatattggaccaggtcttttcattgagtcttgttttggtagcagagatatatctgccaatattggtagaatatctgcggactttctggttgaagcggttgccaggcaagatgcgagataattccccccttgtcagagcaacccagaagtttggaggaatatagcaactgattgcacctttcacaaaacccacaaaaaaaacaagagcaatggctaacaagaagcctatgtaaccaaagagagaacgccgtgttgaatcgcctgaagggacacgatcaccatccattacagcaatccatccaccactagcaagttgttgtgcatccatgtgatggtaacctcaatagaccaattaccaaggacaatttactaacctttactttaaggaactaacttaacaaaataaccaa

SEQ ID NO: 11362 - DNA, 298 bp, Setaria italica
  Peptide Sequence Number=SeqID_77336
aacaacaaatataacgatagaatagcaaagaaagaaagaattgcagcgagtaaataaatccgaggattcctttcctttttacaagcggtgcggtgtggcggatgtcgtccaactactactccatctccatggagggcggcggcggcggcgcccggcgagggtagtagatctcgtggagatggggaggcaggccccctctaggctctagtacggcggcggcggggcgaagtggccgtaggcgcggaaggagccgccggcggagtggtggtcgtcgaggtggatgttgctggtcagcttg

SEQ ID NO: 11363 - DNA, 426 bp, Setaria italica
  Peptide Sequence Number=SeqID_77337
gtcgtccaactactactccatctccatggagggcggcggcggcggcgcccggcgagggtagtagatctcgtggaggggcgaggatgcggagaggcgagcgggtcgacgaggcggcggcggcggcgaagtggccgtaggcgcggaaggagccgccggcggagtggtggtcgtcgaggtggatgttgctggtcagcttgtggaagccgcgggtgtagatgccgaagccgaagacgaggccgacggcgaccagcaccagaatgatgagcgtgcagatgcagcacgccttgctcgggcagcagcacatctccgctcgccttctcctcctccttgttcctgacggggagagagccggggcgcacgcgttccgaaaaggcgaggcgcttttgcttctggctgggtatcgctcgggacgggggcgcgtcaggt

SEQ ID NO: 11364 - DNA, 368 bp, Setaria italica
  Peptide Sequence Number=SeqID_77338
tgaacagaccttgagcattttgaggaacttgaatttggaagccatcccatggtcgagaagggtccatttttttagtccacaaccaacggattcggagagcccagcctagcaattcaaagttatgaatccccaatcctccatattccaggggcctctggaccctttcccaagacaccaggcaatttccaccatttgcatgttcctgtcctttccacaagaaaccccgtcttcttttgtctatagccttgataacccattttgggaggtcaaaggctaacatgtgataaataggaaaggctgtcatcaccacccgcaccataaccaaacgaccagccctattcatcatagaggccttccatcctgggaga

SEQ ID NO: 11365 - DNA, 2126 bp, Setaria italica
  Peptide Sequence Number=SeqID_77339
ttaagtttaacgttaaacgttaacctttttaactttaacggtttacgtttacttaatttcggttcgttcgttcgttcgtttccccggtattccgtccacggccgatgacggcgccgtcgacgacaacgtcaaggatatcgtgctggagaacttctccgtctccgcgcgcggcaaggagctgctcaagagcgcctccctccggatctcacacggccggaggtacggcctcgtcggccccaacggcatgggcaagtccaccttgctcaagctcctggcctggcgccaggtccccgtgccccggaacattgatgtcttgctcgtggagcaggagattattggtgatgaccgatcggccctcgaggctgtggtcgctgctgatgaggagctcacagccctccgtgctgagcaggccaggcttgaggcgtccaataatgctgatgataatgagcggcttgttgaggtgtatgagaagctgaatctccgggactcagatgctgcccgagcgcgtgcatccaagatcctcgcggggctggggtttgatcagtctatgcaggcaagatccacaaagtccttcagcggtggctggagaatgcgcatatcacttgcccgtgcactcttcatgcagccaactctgctgctcctggatgagccgactaaccatctggatctccgagctgtgctatggttggaggaatacttgtgctcgcagtggaagaagacactgattgttgtgtcccatgaccgggacttcctgaatacagtttgcaatgagatcatacatttgcatgataagagtctgcatgtctaccgtggcaattttgatgattttgagagtggctatgagcagaagaggaaggagatgaaccgaaagtttgaggtatatgaaaagcagatgaaagcagccaggaagtctgggagcaaggctgctcaggataaggttaagggtcaggcgctgtcaaaggctgctaaagaggctgccaagaacaagggtaaggggaagaatacagcagatgatgatgatgaccagaaacaggcggctgtgccgcagaagtggcgtgactacagtgttgagtttcatttcccagaacctactgagcttacaccacctctccttcagctcattgaggtagggttcagctacccttgtaggccagatttcaagctgtctgatgttgatgttggcattgatatgggaactcgtgtagctattgttggtccaaatggagcagggaagtctaccctgcttaatttacttgccggtgatcttacccctacagaaggggaggttaggaggagccagaagctgaggattgggcgatactctcagcattttgttgacttgttgacaatggaggaaaatgcagttcaatatttgttgaggcttcacccagatcaggagggaatgagcaaagcggaggctgtccgtgctaagcttgggaaatttgggttacctgggcacaaccatctcaccccaattgttaaattgtctggtggtcaaaaggcccgtgttgtgttcacttctatatcgatgtctaaccctcacattctcctgctcgatgagccaacaaatcacttggacatgcaaagtattgatgcattggcagatgcactggatgagttcactggaggtgtcgtcttggttagccatgactcaagattgatatcacgtgtttgtgaggatgagcaaaggagcgagatatgggtagtggaggaaggcactgtgaagaaatatgatggcacgtttgaggattacaaggatgaactcatggaagaaataaagaaggaagttgaagaataatgctactccaaatgagttgtgctttgcttgttctttgtagaacaagctgttttcttgcactgaaattgcatgtactattagtgtcttttcttttctctggtttgcagagtattcatatatggttacaactctgaaagaatgtaagatgaggtaatatttgtttctatgagttcatccttgtaatcctcaaacgtgccatcatatttcttcacagtgccttcctccactaccccatatctcgctcctttgctcatcctcacaaacacgtgatatcaatcttgagtcatggctaaccaagacgacacctccagtgaactcatccagtgca

SEQ ID NO: 11366 - DNA, 378 bp, Setaria italica
  Peptide Sequence Number=SeqID_77340
cgcaagcacacttacccttgccttcttacttgcagcttcatgccatcttccaagaagaaaataagctaccacaggaagcacaatgaagacaagaaagagcacaggcacatcagcttcccttggttggagcatgtccctaacagaatactgatatccagcgccagaagttctctacttcagctcggaaaaacattccagaataattattgaccgagagcaggaatgccactctgggcggatctcctgccgggtaaaagcaggagcaggaggggcagggccacagccgacggttccgggggagatcgaggccgggagacggagcggcgcccctccgacggtggaggcggccgggtgagggaggccggaggcggaagccga

SEQ ID NO: 11367 - DNA, 468 bp, Setaria italica
  Peptide Sequence Number=SeqID_77341
gcggagtcttaactttattttactttggccacattttgtatccttgatcagctcatagtggtggcagtggatgaatcgtgcacaaagttcagaagctgtgcatttcttcgatctctgagaaaaaaaggttcaggcaagacgagcaattggatgctattcaacaaggatggaccgatgatgtggctaatcgacctctggtagccacttgtgttctgaagatctcaggaactgaatagtagataccctctctgactctgtaccgctaagcttcaaaactgtagatacctttactctctacttcgactccgtttgtaggcacctgcagaaggcttccccgtcggcgtcggcgcgacgcaaccggaggcaccatcttgtccgcgctgaccagacgagggcgacggatggcgacgacgcgtgcataggccggagccggcgaatcgaccgctcccggtcgaaatctcctccggt

SEQ ID NO: 11368 - DNA, 1294 bp, Setaria italica
  Peptide Sequence Number=SeqID_77342
tacaaccacagcacggccgcctcaaaagtcgtaactctccagtccaggcttcaccctctagagttgcgacgggcatgagctccgcggcggcggcgatgatgggggcggggaaggtggtgtgcgtcaccggcgcgtcggggtacatcgcgtcctggatcgtcaagttgctcctcgcccgtggatacaccgtccgcgccaccgtgcgggacaccgctgatccaaagaaaacattgcacctgagtgtgttggatggagctaaggataggctgcacttctttaaagcaagtctgctagaagagggctcttttgatgctgcagttgatggctgtgaaactgtgttccatactgcttctcccttttatcacaatgtcaaggatcctaaggctgagttacttgacccagcagttaagggaacactcaatgttcttggttcatgcaagaaagcttctatcaaaaaggtggttgtaacatcatccattgctgctgttgcctacaatgggaagccaagaactcctgaagttatagttgatgagacatggttttctgatccacatatttgtgaaaagaatcagcaatggtatgttgtgtccaagacgcttgcagaggaggctgcttggaagttctctagggatagcggatttgagattattacgataaacccagcaatggttattggacccttgctgcagcctacactaaatactagtgctgaagcaatcctaaagctaatcaatgggtcatcgtctacatatcccaatttcagctttggatgggtgaatgttaaagatgttgccctggcacatatcctcgcatatgaagttccctcagcaaatggaagatattgcatggtcgaaagagttgttcactactcagaagttgtcaacatcatccggaagatgtatcccacaattcctcttccagagaagtgtgcagatgacaaaccgtttgtcccaacgtatcaggtatcaaaggagaaaataagaagcttaggcatcgagttgaagttgattccactggagacgagcatcaaggagaccatcgagagcttaaaagagaaggatttgttcgttttgactagcaatctgtgaaacagaaaaaggcaaaagcttgatattgcaagatctgtggcatgtaccagactgcacttcacatggtatgcctagaagtttcttggcctgtaactgtacggtgatctgaaataaacgaggcattatgtagttttcggacctgttatatgtttagaggcggatggataactcgatttggggaataaaggaaaaaaaaaaaaaaaaaa

SEQ ID NO: 11369 - DNA, 784 bp, Setaria italica
  Peptide Sequence Number=SeqID_77343
ttggggtagggctttctgttctgatggtccacacaggatattgatttcagaatatgtgaagaatggctcgttggaaaagaccttgttcgccgtcgaagcctcagaaatcttactcgaatggaagcaaagatttaatattgccttaggcgtggcaagaggattggcgtatcttcatcatgagtgcttagagtgggtcatccactgtgatgtcaagcctgaaaatatactgctggatgagaacttggtgccaaagatcgctgactttggcctcgcgaagctcttgaacagaggtggatcaaatatagatgtttctcggatccaaggaactagaggttatttagctcctgaatgggtttctagtctcccaataaccgcaaaggtagatgtttacagctttggagtggtgctactggaactactaaagggagcccgaatttcggacatggaaaataatgagaatgaggaggtggagatggtccttggaaggatagtcaggatgcttaaagagaatttgcagttggatggcagtgaagaattttggatccccgactttattgacagtagactgaatggtgacttcaactacttgcaagcaagaacaatgattaagctagctgtttcatgtctggaggaagatagaggcagaagaccaactatggaaaatgtggtgcagacgcttgtttcagttgacgcttgtttcagttgacgctgtcagcagtgcaactaaaatgggaggagttgcttattaaaagcctgcgtccaaatgattctttgtactaaggta

SEQ ID NO: 11370 - DNA, 1388 bp, Setaria italica
  Peptide Sequence Number=SeqID_77344
acatggtgtctgcggcagattggcccaggagtatacacacatactcctgggccaatctgtgtatgcccccctggttttgaagtcatcgaccaaagtgactgggtcgaaggctgcagaccaaagatcagtattacttgtgatgagcaaaaggtgaaatttgttcatctacccaacactaacttcgacgggctagatctaagtggtcaacgtaatgtctctcttaacttctgcaagcagatatgtttgagtgactgcaattgtaatgggttctcatactttcaaggatctggtgactgctacccgaaggctattctactaaacggcagaagtctagatggtatcggtagcatgtaccttaaaatcgcaaaggacttagaagtatctggatcctcaattcctcggtcacaagttttatttggtcctaaatatgggccaaactgcagtgcagcaaacgaacatgtcgatatgaataaggccagtcagaatatatcaaagtatttgtatttctacgggtttttatcagcgatatttgtagcagagttaatatttattgtattaggatggtttattttgagaagggagagaggacaactcggaggagcatggccagctgaatcaggctatgaaatgataacaaaccatttccgaagatatacctacagagagttagtgaaagctactagaaaatttaaggatgagcttggaaggggagcatccagcatcgtgtacaaaggagttttgaaagacaatagggttgtagctgtgaaaaaattggaagatataaaccaaggtggagaagaattccagcatgaactaagtgtgattggcaggatttaccatatgaatctagtgagagtttggggattctgttctgatggtccacacaggatattgatttcagaatatgtgaagaatggctcgttggaaaagaccttgttcgccgtcgaaggctcagaaatcttacttgaatggaagcaaaggtttaatattgccttaggcgtggcaaggggattggcgtatcttcatcatgaatgcttagagtgggtcatccactgtgatgtcaagcctgaaaatatatacttgtcttggtattgtagtaactttggttgttccttaaagttatttcgttctttgcaagcaagaagaattaaagactaagctagctgtttcatgtctggaggaagatagaggcagaagaccaactatggaaaatgtggtgcagacgcttgtttcagttgacgcttgtttcagttgacgctgtcagcagtgcaactaaaatgggaggagttgcttattaaaagcctgcgtccaaatgattctttgtactaagggccatgcaaacaatacattgatagaaaatggtagttctatcaaatatgacagtatcc

SEQ ID NO: 11371 - DNA, 224 bp, Setaria italica
  Peptide Sequence Number=SeqID_77345
ccggtagcgctggcaggttgatgtacagatcagaccgtggcctgcttgtcatgatctccagcctagtcccgtccgggaacgtctgccatgtgggcacgagctcgacgatgtggtcgctgacgcagagcagccagtccatctcccgccgccacatggccttcttctccggcagcagcggctccagcctccagagctgcccgaatatcgtcgcgcagaggttggtg

SEQ ID NO: 11372 - DNA, 441 bp, Setaria italica
  Peptide Sequence Number=SeqID_77346
ctcccaacttcctcttcctcaccaccgcccgattcccgcggcggtcgccgcccccgccgtgccccccaccctcgcgggagacgacgtagcccgccgcggcaggctcccccggcgatcggcaggatggtggtggccacggaggaaatggcggtctactgcttcgacaccctcgtctcccacttcaccggcgaccagccgccggcccccgccttcgaggacggcaaccacccattgtttgtgacctggaagaaggctaccaatggttcagaaccacgcctccgaggatgcataggaaccttggagccccgtcagattgtcagtggctttaaggactacgcactaactagtgccctgagggaccggcgcttccccccaatccaatcaaaggaactgccaaccttggagtgcacagtgtctatactgactgattatgaaactgca

SEQ ID NO: 11373 - DNA, 1379 bp, Setaria italica
  misc_feature (1336)..(1379): n is a, c, g, or t
  Peptide Sequence Number=SeqID_77347
cgcggcggtcgccgcccccgccgtgccccccaccctcgcgggagacgacgtagcccgccgcggcaggctcccccggcgatcggcaggatggtggtggccacggaggaaatggcggtctactgcttcgacaccctgtctcccacttcaccggcgaccagccgccggcccccgccttcgaggacgggaactttacgaagaagaagtagcaggtttcctgcctcttgtgattgtctgtccgagagtaggggaggacaaggaatctcactgctgcacagctgatattataatttaagtgggagaagcaatttaatcataaggcttttcgtgttcgactataaccctctaatgtttcgttagtctaggattcagaatgttaatgagttcctttttaaccatgtagtgcttatcaaggttgaccgacagttatattgtagtctcagatatacggagtagatattgttattctagcatacgatggcttaacttgtttggtcaatttttgtaacttcagcccattgtttgtgacctggaagaaggctaccaatggttcagaaccacgcctccgaggatgcataggaaccttggagccccgtcagattgtcagtggctttaaggactacgcactaactagtgccctgagggaccggcgcttccccccaatccaatcaaaggaactgccaaccttggagtgcacagtgtctatactgactgattatgaaactgcagagggctacctcgattgggaggttggaaagcatggtttaattattgaatttacagatccagactataacataagacgcagtgcaacctatttacctgaggttgctagccatgaaggatggggacacgtagagactattgacacgctgatgaagaaggcgggttaccatggtaccatcactgagtccttgaggaagaagatccgtgtcacccgctaccagagcaccctgtacaccatgcactatggtgaatatgttgcatacgtcaagaagaatagaggtgcagccccagcaattaacggggtgactgtagttaatggcttcaagccaggccattgatttatccgtattgcaaaagctgaaaagaactgtttataatttatctaggagcaatttgggggtgagaatttcttagaagagttcccacccctcacagctcattggtctagcatcatcaaattccaaggaaaggggggcaccataccaacaagtccccagaataatgtcttcctgtgatggatggtgcttatgtatctcggaatactctatgtgctacaacaagtgcaaattatgtggtgaaattgatcgatttgagatgatcgttcctaataaannnnnnnnnnnnnnnnnnnnnnnnnnnnnnnnnnnnnnnnnnnn

SEQ ID NO: 11374 - DNA, 417 bp, Setaria italica
  Peptide Sequence Number=SeqID_77348
agagatgaagttccctattcagcaagaactgtccctgattatttggaccaaaaaaggatccaaaaacttcttcttcttggaccgcctggtgctggtacaagcactatttttaagcaggctaagtacttgtacgggactaggttcacccaagaagagcttgaaggtatcaaactaatgatccaaagcaatatgttcaagtatcttgggattttgctagagggccgcgagcgcttcgaggaagaggctttgtctagattgaattgcacaacttcagagggtgatgagactcagcatggtaatatggtcaagtcatttgatctttgctttttttaaccagatgcggacacaatattactgagtttttttttccggatgcagatgacagcaaagccaacggttcaaattcttgtgtatact

SEQ ID NO: 11375 - DNA, 1968 bp, Setaria italica
  Peptide Sequence Number=SeqID_77349
tgaagtgagaaggagtgccaagcaaatcagctgcggcctgagcagcttattgtgaacggttgcccattgaggccagaagagctgacagacctgctaagttgctctcggcctcctcagaagctaaagcccggaaagtattggtatgacaaggagtcaggcttatggggaaaggaaggagaaaaaccagacaggattattagctctaacctcaattttactgggaagcttcaagccaatgctagtaatggcaacacccaggtttttattaatgggagggagataacaaagattgagctgaaaattctgaaggttgcaaatgttcagtgtccccgtgatactcatttttgggtctatgatgatggtcgttatgaggaggaaggacaaaacaatatcaaagggaaaatatgggagtctgctctgacgcgttttgcatgtgcattgttttcactgccggtgcctcctgggaattcaaatggaaccagagatgaagttccctattcagcaagaactgtccctgattatttggaccaaaaaaggatccaaaaacttcttcttcttggaccgcctggtgctggtacaagcactatttttaagcaggctaagtacttgtacgggactaggttcacccaagaagagcttgaaggtatcaaactaatgatccaaagcaatatgttcaagtatcttgggattttgctagagggccgcgagcgcttcgaggaagaggctttgtctagattgaattgcacaacttcagagggtgatgagactcagcatgatgacagcaaagccaacggttcaaattcttgtgtatactccataaatgcaaggctgaagaaattctcagattggcttttggatatcatagcaatgggtgatctagatgcattcttccctgccgcaacacgtgaatatgctccgtttgttgacgagatgtggaaggatcccgccatacaagcaacattcaaaagaaaggaagagctgcattttctccctgatgtggctgagcacttcttgagcagggccattgaggtatcaagcaatgagtatgaaccttccgagaaagatgtaatctttgctgaaggagtaacacaaggaaatggactggccttcattgagttcacgcttgatgatcgcagccctatgtctgaaccttatattgacaaccctgaggcacattcccagcctctgactaaatatcagctaatcagagttagtgcaaagggcatgaatgatggctgcaaatgggtggaaatgtttgaagatgtccgcatggtgatattctgcatagcactcagtgattatgaccaattgggtccccctgtaaatggcagcggtcggcctcttgtgaacaagatgatgcaaagcaaagagttattcgaggctacaattcggcaaccgtgcttttgtgacaccccatttgttctggttctgaacaagtatgaccttttcgaggagaagatcaaccgtgcccccctctcaagctgtgagtggttcaatgacttctgcccagttcggacgcaccacaacaaccagtcgctggctcaccaggcatactactacatcgctatgaagttcaaggacatgtactttgcgcacacgaacaggaagcttttcgtgtggcaggctcgggcgcgtgatcgtcaaacagtggacgaagcgttcaagtacatacgggaggttctcaagtgggaagaggagaaggacgagaactactaccaggaggaatcattctacagcaccactgagatgagctcatctccgttcatcagagcggaatgagacgatttgagctggtacatacagggatcatcattaacggtgtatattaattaattgaattgaattgattctgctacagcttattccgatcatagctgcttgtgtatgttgttggtattgctgcattgtatttattattatttacttactaattttccccagccagaagaaaaatgtgtttaccaaaat

SEQ ID NO: 11376 - DNA, 769 bp, Setaria italica
  Peptide Sequence Number=SeqID_77350
cttgctgatacgaaatattagatacatggatcatcagatgatggcagcctgaagcggtccagcgcagatcggccgtcgaggcccttgcccttgtagtagcccaagaactccgccatcgtgacgctcctgtaccgcggcggcgtgagtgtggtgatgggcccgtacgccctggtggacgcggcggcgccggtcgtcctgaagaagcaggccgccgagacccgcgcggcggcggccggactcgtggccaccacccggtgctccacgctcttgaacctgtcgttggacacgagctggagcaggtcgccgatgttgacgacgagcgcgccgggcacggggggcacgtccacccagcgccccccgacgagcacctgcaggccgcccacgccgtcctgcagcagcaccgtcaggaagctggggtccgagtgcttggcggtgcccagcgtgaggtgcggctccgggcacggcgggtagtagtggcaacccaccgccacgccgcccccgtccaggcagccggcgtcgtgctccaggtacctcgcgtggaggcccagggcctccgacagcagctccaggaggcgggcgcccagcccccgcgcctccctcgcgtactccggcacggcgcccctgcacgctggcgggatctcctcctccggcgcgggcaactccaggaagagcgtgtcgcgccagctggccgcgggcgcagggaagaggtcgaagttgctctggtacctgacgcgcctcgccgggtccctgctgtagtagggccgcttcg

SEQ ID NO: 11377 - DNA, 270 bp, Setaria italica
  Peptide Sequence Number=SeqID_77351
ttcttcctctccctccccactcggtgaattggctcacgcatctcgtgttcattccaagccctccatcgtattaagtggagctttctgaatatcaaattgcaacagagctggattttatggccatccctatgaagcaatccggattcctgatatagatgtttccttgttctgaacatgagaagttctcaggtattctgctgttgatgaactgcctccacacctgcagtgacaagaaaacgctcaagaagttggtttttcatcgaacaaaac

SEQ ID NO: 11378 - DNA, 342 bp, Setaria italica
  Peptide Sequence Number=SeqID_77352
cgactcgtaaacgaagtcttggaggcctttcctcgtctcaaagtaaccaatggacgaatggtaggagactagactattttactaggtctggcacaaatcgtgatagttcttccaagatttaacataaatctttcacaattcttcaggttttagaggttcgtccagtgattgactgggacaagggaaaggccgtggagttcctgcttcaatcactcggcttaaacgactctgaaaatgtgattcctatctacatcggagatgatcgaacagacgaagacgcattcaaggttgctacatcttctgaaggaacttctgtggttgcacatctcactcattctaaag

SEQ ID NO: 11379 - DNA, 372 bp, Setaria italica
  Peptide Sequence Number=SeqID_77353
tggttgcacatctcactcattctaaaggcgtctaatctctgaatcttcggtgtctcgcctcaggtacttcgagagcggaactgtggatacggaatactagtttcgcaggtgcccaaggacactgaagccttctactcgctgagagacccatctgaagtaaatctctcttctcatgacctcttcagtttttccttgtaccctgttggttccattcagtctagtgatcttgtctggtgattctaatctgagtttgcttgacgtaggtgatggggttcctcaattccctggtgaagatggaggaagcgctcactgtgaacgaaaaccgaaaatacgatgattgatccagaagtcgtagaaaataactgtggttcg

SEQ ID NO: 11380 - DNA, 1958 bp, Setaria italica
  Peptide Sequence Number=SeqID_77354
ggtgaattggctcacgcatctcgtgttcattccaagccctccatcgtattaacatagcataagccatggccacatgattaggcgcatgtcattatgctaactccctcttgtcctaaaatgtgtgtatagaccttttgaaactttactgatccacgttgtctcataaaacatatatttccatcaagaacacgtttcctatatcattaactttgctaaaggagaagggagtagttgtaattatgttaactttgctaatgatcacaatttttgttttgcaaatattctactcatatttttctttcttgactggtgcagtggagctttctgaatatcaaattgcaacagagctggattttatggccatccctatgaagcaatccggattcctgatatagatgtttccttgttctgaacatgagaagttctcaggtattctgctgttgatgaactgcctccacacctgcagtgacaagaaaacgctcaagaagtggtttttcatcgacaaaacagtaggctgaattcagttcagagaaagagacaacacttgaccactgttccctttcttgattcatccccaatggatatgagcaccagctcacctgtcatcaccgatccgttgtcgataagccccccactgttaggaagcttggcctcaaatatgatgcagttttcagtcatgtccggaggctgctccagtcccagcatgaacgtgagcgccagtaggcgtaagatcgaagaggtccttgtcaatggcctgctggatgcaatgaaatcctcatcaccgcgcaagaaacacaatctcgccttcggccagggcaattcacttgacgaagatcctgtttacagttcatggatgtcaaaatgcccttctgctctgacgtccttcaagcagatagtagccaatgcacagggcaagaagattgctgtgtttttggactatgatggtaccctgtctcctatagtggacgatcccgacaaagcattcatgtccccagtgatgagagctgctgtgagaaatgtcgcaaagtccttccctactgcaattgtcagcggaaggtcacgcaagaaggtgtttgaattcgtaaaactgaaggaactatactacgctggaagtcatggtatggacatagtgacatctgtagcagaacataatactgaaaagtgcaaagaagccaatctcttccaacctgcttgcgagttccttcctatgattgatgaggtttccaagtccctcttggaggtcataagtggaattgaaggtgctagtattgagaacaacaaattctgcgtatctgtacattaccgcaatgtagcagagaaggactggcaggttgttgcacgactcgtaaacgaagtcttggaggcctttcctcgtctcaaagtaaccaatggacgaatggttttagaggttcgtccagtgattgactgggacaagggaaaggccgtggagttcctgcttcaatcactcggcttaaacgactctgaaaatgtgattcctatctacatcggagatgatcgaacagacgaagacgcattcaaggtacttcgagagcggaactgtggatacggaatactagtttcgcaggtgcccaaggacactgaagccttctactcgctgagagacccatctgaagtgatggggttcctcaattccctggtgagatggaggaagcgctcactgtgacgaaaccgaaaatacgatgattgatccagaagtcgtgaaaataactgtggttcgtgcggcggcaattttgtagagttggacacaccgggtggctcattctttcatgcctgtcattgttttttttccttttttgttcgtgttctttgccgctgagataatgatcggtggctggcttaccctcttgcaactgttagtttgtaagcaagagggcctctttcctgttcagtatggttaataaaactgggacgcttacttactttttttttaaaaaaaa

SEQ ID NO: 11381 - DNA, 348 bp, Setaria italica
  Peptide Sequence Number=SeqID_77355
ccttttgcagataagtttggtgttgtttggttagtcactctgggggaagatggtacagaacaagtttcagttgataacaaacctgtgtcaattcttggtcactactgtagtatcatcactagtatgaatttttcaccagatgggcggttcattgctactgctgatagggactccaaaatacgagtaacgttattcccagatgggcggttcattgctactgctgatagggactccaaaatacgagtaacgttattcccaaagaatcctcttaaaggggcccgcgaaatacaaagcttttgccttggacatacagactttgtgaaggcgatgcatgacacaaatactaaa

SEQ ID NO: 11382 - DNA, 574 bp, Setaria italica
  Peptide Sequence Number=SeqID_77356
gcaaatttagtgtccttcaagataacttacatgacctagtataaacaagatttaccatttaccattaacacggttgacattgttctgtggtcagtgctgatggccattactttccaggtccaaattgttttttcatgccagtttttatctggttttattgtacttaatttactggctgagaagcctgaaatgtagcttatgcagttacaacgactcttatgcaatgccagtcttacactcttactagctagatgttggtattgtctcactaaatatggtaactaattggaaagctcagataagaatttgggtatttgtggctcaattatgctagaattctttaatgtctcaactgttcgacaattgctttctctgtatcctattgattagccgatgcaccttatccaattgcaggtgattacaatggaaaagagctatattcctactagcttagcatccagcttctcatcagaactcctatggactgtcatgggtgcatcaaacatgcccaaccaggcttcctcccagttattaactcgtttaaggatcattcgtcgcttccaaaaggatctgc

SEQ ID NO: 11383 - DNA, 1560 bp, Setaria italica
  Peptide Sequence Number=SeqID_77357
acccctgaatccctccccgcctccatctcgcgctcgattcgaatccgagccccctcgcttgctgctgttgcaatggaggacacagctgtcgaggaggccgaggtgagcggcgcggcggagttcgcgccggcgctcatcgccgcccacccgcacggaaactctgttgccgtcgccatcggccctgagctccgcgtgttcgatctcaaggttggttctccagttttattgtcagatgattgtggcggccgttctcattcagacgctataagagctatttgctttagtgtgagtggtgctttatttgcatccgctggtgacgacaaacttgtgaaggtttggaaaactgattcgtggcgttgcatccggactataacttcagagaagagggtcagtgcagttgctattagcaacgatgacctgtatgtaacttttgcagataagtttggtgttgtttggttagtcactctgggggaagatggtacagaacaagtttcagttgataacaaacctgtgtcaattcttggtcactactgtagtatcatcactagtatgaatttttcaccagatgggcggttcattgctactgctgatagggactccaaaatacgagtaacgttattcccaaagaatcctcttaaaggggcccgcgaaatacaaagcttttgccttggacatacagactttgtgtcatgcatcgccttcacaaacatttctgaaaatcagagctttcttatatcaggaggaggtgattcaactgttcgcttgtgggaccacataaatggatgtctccttgatacgtgccaagtcagagacaagatggaagagctcttggaattgaatgaaacagatgatagcagtctagccattgcagatatacgtccgagtaatgatggctcattggttgctgtagctattcaaagtttcaatggcgtaatgcttttagcatgtgatttagtaggaaagaagttatctttcctaaaggtgattacaatggaaaagagctatattcctactagcttagcatccagcttctcatcagaactcctatggactgtcatgggtgcatcaaacatgcccaaccaggcttcctcccagttattaactcgtttaaggatcattcgtcgcttccaaaaggatctgctatcttccgataactgtcctgcaatccttgaagacagtgaggtaccacacggtgagaagctccttttggcgctgcaaggaagcctcgacgttgcaaagcaagaggaggtgttagcctcagtgctggccgcgctgaaggtttcgatgcacaagatgctggtgaagaagcactactcggaagagaggagggagcagcggaaacggggcaggaacgacaagaagatcaagagctagctcaacatgtgccttccaagtctcagcaaaacaatagaattgtttccttgttgcgtgctgtaccattaatagtttgaaacacaggaactgtattaacaactgtaagagtaaattttccactcgttttcttatgatgtactactagcataaatagcagtaattcatgctgatcgcatcagtaaaaac

SEQ ID NO: 11384 - DNA, 2181 bp, Setaria italica
  Peptide Sequence Number=SeqID_77358
aaggaatgcgtccggcaactccggcgagccaaggaggagcaggaccagacggtgcaggacgcgctagcgcagcaggcccggcaatgggagtcccacaaggccgacctcgagctgcgcatcatcgagctcacggcgaggctggaggccaagtccgagcgctcggcggccgccgacggcgacacgggctccaggctggctgccatggagaaggagaactcggctctgaaggcgcagctgctcgccaaggcggaggagctggagctcaggacgatcgagaaggagctcaaccggcgggccgcggagacggcgagcaagcagcagcttgagggcattaagaaggtggccaagctccaagccgagtgcaggaggctgcaggccacggcggcacggcggcctcccatgaacgccgagctccggcgctccccgagctcggcctgcgccgagtcggtgacggactgccagtcggactgctccgactcgtgggcctcggctctgatcaccgagctcgaccagttcaagaacaacgacaagagcggtagcgcgagcaccagggccgggagcctcgccgccgcggacatcgccgtgatggacgacttcctcgagatggagaggctcgcctccgccaacgaatcgtcgaaaggcgacgccgccgccgtcgaggacgcgagcgggcaggtggcgaagctcgaggagaaggtcaagaggctggcagccgagaaggtcgagagagagaaggcgctgcacgaggctcagcgcgagctgaggaattcccgccaccgggtgatggtggcggaggagaaatcagccgagctgcagcggcaactgaaccttgccaatggcgagaagcacgccatggagaccgaggtggaagccgccgaggctaagagaagcgagcttcagggtaagcttgagctggcccgcgccgagatcaccggcttgctgggcaaggagcgcatcctggaggaacggctcgagtctgagaaggcgttgacgctggagctcgcggccaagtaccaggacatggaggcactgggagcggagaagagtgagctgagcgctcagctggaggcatcacggtctgaagcgaagaagttgagtaacaagatcactctgttcgagaggaagctggaggtggagaaagccttgtcgatccggctcgcgacgaaatgccatggtattgatgctctggaagcgaagaagaagggcgtggagctcgagctggagtcggcacgagaggaaattgcatcactgcacaagaaagtgagtagcctggaactggaagttcaggaagagaaggcgtcgtctgcagaactggcaacgcggtgtgaagaattggaggcgttgggtaagcacagagatgagcttagaacccagcttgagtctgcaaattcagatattgttaagctgaatgggaaggttaacatgctcgaggatgcaatggagaaacaaaggccagtggcagtggaattggagtctcagcttcagtcgagacaagctgaaatagagagcttgaaggagaatgttggtctgttggaaaagaagctggagagccagaagaacttgtcatcggcttacatatctgcactaggtgcttctgaaactgagaagaaggaactggctactcggtttgaactcaaagagaaagaagccgaggaattactcaggaagatgagtttgctggaggaacatatttacaaagagaaggcacgatcgtctgaatttgcagcgaaatgcctgaagatggaagaacaagtgccaagcagatctctgggtcacgaaccagtgaagtctacgtcagtccaagatcttcagatcagaaaggagaaagagctggccaaggccgcagggaaactagcagactgccagaagaccatagcttcactcagcagccaactgaaatccttggcggatttcgacgaattcctccctggaatggagtccggtggcgccacctcagccgactcctgggacggtggtgatccgaagctgctccaaccagcgagctatccctctcaatttggttgtttggcagtcacatgatcctcgtggcaagtgggtttcgccgcatgattggtgtgatgagattgccatgatcttccacccacatgtcatatagagttaatttaatagtctataggtgagcaaatgttcatatggaaagctgtttatagagttggtggt

SEQ ID NO: 11385 - DNA, 285 bp, Setaria italica
  Peptide Sequence Number=SeqID_77359
ctagctttagcctctctcggtcgtgttcatggggaggacggagaggagtgggcgatgcaggatggcgttgctgcttctcgccggcgtgtcactaatgctgcaaggatgcatcgcgcagggcgaaggcgcgctcacgcgggggagcttccccgagggattcgtgttcggcaccgcctcctccgcttaccagtacgagggagctgtgaaggaagatgggagagggaagaccacctgggacacgtttgcacacacttttggcaaggtcgctgacttcagtaacgctga

SEQ ID NO: 11386 - DNA, 385 bp, Setaria italica
  Peptide Sequence Number=SeqID_77360
tgttaaattcctttcttcagtcttgaaacgcccaaaggtattgcggtataaaaatctccgaggacctgatgccaaaatccatcagtatcaaggtttgagacccaacaaaaaaaagtatgcaaatcattgccaaacagatggcacctttgtgtaattattagaggaactactcacaggaaatactacacatacagacatagtgttacaaaattgttttttcataagttcaatgcctgttagtaattgctgttcataagcatgttttggtttgtacctttgtcaatgctcatgattgtgatgggtttcaagtggtatgtctgcttggcaatttcatttaaaaagtttttgtaccaaaggaagttaaactctttgattctacaatttg

SEQ ID NO: 11387 - DNA, 1027 bp, Setaria italica
  Peptide Sequence Number=SeqID_77361
ctcacggtggattcacagtttattgtatgaatcgatatcaggggaaatgtatatgcggtgcagttcagacacggacaccatattcagatattttgttgattctttcctgcaaggcatatctctgattcttcaaatcggaggccatggaagccacctgaaggataaaaagaagcaatgtattttaatcagcacttcatgcaaccgagaaaatattccatgtactaataattatgtactcgcctctgctcgcagctccagagattgcctggttggaatggttcttagtctatccatcagacctgcagctgtggattctgccttgtatatggaacctataagagattggatctgcttcccagtagatctcaaatcagtttgtccacgttgcagatcactttcaccaatagctactttgtcaagagtgtatttcgattctttcttcaagttcgcaatagatgttttgtactccatcatactttcctcagcatcattcagtaaatccttctcagtcttgaaacgcccaaaggtattgcggtataaaaatctccgaggacctttgtcaatgctcatgattgtgatgggtttcaagtggtatgtctgcttggcaatttcattaaagtttgtccaaaggaagttaaactctttgattctacaatttgccaaggtcagacaaggaattagccaactgagtctgagatgagcaaataagatagtgccagatacacctggttggtcttgacttgttcttggaccgatcccactttacctccaatggagtgataaatgtgtacataataacccgactactcgagtgtattcacaattctctggtaactaagctataatcaatcagccaccattaggagctacctaggaggcccatacagcatgagcatggtagacacttgaatcaacgaaacatgtcaatggaaaaggcaaagaaatagagcttcacagcacaatttgattgcttcaggataaaacatagtatagtatgatattactaaacacgatcagtagcaagcag

SEQ ID NO: 11388 - DNA, 1036 bp, Setaria italica
  Peptide Sequence Number=SeqID_77362
tttttttgtatggaacatagctttccttgcaattgcatatagatggggagtatccaaagttttcccacaaacgagcaatctcaacagtaaactgacaggaacaatttcatggttctgaattctgatgagtgatcttgtctgtcctagcatttaaaatgctaacaaaaaaaggttagaatctggagacacagcacttgtccaatcaacaaacacacctctcacggtggattcacagtttattgtatgaatcgatatcaggggaaatgtatatgcggtgcagttcagacacggacaccatattcagatattttgttgattctttcctgcaaggcatatctctgattcttcaaatcggaggccatggaagccacctctgctcgcagctccagagattgcctggttggaatggttcttagtctatccatcagacctgcagctgtggattctgccttgtatatggaacctataagagattggatctgcttcccagtagatctcaaatcagtttgtccacgttgcagatcactttcaccaatagctactttgtcaagagtgtatttcgattctttcttcaagttcgcaatagatgttttgtactccatcatactttcctcagcatcattcagtaaatccttctcagtcttgaaacgcccaaaggtattgcggtataaaaatctccgaggacctctgaacagaatgaatcctgcaacagtggcacatccaattgcctccgcctgatgctctttcacaaggaccagagcatctgcaatagttcctttagtactctccacaaccgcattctcataaactttgtattgcgaccacagccctggtgtgaaactctggagcttgcggagaggccacggggaggtggagccggcttcgtcgccttgcgccggcgtgcggccgggatccggcgacgccatcgactaggctgctgctcgttctacggcgacggagacaggggcttctcgccggtctctctctctctctctctctccgccgtagaggattcttgcctcgtgctgttctgggc

SEQ ID NO: 11389 - DNA, 442 bp, Setaria italica
  Peptide Sequence Number=SeqID_77363
tgtcccgggagatgtcgccgccgctgttcttggcacctatgatcaccacaacctgatcgcggaatggatccggcacgcggtagctgtggctgtgcatctgcttgccaggccaggcgtcaacgcctgcagaatgcagatagagcagcagcaggaagcagcagcgtcgatcatcaggagttcaacaggactgacgatgaacatctatctactcgatcgatcgatctcgatcgatcggataattatattaccggggatgtcggcgatgcgcggctccgtgtagtggccgttgcagaccacgacggcatcgtaggactcctcctgttcctcttcgtcttccccagttcgtgccgcgtcagcatcagtaccaccaccaccagcagccttcctccacctcaccctccagtggtggcgatcctggaggacgtcgacggcggtgacctcg

SEQ ID NO: 11390 - DNA, 1231 bp, Setaria italica
  Peptide Sequence Number=SeqID_77364
cgcgagatcatcccaacaaagaacacctaactgatttacacttccagcctttcaggtccatgtatatgcaacggaatagcctatgtttgtttgtgatgactgatgaaaggggacaaaaatgattattgtctgaactctgaagaacaattgtatatgtgcaattaatgtagctagaggattcaatgatacttttggaagtcctggttcgcttgctccagcagatggtgatcgtcccactcatctcggtatgtctccgggcattccaccttcttcttgctggcggcgtcgtacatctgcctcctccagccctccaccttggcgtggccgcactgctccgccagccagtcatcgtaatcgaactgatcgtgcttcaagcagtgcgtgtaccgaacgggccatccgatggcctccagctgcgagtacagtgcccgcacatcctccatcatctcttcctccgacgggagctggatccgccccgacagggcgccggcgacccagctggcttggagctggaccagcgggaacgggatgaccttgaagggcaggccgatgaaggcgaggctcggcgccagccgcggcacgaagacgtgcttgtagagcgggtggatgcggttgtcgtggacggagaccgtctcgccggcgaggaaggggaagctgtacttgtagccggtgcagtgcatgatgacgtcggctctgacggaggtgccgtcgcggaacacgacgctgccgtcggcatcagcgcgttccaccatggagtgcagccacaggttgtggtagccgggcagcctctcgcaggtggcggcgggggacgctctgttggccatgtgcacctccctggcgacgccggcgatgtcccgggagatgtcgccgccgctgttcttggcacctatgatcaccacaacctgatcgcggaatggatccggcacgcggtagctgtggctgtgcatctgcttgccaggccaggcgtcaacgccggggatgtcggcgatgcgcggctccgtgtagtggccgttgcagaccacgacggcatcgtaggactcctcctgttcctcttcgtcttccccagttcgtgccgcgtcagcatcagtaacaccaccaccagcagccttcctccacctcaccctccagtggtggcgatcctggaggacgtcgacggcggtgacctcggtgccgaagcggacgaggccgtggaggtcgaagcggcgcgcgaattcctggaggtagcgcagca

SEQ ID NO: 11391 - DNA, 522 bp, Setaria italica
  misc_feature (431)..(431): n is a, c, g, or t
  Peptide Sequence Number=SeqID_77365
taaacaacataaacttcccaacagagtgtgggggattgtacagagcaagatacagcaaaattgctcaaaggcgcccagttggtgcaactagcaggacactgctgctcatcttcttacagcgaaaccatgagtgcagctttgctaaatggaacacaacaaatctgcacttcgttccaatctgtaagaagatgagcagtggccggcttcagtacttgtttcgccacgcgtaccagttaagcttcagctgataccacaggggagagaccccatggactccccttgacacccgcgaatcaaagacattgaactcgcatcttcgcagggaatccaggaggacctgggccggcaaggccggaaggagcactgggatcgcctcccttggcacagatgaggccagctcccgcgccttgagcaggtgagcctcggcaacngatgcaaccttgaaaactgcatcaggcagcctctcatccatcctgacctccgatcggccaccctcccgtgtaagcaggccgcactcctcgg

SEQ ID NO: 11392 - DNA, 922 bp, Setaria italica
  Peptide Sequence Number=SeqID_77366
taaagtactatttgtaacttcgtcatacttacgacaagggaaataccaaggaaggaacctgggccggcaaggccggaaggagcactgggatcgcctcccttggcacagatgaggccagctcccgcgccttgagcaggtgagcctcggcaacagatgcaaccttgaaaactgcatcaggcagcctctcatccatcctgacctccgatcggccaccctcccgtgtaagcaggccgcactcctcggcgacattagccgggatatatggtatcaccccttgcttatttacatggtgaggcagtgccttgagcagtaacaagagcccactggctttgccgatgtgcgaggcggcgtgatcagcggcagtggactgtatcccaccagcctgcagcgtcatgtaaaggatggtggactgggtgtcttctgcgtacctctccaactcggcacttgtctcaggaatggcaccctcatcccggttggcgtcgtttatccttgcctccacggatctcttgagccagtgcttgctaaccttgtggtctgagacgaccgaagagagtgcctgggcaactgggtgctcaaccagcttgttggcaaagaccttgtcaatcacgtccttccaccagaggaggcgcatgaggccagtcttagggtcagacacaacgtccatggcctttgctgtctcgacgttgaaggcccggaaggtgaacgcagccttgcgcattgctggaggcaggtggagaaggcatagatagttgtggtagtcatagctgcggacttgcctaacgcagtatgagagagctgcttgtaggctactgcttgctgcaggtgcgcggctcatgagtcctgtagtccggtgcgtcgccggaggcggcggtcgggcggcggcggcggcgattgccgagatcgagagagatgtgtatggatc

SEQ ID NO: 11393 - DNA, 273 bp, Setaria italica
  Peptide Sequence Number=SeqID_77367
gcttctctctcgtggtcgtggccttccgttcatagaggcgacgactggcgagcggcgacgcccttcgccgggcccgtcgccagcgacgagcacgcaccaggtaagcccgcccgctttctccccttccttcctgctgagcgaaacggagcgccccaaaccctaaagtaagctatttgtattcggatctgatcccaacttactttagggtttggggcgctccgtttcgctcagaacatatcgggtgtacatgcgtccacccatttcctataccga

SEQ ID NO: 11394 - DNA, 262 bp, Setaria italica
  Peptide Sequence Number=SeqID_77368
ctggatatggtaccttccagcaaagtttaaaagggctgtagccagctgcgataaacttttttcctaaggcagcaaaaaatcttttgagggaacaactgcctaaactgtacacgttcagactggatttcactggttgtattttgttttaacagtgtatcagtgaagttataggtttagagaagggtgaaagtttgtctgtttctttgtatgataattgaatgctctgtgaattgctcactgaagtatatttccttttagtaaa

SEQ ID NO: 11395 - DNA, 503 bp, Setaria italica
  Peptide Sequence Number=SeqID_77369
cttctctttgtgtttatctttctctttcctttctttttctcatgccgatcacttttcttgtcctctttcttggcaacatcaggtgccccatctctgaccttctccatcctttcagctcttccatctgcagccttgaccgcagctggaggttttgacataaccactttctgatcagttgaaatattaggctgtggcaaccttccaccatgttccttttccttccacatagcaggagaaagggctccagcatcgggtttattagcagaggcagaaaggttttcagatgaccgcaccattccatttggtctccgaattgtaatgcttgggcttgggatagttgacctgggtattcctctatccatccccactgctgcgctggatgtcgatggactgtccagtctctgcatggatactgctgtgttctccattggcctaccaaccttgccatttcctttctgcatagtattagcatgatttggaagcaatggcgaggtggtgccaac

SEQ ID NO: 11396 - DNA, 1240 bp, Setaria italica
  Peptide Sequence Number=SeqID_77370
ttaccttaatttttggttcttccgtaatttgttaattgtctttgggtctttgggatagttgacctgggtattcctctatccatccccactgctgcgctggatgtcgatggactgtccagtctctgcatggatactgctgtgttctccattggcctaccaaccttgccatttcctttctgcatagtattagcatgatttggaagcaatggcgaggtggtgccaacttctttctttgcaagatctttgtttgtagtctcagttctcttctgaaccaatatgctaatgttactgattcgctgtccaatcccctcttttcttggtgtggcttcagtattggagggaggcctcccaactctgcctctttcctccattgtaggtgctggtgcaaagccagcagcaggtctctgagctgaagtagtgaagttttcagaatgccgcatcgatgtcccattcttttgttgattgatgttgatgttctgttgtcccaacccctcaattttccttgaagcattactagaatgaatatgcattctattaactgcaggtctttcattctcaattgcaggtgatgcactgaagcctccgcgacttctatcatttgaaacagcatgattttcaataggtcgactcgccgcccctttctcatccggtatctttctgaccaaatcctccctggatttaagatccttaatttcttcagatttcctgctgctctctccaaccttctgatcatggagaacctcatcatgtctttcaattccttctaccgactccctgcttttatctttgctcttatctttttcttgtctctgtgtttttcttttcgatctttcttatctttgtgcttatccttactcctgtctttatccttcttttctttaccttcttttttatctttgtccttcttgtccttcttatgcttcttctctttgtgtttctccttgtcgagctgctgaaggttggagactagctgggcgtcggggcgcgcggtcttctcatatcctggtggcggaaacgggaagcagcgagacatggcacggccgcctcgggccccggatcacccaccgccaccccctcctggacggccgctactctccggcctcaaacacaggctgtcccgccgccgccgctggtggtgccgctgccgctgctggtgtcgccgccgcctcactcctgccgccgccaccacaggcatgccctccggcctctcatccccgccgccggcgccggaatcgcgggg

SEQ ID NO: 11397 - DNA, 387 bp, Setaria italica
  Peptide Sequence Number=SeqID_77371
gggagggagcgggcagcaggccgggaccgggtcgaccgggagcagcagcaggtccacgcaaactccgaaacccgtgcgccactcaagagctttacgacgttgcttagttagccatggcaccggagcgacgacgtagcgccgccgccccgacgctgccggcgcttcttctggtgctgctctcgtgttgctgctggtgcggcgccaccgcggcgcggccagcgccttcctccggcgacgccctgccgctgccgggcttcatcaagtcgtggtgcgcggggacggagtacccggcgctgtgcgaggcgacgctggccccgtacgcggcggcggtggggtccagcccggcgcacctgtcgtgggcggcgctgacggtgacgctgggcggcg

SEQ ID NO: 11398 - DNA, 267 bp, Setaria italica
  Peptide Sequence Number=SeqID_77372
tcttgtcttgtctgcccgcgctgtccgcctccgccacctcgccgctggcttcctactcgagcgacccaaactagggttcgcgctcgcgccaggccacctccattctgcccgatccgcttccgcccggaggcttcctaggggttagtttcgatgagtccatcaagaagcaggagcaggagcaggagtaggagccagagtcgcagcagaagcaggagccgcagtcctaggcgaagagataggttgcgcagtgaacgtgcaccccgccgc

SEQ ID NO: 11399 - DNA, 306 bp, Setaria italica
  Peptide Sequence Number=SeqID_77373
gaggtggagaaggtgatcgacggccgcggcgaaggcaagtggcgggagtacctggtggagtggcgcgacggcggcgagagggagtgggtgagggcgccgtgggtggcggaggacctggtgagcgacttcgaggccgggctggagtacgccgtggcggaggccgtggtggacaagaggccggcggcggcggagggcggagaggagaaatgggagtaccttgtcaagtgggtggacattgaggaggcgacgtgggagcctgccgagaacgtggacgacgagctcgtgcaggagtttgagctgaggcaa

SEQ ID NO: 11400 - DNA, 964 bp, Setaria italica
  Peptide Sequence Number=SeqID_77374
ctgtgttaagcatatttctggatcatgtacaatggctttagcttgtgctacgagctgcactggcggtcctttacttgggaagtggcatgtagctgtaaagtggctgtacgaagggatgactgtcaatgttcgtaagcttgtgttgccattcttctcttcactgcctcttggctaacgtctttttaaggcctctcaagatcttggcaaaccacattgtgttcatgacaagcagtattgtgggcacagcaaatatcagaatgcagctaaaggtgtgcatctgcttgacctgatcatagtggaagtagatgtggtaaaacaagtaaacgaacagaattatccgcgccaccagccatgcaacaaacattgcaacaccattgacaagataggccttggattttttcatcccagcagtatcaagaaaccatcggaggttgattccaggtgtggttgtttcagagatgagaaccatgtaagtgtacaactgtccttccccagaatacatagcatagaatatagaaataagcgacagcatatggtgaagaacatactccattccaccaagagaaggatatgcccagaatatcatagcaaggtcagtgatgaagtacccaacagaaacccccagagtaaaatttgataggtttgaactccgaaaggttactggtccgtccagctgatcagagaataggttggagaagaataccaggtacaccgacatgactgtgatgaatatcgcatggacagtggacatgcccctgttgttaaacataggaagttcctaagcagtactagaatgtctgtctaactccatcaggacaaaaaactcatcaaacacaactactgacttgtagcattcatatttccacttgaaatattataactctcctatcctaatcctccgcacttccccaacctgctagagcacaaagatacaaaacgtctagtcttctaatgatagcccttt

SEQ ID NO: 11401 - DNA, 539 bp, Setaria italica
  Peptide Sequence Number=SeqID_77375
tcacacaccggcggcggcggcggcttctccgaccgccgccccggcacccatgtggaagcgcctcctggagacgaccaagcaggccgtctcctccgcctccaagccggccatccccgccgcggccgtcgctcccaagcccgcgaccccctccgccgccaagcccgccacatccgccgccgcctccgcatccaagggcgacactgcggtcgctgccccgaagctctgcacccggaagaggccctcctccggccgccgtgccgccgtcaccccagccacctctgtcacgcaggcctccctcctgcggctcaagcaggccgcggcgtcgaagaagaccaacttgccgtcctccctcccccaagctcacgcgtgcgccctagatgaggatgatccccctgaggccctcaccaaggcgctcatgtccgtcctagatgggcctgatgacgtggaagaggcgacgccctccgaagtgccagtagaggactctgaagatgctggggaggttgccacgagcaacaagatactcgactttgagtggttcc

SEQ ID NO: 11402 - DNA, 1004 bp, Setaria italica
  Peptide Sequence Number=SeqID_77376
ggcagctcttcagctgatggagaaaggtggtcatcaagtgctcccagctgatgcagcctcttacatgcatcaaggcaacaagctgctttgctttctgcatgtttcttgcttttgggcctactaaaagctgaaacatggcactagatggtaatgttactgtacactcatagccattcacctatactggctgaactgaaacgtgggtcttggggtgtagtacttgtcctttggaagtttgtcacagtactggtagagaacactgatgctggaatcagtagttattttggctcctgttgtgcttatatggtactcatttatttcttctgtgggaatgggaaagaaactggggtgtgaatcctcaggctctcggtttgaagcaatctcggccatcaaggtcttacttctcataagggaagatattaaatcattttgttttacatttccctgttcaatcattagtatgtactgagagtccttttgtcgggctcgcccacgtgactgcacatagctgcgggtagtcttcggcaaatcaaatcgtactacacacgagcagtctgggacatggataccctcttctgcaacatctgtagtaaatagtaagttgacctctccagagcggaatgaatccagtgtgtccttttgcattttaggggtcagtgcatccacagaagaactcccaccagttaggaaagagactctgaaatatgggagtcggccaattttcttcatagtccgctcaatgactctggcagtaatctttcggtccacaaaaataaggcatcggacatgttcaacatcactgaaagagagaaatatttggatgagctcatggagctttggcgagatatagcccccctttattgcttccacacatccactctctgagttcagaagtgcatcaattccttgttgctgttggaggcgtttgtcaattatatgcaacgcttcctcaaagaacttcatatgaagcattgaattttctgcaaacaagcctggtccatttg

SEQ ID NO: 11403 - DNA, 1659 bp, Setaria italica
  Peptide Sequence Number=SeqID_77377
attagcagccatgtcgctccaagtgtgtcctagagaaattatgcttccaggcttgactttgactgcatttcctccccttccaactccttgactgcagctatgaggctgcgacttatacccttaaggcacaaaccactatcctccatttcctccaggagtttctcagctcttctccaatccaaagccttgagacacaatgattgaatcagtttgtcatactcatccacatttggcagcaacccatctttcctcatctcctttaggcactcaatggccttctcaaactcctccatcttgcagtatccacggataagaatgtgataactgaccctgttcaatttcagatgaatcttcttagcttcacgaagtagagcatgggcttcatcaatcatgccccctttcgcgtagccactcatgagcacactgtaagtataaatatcaggactaaccccttcgttctccatcaatctcaacaaaccctttgcatcctccatctctccctgttttgacaatgctgtgatgacaaaattaaacactgctttaccaggagctgggccaagatctaccatcctcagcaacaatttcttcgcgtcctccaatttctttttcctgcacagaccatgtataactgtggcaaatgtcttgcctgcatccttaagagactccccttggtactcttcaagctgcaccatccttgtcaacaaattatttgcatcctccagtttgtttgtcctacataaagcatgtacaacagtggcaaaggacttgcctgcatgcttaagtgactccccttggtactcttccagcagctccagagcagttcctacggtctcatcattccttgccaaagcactaacaaggaaatccaaggctgattttgggatctgaatcttcttctccttcgctgctaggtataatgaatgtgccaccttcaccttcttcccatcgcaaaggaaagtcaaaatcctgccaaccttctcacaattagggaagcagccagagccaatcatcttctcacaaacttcacaagcagaacggaacatggacttctttcgtgctgcttcaatagccagataatagctgttactgtccggagtacaaccgaactcatcgaacttggcaaacacctccagagctgccttcgacttctcaagcttccaaaatatagcaatcatttcattcaacaacggtgtgcttactgatcctggtacagagccaatttccttgactgaatcccaaagcaagtacgcgtccatcttgtcaatctcatcagaatccgctaccttgcccacgaggatctcaagattcgagaggctcttggtcgcagggttgttcttcgcggcatagttgaacagggatatcagcttcttacaggaacattggtcggcagcaaggaggacagcggcgaggagcggctcgttgaagtccacgaccatgtcggcgagggtggaggcgatcttgtcctcgggggtggactccacgacgtcgcggacgcgggcgacctcctcttcgtcggctacggcgtcagcgccgccgggggaagcgaagatgtcgtcggcgtccccagcctcctcccacatcgagctcaagctgtcttctcccgcctcggtgccatcatctggagtagccgcggtcggagaggaggcttcgggaaagggg

SEQ ID NO: 11404 - DNA, 759 bp, Setaria italica
  Peptide Sequence Number=SeqID_77378
gcgccgccgcacgcgtctcgctccttcttccaccgtagcgacgtcgcctccccacgccgccacccccagattggcgcggcgcggaggtccatcccgtctacccggagtctgatcggatcctccactcgccgtgaaaacttcaaccagggaatggcaatgtcttggacaagagggttaaagcatgttgttgctccgaggcatacggctcaactggtagagagtagaggtcttgccattgcaagcaaggcaaagaagggtggaaaaggtggcgctgatgctgccaaaactcctgcccttagcaaagagcttaagagttcaacagtttttggggcaaacatcctcaaggaaggttcagatccgaaaattcaagcagactctgagtatcccgagtggctgtggcacctccttgagaagcgtcctgtgctaagtgagctgcggaggaaagatcccaagacactcccttacgaagacctgaagcgttttgtcaaattggacaaccgatctcggatcaaggaaaacaatgctctcactgctaagaattgatctggagggtctcaggaagaaacagggcctgctattttgtcctttttatctgaatacttactagacataatgaacatcttttttgccaataacatagtggtttggagcatgaaaactgcgggaactactcacactttggtactattattggcaacctctgaattttacgaagatgtagcctctgcctcttgtgtccagtgctgtagcaattctctt

SEQ ID NO: 11405 - DNA, 269 bp, Setaria italica
  Peptide Sequence Number=SeqID_77379
cccgccggcgccaccgtgcatggccatcgccacgtccgccaccaggtcccccagcgagttcccccacgccagcaccgtcgcgcccagcacgctcgccttcacgccggcgacgagaccgatcgccaccagaagggcgacgagctcgcgggctaggaggtaggaccagagcaccgacatcaggaacccgcccgcgagccacgggaggcgcccgcaccgggtctcaggaggggaggtggaggttgttgtgtgggcagccgcggcggccaggg

SEQ ID NO: 11406 - DNA, 573 bp, Setaria italica
  Peptide Sequence Number=SeqID_77380
ctctgacacgagaagaccttcgcaatcgttatgctgagggatcttgggatatgttcaacaggttgcttgaagaaacagccctgttgaatggagggaagttgggattttactacaaggaacatgagattctcccaccacttccagttggatttcaccggtacattgtcaagaacttgagtagcggatctttagatcagatggtggaagaagaagttgacgagtttgatcctccttcggaggtgcgtgcgataattgaagggcagttcctgtccatgaggggccatgctgagcaatgtggcctgccagtacctccaaagcatattatagcaactggtggcgcgtcctcaaacccaataattctcaagataatggcatctatttttggctgcccagtgtacacttcccaaagatcagactctgcatctttgggtgctgctctgcgagcagcccatgggtggctctgtaatcaacaagatgagttttgtgccattctcatgtgtgtactctgggagaattgatagaacatcactgagcatgaagttggctgttcctttggggactgcaagagagaca

SEQ ID NO: 11407 - DNA, 246 bp, Setaria italica
  Peptide Sequence Number=SeqID_77381
tgtaaccaaaatacttgaccagcggaatcttatcttcgcaaccgaaaccaaaacatgatcgagcacacgacaagatcagcagtaataaagataagaggttctgctccccgtacagtaattcatgcatcaggagtaaaaatcaacaaaaagtcatattaccaaaagatatgctaagttcaaccacaaatcggcgacaaaatcaacttcaagctgctccatgttgaacagaaaaacacacaccccaaa

SEQ ID NO: 11408 - DNA, 446 bp, Setaria italica
  Peptide Sequence Number=SeqID_77382
cgacgacgacgccggcgccagggtctggcgcgaccgctgcggcggcgccggagaccgggccgaccggtgtggacacgacggcgccaggcggtggtgctggagtgaagtcagttccaggcttgcttgacacgggagctgctgcagcaggctaccgcggcatctctgccgccgctctcttcatgacgttgttgggcgtttaccttctctgaactcttgatcggattatgcactgctacgatcgttccgagtcgtgtgatcgtttccgtggtgcgtactttcagatgtgtggattttgtagcatgtcgttcatgttccatgatgcggtactgttctgtgcttgctgtgagatgtgaccagtgaccacgcacagagttgccactgaattcagttaatgccgatttaccgcggttcatgaaataaacatatggctcctacaaaagtaaaaa

SEQ ID NO: 11409 - DNA, 1410 bp, Setaria italica
  Peptide Sequence Number=SeqID_77383
tcagcttagcagcttctctgttgctagtgctggactgggcaacacaaggcagcgatgccgccagcatcctcttcagcaggctctgcagctggctccagaacttcggctttatgtccagatccacatcgttggagtagtcttcatttgcttcgaccacgtgccggccttccaacaagtgacccagcgcggtttcaagcatcgaagttgagtggaaagaatttgatatgttaatagtaagagcagactgcgccataaggatgttaagaaacatagtaggatgtgtcttcggaccataaaattctaaagccttcagccagttcttctccgctcgggaaccataccacttacttttctgacgatatttatcctcatttttttgtttaacctccttgtcaactaaatccagagatcttaagcacagatccctctgataacaagcgagctgaaaatgaccaaaagcagcttcctgtttgcgatgttcaccaagggattcataagtagacaaagcctcccgaaaagcatcacccgctgaaatctctagaactgctatgttagatgagtcatcaatgagtccaccttcataactgtcggttaagaagctctcccttgccaaaagcattccaagtctcaggtaggtatgtgcatactgtgtataaacctcatggaacagtactttatcgacttcagtattgacatacttcagttgcctcttagctgctgaatagtagtttattgcttgaaaatattctgacttggctgacttaaaggattgcatatatgtgccttcaggaagatcatacttctgaaattcatcaatcctggacacacattcctctgctaaagctctcctaccatgacctaagttacagttgatcaatataacatttgtgtgatcatggacatcttgaaatgctgtaatagcatctgcaaaagcaatctcagcactacccagatttctactttcaagtctacaacggcccagttcattaaatgcccagcctcttttcttaagaacaatggaagtttctgctgaatgcacaggatatgcgaacaatgctcccttggctgcaccataacagtgaatagcagaagacaagttgtactcaatatctcctggtttggggaccacctaggaacttgaagataccaccatccctcacagtgggaacacttgtgtgagatttttcaggaacaccatcaacatttccagactgattttccctggcatgattgtaacgatccacatcatcatttgatactgagttgttttcaatacaagtatctttcacacaatgctgcttcttttcagaaccttgcattgcttcctgtgtagtgggtttctccccgttttctttatattgtgattggtggttcctaccaagtgtttttttatttttctttcgaccatag

SEQ ID NO: 11410 - DNA, 442 bp, Setaria italica
  Peptide Sequence Number=SeqID_77384
atcagtgctgaccatattgcagatctaaatattcattcaatatcgaatcccttctcttggacctcctgtataacctcattcctcatccgaagccatagcttccgtgcttcctgctcaaacttttcagactgcaattgcttctgcatgttgtcagaatccatattggcatcagcaaaacccttaggtccaattgtggttccaagagcacctccactttttatgaactcctcaactgcttcttcatcaccagggtatggaaactccctgcgctcataaaggtgtgccatttctttttcttccttggggcgtggcttgagggtccaccatccgagcggcgacgtctcgttccagagccaggcgacgccgaagagagtgtaggtgcagagcatggctttgcccatctgcttaaagagtaggcgtcctccttctcgaagcccatccg

SEQ ID NO: 11411 - DNA, 470 bp, Setaria italica
  Peptide Sequence Number=SeqID_77385
tggtgtctgtaatgagagcaagagtcagaggtgaatactacctttggcacagctgcctggaagacgaaatctgtgaatgtggtagttgctaaatttgtgaaggtagcattaattgtagtctcctgaggtttcccaggctgctttttgaagctgaatgtgatcctcaaggttgcactctggaatgctgtgattgtgggataagctgcatttccatctggcggtcaggcaaattgagtaacagaaaaattgtcattatcaagaatgttatataattagtagaaaaatgcaaaaccaccctttgaagccaccttgagtttgatatggaaagaaatcaaacttggtgacttttcgggggtacttgcaactttctattgtatcggataatcaagtaacaggagataaccaggaagagatgtgcttgaggacaaaccatcaagaagatccacaacttgaggtgtaacaggaacagg

SEQ ID NO: 11412 - DNA, 1241 bp, Setaria italica
  Peptide Sequence Number=SeqID_77386
gcaatgcgtatccggatgtcttacaaagtgaatggcgaggacaggctagaacaagggcaggtcagcaactttcctgctgggttgtagtgctccacctgtctataatgttgcggttgctctttcagcgtgcttcaggcaaggcgtttcctttcttgttcttaaccatttctctcacttctgcttgcctgttagtgagttgtgtacactgctagttggtttttgccattcattcttgctttatatatagtgtacagtagatggcagcgattaatgttgtatcctcagttttgccggaatgtattcatatgttggtgtatatcataccgagggtaaccaaaattttcaccctatcccctcatatcaagcagcaaagaaatatgttgtatcatgatttcactacacaactcactaacaggcaagcagaagtgagagaaatggttaagaacaagaaaggaaacgccttgcctgaagcacgctgaaagagcaaccgcaacattatagacaggtggagcactacaacccagcaggaaagttgctgacctgcccttgttctagcctgtcctcgccattcactttgtaagacatccggatacgcattgcaagtggtttctgtccatgctggttgttagtaacactgaggctttgtgtaactgacccatttccactggcaggaagagtgctgctgctagctgggtccagacgcaactggatgaactttggcacagctgcctggaagacgaaatctgtgaatgtggtagttgctaaatttgtgaaggtagcattaattgtagtctcctgaggtttcccaggctgctttttgaagctgaatgtgatcctcaaggttgcactctggaatgctgtgattgtgggataagctgcatttccatcatcaagaagatccacaacttgaggtgtaacaggaacaggtttggtttctgctatgcctggagggataaagttcgatgttggtgggccattttgtacaggagttgaaccaatagatagaagatccattagaatgtctgtgcttgtagatggagctccgcctgcaggggatgaatcaatcaagccaatgcccaaaaggtcctgtagaaaatcattaggtgctgtagtaggggacgaggtagtcactggggtatcatcagaactcaaatcaagcaaatcagctaaaggagctgctggtggctttgctacaccatttggaagcttaagttggcctccaggagtgactgctggagctg

SEQ ID NO: 11413 - DNA, 2283 bp, Setaria italica
  Peptide Sequence Number=SeqID_77387
atataaagcaagaatgaatggcaaaaaccaactagcagtgtacacaactcactaacaggcaagcagaagtgagagaaatggttaagaacaagaaaggaaacgccttgcctgaagcacgctgaaagagcaaccgcaacattatagacaggtggagcactacaacccagcaggaaagttgctgacctgcccttgttctagcctgtcctcgccattcactttgtaagacatccggatacgcattgcaagtggtttctgtccatgctggttgttagtaacactgaggctttgtgtaactgacccatttccactggcaggaagagtgctgctgctagctgggtccagacgcaactggatgaactttggcacagctgcctggaagacgaaatctgtgaatgtggtagttgctaaatttgtgaaggtagcattaattgtagtctcctgaggtttcccaggctgctttttgaagctgaatgtgatcctcaaggttgcactctggaatgctgtgattgtgggataagctgcatttccatcaggaagagatgtgcttgaggacaaaccatcaagaagatccacaacttgaggtgtaacaggaacaggtttggtttctatgcctggagggataaagttcgatgttggtgggccattttgtacaggagttgaaccaatagatagaagatccattagaatgtctgtgcttgtagatggagctccgcctgcaggggatgaatcaatcaagccaatgcccaaaaggtcctgtagaaaatcattaggtgctgtagtaggggccgaggtagtcactggggtatcatcagaactcaaatcaagcaaatcagctaaaggagctgctggtggctttgctacaccatttggaagcttaagttggcctccaggagtgactgctggagctgattttactgatgaaaccgtggcctgcatagaagcagctctcttcaccaaataattagcttcatccaatacaggcatccgttcaagcaatgatgattttatagactggtgtctttgtataatggaactgaattcaatagatctttgctgcaattcaagcacagtattccctttattctgtgcaactatttcttttatcctctccgaggttggtggaaaccgggaggaaagcttcaaaagggagacaagacacatagccctagtagtaacatctgcagagtagcgtttaagatagacctctacagcatccacagcatcagattctgttaccgtgatcggttcctcaatgtccaacatactaacattgttgaccagcatttctccatattcaccgatgcaccaaacagccaccctaactaaactttcctgttcaccacatgcttgcaatgccttatataatgacctgactgaatatccttgaagttcagatgcattacttattagaactataagagcatgccatacatcatcctttacatgatttccagccagtgataaaactctgaacatctggtctaagtaccatagcttgtcctgggaaaacttttcaactattgagcatatcttagcagtgaggtcgtccttgaaatcttgatcactcacttcaaggtaatcaacaagctccttagtcaaaggctttacatttgtatcattgacaagtaggtaaacaagttccagggcccttttgcgaatggagacatctgcatccttgacacactctaaaattgttgctctgtgcctctgcactgcttgtgtgtctacagcaatggccttcataagcatgttcagggcaacatatcttatgttgttatcacggttggacaaaaatctacccaaaatattgattgccaacacacgtaaaccactggtagcttcgatgcccattatggtctcaacacattcatataaaatagcatttccagcattcttatttgactcggttttcgttgcaacctgagcaagaatatcattaatatactcactgcaatctgcatctccttggctcagtgttcgcatgagtttaagcactcggatatgtaagaacggatctgtaatgccagcaacatcgtattcaggagcatatgaactgttggacacatctctcagtattcggaccaaaccttcaagagagttcttcctcaagtactccaatgcttcagtgctggctttacagagttccgtgcaaagctgaacagcagatataagaaccccatgatgtttttccttcagtaatgatgcagcagcacccatgaaattttctgccaagtctgggacttttcttacaatccttatagagcataaggcagccttcttctt

SEQ ID NO: 11414 - DNA, 311 bp, Setaria italica
  Peptide Sequence Number=SeqID_77388
cctggagaggacgcttgaaattcgggacaggtcctacaggttcaatattgagcgccgtgacgatggtagccaagtcagtgaagcacagcacagggcagatggacgctttgccgacaatgctgcccctttggatcctgcgtgtgatgaaagtgccgctactgattcggatgaaagcgccgctactgattcggatggcgaggagttcagccgttatgtcaaggaggctgcagagctattgagcaaggccaaggtggccatggctgatgaagagactgcagacgcgctgctgtacaaatcagctaggctccttt

SEQ ID NO: 11415 - DNA, 254 bp, Setaria italica
  Peptide Sequence Number=SeqID_77389
attagcagggtgatgcacacaagctgcagagcatgaccaactaacagtctaacacacaaatgtggtttagcagtaatcagaagtttatgccattcttggcttgaagcattaaatcttttgcatttaaaatacgcatgtagctttaagtattacctgagagtgaaatgcaaagaatttctagattaagtactttatatccaaaatgtttctgtaaatgtgggtgcatgtaaccttccataactttaaacaaccag

SEQ ID NO: 11416 - DNA, 1018 bp, Setaria italica
  Peptide Sequence Number=SeqID_77390
cttctggtcttcttgaagaagcaagcttcgttgcttcatctgtgtcgaacttgtgcttcccttctgaatgtgatgagggccatatcaaaaagaaatgcatggaagctagtgtttctgaatttatcagtatttatgcatgcaagatacttgacttatggttcatatgcattcagttgttggaggatgaagatgcctatctgagacaaaacctagcaaagaacattcagaacataatcgcaaatggttcagctagtaacttctgtgatgattccacaccactgcaagttgatagagtcattgaattgagctttgattatctcacttctttgtttggcccctggttgaaatacatcgagtatttgttaaggatagtcttagatactggaaacactctgaactcccgtgaggatttggtccgtcagatatttgataaagaaatagataaccatcatgaggaaaagctgttgatatgccaaatctgctgttttaatattcagaagcttttgcagtccaaatatcagatggaaacaggaggaaaaactgaatcgttcctgcagaactggcgggagagatttttgagccaactcacattgctgactagtggctatcttgagaaagaggggaaaattgattggattggcggcataggtaaccataaggatgtgttcatatcagtttatgcagatctgttaggcttgtatgtgcttgcaccatcaggttctctggaacatcaggacagtcatgcaacttatttgcaagaatttccaaaaccttgatgggtttatcaaaaccattcctcaagaaccctctgatatctaacctttatgttcttgtaaaaactatcacatgagaggttaagatgccccagataagccagaggaccaaatggcctcaagttttgacccatattttcttatcagatgagttttgctcatgtaaaaactaattattcttcattgttattcttctgttgtaacattctaattataattgttctttaatataaatttaccattct

SEQ ID NO: 11417 - DNA, 429 bp, Setaria italica
  Peptide Sequence Number=SeqID_77391
aagggggaaaaaacgacctgaggaaaaatagaaaataaagaaaccaaaataaatgaccaatatgattcaaagcctccaagcacatgtgatcaacgtgtaaatttggaaaaatcttcgggcagtgggcgtttggattctctgattgagagagcaagacctgatcgtagttctagtccaagtaaaatccattcaagaagttcacctagcccaagttcttatcacgacaaagatcaaagccggcatggatctaaggcgatggatcatggaaagagagaaatgccatatgatgagagaaatagtcgaccgagaacatcttccgggagagaaaggacacctgcttctaggcttcgtgacagggacgcagaaaattggtacttctgaaaggctcaaacagaaggatgatcaccagcctcgtgatgtaccattgga

SEQ ID NO: 11418 - DNA, 788 bp, Setaria italica
  Peptide Sequence Number=SeqID_77392
tagacttactaaggcttcgtgacagggacgcaggtgtcctttctctcccggaagatgttctcggtcgactatttctctcatcatatggcatttctctctttccatgatccatcgccttagatccatgccggctttgatctttgtcgtgataagaacttgggctaggtgaacttcttgaatggattttacttggactagaactacgatcaggtcttgctctctcaatcagagaatccaaacgcccactgcccgaagatttttccaaatttacacgttgatcacatgtgcttggaggctttgaatcatattggtcatcattttcctcaggtcgttttttccccctactttccttatacctattgctataatcctcataatgatcaccatcttgaactgcttcctttctgtaatggctctcagagcttctgtgcccatctttagcactcttataatcagccctgtcactttcatgaccacgggtcacgcgctcatcaagaaacttgtcatcttgttgtcttttatcccttccataatcatccttatacttttccttatacttgtcatcatcaaacctttgttccttagaactcctagatttaccatgttcatatctggacagagtctttctgtcatcactgtctctgttatcagcaggccacttatctgtatcttcagaatcatctttccttcggctgtgtttgtcaggttgcatctcaggattattgtacttctcttttgcagaaatttcattgatctctgtgtctctcctgttaggtagttaggtcctt

SEQ ID NO: 11419 - DNA, 3090 bp, Setaria italica
  Peptide Sequence Number=SeqID_77393
gaatggattttacttggactagaactacgatcaggtcttgctctctcaatcagagaatccaaacgcccaagttcttatcacgacaaagatcaaagccggcatggatctaaggcgatggatcatggaaagagagaaatgccatatgatgagagaaatagtcgaccgagaacatcttccgggagagaaaggacacctgcttctaggcttcgtgacagggacgcagaaaattggtcttctgaaaggctcaaacagaaggatgatcaccagcctcgtgatgtaccattggaaatttctgcatcatcacagtatgatcgcacacctaggaaagacaagcatacttcaccaaaacaattttctgaaaaatctccatcttcaggtgaccaaaggttttcaggtaggcttagtggtgggcgtagtcttgatagtaaaggagaaagaaacagccttacaaaatacagagatcgagatggcgacctgtcccaagaacgatcacatcatcaagatagaacaccagctaaagttccgttcagagagccaacaccttctggttcatccatgagtagaggtggtcatttttcaggaacttcaccaaatcatcctctgccaccttccaggcacagaaatgacgactccttcttgggttcgcatgatgatgaccgtaggcctcaaagtggagatcgaaggttccatggtcatcaaaagaggaatgatatgaattctgtacgtggacatggacatgcctggaacaatccgccaaactggccttctccagtttcaaatggttttgttcccattcaacatggtgctcctggatttcacccacctgttcatcaatttccggggccacctatgtttaaccttaggcctcaaatgaagttgaaccaacctggagtttcatatcccatgcatgacggtgttgacaggttttcaactcacatgcgcccatttgggtggcctaatcctctggatgaatcatgcccacctcacatgcaagtttggaatggaggcagtggtgtgtttcccagcgaaccatatctgtacagtaggcaagagtgggatcagaacagacctcatgctggcagcagaggatgggagctgactggtgatacatctaagggactaaatgaagtgcctgatgctgaacttccagttgctaagaaggagcctgactccgcagcaaccgctatttctgattcttctagtggacaacacaatcttcaacctctggtcgagcaaaaggaaattgaacacttgacttctgaacactttgaagcaaaggatgattctaaaagtgctttgaaaagtttggaagctcctcgaggagcacaacttgtgacttctatgttgtcaaagaatggcgcagtcttttgtaaaagctatctatccagaattagtgtgtcacatgatctagttgagtctgagttgtacaaaaggtgcatatccttgctgggagacttgggtgtagcaaaagcccctattgtggttaggaatgaacttagtcagcgggatgatggaaatattagaaagataactgaaaactatggaagcccaaatcctttcagttcactttacctcaagagtaacagtgctatctttcagagagctttggcccttcacaagaaccagactggaaagggtttagttcctacctttgcatctgtaaaaatggaagagaagatggacgcaccagaaggtagtcaagatacagaaatgcttgattgtacttcaaaggaatcaatggtgagcagccctgctccgcaacatcacactgatgtcatggaggaatggtcaccatcaaaacaggaacttggtgataggataggggtggcaactgcagcagctacagaatctggtggtgtggaggcacctccagcaatcacacaacctgatgaagagatggaggtcgtggcaccaccagcaataacatcgcctggcaaggatatggaggatgtgataccttcagaaaacgaagtaccagctgatggcctggaggatggtgaacctcaagcaaccctagaacatgctggtgacttgctggaagttatatctgctgatggcctggaggatgttgcacaaccttcagctgatggagaatcaggtgataacatggagattatgccccctgctatgacagatcctagcctaggcaaggaggaggttgctcctgttgctgctagcccccctggcagtcaagagagacccttcatcatgcatgcagatgctgagaaaggtatggaggatcagattggtaaagttattgatgataatcctggggatggtgaggtgagctctatccttgccacaaagcttgatgtcgctgcaagcgatgatcaggattctgaagctttgttggtggaaagtagggtaaatttaagtcggatacctaattccccagaaagtacacattgaactcctttttattccattttaattccttttttgtctgagggacttgtgccctcagcctagctttttgagctgcgttattttctttacatctgggcatcttctctttctagtgtaacattcgcagtgagctaggtgcctagcttatgggaacttgcacgtgcctgtgggatgcaggacctgctgcatggcatgcctcaagcagcccgtgcccatccagcagcgtttcttgttatctgcttgcttgtatgccccattggcatgaatctctctgcagcttttgctaagcgtcccctatagctcggccactcattgcatgatgcctttgtctgggatcctagatttaccatgttcatatctggacagagtctttctgtcatcactgtctctgttatcagcaggccacttatctgtatcttcagaatcatctttccttcggctgtgtttgtcaggttgcatctcaggattattgtacttctcttttgcagaaatttcattgatctctgtgtctctcctgtaggagtaggcctcctcttctgccctacttgtcttcgagccagtcttcctgctacccccatcctcatacctctcatgcttggaatcatagtctttcctgtctctctcccgctccttctgcctctcccgttccctctccctctccctgtcccgctctcgatccctatt

SEQ ID NO: 11420 - DNA, 402 bp, Setaria italica
  Peptide Sequence Number=SeqID_77394
tgtttcttctcatcctccacgtggtctgagtttgtatcatccttgtccatggtgtctggtgacttatctgctttcttatttgacagatttgagaaagtaacgccatcaatttccatcttcagctcatcatggtattgcttctctagcatctccagcttcctcttcttttcagcagcttcgttcgactctgttcgatccatcattgctgctaccaacgaattgtccagatcttcatcacctggcagaggcaagacctcattgcgagcagcagcttgcagcctctttattgtttctgcatactcaggaatgtaaccctctgcatcgttgtccacaaaaggagacaaatgtggtggaggtactcttccacatttgcctctttattgtttctgcatactcaggaat

SEQ ID NO: 11421 - DNA, 2191 bp, Setaria italica
  misc_feature (1)..(14): n is a, c, g, or t
  Peptide Sequence Number=SeqID_77395
nnnnnnnnnnnnnnttttttttgaaccacagatcagggcaggagcatcccacaataatgcaacaagtaaaatatatcaagtatgttgtcttcaagtatcctggtgcacatcgttaagcccagattgaacagcatagatatctttacgtcaaacaaataaaaacaacatagctatcaaaaggcgaccaccatcacacagtgctgatcgtggcagcgtcactacaagaaatgctacccaaggctgatgccagtaaggcccaagcagatactcagcgttgcttagcagacgcgctagactcagcgctcttttttctcttcttcagtatctcaactttgtcttgtttcctttccttgccaatcttcattgccttatacaggcctcttcccttgcgagacatggtaaccgtagaaatgtcagcactatccttctcagcttgtttcttctcatcctccacgtggtctgagtttgtatcatccttgtccatggtgtctggtgacttatctgctttcttatttgacagatttgagaaagtaacgccatcaatttccatcttcagctcatcatggtattgcttctctagcatctccagcttcctcttcttttcagcagcttcgttcgactctgttcgatccatcattgctgctaccaacgaattgtccagatcttcatcacctggcagaggcaagacctcattgcgagcagcagcttgcagcctctttattgtttctgcatactcaggaatgtaaccctctgcatcgttgtccacaaaaggagacaaatgtggtggaggtactcttccaacaatatacccttctgtcggcaatatgatgcgagcatttacacaatcaaatatccactgtggttggacatactccctagtgaggaaaacatggctttgtgtcggcctatcaacaatctgatgagtgatgtcttcatctacttcagtaaatggagctccttctccttcccacgaaacagttcctccaaatgccgggataataaataacagggactccctaggcacctcccgactcaagtagaactttaagttcttaaataaacttttacattctttggtctcatcatcatctgtgtcaacagcagtcgtttcttctacaagatgcattagtgcaccaggttcattagctgggagctgatgttgaagctgtgccaatctgagttcagactcatctgcttttgagcttgttttattgtttgcatcctcattttccttgattgctccaccagtctcatctgcttttgagcttgttttattgttttcatcctcattttccttgattgctccaccagattctgagtttcgaatcactttcccagaaccagtagacatgtatcggcacaatgcatatagctcagcagctaaagcttccaaacgagaatccaggatagggggataatttacattaattgaatggtagagcttgaagtttacaaatcccagaagagtctcgtagaattccagaaaactaagcatcacattgaagtcaacatcatcagttaatacttgctgaagagcatgaggagttagccaagtgatcttttgtccttgaacttcagcctggaaatatatgcccttcacagaaataaatgtcttcctcagggaatgagttctggatatgtatgcttgccattcatggctcaacctgcggcagttatggatccgtttgacttcaacacgttcaccatcaacagcaggtaatgccgcaaacagatgaaccattgtaaggcagtcatccaagtctcgaagagcatcaacaaacgttggatatctttcaaggaccagcctatcaagcttgtatgttggtggtcgattcaacagtctgtccgcaagatccctgtttttcttagcaacagccttcttaacctttttcctgtggaccttaatttgcctgaatttctcgatcaaagggtcatgagcaagaaaagcgatatccttcatgtggtagtaggtcttgtggtttccttccactttcttcttcggctgacgaggaaaaacacctttgagaatgcatagtttcctgaagattgcaaggctgacttgcaggtagttgaccgccttggtcctcgtgatgtacttcgccgcattcccctccttcttcttgcccgcagggcggtagtgcttcggcatggcggcggcggcggaggtcgctcctcggaccgggaaggggag

SEQ ID NO: 11422 - DNA, 723 bp, Setaria italica
  Peptide Sequence Number=SeqID_77396
gcagcaatctaaatcatctgaagatagagtttgtaagcaagttggtcccaaaaaaatgacttaggtaatccagaaacaatactaaaatgcttcaggaccataaccaaaccaaatctctaccgcactaacttagaactacaaatggctgctagtaagaaaaaaatatttggccatcaccctgaagattaaatttgatgcaattttcaagaaagaaaagataagctacctctggtttgggcaagaataatcaaatttatagcatacttagtaatcagttgtagttaattgtttaatcctagaaagatcatggtaatgactaatacaaagatggttttcaatagatagctatagctctgtgaatatatctctataggtggtacagagtattctggcacccctacaaacattatataaaaccttagacttgaaataagtacagtaatctacaattctacatggagctgataggtactataccagtattgttatcgaagtaaaactaaatgacattccatgcatttcaaatgcaaaagtagaagaattcatgatcaacttaccaggccagaaagatcaaaaggtcagataattatataaagaacaccacccctacttaaaggttaaagataaccatttatttacagcctgcatagcccagctgctggtctatgcctcgaagttcagacctaatatatgtgccagccgatgccatcttcatttgacaaa

SEQ ID NO: 11423 - DNA, 927 bp, Setaria italica
  misc_feature (39)..(39): n is a, c, g, or t
  Peptide Sequence Number=SeqID_77397
aagcaccgcggccaaacccagcgccgccaccgttccacnccaatccaatccggcgcagctatatctccttactactgcactggtatatttctagctccgtcacaatggttgctacctataccaaccacggtcagggggtggagagccccgtgtggttgctggacgcctgcgaggccacgtcctccttggcgatggcgacatagttcaccggagcaaccggcctgctcgcatccctccgcccatcccggcttgcggtcctgccaccgctctggagggccgacagcctccggaccggcgtgccattaactgcaccaccaccactgtttgcccgggcgccagcaaccttccttgaggactggggccgcgctgggctcggcttcgaaccaaactagcttctcctgttccgcggctagctgatcatttatctttttctggtccctcattcttcgcttctcgtcttccttgtcctgcctcagaattttgtattcgtccagcattgcaaggagaggaacgccgtcataggtgaacggcatgccgtgctcttgttcccaagcctgggtcttcgcaaccagcgtgtcaacaatagctggaattttattgaccaaaacacgagccttttctgcacgtttcagattcagatgtgcacccctagttgcactgtacctgttatcatcccggctatagtcttcaagccagctctcttcttcacaagctgacatccacctatcaaccctctccaatatgtcctttctgcttaacgcctcttcatttgcttgaagtatctggttctccatattggccagtagttccgaaggttcaaaactactagactcgataatagacattattctatctctggcagcactagtatctattgcaatatgagcccgggcatatatatcttcaagttcagtctgctttctttga

SEQ ID NO: 11424 - DNA, 366 bp, Setaria italica
  misc_feature (1)..(61): n is a, c, g, or t
  Peptide Sequence Number=SeqID_77398
nnnnnnnnnnnnnnnnnnnnnnnnnnnnnnnnnnnnnnnnnnnnnnnnnnnnnnnnnnnnnaagaaactcctttattttctgggaaggactacatacttcataaacatttacagcttcaactcttccatcagttaaagcaggacacatgtttgagaaattaagaaatactgctggaagaaagaaaacagaaattaaacaacattgctgaatactgatacacatgctcttgttcacttcctcttgttcttgctgctgacgagcaagacaacataaaacaatgctctgaacaggaacccgcaggccacggttaccagcaggcacttccacttcccgatgtcggtgacggcctgcagcgcgagcacgtc

SEQ ID NO: 11425 - DNA, 329 bp, Setaria italica
  Peptide Sequence Number=SeqID_77399
cgttgaggaacaccgggagcgcgtcggagcaggtgtagaacatggtggacatggcgatggcgaagaagccaagccgctcctgcacgcccttgggggagtcgtccaggcgccagaagatggtcgccaggatgaaccccgtcaccagcacggcggccagccggatgatgaagatctccggcgtgcgcttcgtgttgatgaacgcgcggcgggtcaggacacccatctcgatccagaacgggttcgcgaacttggacaccgcggccgccggcaacggctccccggaatgcacggacacggacccgtcggtcgcgccggacacgagcctcccg

SEQ ID NO: 11426 - DNA, 668 bp, Setaria italica
  Peptide Sequence Number=SeqID_77400
atttagctacaaatcactggagaaagaagaaaagtgaaaaaaccaatgaacaatcaccacctattcgactactatgtcttccttcatcacttcccttttgcacgctttgatttcctccatggtgatcgagcttcgacgacgattgctttcaaatgtacatatacgcgcgcatatggtgggcgcgcgatcacctccgcttgttcttgctgccgagaacgaggctgaagtagaagaagagccggaagaggaacccccacgccgcggtcacgagcaggcactcccactttccgagctgcgtcaccgccgcctgctgcagcacgccgcggcccgtgacgacgcacgtgtcgacgccgatccccaccccgagggcggagctgatggacgcgagcacccgcgccttcacggcgtccggcagcgcggccagcggggagttgtcgaagatctgcgcgccccgcacgaagcactcgccgctccgcccgaactcgttctgcagcaccccctcgaacgggtacttcaccagcgacaggtagtggaaccagatccagtaccccgggatccggtcgcggttgatgaagaagccgctgaatagcaggaagtaggcgaggatggcgaccaccacggtgtacccgatcatgacgtgcggtatcacgccggagaggaacgtgacg

SEQ ID NO: 11427 - DNA, 680 bp, Setaria italica
  Peptide Sequence Number=SeqID_77401
ccccgtcccatattaatcacatgcggtcaattagaaaatcgagataaaattccaaagaagaaattcaaggtagagggaccaacaggccccggccatccgccataccgatcgcaccggccggatcacctcctcttgttcctgctcccgagcagcagcgagatgtagaagaggatcctgaataggaacccccaggcgacggtgatccagaggcagtcccacttggtgaggtccgtcactgcctgctgcgccaggaagtcgggccccgtggtgatgcacgtcgccgtgccgatgtccacgcccagcgactggctcatggcgcgcagcacccgcaccttgagcacccccggcagggcggccagcggcgtgttgtcgaacatctgcacgccccgcacgaagcaccgccccgggtcgctgaactcgttctgcatcaccgcctcgtacgggtacttcaccagcgacaggtagtggaaccagatccagtaccgcgggatgcggtcgcggttgatgaagaagccgctgaagaggaggaagtaggccagcgtcgacaccaccacggggtaccccagcatcacgttggtcaccacgccggagaggaacgtcgcgaacccggacccggcccaagaaaggacgccagcacgatggccacgaagaagaagaagccctcggcgccgccggccagg

SEQ ID NO: 11428 - DNA, 2173 bp, Setaria italica
  Peptide Sequence Number=SeqID_77402
ttagtaaaactagtatttgaagttttcacaccaagcattgcattcattatgcgtaaaatgtaaaaaaaatagatacatatttcttaaacataaaagttgcacagatcgagctatacatttgcttcaccagcacaattcaacaaaataactgaacatatttttccttttctactagcttatttgcgcttgttcttgctcccgacgagcagaaccacgtagaagagggccctgaagaagaacccccacgccacggtcaccagcaggcacttccacttgctgatgtccgtgacggcctgctgcaccagcacgtcggcgccggtggtgacgcaggtgctcgccgtcatgttggaccccagcgtcttgctgatggcgtcgagcaccttgagcttgacggcctcggacatgcgccccacgggtgttccgtcgaacatctcgatgccgcgggagaagcagcgcgacgcgtccctgaactcgttctggagcacggcctggtacgggtatttcaccagggacaggtagtggaaccagatccagtagtcggggatgcgatcgcggttgatgaagaagccggagaagaggaggaagtaggcgaggatggcgacgaccaccgtgtaccccagcatgacgtgcggcaccacggcggagaggaaggtgacgaagccgctgcccgcccagaaggaggccaggatgatgaggacgaagaagaggaacgacgaggcgccgccggcgagccccaccgcccagaaggtggtgacggcgaaggcgagggagaggagcacgagcggcgggaaggcgacggcggcgttggcgagcacgtaggagatgcggcggtaggcgttgtgcgcggtctcgcggaggtagatgtggcgctcctgcacgaacaccggcagcgcgtcggcgcacacgtagaacatagtcgacatggccatggcgaagaagcccagccgctcctgcacgcccttgggcgtgtcgtccaggcgccagaagatggtcgccaggatgaagcccgtgaccatgatggtgccgaggcgcatggcgaagagctccggcatgcgcgccgtgttggtgaaggaccgcttgatcagcacccacacctctgtccacggcgggttcgcgaacgtcggcaccgtgccgctcaccgcgctccccgacccgctcccggcgaccagcttaccccgggacacgctctcggcgatggcgagctccaagggcatcgtgctcatcagcttgctgtccttgtccgtggaagaaccgttgttctgccacttggcgttgaagtcggcgagcgcggcggcgccgtcgggctggcgctcgtactcgcggatggtgtcgagcgcgaactcggcggggttctcgttgtccgggatgggcgcgccgaactcggcgaagaagggcttgaggccggcgggcgtgccggcgtagacggtgcggccgcgggagaggaggagcaggcggtcgaggatgccgaggatgcgggcgctgggctggtggatggtcatgatcaccacgctgccgctctgcgcgatgcggcggagcacctgcaccaccatgaaggcgctcgccgagtccagcccggaggtgggctcgtccaggaacagcaggatcgggtcgtggatgatgtccgtcccgatcgaaactcgccggcgctcgccgccggacaccccgcggtggccctcgtcgccgatgatggtgtcggcggcgcgggtgaggccgagctgatcgatgagcgcgtccacgcgcgcgcgcttcttctcctgcgacagaccgcgcgggaggcggaactcggcggcgaagtgcagcgtctcgcggaccgtcagcatcggatacagcaggtcgtcctgcatgacgtaggcggagatggcgcggagccgccgcccgtggagcggctccccgttgagcgtgacgctcccgtggaggctctcccgcgcgatgcgccccgccagcgcgtcgacgagcgtggacttaccggagccgctggcgcccatgacggcgaacagctcgcccgcgcacgcctcgccggagatgccgtcgagcagcgtcttggtgttcccggccggcgcggccggcggcgcgtccgcggacgcgaggcggttgctgggccgcgacgggaggcagcccagcagcccgccgcccttcttgacgctgtacgacaggtcggtgaagttgagcacgg

SEQ ID NO: 11429 - DNA, 745 bp, Setaria italica
  Peptide Sequence Number=SeqID_77403
cctcagatactgaggacactttttgtagatcattctctttgaggatgctggtaaccagtggagtctcagtaggccaatattgagcttgataatgaccagtgaacagatgttcagtgacctgagagcgcacttattagcatcacagactgtggaccagcaacaacgcctttcacaatgctttgataagctgatgactgatgtcaacaggaacttggaacctaagaaccgagacagattcactcaaaatctgacagcatttaggcatgattttcggatgaagtaacagttcctcagaatcagctatcagtaaaaggaggtgttcctgcatgatgtaaatactccggttatcttcattttaggagtcaccattctgtggattaaaaaagaagtctcgttgcttaggtttgccttggattagtctgaagcctgaagatgaagtttcttgacttgatggatgtggtggttaaagcagttgtaaatttcttagcttgtcatttgtatcagaatggtggggattgtttctctttccttatatcgcttctcttttgcttgtacagcaaaattaatgctggaaatgggaccgctgtttgcccaagttgttaggtggtaaacagccatcccccaaatctaattcatttgttaagaagccaacgaggtaaaggatgtaaatggttctgttggctttgctgaagatgaaaattgatagaaacagtaaaaaaagtggtccattaattccaaaaaaaaa

SEQ ID NO: 11430 - DNA, 2010 bp, Setaria italica
  Peptide Sequence Number=SeqID_77404
catttttctttttttttaattcagatcttgatattttcctatgatgtttcaattacacaacctgattgatcttctctttcaatgagttgcagtaccaaagcgctagtctgtacatcataaacatcatggaacctcttctacaagcttatacggaaaggtcaagattaccagctcctggagatgctgatgagctctctgtcatcgaaggacaaattgcatggatggtccacataattgcagcaattctcaaagttagacagaccgttggtgttagccaagaatcacaggagtcaattgatgcagaattgtctgcccgtgtgctacagttgataagtgtgactgatacaggggctcacgcacagagatatcaagaattaagtaagcaaaggcttgatcgagctattttaatctttgtgcaaaatttcagaaggtcatatgtaggagaccaagccatgcattcttcaaagctattgtatacaagattgtctgagctgctagggctgaacgaccatttagttttactcaatgtcatcgttgggaaaattgctacgaatctgaagtgctatgctcagtgtgaggacgttattgatcatactctgtctctattcctggagcttgcatctggctatatgactggaaagctggtgcttaagctggagagtgtaaagttcatcatcgcaagtcattctggagaacttcccatttctggcagagtacagatgttcccgtagtagaactacattctattatatccttggctccttagtcttcatggaagacagccctataaaattcaggactttcatggaaccacttcagcaggttgcatttaacctggaggcaactcctgatgctgctttctggaatgatgttgctaagcgtgcatttattggttggatgagagatttacgaggcattgcgatggccaccaacagccgcaagacctatggcctcctatttgactggttgtatccatcacgcatgccacttctattgagagcaattgcactgtggacggatgaaccagaggtcaccacccccttgctcaagttcatgtgtgaatttgttttgaacaaagctcaaagagtgacatttgattcagcgtcaccaaatgggatccttttgttccgagaggttagcaagataattgtggcttatgggtcgcgaattctagtgcttcctaacggtacagatatttacggaagtaaatacaaaggcatatggatctcacttaccattctttcaagggctttatgtggtaactatgtcaattatggtgtatttgagctctatggtgatagagcacttgcagatgccctcgatatatctctaaagatgaccctctcagttccattgtccgatataatggcattcagaaagctgtcaaaagcgtactttggatatatggaagttctgttcaacaaccatatcaagtttgttctcaatttggacacgaacacattcgtacatattgtcagctctcttgaatctggcctaaaaggtctagatacagggatatcaacacagtgtgcttctgccattgacagcctggcagccttttattttaacaacattacagctggtgacacacctccatcaccagctgcattaaatcttgcgcggcatattggagagtgccccaatttgtttcctcagatactgaggacactttttgagatcattctctttgaggatgctggtaaccagtggagtctcagtaggccaatattgagcttgataatgaccagtgaacagatgttcagtgacctgagagcgcacttattagcatcacagactgtggaccagcaacaacgcctttcacaatgctttgataagctgatgactgatgtcaacaggaacttggaacctaagaaccgagacagattcactcaaaatctgacagcatttaggcatgattttcggatgaagtaacagttcctcagaatctgcaagactaatacaagtaaaaaggaaggtagttacctagacaatagaatagtaaaataacta

SEQ ID NO: 11431 - DNA, 652 bp, Setaria italica
  Peptide Sequence Number=SeqID_77405
ctcctcagatatcctctcctcctgaagaagcagcagggcttcatcatggtggctagtcttcctcaagccgcggctcttttcgctgcgctcttggccgtcagcttcggcgcggcggcttggaaggccgaggctgcagcgccgccgccggtcgtggttggctcgatcaagtgcctggactgcttccccaacgacatcaatgccgaagatgccttcaaaggccttcaggtagcgatcaagtgcaaatccgccgccgacgagaactacgactacgagacgaaggcggtcggccccctcgacgacgtcggcgtcttccgcatccctctcgccgccgagctcctgcgcgacgacgggaacctggaccgtgactgctacgcccagctccacagcgcgcctgacacgccgtgcgtcggccaggcgccgcccaggatcgcgcccacccaagacggcaccgccgccgccaccagcgccatctacctcgccgcggcggccgacaccgtgttctcccccgtcgcgtgcgcctgcggcaagaagaagaagaagcacttcatgttcggcccgccgccgccgccgcccaggccaacgccaacgccgaccccgcacccgccgacgccgacgtacggccccccgacaccgacgcccacgcccgtaccgg

SEQ ID NO: 11432 - DNA, 727 bp, Setaria italica
  Peptide Sequence Number=SeqID_77406
aaactcacaaccatttcttcctcagatatcctctcctcctgaagaagcagcagggcttcatcatggtggctagtcttcctcaagccgcggctcttttcgctgcgctcttggccgtcagcttcggcgcggcggcttggaaggccgaggctgcagcgccgccgccggtcgtggttggctcgatcaagtgcctggactgcttccccaacgacatcaatgccgaagatgccttcaaaggccttcaggtagcgatcaagtgcaaatccgccgcccaggccaacgccaacgccgaccccgaacccgccgacgccgacgtacggccccccgacaccgacgcccacgcccgtaccggagcccaggcccccggcgccggaggagcccgaaccgttcttcaagaagaagccgaagatgaagttcatgcacaagaagaagccgtgcccgccgctcgtcgacgacgacaccacccgacctgcggcagccgggcaggagaagctacccaagaaattgaactagggcgcgcgtgctggcaggactgcagcaaagggctaagatgatggcgtgtttcagactctcattgatgttcgtttttgtttcggtgatgttgttgtgttgtcagtgacttattgttttcgttcggttcgtgccgtatgctgtggcgctattggtgtttcagtgccagttgtttgtttgtgatttgagaaataaagatagttgatttcttaaaaaaaaa

SEQ ID NO: 11433 - DNA, 695 bp, Setaria italica
  Peptide Sequence Number=SeqID_77407
aaattacataatcaacagcagcagatgcgtgggaagtattcacacctaagcatcccagttccgggaagagttcatgggctgatgttaaatacagaggcgagtggatgagaaggcccatctcagagacggaagtggcctggcttgcaaggattctgatccgcctttctgattggctgaacggtgcccttgggcttgactgtggtgatgctgacgatagccctgccactgctagcgccacctacattcgttttgatggcaatgaagtgaacacagtgggcgggccgaaggatgctgccagaatggctgttgttgctttatgttcagtgatagctgttgtggggcaagcattgctgaagttcatgaggtcacacagggtgaagatcaatctaagagtgtttgcttcgaaaaaagctgctgccggctgctgttgtgctgtatgccgtggtggctgtaacaaggaatgcttcaggttgatggtcatccaatggaaattttgataccaacaggttaatgctgtagaggcggtcttattcatgaaggaaaagtgtagctgttcatcgtgttgttggtgtgctgtacaggacgttgctgctctattgccatgagtgtaaaagagagacgctgatgctgcgtgtaattaaccagcactgcgctgtactgtatgatatggtacagcgcagtgctggttaattaca

SEQ ID NO: 11434 - DNA, 320 bp, Setaria italica
  Peptide Sequence Number=SeqID_77408
tctgctgctgtagcgatccggcgaaggcgccgccgaagacgccgccggcttctccaccggcggaattggcggcggctttgagtagcgcctgcacgtcgccgcccgatccgccgctgccgagggaagggccaccacatgctgctccagggcatgggccgcccgtcgagcggcccatgccctggagcagcatgtggtggccctgcctcagatcggccagctgctgcagcaccatctgcttcgccgccgcggactccgcgccgccaggaccgccgctgatttggtgctgccggagccgcgacgccagcagcgcggactcgtcg

SEQ ID NO: 11435 - DNA, 452 bp, Setaria italica
  Peptide Sequence Number=SeqID_77409
ctgaaaaccaaaatgcagttcctactgaactcgattgggagactcagcaacctaacgtctctaaatctggtaccacgaacttcctcttgtgcaaattctctcgacgatgctggtgctgcaagcattactgtttctgatagcatcagcagtatgcctaccccaacccttcttcagagtcttgaggtttcgccacgaatttgcatatttttttgcctccccaagtggatcgggcaactctgcaagctctgcactttaaaggtcggagtcagaaaactagccaggaatgacattgatgttctcagaggaatgcctcttcttgctgttctctcgctgtatgtccataccaagcctgcatcaaggattgtcattgggaagacaggattcccagttataagatactttaagttcaagtgttgtgatcctttgctaaaattcgaggaagatgctatgcc

SEQ ID NO: 11436 - DNA, 1597 bp, Setaria italica
  Peptide Sequence Number=SeqID_77410
aggctgaaaactgtcatatactttacatttgttaactttattacactagaatttttattcagaacggcataaaccctagaggtccttagccaggaactaagatttctgctacagtcagcaattacatagaaaacatgtgctgcacgggaggctagctaggctactcgtctagaaatgtagattcggcaaggtcaatggcacgagcagcgcccgcggccttgttcaggcactcctggtgctcgtcgtccggtttgctgtcagccactatcccagctccggcctggatatgagccacccactccttgcgtgggtttccgtcagtatatgagtacatggtgtcgaaccgagaaccggtggggaagaccatggtgcgaagagcgagcgcaatgtccatgtcaccattgaaggaaatccctccaaagccaccactgtagggcccacgcatattcacttccagctcgtcgatcagctccattgctcgcaccttaggagcgccactaactgttccaacaggcaatgctgcacgaagcgcgtcccaacaggtaaggtcatcacgtaactccccagtaactgttgagctaatgtgcatgacatgtgaatatcgttcaatattcatcagtttctccaccttcactgaacctggtttggacacctttccgacatcattgcggccaagatctactaacataatatgttcagcacactgcttttgatcactcaaaagcagttgttctaaaactttatcttctgcttttgttttccctcttcttatagttccagcaagtggccgattgatgactgtcctcttttgcacccgagttagaatttcaggacttgacgccacaagaatacaacctcgtgcctgtagataggccatatatggactaggatttacgatacgtaatgcacggtagatctcgaaggggtcggcaaatgttcgcctctcaaatcgctggcttaggactacttgaaaaatgtcacctgccagaatatgttctttcgcttgaacaacagcattcttatagtcttcacatgacattgatgatttttgtaatgctgagccaaagtgcccaacattaagtttgatagaaccagaagaaagtgtggggacattaagacaatgtaatctcgataacaaagcttctagacgatttgttccatcttcgtatgcttcatcagcagaattgtaacagtccagcctcacccaatggataacatgtgttttcttttcaacatgatcgaacacaatgacgtcattgtagaggcctaaatgaatatcaggaaggttcctgtcgtcatgtggcgccttactaaaaggaagcttctttgtttcaacataccgcactgtatcatatgagaagaatccaacccatcctccacagaatgcatcaggtaggccggcagttatatgcggtttccactgctccataatgcttctggggatcttcatgggatcaggcacgaagtgctccctcttcgacttcatgtcatgatccatcaccgtgacgtggttggccttggccacgatctccatggtgggctgcgccctaccacgctgtacctcccacattggtgccctcgaagccctgctcgacgg

SEQ ID NO: 11437 - DNA, 1072 bp, Setaria italica
  misc_feature (86)..(86): n is a, c, g, or t
  misc_feature (819)..(819): n is a, c, g, or t
  Peptide Sequence Number=SeqID_77411
ccttggcacaaaattgttattggacaacatcatcaccattttgtccatcagctgatgtaacacgtcgcaattcatcaagtacctcngtaaaatcatctggcggggggcatgagaattcaaggatctttcctgagtgcggatgcttgaatccaagcaatgcagcatgaagacatggcctgtctactttagatatcagatccgaaagcccactatgatattttgaaggagttcttggcctcaaaagagacagtgccatgcttttggtacctccatatgtttcatcaccaagaagtgggatccctagatacttcgcatgcgcacggatctggtgagtgcgtcctgtctccagtctccattctactagagcggatccaccaccagcaaagacctctcttactttgtactagcagcatgccgtgcatatctctggcctgatccagctatagcaatcatacgaatcctattgttaggatcacgtgcgatagacgcttcaatcctgccagaatttggatgaggtaccccacaagtaagactgatgtatactctacgaattgtgtgcagcttgaactgttcagctaattgagcatgggaatgctcatccttggcaacaacaagaagtccacttgtccccttatcaagtctgtgcacaataccagggcgcacaaggagcattccgcacttccgaactaacgtcttcagtagtaaattgatcaacatcaaatacatcaacatcgtcatctgaagaatccgggcattcatcgccagttgaattgcgcgccagacatgtaaacgtagaaatcctgcagtggtgaagtatancattgaccaaggtgccatttgcatttccaggcgctgggtgaacaaccatatgagctggtttgttcacaacaagaacatggtcatcttcataaacaatgtctagcgggatatcctccgcctctgccctcagcggctgtagctcggacactgtgcaactgaccagatccccctcccttcaccatactgccgaaaccttggagaccgggcggccattgacggcgacgagtcccgcgcggatactggcctgcacgcg

SEQ ID NO: 11438 - DNA, 1175 bp, Setaria italica
  misc_feature (6)..(6): n is a, c, g, or t
  Peptide Sequence Number=SeqID_77412
ggcttntgtatatatcaaattgcttatctgcatcttctttcctgtctaaaaagtgcatacacaatgccctggcaaagatgaggccgaaaaatctcgaggatcctcatttataagattttgtagtttctccgaatgcaatgcctaactgacccatgacaacatgcatttgtgcaatcaaaagctttatgttgcgctcttccgggacccttttgtcagaagctgcaagttgcaaagcattatcaagcatttcaaaccagcagggccttcatgtttcttttgcatacatattgcgagtccatggagagcccggatgaggaggggctcctctgctaggacccccctgaactggcgctcggcctcggcgagatcccccttgagctcgtgcagctgcgcctccatcagccgccactccacctcgccgggctcggcgtcacgcagccgccgcgtgtaccggagcgcgccggcccaatctgcacgcctcatcttggcgtacagcgcgcacttgagcgtgtcgaggtcgcccgggtcgcgactcagaatcgctgaatacatccgcacctcgtcgtcctcctcctcctcctcatcctcttgctgctcctcattctctttcacctctgctttctcgacctcgtcctcgacctgctccttcctttcttcggattcttgctgctcgtcttgctcctcgatttcttgcggttgctgctcgtcttgcccctcgatttcttgcggttgctgggtcggcgggggagcggaggcgagggcggggagcggacggattccagagagggagaggaggcctgcggctagcaggaataggagggtcctcgaggtggaggcgacgggcgagagggcgctgacggtcggggcctcgcaggagggggagactgagggggcctctggagaagcgcgggggtttgggtggaattcggaagcgggaagggaagcggtggggcttcaagggaaaggagagggagggaccggcggcgagctggcggcggatggggaggagggaggcggaggctacgggggtagtggtgagcaagatgaagctcatcgccatggccaaggttttgtcgcgaggaagaagagtggtttgctgaagctataaaacctcttgctcacgctcacgccagagcctcctctgcttctgatctgttctttgttatttctttgtt

SEQ ID NO: 11439 - DNA, 538 bp, Setaria italica
  Peptide Sequence Number=SeqID_77413
gttatgatgaccatcttgctcatgttggtgactttgggctcgcacgattcgtccttgatttctcttcttatggagggtaccagaactcgacgagcttgattggaccaagaggatctgtgggatacataccgccagagtatggcatgggcagtagaatctcaactgaaggtgacatatatagctatggtattgttctcctggaaatgctcaccggaaaacatcctaccgatgaattgtttgatgatggtttcaccctacacaaatatgttgaggaagcactgcctcacattgctaagatcctagatcctgttctcagcaaagagattggaatggatcatagcagtcatacgcaatcacaggaacaaggcaacataacagaggtgcagaagtgtattctgcaactgctgaacctcggactaatatgctccgaagaagcaccaaaaactcggccaaacatacaggatgtatatagtgaagtagtcgaagtgaaagaacatttcctttctgcagcatgaatgaaacatgacaaattttacgg

SEQ ID NO: 11440 - DNA, 413 bp, Setaria italica
  Peptide Sequence Number=SeqID_77414
caacggaagcgacgacgccgtgtgactgaataatggacacttgacaaacaaaagtatcctcctatggcaagcgggccccagctgtcagcgtccccccaagaccaagacccggcctttgaatcagcgcgccatttaatgatggccgccatgaccgcatcagatctactcgtcgtaagtgcgcttgttttgggcctggtcaccaatggcgtcggaaaatgcagttgcctgtgcaggctgccctccccggagttctttggagcatgggtggggccactcagtcacctgaccccgccggccgctttcctactagctactagtacggagtagctttctccgatcaaggctctccaatgcaagggaaaagtggtgtaagctgtacatagcttttgagtgtttataagcagagggaattt

SEQ ID NO: 11441 - DNA, 524 bp, Setaria italica
  Peptide Sequence Number=SeqID_77415
aaaagtaaaagaaaacgtaaaacaaaactaagtaacttaagaattagaattactttaggggaaagaatggataggattgctgaggcaggtaaggtcctagaggagatggcagctgcaggattgaagccaactttagtaactttcagtgctttgatttgtgcatatgccaaagggggaggtgggctgaatcggagaagacgtttgattgcatggtcgcatcaggtgtcaaacctgatcgtttagcatacttggttatgctggatgtttttgctaggtcaggtgagacggaaaagttgttggatctgtatcgaaaaatgatgaaggatagttatagaccagatgatggcctgtatcaggtcctgcttgctgcacttgcaaaggaagataagcacgaggagattgaagaagttatccaagacatggaattactttgcaaaatgaatccaggaataatatctaacaatactcatcaaggcaaggtgcatttctcagggcgctaaactattgaagaaggcatgtctcca

SEQ ID NO: 11442 - DNA, 306 bp, Setaria italica
  Peptide Sequence Number=SeqID_77416
tttgcaaggccaggcaccatttctgcagatcccatatacgaatgtaccaacacgcctgctggaaaaggtccagtttgcttcagtatttccagaagatcaccaaatgcccgcacacaatgaacagaaacaggtctctccaattccttagcaagttcaagttgtcgctggaacacttcaacctgttctccgaagtcgatggtttttccatgtgaacctttgtccagaccaatctccccaacagccgcctctggggtttcagcgaagaaccgccggagcgaatccatccttcctaattccggtcgacct

SEQ ID NO: 11443 - DNA, 594 bp, Setaria italica
  Peptide Sequence Number=SeqID_77417
gtgtgagtagtttgcctggaaccaagatgttaacacactaaagtatgctccatggcatctcgctaagtcatttgtatccaagacaagaaggattataacggcattggttttctatgtatcagaatcaccgtatcccttacacccttacatacaaatcgatgcatgccatattaagtgagcaaagcaattcaagggtttcaaactggacgtaattttaataataaagaacaaataacatgtcttacttcagtatttccagaagatcaccaaatgcccgcacacaatgaacagaaacaggtctctccaattccttagcaagttcaagttgtcgctggaacacttcaacctgttctccgaagtcgatggtttttccatgtgaacctttgtccagaccaatctccccaacagccgcctctggggtttcagcgaagaaccgccggagcgaatccatccaatccggcgacctctcggggacccaccatgggtgcaggccgaagcagggaacgacggctgggtgatcctcggccatctgcttcaccaggtgccagtccttctccgaggtgccgttgaccgcgaagtgggcgacgccggaag

SEQ ID NO: 11444 - DNA, 564 bp, Setaria italica
  misc_feature (527)..(564): n is a, c, g, or t
  Peptide Sequence Number=SeqID_77418
cagctcgagcacgactacgccgcgctccgcgcgcagtacgacgcgctccacgcccgcgtcgagtcgctccggcaggagaaggtcgcgctcgccacccaggacggtgtctgctggattgatgatgatgcgcgcagttggatgagctgaaggggaggctgaacgggcggcaagaccagcagcagcagagcggcagctgcgaggtcaacggggcggaggcggccgacgacaggaggaacactaatagcgccagctgcgtggtggaggacgacggcgccgtgacgcccgcggtggacgtctcggaggaatcggcggcggcggcgaccgccgagtactgctacgatgaccacgtcgcgtacgggggcctgcccgatcccttctgcaccacgccggacctgtgggatacatggccgctgctggagtggaacgcggtcgcatgaacccccgcgacgcaggggatattgtagtatttgtgtactcatgtctctgtatgatagcgtaccagtggattcatgtgcaactaaaacctnnnnnnnnnnnnnnnnnnnnnnnnnnnnnnnnnnnnnn

SEQ ID NO: 11445 - DNA, 1001 bp, Setaria italica
  Peptide Sequence Number=SeqID_77419
aacggtggcgggaagggggagaggaagcggcggttcacggaggagcagatacggtcgctggagtccatgttccacgcgcaccaagccaagctggagccccgggagaaggtggagctggcgcgggagctgggcctgcagccgcgccaggtggccatctggttccagaacaagcgcgcccggtggcgctccaagcagctcgagcacgactacgccgcgctccgcgccaagttcgacgccctccacgcccgcgtcgagttcctcaagcaggagaagctcgccctcaccacacagttgcacgagctaagcgagaggctgagggagcgggaggaccgggccggcagcggcgtcgcggcgacggccagcagcagcagctgcaacggcggcggcgtggtaggtgaggaggcagaggacgacaagaggaacgtcgtcctcgggtgcgtcgacatggagccgcccgagagctgcgtgcttggcggggcgtgcgcgacgccggcggacgtctcggtggagtccgagtgcgacgaccaccaccaccacctcgactacgacgacgggttcccggagtccttctgcgccacgcctgagctgtgggagccctggccgctcgtggagtggaatgcggtcgcctgaggtagtgaaagaagctagtacataggcttgcgtgtgtagcatacgtgcatggtgccatggtgtgctctcaatggagagaactggaggagaagggggccggtctgtggcaatgacgagtgggcccctgaaagaggtccgggatgagaaggcgttcaagcgatggaacctagcttgcagacgatcagccaatgggattggtgttttcgatctgaaaagtttaatgatattcattagaggcgcccattggtaggtcgactgctagagttgcaccgggcatgcaactttttgctgttgcctttggaattcaaagttagataatctaatcgaagcatatgttcccttgaagaaaaaataaaaaaaaaaaaaaaaaa

SEQ ID NO: 11446 - DNA, 584 bp, Setaria italica
  Peptide Sequence Number=SeqID_77420
aatctcttcgctgccccatgcctacctccggacccagcagcagcagcagcctatgcaacagctccatttgcagcagcagcagcagctccagtctgggcaagcatggcagcagacaaacaacgcctggtggcaggcgcagggtgtgcctgccgctgcctccaccgccgtcgcgccggtgaccaacattgtacagcaaccccagtatggtgtggtgcccggcagtggcagcgtccagggctacgacgctggcagcgtgggtggtatggcatggagaccgagatagtagagcagtgtaaaattcagctggttttccttttcgtagctgtggtacaacctgcgagcgtccgttgtagggtgggtttttttttttactcaatactttttggtcatgtaagtatcagtggtgtacacccgtgcaaaggaatgtaatctggatagactagaaagttgctggttgtattcgttaccttctaggagtttctgccaccgttttgaacagtagccgctcttcgtggttccgcactgcgaacaatcttaataatgtaaccgcaagaaactaaaataaactttaaaaaaaaaaaaaa

SEQ ID NO: 11447 - DNA, 474 bp, Setaria italica
  Peptide Sequence Number=SeqID_77421
acttaacaataccaaagacaactcaagtgcattatttagccacctactggctgtctggctcgtcccatcattgtctgcatccttgacattgcttgactttggcatgggccccggcacgctactacaggtgtcattcttgctcggtgtgttccctgttctcattgcatggatttattcagaaatcttggaataccgaaaatcgtcatccattaaagttcatgctgattctaatttggaaaaggaaactgtcagagaagatgataaggcagttttgcttgaaggaggcctatcaaaatccccatctacaatgcttcggaacatgtctacgaaaacaaaaattatacgatttataacgatggaggagtcctttcttcttgaaaaccgtgccgtaatgagagcaatggctgaatttggcattgtgctggtttacttttatgtttgtgaccggacaaacacatttcctgaaagcaaagg

SEQ ID NO: 11448 - DNA, 430 bp, Setaria italica
  Peptide Sequence Number=SeqID_77422
aacctaagaacggacaccggcctggaagagtaccagctgccgcccgccgcgaaccagacgtcgccgccgccgccggctcaccgtcggcgccctcaccgccacgcggcgcagtcgtccccgatcgagatcgagcagaacgtgacgaggacgtgggcgatgcggcgcgcgacgtacagccggtactcggtgacggtgaccaacaggtcgaggaagacggtgcgggagctccacctcggcgtgtcggagctccgaggccggctctgggggctcgacaaggcgcggtacgggttcgtgccgcccaagtggatggcggcgctgcgcgccggcgagagcctcaggttcgtgtacgtccagccgggggagacgccggccaatgtatgggtcaccggctacaagctcgtatgaagcagtcacaaagtgacggcgctag

SEQ ID NO: 11449 - DNA, 238 bp, Setaria italica
  misc_feature (200)..(238): n is a, c, g, or t
  Peptide Sequence Number=SeqID_77423
ctccctccatgttatggcaaagcaaatgatggatgcttcaaaggatacaaaatgtccgatgtatttacaaccattgagttcatgtcttacattttgtatgattgatgatcattcatattctagctcttgtaattgtcatatatgctctatttatgttgcttgaagcaaagattttccaatcagttatactgtgcctagcnnnnnnnnnnnnnnnnnnnnnnnnnnnnnnnnnnnnnnn

SEQ ID NO: 11450 - DNA, 440 bp, Setaria italica
  Peptide Sequence Number=SeqID_77424
cctctcggtggtcttcctcgccttgccatccaccttggaatcaaccagctctttgaggcgcttaacctctgcagtgaggagctcaacttcctcagccttcgcctcagaagccctaatggcaccatctacctggctgagcgcttcgttcttggcatcgattgcatcagccagctcataccttgccttctcaagctgctccacagtcgaccgcaacacggcagcgtcaacctcctgctggctctgcatgctctccagcttcctctgcacagactcgatgcttgcctgctccgaatcaccagcagggaatttctcagcctccgacgcctctgcggccctcctctgcacatccagcgcctcctgcagcttggtattggcctcatcagccaccttcttggcaatccccagctcctcgaggactttccccttctccttctctttct

SEQ ID NO: 11451 - DNA, 1943 bp, Setaria italica
  misc_feature (1904)..(1904): n is a, c, g, or t
  misc_feature (1912)..(1943): n is a, c, g, or t
  Peptide Sequence Number=SeqID_77425
aaggtaatgagctggctgatgcaatcgatgccaagaacgaagcgctcagccaggtagatggtgccattagggcttctgaggcgaaggctgaggaagttgagctcctcactgcagaggttaagcgcctcaaagagctggttgattccaaggtggatggcaaggcgaggaagaccaccgagaggattcagaagcttgaaacagagaactctgcattaaagctcgagcttgagaaagcaaaggctgctgaagagaaagcagttggattggagtgcatggttcaagaacttaaggttgatattgctgatgctaagaaggtatgctcagagtcaggcgaattagctgatgaatggcagaagaaggcacagctgctggaggtcagattggaagaagccgaccagtctaatattttgaagggtgagtctttgaattccgcgatggaagaactggatgcaacaagtagtttgctccgcgacaaagaatccaaagttgctgctcttgaggacaaggtcaggttcttggaggatgaggttgctagacagaagggggatattgatgtgtccggcgaacggctagctgctgcagagaaagaggcaactgatttatgggcggaggtcgaagggcttaggttgaagctccgtgcagcggaagaagagaaaatggatgctctgaacagtgataaaaatgctagttcagaaatagagacattgactgaacagaaccaccagctggctgaggagcttgaagctagcagagatgaagttgagaaagttaagaaggcaatggaaggtctggcctcggccttacaggaaatgtcagctgaatctagggaagcgcaggagaagtaccttctcaaacaagatgagattgagcaggctcaagcacaagtagaggagcttaacatgagtctgaagaatactaaggagaactatgaggtaatgcttgatgaagcaaactatgagaaggtttgccttacaaagacagttgaaagactagaagcagaagctaagaacgcgcatgaggaatggcagtccaaggagctaagttttgtcaattctattaagaattcagaagaagaaatagtcgctatcagagttcagatggacaggaccttggagatggttaaggacaaggaaaatgaaaatgctgagttgcaggagaagatgcagcaccttgaagctcagcttatggaagctaacaagatcaaagaggaagctaaggctgaaactatccaatggaaggagaagctattagacaaagagaatgagctgcagaacataaaacaggagaacgatgatttgcaggctaaagaatcagcttcatctgagaagattaaggagctctcttcccagcttgctaatgcaaaagatggcatgataaatggtagcaccaagcaagaagataatgagaaggggggcagtgaagaggacgatgaacctgttgtggtagttgcgaaaatgtgggagaacagcaagtacactgactatgattcatctaaggagaaggagaatgacggcgactcacaagttgatttggaatcaaacaagggagatgcagctcttgacagcaatgggttgcactcgacaaaggaaaacagtggcagcacatcaccaaccaagcagcaacagcagcaaaagaagaaacctttgctgaagagatttggtggtttgctgaagaagaaaagcgaaaattagcataaaaccatctgatgatattctttgttctatgctatgtgacatatttctttgactagccatctagttcctgagcctccctccatgttatggcaaagcaaatgatggatgcttcaaaggatacaaaatgtccgatgtatttacaaccattgagttcatgtcttacattttgtatgattgatgatcattcatattaaacttaaaaaaaaaaanaaaaaaannnnnnnnnnnnnnnnnnnnnnnnnnnnnnnn

SEQ ID NO: 11452 - DNA, 517 bp, Setaria italica
  Peptide Sequence Number=SeqID_77426
ttttttttttgtacatttaaggtgttgaaatgtattcaccctttttatttctttacatttctagggattgtaactggctattctggtacacgcaaaattgttgttcttacaaatgaatcttcccacagcattcaaatgtcacctctaattcttttaaagaaaaatcactgtatatgcaaagatcatgtggtgctgcgtagcaacatatgtactctatgctatgaacaaacaaaattacagttacatgactgatctttctttcagcagtaccctctacaagaacacctgccttcttcaaaatgatggaacctgcttgaatctctcaggatgatctctctgttacacatcttggatatgaatttggcagactcatggcagtggctacaaacccttgagttctttgtcacgcggactggccgcccttccgacaaattgagcacgccgaatgcgatggcgagcttggagctgtgcccacaaagtgcctcgtcgtgcaccgcattgttcgcgcccatcagag

SEQ ID NO: 11453 - DNA, 271 bp, Setaria italica
  Peptide Sequence Number=SeqID_77427
aagataaccccgcgccgcgccgcgccgccgcaccagcacgccgggcaggcaggcaggcacggccatcttcttcgtcctctcctcctccaattcaaggcggcgcccaagtttccagggccgcagcccgcggggcagggggatgtgggggcggcactactggggcggcgggcggcgtccggacccggccgccgccggcgtggtggtgatgttcgcgtggctgtcgagccaggagcgccacgtgcgggcgtacgtggagctctacgcggcgcgg

SEQ ID NO: 11454 - DNA, 310 bp, Setaria italica
  Peptide Sequence Number=SeqID_77428
ggttgtcacccatgacaacacatgaccttcaggaaggcgcatctgaggcctgttgaattacaacaaggcactcaagaagtcaacaacatggagcagccagtccacttttgatcatcatcttgtggagaatgaaaattctctggtcacatctgttaaccctttgttaacagcactttgaaaatccctggaccattgcttccattgtgtacaatgcagggccaacttattgtaaatggtgttgcacaaaaggagcattacacagcatcccatgcattgtacacaatggaagcaatggtccagggattttcaa

SEQ ID NO: 11455 - DNA, 345 bp, Setaria italica
  Peptide Sequence Number=SeqID_77429
cctcaatgaaatctccaggtgttgccagtaccctcttaataaatacaacatccttattgacaccataattctgtacggcggtcggcactttgaagaacactatatccccaatagatggcctccggaataagtatgtaaccttctcggcgacggctcggtcgcctggccggagcgtgggcgccatggaggaggaggcgatgtagcggacctcagccagggcggcggagaagaggagcagcactaggagaagcttgaatccgtcggaggcgggcgggcggaggcgcgggagcggaggggagccaggtggtgccgagggaggcgaagagctcggtggcgagggcacgg

SEQ ID NO: 11456 - DNA, 963 bp, Setaria italica
  Peptide Sequence Number=SeqID_77430
taccggaccaaggaaggcgaccgagccgtcgccgagaaggttacatacttattccggaggccatctattggggatatagtgttcttcaaagtgccgaccgccgtacagaattatggtgtcaataaggatgttgtatttattaagagggtactggcaacacctggagatttcattgaggttcggcagggccaacttattgtaaatggtgttgcacaaaaggagcattacacagcatcccatgcattgtacacaatggaagcaatggtccagggattttcaaagtgctgttaacaaaagggttaacagatgtgaccagagaattttcattctccacaagatgatgatcaaaagtggactggctgctccatgttgttgacttcttgagtgccttgttgtaatcaacaggcctcagatggtggatgatctcttccttccgtctttcctcattggctgcatacctggatcctctactgaaactattcatactcctgcagcgccttcctgaaggtcatgtgtttgtcatgggtgacaaccgaaataacagctgtgattctcgtgcctgggggcctcttcccattggcaacatcgttggaaggtacatgacgtccttcacaagatcctctttccagtaactgaggtgaagaggtgcgacccatcatctccagtgttcctgacggctgatgctgcttcacatcaatatagttactaagttgtgctgagcctggagccactctgttatatgtctacttgtgtgaggacttgccctcgagtgtgctgtagcattgttgttgtacgtgatggcctactcccagctgtggttgtaaaagaggtcacctctgccgctcgctgttggcacgtgccctcaggctgtcgtgtgttgagcttatgaattacctgttgatatgtatctaaaacttggaagaggttgcattgggttatgaagcttatcagcgatgacaaaaa

SEQ ID NO: 11457 - DNA, 903 bp, Setaria italica
  Peptide Sequence Number=SeqID_77431
tttttttatttaaacagtacggtcgatgagtactggagcgtaaatagatgggtgaaagcagttgggagcgtatgaattgctgtcctcttcttcagggtattctttgatgctttccaacaatgcaggtgggcgcctgtagttagagttgcagtttgcacacgcaagaaatcagggggtctttttgctgtgatcaagatggttctgttttagctgaagctggagcttattctatatataagagagcattttttgaaggtcttattgtctcttggccattgttcaaatcaatcatgttgctattgtcactgtcgacagtagacctttcgtgctttcattcagtggatggttgccactgaccaatatcttccttcagttcccattggtaaagttctcccaggaccagagccatggtggcacacgtaaaatggctcttttctattcagtttgcactacaacaggagacatatttccaagtaagtttattgtctgttcttcaactttgacaaggaataacgaagaacctagaatagttttacaaagaatagaaaacaatagtttaatttgcaggatacgagacctgatgttttcaagatgaaacatgtttagtcagcaaaagttcactggaaatgatcggtcattctatgataaccctctctacagatttcgcatttgcaaaagttgagctagaaatatgaacaaacactgcaaacaaagggagtacaggctaaatgaagtattatgattggactgacaaaaaaaatgtcttacaaaactctcacatctgtcagttgttggccacctagtcatgcttattttaattaatttattggctaggagtagatttgggaataagtaaaaaagaaccacgaatgagctgctttgtattgtaaacctagtacctaa

SEQ ID NO: 11458 - DNA, 490 bp, Setaria italica
  Peptide Sequence Number=SeqID_77432
aactaagtaccaagaaaaaggacaaacaagcctctgttgctgcttcatggcatttaattggataactagcatcaactggggcatcaataatagtgctccaatcaactgttccctttaagctatcgggaacaattgcactaaactgaaccaggtgaactaacagtgctgttatcatctggatttgcttttgttcttcatctgccagatggtaggttctaacagcatttcttgaaaactgcaacttacgaagaaggacaattgtttcatcaaccaggtaactcctgtgttgtgtgtatgatgaaaaaaccgtgccaataaccccaatcgctttcaattgtaatagctgcatattgtccaccaagaatgtagtaaagcaggtttttgctaactgcagaatacaactatctgataagcgcaccgttgtgagcagttccttgagaaagcccaataccaagcatagtttctggacagcagagtaaacagaagcaga

SEQ ID NO: 11459 - DNA, 643 bp, Setaria italica
  Peptide Sequence Number=SeqID_77433
ttttaactttttaccctttttatttttcttttaagttttaaagttttagtttcttttaaaatttgtttgtaagcagacaagttgacacattttacacattattctcagacctgatgccacttatagcctccttattgataaccgggagagagaattcgggagcatgtacactgactgggatatccttcctcctcgtaggatcaaagatgttaatgcaaaaaagccaaaagattgggatgacagggaatatattgaagatcctgatcaagttaagccagagggatatgattcaattcctaaagagatacctgatccaaaagacaaaaagcctgaatcatgggatgacgacgacaatggtatatggaagcccagaatgatacctaatccagaatacaagggaccatggaagcggaaggtttatttcttgactagttaccttcacataaccttttatttctttgaatagttatgtactcacgcatttctgctctcagaaaattaagaatcctaactacaaaggaaagtggaagaccccatggattgacaatccagagtttgaggatgacccagacctatacgttctgaaacctttgcagtatgtggggattgaagtctggcaggtcaaagctggttctgttttttg

SEQ ID NO: 11460 - DNA, 485 bp, Setaria italica
  Peptide Sequence Number=SeqID_77434
atctacagctcgtcatggtagtcgtagtgcctatgacgcttgtatctatccctgaaacggtccctgccacggtccctatccctttcaaaatctgctggacatcagttgccgaccatggaagtggaccttgatgattgtgtcaataagaagtatcactttggggcaaaggtgtttgaagtccttagccaatattgttagtcttggagattacacgtgaagaacttgtttgttgtacaactgaaacaaactgaacctgtggttttcgtacagattcaccacgccacgtacggctgtaactaaatttccacgtggcccatgaaatgtgagctggagcctgtagccctgtagtactgttcttgcactcttcttatatctaccgctgctctgttttcaggacaagaaacaaacaataagaaaataaagtaactaagaaattaaagaaaagaaacgtaaacgtttttaaagtaaaaggaaaacccgaaaac

SEQ ID NO: 11461 - DNA, 1767 bp, Setaria italica
  Peptide Sequence Number=SeqID_77435
tgctcctcctcgcctccggcgaggtgggaaagctcgccgccgttcaggtggggtgctctgggtgagcggctgctgctgagggcggggcgatgggccgcgccttcctccaccgcgcgctggtcctcgcgtcgttgctcctcctcgcctccggcgagatcttcttcgaggagcgattcgatgatgggtgggagcaccgttgggtgaaatcggattggaagaagagccaaggacaagccggaacgttccgccacacagcgggaacctattctggagatcctgatgataaaggtatacaaacaactggggatgccagacattttgctatatcagcaaaattcccggaatttagtaacaagaaccgaacattggtgatccagtactctctaaagattgagcaggatattgaatgtggtggtgcttacatcaaacttatgtctggctatctcaaccagaagaaatttgggggcgacactccttacagcttcatgtttgggcctgatatatgtggggaccagaaaaagaagcttcatctcatactttcataccaagggcaaaactaccctatcaagaaagagctaaaatgtgaagcagacaagttgacacatttttacacatttattctcagacctgatgccacttatagcctccttattgataaccgggagagagaattcgggagcatgtacactgactgggatatccttcctcctcgtaggatcaaagatgttaatgcaaaaaagccaaaagattgggatgacagggaatatattgaagatcctgatcaagttaagccagagggatatgattcaattcctaaagagatacctgatccaaaagacaaaaagcctgaatcatgggatgacgacgacaatggtatatggaagcccagaatgatacctaatccagaatacaagggaccatggaagcggaagaaaattaagaatcctaactacaaaggaaagtggaagaccccatggattgacaatccagagtttgaggatgacccagacctatacgttctgaaacctttgcagtatgtggggattgaagtctggcaggtcaaagctggttctgtttttgacaacattttgatttgcgatgatcccgactatgcaagacatgttgtagacgaaacttttgctgcaaataaggaggctgaaaaggaggcctttgaaggagctgaaaagaagaggaaggctagagaagaagaggaagcacggcgggcgcgagaggaaggggagagacgaaggcgagaaagggatagggaccgtggcagggaccgtttcagggatagatacaagcgtcataggcactacgactaccatgacgagctgtagatcttgcactctttcaaaatctgctggacatcagttgccgaccatggaagtggaccttgatgattgtgtcaataagaagtatcactttggggcaaaggtgtttgaagtccttagccaatattgttagtcttggagattacacgtgaagaacttgtttgttgtacaactgaaacaaactgaacctgtggttttcgtacagattcaccacgccacgtacggctgtaactaaatttccacgtggcccatgaaatgtgagctggagcctgtagccctgtagtactgttcttgcactcttcttatatctaccgctgctctgttttcaggacaagaacaacatgaatagtctgattgagcgcgtttttgtggcccgcttccaataaaacaaaatggtctgtccttgtaattgaaaaaaaaaaaaaaaaaacaaaaa

SEQ ID NO: 11462 - DNA, 274 bp, Setaria italica
  misc_feature (268)..(268): n is a, c, g, or t
  Peptide Sequence Number=SeqID_77436
caacagatgaagctgcggaagtaaagggaaaaaaaaaggaaattgattccactgtgtcgctgtattgctggtgttgtcattgtttttgttgtgcccattcggcaatggtcaattggtcatgtccatgatgattgtatttatcgatgtgtggaggtttgagtgccacgcaaaaccacacggaagaacggaacagcaaaaagggttgaagtgtacaaagtatgatccgagcaatccattctttggagcgaaattaaaaaaaaaaaaaaanaaaaaa

SEQ ID NO: 11463 - DNA, 572 bp, Setaria italica
  misc_feature (563)..(563): n is a, c, g, or t
  Peptide Sequence Number=SeqID_77437
gcaacgttgttatatgtgcgtggcttattgtagctcgctgtagagagaactagcacttttttaaataattgcatgccactgaaatcgtatattgggcttgcttgactatatggattggacagatatgctttggatgtcaatgtagaacgagttgaagatgtcttactgcacaacaaattgcttgagcaagcccgtgaacccatgaatgggctggtctttgatgttcgtccttcacagggggttgttactccggaggacagcaccggatttgagtcctcaacttcctttaagcaagaagaacaagatccccaatcctcagcatttacatcaagagatcaaaggcctttatatgaattatatttgcatgtgacgataagccaaagcttcttagtcagttaaccttgcttcttggggagcttggtcttaatatccaagaagcgcatgcatattcgacaagtgatggctattccttggacatatttgttgtcaatggttgggagtacgaggttgacattctccgaagtgcattgaggaaaggcattgataaaataaagtacagcganatggccatt

SEQ ID NO: 11464 - DNA, 469 bp, Setaria italica
  Peptide Sequence Number=SeqID_77438
tttattattcactagattatgcaattttcctgtaaagttggaagaaaactaaaacaccttatattttggaacaagggagtacatttgaatgctcttttgatatttgtgctaccctgtactgtaatccatcgcttggagccagccgagttacatgaaaactcggctggatttatgagcctgtccgaaattctctagccttcatagttactgtattaacacaatttggcaaatcttcacatattgatgtatacaccttggtgtcgtaatattgtgctgccatagccgcagtgtattattgagttccagtggtgactggaaatttgtaattagccaccttgttctttcagctattgctatttcgtatttacaatttgtttaaggttcatctggatacctgcaattatatatttcaggcttgcagcaccgaggaaatttgtgctactgtgaaccaaaaaaaaaaaaaaaaaaa

SEQ ID NO: 11465 - DNA, 438 bp, Setaria italica
  Peptide Sequence Number=SeqID_77439
gccacatctgcacagctggggcaagaagagtgtggcgcccacgcgatggcattgacaggtgcatggtgacaatggaaatggtaacgctgccgttggtcccagtgcccattgacgataggtcccatatctgcacagctggggatgacatgcaggcgctgatatgggacctatcgtcaatgggcactgggagcaacggcggcaacaatggaaatggtaacgctgccgcagctgcagcagcagagggcggtcttgatcccattttggcatatacggcaggggcagagattgagcagctgcagtggtccgcaacccagcctgactgggttgctattgcatttgccaataagcttcagattctcagggtctgattgcctaattccacctgtttcactgagaagagttaagaaaatgggggcaaacttggattatttcttccca

SEQ ID NO: 11466 - DNA, 1057 bp, Setaria italica
  Peptide Sequence Number=SeqID_77440
aaggtaacttacgacaataccgtctccgccgacggctctgtccgtgtctttgacctccgggacaaggagcattccacaatcatctacgagtctggttcaggtggcggtggcggtggtggctccaattcgggtgctggagatggcggagctgcgtcaccgacaccgctcgtcaggctgggatggaacaagcaagacccgaggtacatggccaccatcatcatggacagtcccaaggtggtcgtgcttgatatccgctacccgacactgccagtggtagagctgcaccgtcaccatgcacctgtcaatgccatcgcgtgggcgccacactcttcttgccacatctgcacagctggggatgacatgcaggcgctgatatgggacctatcgtcaatgggcactgggagcaacggcggcaacaatggaaatggtaacgctgccgcagctgcagcagcagagggcggtcttgatcccattttggcatatacggcaggggcagagattgagcagctgcagtggtccgcaacccagcctgactgggttgctattgcatttgccaataagcttcagattctcagggtctgattgcctaattccacctgtttcactgagaagagttaagaaaatgggggcaaacttggatgataaggttagactatgggaagaaataatcctgcaattgctttagtgttgcttatctatgctgtgcacaactgatattcatggcgggttgtttctagtgatagaacagaagatttgctagttagaagctccaattggcaatgaaccttgtttttaggttaaagtagcagctctggtgttagtgttggtgataatgggaactgaagctagtttgctcattgtgctagaatgttcatctgctcagtagcatgtagattcacagcttaacttgctcgttgaacttgcgatggtcatatgtgcccaataatgctataactgatgagctttcttgtgcgtgttgttatttgagttttgtggatttcaaatgtgtatgtgttatcgtgccatgattatggtaggttatatctgttttctggtt

SEQ ID NO: 11467 - DNA, 713 bp, Setaria italica
  Peptide Sequence Number=SeqID_77441
tcctcctcctccccgccggcggcggaggccgcggacagcggcggggagtgcccgctcgaggtggcgccgtccgggctcgccttctgcgaccgcgtcgtcggcaccggcgccgccgcccaggagggccagctcatcagggcgcattacacgggcaagctggaggacggcacggtgttcgacagcagctacaagcgcgggaagccgctcaccttccgcgtcggcgtcggagaggtgattaaagggtgggatcagggcatagtaggcggcgaggggatcccgccgatgctcgcaggtggtaagcggacgctgaagctgccgccggcgctggcctacggcgagaagggggcggggtgcagaggctgggagcccacctcctgcgtcatcccgcccaactccacgctcctcttcgacgtcgagtacgtcggcacagccttcggctgagctatctcaattctcaaagctctgggaggcctgatttgtaaagtgtcgagagtgatcaacctggcgctcgtggactcgcttgctgatgccttggcatcgtgagggtttcatttcttctcggtgtggtttgctgtctgtctgatagtgtgtcaagagagccacagataagattctgtgtattttttttcttggtgtgattactgtatattagtagatgatcatgacacaactggtagaatgaaggagatgatcaaggtggcgtttgattccgg

SEQ ID NO: 11468 - DNA, 1316 bp, Setaria italica
  Peptide Sequence Number=SeqID_77442
ccgtaactaaaatttctgaaaaccaaaaaagaaaatcttaaaccgaaaccacacattctgcgtgcatcattccaatttccttcctggcttctaaagacagccaccgatgaagcaacaagggacgacaacagctctttatacaactgatgacaggtaactaacgataaaggtcagctgacagcatggttattggtggatggcacatagcttccacttcccttcgccatcgatgagtttcagttccaaagaatggaagggaatcagagcaggcctttgtgaggatgtgatgactgttatgcccatgttggttgctaacctgtacaaatgctcctcaacatccacacttgtggcattagtgcactcgtcaaggatgccgtatttaggacagtgaaagaataaacgagccatccccagcctctgctgttcccccaaggataggatatcttcccagttaggagtagcatcccaaccttctctttctagaagatacaccaagcgaacattctctagaatcatcttcaggtgatcatccaacatcttggaagctgcagacttgtcacttgtttcgtgtgaaagcatcttcaactctgcctcctcccgtgagagagggtatatgatctgatccctcaaggttccaagacaagtatatggacgttgagggacattaaaaattccttcggatggcttggtaagtctaccagaagcaatgggccacaaacctcggagcaccctaaaaatggaactctttccactaccatttggaccggtcacaagaaggctttttccttgagatacatcacaagacaattggctagccaatagcttctgtgatggtgttacaatatccacattacggaaggagatgatttcttcggaggcggccttaatagcatcagaaggcacagcaggattgctttgtgctgcctgaagaagctcctcaagctcaaatattctgttaataccaccagaaagttcaaggaacttcttgtgcaattcaagaatatcaccaaatgctatgaagctttgtgacaccacagacgccaagaaccgcagggcatgtgccagctctccttgggttgaagtcaaagctcggtctcccttgtgctccaaagcatataacaaactaagcccccatgtcacattatgaggtagttgtttcgtcacgaaatcatcaaaaataccgtaaagccacttttttctcaatagaacctttgagtggttgagccatgttgtgaatttagcatcaatcatagctttttcccttgatccaccaccaaagaaagctattgactcagcatgtgtccgcaatcttgagt

SEQ ID NO: 11469 - DNA, 320 bp, Setaria italica
  Peptide Sequence Number=SeqID_77443
aggaccagaggaacctgcagcttggttatctttgttgcttgatcttcgtttccgctgtcagtgtcttcaccatactgacgctctttcaggctccagtccttcagatggcaaagcaagggaagtacattaccaagacaacatatcgaacagatccatgtagatagtggtcttacattttgatacgagtatccctttttcctaggatcattagcaatctctgatatacacggtttgtatgccgcaactttcttcggcaatcgacactgcttcaagcttgtgcaaagtggttccttccttccaattgccttttctaacaggca

SEQ ID NO: 11470 - DNA, 684 bp, Setaria italica
  Peptide Sequence Number=SeqID_77444
atactgctagcttgacgtcaatcctcacagtccaacagctcgacacaggaattactagggcttgatagtttgattttcaagttctttacctatttggataccagaatggaaagtttaccaaaagtacctcattctggaactcaatattccagagtctcgattggtagcactaaatacgatccaggactatgctgatgccctcaaccgtggaccaaaaaatggcggtgttgctgcgattgttgatgagaagccatatattgatatcttcctgtcacactactgcaacttcagaatagtgggacagcaattcacaagggaaggatggggctttgtacgttcatcgtcctttaacttgttctgttcattcattcgccttcattttggcattcctcccattgcatcccagagaagcataatacatgtctggtactgtaaaggaaatgatttattctgctccattgtttttctttacagacgttccagagagactcccccattgctgcagacatgtcaacagccatccttcaactttcagagagtggccagcttcagagaattcacgacgactggttcaaacggcctagttgcacctacgatgacgagagccaagtgggagcaactaggcttggcatcggaagcttttcgggccttttccttatgtgcgccctgatatgtctcttcgca

SEQ ID NO: 11471 - DNA, 498 bp, Setaria italica
  Peptide Sequence Number=SeqID_77445
taataacaattctaacgatgccaatataggttgggtattcccaaacaatggccagcctctgagagttggcatcccgaataaagcaagctttaaggaattggtttcaagtggaggccctggtaatgtgacgggttattgcattgatgtattcagcgcagcaatcaaactgcttccttacccagttcctttagaatttgtaactattggggatggcacaaaaaacccaagctatattggcatcgttagaatggttgctaacaattcccttgatgcagctgtaggcgactttgctatagtgagaaatggaacggcgatttcagaatacacacagccttatgttgaggcagggcttgtgatagtagcgccagtgaaacaatatggcttcttgaacatcggattaatgaggaatttcgaggctctccacggcgacaagttgtaacaatattctggttcagcttctcaacaatgttccactcacacagagaaaacactgtaagg

SEQ ID NO: 11472 - DNA, 1159 bp, Setaria italica
  Peptide Sequence Number=SeqID_77446
aaagctgtagacgtcgcatttctcggtcaccctcgtcatgtatgcgagctcaggtgcaagatacccagttgtcccagcaagcttgcttgtagagcttgatgcatcaaggctcaatattttagctaagccaaagtctgatacgcaggccctgaactccatatcaatcaaaatgttattgcttgtaatatctcgatgtactattggaaatgaacaatcatggtgcaggtaagagagagcttgagccacatcctttgcaatatctagtctcctattccaatccagctcaacagcacttacattagccatgagaatagttgataagcttcctctcttcatatattcatatacaagaaacttatcttgatcggtggagcaatatccatagagcttcacaatgttccggtgtcttatctgcaccaaggcctctatttcacggctgaacagttccttgtttttcaaactttcatcttctttttccttatcttctttactgcaaaaatttcacctgtttgtagtgaagcttcataaacagagccgtgccctcctattccaatgcaatatttttcatcaaagttctctgttgcttccacaatctgcttataggcatctcctccatcgaagttccagatagagaataagttactagtaaatcttaaagattcatttgcattattatgtgctttgggttccttcctttgacataggcatatcaacagtgcaaacagcgagagagaaaacgctgccacaatgccaccagcaagggccacctgcctccggtgggatttgggctgttgggtgtcgataacactctgcttgcacggtgggagtggggacccacacaagccataattgttctcaaatgatattgcaggaaatgtggcaagggacccaagttgtggaatcatcccgctcaacctgttatttgataaattaatctctgacaatgatagtgattccaatgagctgggtattgggccctccagcatgttgtgcgaaaggtcgagtactgcaagtacccgggcgccagcaagagcagcagggatcacacctgatagattattgtacccaaggttcatgatcatgaggtaatacatgttcccgagctcctttgggatccctgagtcaagctgattaaatgacaaatccagaaatatcattg

SEQ ID NO: 11473 - DNA, 466 bp, Setaria italica
  Peptide Sequence Number=SeqID_77447
ctaaggtgcccacgcaataaatattccgcagatattgtcagtgcacgagggaagccgaatctctaaaagagaagcccactggagtatacatcactactttctgttaccaatctacttcatgccaaactccgtcaaacctggagggctggacctcgctcgtacaatcatctatccagcaggtctcatgttttctgttcagcacaaatttctcccgtgcttctctcactgcagcaaatcccaaatccgtctcggtgagcaaccctgaagacagacgtaaagcaacggttacattcctttatggttcaccaatattaaccagcaaaacaaaatgatgactaacacctgaaaagcatccaactattccttcggaaagagaaaagataaagaagaatacatatgcaatggaacgagaataacttttgtatacaaatatggtgcacctatagtacttgcagcatctacacaa

SEQ ID NO: 11474 - DNA, 256 bp, Setaria italica
  misc_feature (6)..(6): n is a, c, g, or t
  Peptide Sequence Number=SeqID_77448
ccgctncgggagtacaaggacctgcccaagtccaagaagatatggctcggcctgcagcaagtcttccccgtgctcgactggagcagggactactccctcggcaagttcaagggcgatctcatcgccgggctcaccattgccagcctctgcataccccaggacataggttattcgaagcttgctaacctgccacctcatgtcggactatacagcagctttgtcccgcctctgatatatgcggcgatgggcagctcca

SEQ ID NO: 11475 - DNA, 563 bp, Setaria italica
  Peptide Sequence Number=SeqID_77449
aaagcagaccttcaaactgtgggttaagtgcttctgctgctatcagcaccgttgcgtaggcgtatactcctgaaacaccagtaatgccacgagcggtgtctgatggaggggaaggcttcgaagacatcgccagccggacgtcatcacaccgccgcatggacagcatccaacatgggcacggctacaaggtcggcttcccgccgaagaagggactcttcgccgagttctccgacgcagtgaaggagacattcttcgctgacgatccgctgcgggagtacaaggacctgcccaagtccaagaagatatggctcggcctgcagcaagtcttccccgtgctcgactggagcagggactactccctcggcaagttcaagggcgatctcatcgccgggctcaccattgccagcctctgcataccccaggacataggttattcgaagcttgctaacctgccacctcatgtcggactatgtaagtgcacccatacacattcatctcttcgttctagttgagatcactaccagcaactgagttgatcagagaagtgtggtcaccaattttac

SEQ ID NO: 11476 - DNA, 290 bp, Setaria italica
  Peptide Sequence Number=SeqID_77450
gatacaaacaccatggacaacttaaaatggtgccactcataactatttgaagtttctttcctacaaataaaagaacaattttagcattcaacatacaagacactatctgagctttcaagcatcagattaattacatctagtgccatccctaccataacagttactttgttacggcaacaacacattgtgcaaggttaagtgtttcattaggtttcgttaactagacgaagaggagagccaatttccataggcaaatgcataatggagggagcaaaaccaaagacactctt

SEQ ID NO: 11477 - DNA, 654 bp, Setaria italica
  Peptide Sequence Number=SeqID_77451
acaccgtctggaaccggcggcactacgcgcacgaccgcttctactgggtgggactgcctcaccaatcggtggctcatgctcgacacgcgtgctatggagctcgccctctccatcatccccttgccgaccggctactggaggagcacgtcgccgtcgtcgaggcccccgacgggaacgtcggcgtgttcgcgcatgacttccaccaccccggcggcaaagccgatctccactactacacgatcgtgcaggacgccgacgggccgcggtggcggctggagaacacgatcccgctgccatggccggcggcgtaccaccggccgttctgcctccggggcacggccaacgggtgcttgatcctcgaggtcagcgaggagaagccggcgttcatggcgagctaccgcgtcagggacgccgagctgttcaaaatcgacgtcaacagcttccagctggagaagatctgccaggcacggtgcgccggtggtgctgccgggcagtgttgctggccgtacttcggattcccgccatcgctgtccgtgcccactgtatgagcagcatgtgatattgctgaacaaaattatgttccagctggctgctcatagagttagagccttgagtttgtctggcatatatataataatgataacaatacaagca

SEQ ID NO: 11478 - DNA, 219 bp, Setaria italica
  Peptide Sequence Number=SeqID_77452
cgaagcgcctccgcaacaaggtggccggcttcaccacccacctgatgcgccgcatccagcgtggccccgtccgcggcatctcgctcaagctccaggaggaggagcgcgagcgccgcatggacttcgtcccggagaagtcggcgctcgaggtcgacgcgatccgcgtcgacaaggagaccatggagatgctcgacgccggggagatcggccatgccgagg

SEQ ID NO: 11479 - DNA, 861 bp, Setaria italica
  Peptide Sequence Number=SeqID_77453
tgacatgaaattcgtaagtagtagtattctgctatatagaaatccttattttgtggatgtatatgtaagaaatgcttgatccgtatcctaccaatgaagtccaatctgaaacatttggatttgccattgcatattcgcattagttgatagagaacacaacctgtattcagcaactcattgtgtggcttttcgattgtttaaagatgttgaattgtccattgcctttcggaatcagcagtgcatccgaacaacagtacaacacaattctgcttgtgttagtggactggctgctgcggttctaggtgctagctgtgagagggaccggttatgcctttgatcaagctcaaatggcatgccaggtttccaagagatttaggaaggatgagacaaagactttgccctctcagcaattgttgattcacagtttgttaatttcctttgtaagcttgaggctgatattattgaaaacacaggaatggggaggttgatgttcgtctgcaccgtcaggctcaccaactctttcctgcacatcgtcggcaccttgcagcaactcgactgcacatcgtcggctgcacttcgaatccttgttcgcttcaaactttcttccgatccgatagataatcaaccttcgttgttctcagatacgtttccgagtttccgttggctgtttagaggtgtttccgttggctgatttagaggcctaatattgtgcttgtggcctcaaggccaatagtataaagcaccaccgaacgtaatcggtttattcgtactgcttcggatcctacgaattatttgttacttttgcctcttatcatggcgtctccatcgcacaacaatgtaagtccccctaccttctctcga

SEQ ID NO: 11480 - DNA, 576 bp, Setaria italica
  Peptide Sequence Number=SeqID_77454
aagtactactcccgcatgaccctcgacttccacaccaacaagtaaggttgtcttggtaggaggtctccatcctgccctcgaagcgcctccgcaacaaggtggccggcttcaccacccacctgatgcgccgcatccagcgtggccccgtccgcggcatctcgctcaagctccaggaggaggagcgcgagcgccgcatggacttcgtcccggagaagtcggcgctcgaggtcgacgcgatccgcgtcgacaaggagaccatggagatgctcgccgccctcggcatggccgatctccccggcgtcgagcgccagcccgagaacaccaacgcccccgcctacggcggccgccagcagttcggcggtccccgccgcgaccgcgtctaggcgcacggctgggttgcagtggttgcctcttgatcgcgaatggggaggttgatgttcgtctgcaccgtcaggctcaccaactctttcctgcacatcgtcggcaccttgcagcaactcgactgcacatcgtcggctgcacttcgaatccttgttcgcttcaaactttcttccgatccgatagataatcaacctt

SEQ ID NO: 11481 - DNA, 766 bp, Setaria italica
  misc_feature (311)..(311): n is a, c, g, or t
  Peptide Sequence Number=SeqID_77455
ttttaaacttcggaaatcaccttcacttattaacagaacaaagatggccaacgtaaaggtgcacataaaatttgaagaatgatattctagcagcagcttaagtggccattttttacaataaaaacacgaaaaattgggaatagtcatggtcttacggaccatcaacgatgacaattacaggagcccgtggggcaccaaaacgggagaaagggtgccccctactgcccttatccttcatcgtccatccaaccacctcctagttggtcccctaccgaccgtagcagcaggtaacaaggtatatcaggcaaagntaaaaagctctaagccgaggcatctgcgcctccctcaggtttgtctgtttccatctgctcagcagcaggctcctcagcagcatcctcgctggttggctcactggctgcgttttcaccatttgattgctgctgctctggtgtttgaggctcaggtgctggggtttcagccggaggcggagtctgtggcttcggagctggcttgggtttcgtcatgattggtttgcagaacctgtcaagtgcttcagctttcttcttcaggtcagcagcaaggaggacaggattagcatgctttggcagagcatcctgctgctgtttttctctaatagccaagtctctgcttctgagcactcattaataaccttttgctttttctgatatgtcgatgtgttcaaactttaggtcattagacagtgcagcttctctaaagctggtaatgcagtatgccagttggtgat

SEQ ID NO: 11482 - DNA, 721 bp, Setaria italica
  Peptide Sequence Number=SeqID_77456
ttgcgtgtctcagcgccccccgcccgccgccacaaaccagcgcatagccgtcgccggacggaggaaggagccacagccagcagccatgggtcgcgtccgtaccaagaccgtgaagaagacctccaggcaggtgatcgagaagtactactcccgcatgaccctcgacttccacaccaacaagaaggtgctggaggaggtctcgatcctgccctcgaagcgcctccgcaacaaggtggccggcttcaccacccacctgatgcgccgcatccagcgcggcccggtccgcggcatctcgctcaagctgcaggaggaggagcgcgagcgccgcatggacttcgtcccggagaagtcggcgctcgaggtcgaccagatccgcgtcgacaaggagaccatggagatgctcgcggccatgccgagggccgcgagcatggccgacctccttgtcggcgttgagctccagcctgagaactccaacgcccccgccttcggccgtccgcagtacggtggtccccgtcgtgaccgcgtctaggcttccgcgggtcgcactggttgcctacatctatggtgatctatggtttacttctgtggcgattaagctttggacctatcttttatgtaaatcggtctggttgcgtgtgatggacatcagatttatattctcgcgcttttgaaatcttaagctattttataaagtacaatgagacttgctaacaaaaaaaaa

SEQ ID NO: 11483 - DNA, 766 bp, Setaria italica
  Peptide Sequence Number=SeqID_77457
ccctaatccacgcccgcgccgccgccgccgccgccgcagccagccagcgccaagccgccgctgtcgtcgccgaagaaggggagggagccatgggtcggcgtccgcaccaagaccgtgaagaagacctccaggcaggtgatcgagaagtactactcccgcatgaccctcgacttccacaccaacaagaaggtgctggaggaggtctccatcctgccctcgaagcgcctccgcaacaaggtggccggcttcaccacccacctgatgcgccgcatcccagcgtcggccccgtccgcggcatctcgctcaagctccaggaggaggagcgcgagcgccgcatggacttcgtcccggagaagtcggcgctcgaggtcgacgcgatccgcgtcgacaaggagaccatggagatgctcgccgccctcggcatggccgatctccccggcgtcgagcgccagcccgagaacaccaacgcccccgccctacggcggccgccagcagttcggcggtccccgccgcgaccgcgtctaggcgcacggctgggttgcagtggttgcctcttgatcgcgtatctcctctcgtcgttatcatgctactatgtcaaacttgttttagatcagtggttgctgttgtggcaatttagtcttgaacctatctgttttgccctaaattctgaagtgttttggtctgcctgtgatggatcatgatttatattctcgcgccaatgaaatcttaagcgatttataaactacagttagatgttgctaaaaaa

SEQ ID NO: 11484 - DNA, 3175 bp, Setaria italica
  Peptide Sequence Number=SeqID_77458
ttttttaagaactttatgcaggattctgtcagtacaaaaccccaccagcaaaaccacccactttttgttgtttctgcaagcatatacatatactaaaagcaaaaacgcttcatatagaggaatccaagtgatacatccaacttcatggaaaaaaaagctagctttggccgatcaaccagagacattcgattgagagattcaatggtacaattcgatcatgcaacatctctattcggttttagcccagtccagatcgcaagaacactgggcatcccaaccgtgtccaatccccaacacgaaaaagtatgaagagcattaggtcgcctaacttctcgcctaccaaacataggaacgggagaattcaatcatcacgcagaagatgaacccaacaatgctcaggcctcagcagaattgtcaggcttatccgtgtccatttgctccccagaagcctcctgagcacctccctcacttgtcggctcaccagcagcgcctgcagcgccttgctgctgctctggtgtttgaggctcaggtgcctgggtttcaggctgcgacggcggagtctgtggtggtggagtctgtggctttggtgcgggcttaggttttgtcatggtcggtttgcagaacctgtcaagtgtttcagctttcttcttcagatctgatacaagaaccacagggttagcatgctttggtagggcatcctgctgctgctttctctctcttagccagttttctgcctcagagcactcattgatgaccttctgtttctctgatatgtcgatgtgctcaaacttttggtcattagacaaagcagcctctctgaaactgttgatgcagtacaccagttggtcaatagcggaacctctctctgtccactctttgtaccgtgtctcaataggatcgccaatctttttaagttcttccagtttagcaatatagaccccctttgtctcatcctcgccatcttcgtacagccaatcttcaacctcctgaagcctagcaatcagcccttccttctcctctggtgtgaacagaatcattgtacttgtcgtagagcttgttacgcatgtcataaacataagcctccacagcattcttcttctccttggtttcttccatgattctgtcctgaagagccatctcatactctttctctaccgccttttccagttcagcagcaggcaatgcaccatagactaactcatggactggaacagcagttttcttaactttctttttcgatggctcaacctttgcatcagtttccattggaacagatttttcctcaggatcttgtgctccattctcagcagcagcagcaccctcagttgtatcagcacttttaggctcctgcatgttcacatccgttccagaagaagggtcgcttggtgcatcatctgtgtccatctttgtagcatccttcggagcttcattcacagatgaaactggaacttccacatcatcctcctccagcatcaatgctgaatcaactgtgacgatcccatggatgttgagacgaactttaactttcagtttcgccttctcacctttggacggttggaaagggccaatcgtgtaagtgcttattttttgtgaaatttgtgagtcacccgtgtcgacgtacaaaacatcaacttcaaatgtacttgatctatagaaggtcagagctttaacactaggaattgcattcccctttgggaatacaaccgtttgctggggtgaaccatcctgggagtccggcttccacgacaatgcaattgagaaaggaaacccatcattaacctgaaactcccgcactttgaaagtggggctgagaatagcacattgaagagcacatcctcgcgcaacacactcactagcattcatggtcctccttggctccttcccaaaaaactctgtaattatcttgattatggctggaacacgagaaccggatccaacgacctcaacaaaatgcacattttctgtcgtcaagccagcttcagccagcgccttctccaatggccctttcacacgttccagcacaggggcgctgatttgttcaaactcctccctcttaatgaagccccgcacatccttctcatccatcaagcactctatattcagtggtgcctctgggttggcactgagcaccttcttcagcttctcacatgctacacgcaacctaaggcatgcccgggcattctggtacacatcaatcttatactcctctttgaactttgccgcaaagtgcttaaagagggcctcatcaaagtccctcccaccgagggatcggtcatatgcatgcgacagcatcttgagctgtcccttcttgtaaccgacaatgctgacctgcatgctagcatgaccgacatcaacaaacgcgacattgagctgctcatgctctgggagatcggtcttgtaaataccataagccaacgccgtggcagttgtctcatggaacagccgtaacggccgaaggcctgcgatagtggcggcatcaagaacagccctgcgctgcaagtcactgaagtacacagggatgccaatgcagcagtcaacaacagcagcattcaggtttccctcagcaatgcccttaagattggacagcaccatggcaagcagctgggtgggagtgaacgtcctctcctcaccgaggaaccgcacatggaccaatggaaaaccatcagggccctccgtcacacggaaggggaaggaggcgagatcactctgcagctcagggtcagagaacttgcggcccagcagtcgcttgatctgcgagattgagttcttggggttcatagtagaggatgcagcaccggcggtgccgatgaaccgctgcttgtccccgaagcaaacgatggctggggtctcccgcttggactcctcgttgaggaccacatcgatgccgcgctgccgcgcgacagccacgatgcagctctcattgccaaggtcgaaccccaccacgctcatcttcgatatgccctcagctactacaggttagatctagatcgcaatcaaaccctgaggcggggcagggccgaggcctccggaagctcggtcctggcagcggagcctcggcttctcgcttcgtcgtcgactcgtcgccgtctccacagagcgctttcgtaggcagacggggaggcagcgggggaggcggcgatatatcgggcctggtgctcggggcggtgcgccgtgg

SEQ ID NO: 11485 - DNA, 3084 bp, Setaria italica
  Peptide Sequence Number=SeqID_77459
cggaaatcaccttcacttattaacagaacaagatggccaacgtaaaggtgcacataaaatttgaagaattgatattctagcagcagcttaagtggccattttttacaataaaaacacgaaaaattgggaatagtcatggtcttacggaccatcaacgatgacaattacaggagcccgtggggcaccaaaacgggagaaagggtgccccctactgcccttatccttcatcgtccatccaaccacctcctttgtcaaagaaaggaacacatcataactaaacgtcccaacacacatcctcaaagaaatgcagcaaacaaccatctcacctagttggtcccctaccgaccgtagcagcaggtaacaaggtatatcaggcaaagataaaaagctctaagccgaggcatctgcgcctccctcaggtttgtctgtttccatctgctcagcagcaggctcctcagcagcatcctcgctggttggctcactggctgcgttttcaccatttgattgctgctgctctggtgtttgaggctcaggtgctggggtttcagccggaggcggagtctgtggcttcggagctggcttgggtttcgtcatgattggtttgcagaacctgtcaagtgcttcagctttcttcttcaggtcagcagcaaggaggacaggattagcatgctttggcagagcatcctgctgctgttttttctctaatagccaagtctctgcttctgagcactcattaataaccttttgcttttctgatatgtcgatgtgttcaaactttaggtcattagacagtgcagcttctctaaagctggtaatgcagtatgccagttggttaacagcagaatctctaatttcccactctttgaagcgcgcctcaataggatcaccaacctttttaagttcttccagtttagcaatatagactcccttggtctcatcctcaccatcttcatacagccaatcttcaacctcctgaagcttagaaatcaaaccttccttgtcctcaggtgtgacaaaatcaccgtacttgtcatagagcttgttacgcatgtcataaacataagcttccacagcgttctttttctccttggtttcttccattaccctgtcctgaagggccatctcatactctttctctacagctttgtccaactcagcagccccccaaggcaccgtagaccaattcagagactggaacatttgttttcttaactttcttttttgatggctcagccttagcatcagtatccattggaacagttttttcctcagaagtcggtgccccattttcagcaccctctgcagtgtctgtagcacctttagactcttgcatattcacatcagttccagaagcagggtcatttggagcgtcatctgtgtccatcttagtagcttccttctgagcctcattagtagctgatactggaacttccacttcctcttcctccagcatcgttgctgattcaactgagactatcccatgtatgttgagacggactttgagttttagtttcgccttttcaccattgctggattggaaagggccaatcgtgtaagtgctaatttttggctcaatttgtgcatcatttgcgtcaacattcacaacatcaactgcgaatgtattcgctcgataaaaggtcagagctttgacgctagggatggcattcccctttgggaatataatagtttgttgtgtttcattgttctgtgcatctggcttccatgacaaagcaattgtgaaaggaaacccatcattaacctggaattcccgcactttgaaagtggggctgagaatagcacattggagagcacaacctctcgccacacactcactagcattcattgtcctcctaggttccttcccgaagaattcagttattatcttgattatggcaggaacacgagaaccggatccgacaacctcaacaaagtgcacattttctgtcgtcaaaccagcttcagccaaggctttttccaaaggccctttcacacgttccagcacaggggcactgatctgttcaaaatcatcccgcttgataaacccgcggacatccttctcatccatcaagcactcgatgttcaatggagcctctggattggcgctcagcaccttctttagtttctcgcatgccacacgcaacctaaggcatgcacgtgcattctgatacacatcgatcttatattcctctttaaacttcaccgcaaagtgcttaaagagagcctcatcaaagtccctcccgccaagagatcggtcatacgtatgggacaacatcttgagttgtcccttcttgtaaccgacaatgctgacctgcatgctggcatgaccgacatcaacaaatgcgacgttcaactgatcgttctctggcagatcagtcttataaataccatatgccaatgccgtggctgtcgtctcgtggaacaaccgcagcggccggagacccgcaatagtggcagcatcaagaacggccctgcgctgcagatcattgaagtacactgggatacctatacagcagtccacaaccgcagcattcaagttgccctcagcaatgaccttcaaattggacagtaccatggcaagcagctgcgtgggggtgaaggcctgctcctcacccagataccttgcgtggacgagcggaaacccatcagggccctcggacacacggaacgggaaagaggcaagatcgcgctgcagctcgggatcggagaacttgcgtccgagcaggcgcttgatctgcgagatggagttcttggggttcatggtcgaggacgcggcgccagcagtgccgatgaagcgctgcttgtcgccgaagcacacgatggcgggggtctcgcgcttggattcctcattgagcacgacgtcgatcccacgctgccgggccacggccacaatgcagctctcgtttccgagatcaaagcccactacgctcatcttcaccctcggctccccaccactacagcttcagatctagatcacaaacagcccctgcaggtcgaggccggtaggagctcgcagcgccgcagcggggaagtatgggcagcgctttcctttggagagggaagggtagaggacgcggtgatttacgg

SEQ ID NO: 11486 - DNA, 302 bp, Setaria italica
  Peptide Sequence Number=SeqID_77460
ccctccggcctcccacgcgcgtcccacacccgcttccgtatcgcccaccttccacgccctcgggtccgcctccgccgccgcggcagccgacgccatcccgtcccgtgccgccgcgtcgaggcgcaggcgctcggcctcgaaggcggccgcgtcgaacgaggccgaggccgaagaggagcccccggccgtggacgccacggcgaggcgcgcgccgcgggaaacccgagccgcgaggcacagtggtagcggcggcgcggctttggggaagaggagcggcatcgcttggctggcttgtgtgcacg

SEQ ID NO: 11487 - DNA, 715 bp, Setaria italica
  Peptide Sequence Number=SeqID_77461
tgcatcagtgggctgcaaacatttacaaatgaccatgcatgggaaaactgctttacaaatgacctataaatagtggtgaattaaaaaggaaatttttcaaaatgacttatttcaagactattggttaacaagtaccatttttcttctactgggattacaatgagctcgaaataggacttaatgttaatgcaacttgtttggatttatcatctttgttcttggggcgttacttttcgtatacaggtcatccccactaactgcaatcagtgtttttaagtcttattgtttactatgtatttactggtgctcttttaatacagatttttgcatgacaaggtgaagccccaggtggtgcaccgtgacattcgtgcaagtaatgtcttgctcgatgaggaatttggcgcacatctgatggggtcggcctttccaagtttgtgccatgggaagtaatgcacgagaggactgtcaaggccgcatcctacggctaccttgctcccgagtttatatacaggaacgagctgacaacaaagagcgacgtctacagctttggcgtgctgctcctcgaaattatcagcggtcgtcgccctgcacagtcggttgagtctgtcgggtggcagaccatatttgaatgggcgacacctctagttcagtcacaccgctatcttgatctgctagacccactcatccaggagttgccagatgtgggggtcgtcca

SEQ ID NO: 11488 - DNA, 650 bp, Setaria italica
  Peptide Sequence Number=SeqID_77462
caaaggaaaaggacttctactctgagatccggagagtcgcaaagctttatcatcctaatttggtggctgtaaaaggatgttgttatgaccatggtgatcggtttattgtctatgagtttgttgcaaatggtcctttggatgtgtggctgcatcatattccaagaggtgggcggagccttgattgggcaatgagaatgagagctgccacaactcttgcccagggaatagcgtaagccgtccctctcaagagatatttttgttcttactatgagtttttcttagatcaatatttctgagacattggaatattaattgatgtaagtgttaaggttcttatttcacttgtattatttaggtttctcttttcttcgtatcattcactgtcttagtttccataacatttgaccccacacatagacttacgacttgaatttattttgttgcgcaatagtttgcatgcagatgttacgtaatgctcacataaggtggtgcaacttggtcgtcaaccattttttgggtagtttgttttaccctaccacatgaaactaaccggttagatattaaaattgggatttcattttgtcattatggctgccacatttatgattgtatttgttgtttcttattaatttgcatcagtgggctgcaaa

SEQ ID NO: 11489 - DNA, 410 bp, Setaria italica
  Peptide Sequence Number=SeqID_77463
tgcacgagcggctccacggcgggggcaaggccgccgggacgatgccgtgggcgcggcgggtgtcggtggcgctgcaggtggcgcgggcgctcgagtacctgcacgaccagtgcgagccgcaggtggtgcacggcgacgtgaaggcctcgaacgtgctcctggatgcgtccatggccgccaagctctgcgacttcgggtcggcgcggatggggttctccgccgccgttcgcccgcggtcgtcggcgcacacgatgctcggctccccgggctacgtcgacccgcactacatccggtcgggcgtcgtcaccaagaagagcgacgtgtacagcttcggcgtcctgctcctggagctcctcacggggatggaaggccttctgccccgaggagggccggctcctcaccgccgtcct

SEQ ID NO: 11490 - DNA, 2116 bp, Setaria italica
  Peptide Sequence Number=SeqID_77464
tccatccaccgggcaaaagcatatctccatcctccctccgtttccctttctccctccctccgccgcacagtgccaggaggccgccgttgggaggcgtgtgtgtgtttctctcgagccgctggatcctccggcctcttgtcgcctgctggagcggagatccggccgctcgggcgtcggctacgttctttttctgctggaagctggcatcctgcaatggagtcgcctacagcctcccctactctgaaggatcatctctccgcgcccacaggccccttgcatctcaaagtatgggaggttgtatgcattgctttgggagttttcatggtggttgtcttctttgttgctgtgtggcttacaatccggagtaagaagagggtaaggcgggcctctgcgaatatcccaatcacccaaatccctgccatttccaaggaaatcaaggaggtgagggtggaggaagtgccagcaagcgacttcgcggcccatgatggagtcctcctgactatccaagacaagtgtagcgaccgtgattcggacaaggccatggcccatcttggtgttagcaaatcgaggcgcggtgatgagagccactcggggtcgttccgctacatggacaaggatgcaggattccaatcagctgaggaagggggctcagggacgtttcgtcaggcttcagctcatgcaataaccgctccttcacctctggttggtctgccggagttctcataccttggttggggtcactggttcacactaagggatctggaacttgctaccaatcgcttttcaaaggacaacattatcggtgagggtggatatggtatagtttaccgtggtcagctcatcaatggttctcctgttgctgtcaaaaagcttctcaataacctaggtcaagctgagaaggaattcagagtagaagttgaggctattggtcatgttcgccacaagaacttggtccggcttctgggttactgtgtggagggtactcaaaggatgcttgtctatgagtatgtgaacaatggaaacctagagcaatggcttcatggagctatgagtcagcgtggctcccttacatgggaggcccgcataaagattcttcttgggacagctaaagcgcttgcttacttgcatgaggcgattgaacctaaagttgtgcaccgtgatatcaaatccagcaatattttgattgatgatgagtttgagtccaaagtatcagatttcggtttagccaagcttctcggtgctggaaagagtcatgtcaccactagagttatgggaacctttgggtacgtggcgccagagtatgcaaacactggactcctgaatgaaaagagtgacatttacagctttggagttgttctcctagaagcgattacaggaagggaccccgttgactatggtcgcccagcaaatgaggtgaatctggttgattggctaaaaatgatggttgctagcaggcggtcagaggaagtagtcgatcccaccatagagacacgaccttcgacgagagcgctcaagcgtgcactgttgactgctctgaggtgtgtggatccagattcagagaagagaccgaagatgggtcaagttgtccggatgctggaatcagatgatccaattcctcgaggggacagaagatctaagcaccaccgtggagggagcacagaaatggattcgcaaagggacaacaactccgacacggagaagagtgataatccggattccaaaccaagcaggagcagagcatcatcatcaaaatgagcgcactggcatttctcgtactacattctttggtacattgcatggaccagacttcttccattttacattgctgacgaattggtaactgaaggctctgaagcttgaatacacaagagctcaggaaagaagatctacttttttcttttccttttttcttggttgtaacggtttatgatttatttgtagagaaaggtattgtttttttacttatcgatttatatgtacttactggtgatctcgacaattgctgctgtaagttcttaacagtgtgtacaggcgtagcatcatgaatactggcggaatacccgtaatatttgtaatgataatgttgcaattaaaagcatccttccaattgagaaaa

SEQ ID NO: 11491 - DNA, 428 bp, Setaria italica
  Peptide Sequence Number=SeqID_77465
ctgcgtcttcatttccttgtcagtttgtggattgagctcggagctgaagaactcgaggaacagccacggctgaccaaccatgtcggcgaccttctcggtggtcgaccattcctcgttcaagcgcagcgtcaccgtggccttcagcatgacgagctcgtccttgtcgtggcgcgtgaggaggccggcggcctgttcctggtcgacgttggccaccgtgcccacggcggcttggccattgacggaggcctcggacaggctgacgcgggtgcggctcaccttggacgagacagcccggcgaggcgcccactggcccggcgaggccgtgctgctgcagaaggaagaaaggccatggctcggggagagcactgcgcctagaggctgcgtggcagtgagcattatggctgagtgtgtagtgtgttgctttcaac

SEQ ID NO: 11492 - DNA, 847 bp, Setaria italica
  misc_feature (802)..(847): n is a, c, g, or t
  Peptide Sequence Number=SeqID_77466
acgaaacacgacgagagcacgtctcgacacgagagcagagcgtggccggggaagaagaggagggcgaggagatgagcgggctggagcaggagctgggcctgagcctgggcgtcctcatcgacgtcgtcgacgagcagtggatgcgcgacaccctccccgccgacgaaatccccgtgccgccggccatggccgtcaagaccgaggacgccgaggatccagcacctgccaatcaggaaagccaaccagcacaaggggatgtatggcgtgattttgcgttggaaaacctctgatctttcatgccctacaagtgcctctagagatgagctgcatggtacatcatggtttctacgcggcacaaatatttgtctggacttgtttataatctggtttatgcaattgctccagttattgctgcatggtggcgttgaaccttgtgtcggcctgttataaaactctatggtgacgatgacagcaatttagttatgcgagtgctccagatcttggctgcatgttggcaccgaaccttgttaatacctactgctgagtttctttcataaacttttggagctcatgtttgattgtttgtgtttcttaacctagcatgaagaatgtttcggtacttgcattccaacttgtggttgttaatttcttgttctacatggatggatcctgtgcagccacatgcttaatttgtactgcttttgccacttcttgaactgctagttgtaacttgtacggcttgcgcgtctgttctttcacacacttttacagagaggatctacactggtcactgacttacacnnnnnnnnnnnnnnnnnnnnnnnnnnnnnnnnnnnnnnnnnnnnnn

SEQ ID NO: 11493 - DNA, 425 bp, Setaria italica
  Peptide Sequence Number=SeqID_77467
agcgtctcctttacttcatacagaacatagcacacagagctagttacctaatacagtaatactgaaatttgtcatggttgaaaacattgcccattgcttagaaactggcaaagccaggcacataccaggtgttcggagggggatacaggatgtgcgcggggaacatgctcgcaaggctgcagctcactatcctgctgcatcatctatccgttggctacaaatgggacttggttaatccagatgcggaaatcatatacattccacactcatatccttccgatggggctgtcattgccatcagtgaactgtgagtggtagcaggaggttccattacttcaattcaaagcatcgaatcagatgtttgagctactatgcatgtgtgccggcttggccgggcatggattggaaaacacagtccactgcac

SEQ ID NO: 11494 - DNA, 1291 bp, Setaria italica
  Peptide Sequence Number=SeqID_77468
ggagcaccgtcaccgccgccgtcgagaccaatttcgtttcaattattatcccggtgcatcgcctattcactattcagtgatgaacgctcgctgtgcaggtcacgttcgagaacatctgcaagatgttcgtgggcatggatccgtcgccgttgacagaggagatggatgcgtggttcgccggcttgctgggcggcctcagggcgttcccgctcgacctccctggaactgcattccgtcgagctctccggtgccgccacaagctgagcgcggtgttcagggatgagctgcggaggaggaaggacgtggcggacggcggcgaggacctgatgggcgcgctgatgcggacggaggacgagggagggaggctgctcagcgacgaggaggtggtggacaacatcgtgtcgctcgtgctagcgggctaccagtccactgcctctgctctcatgtgggctgtctaccacctcgccaaggcgccacatgcccttgccaagctcagagaggagaatgcggcgatcggcagagacaagaatggggagttcatcacccctgacgacatctcaaagatgaagtacactgccaaggtagtcgaagaaacacttcgagtagccaacatcgctgcaatggttcatcgtgtagcgctcaaagatgtcgagtacgctggttataccatacctcaagggtggagggttgtggtctggctgcggtcactgcatatggaccccaattactacgacgatccgctgagattcaaccccgacagatggggaaaactggcaaagccaggcacataccaggtgttcggagggggatacaggatgtgcgcggggaacatgctcgcaaggctgcagctcactatcctgctgcatcatctatccgttggctacaaatgggacttggttaatccagatgcggaaatcatatacattccacactcatatccttccgatggggctgtcattgccatcagtgaactgtgagtggtagcaggaggttccattacttcaattcaaagcatcgaatcagatgtttgagctactatgcatgtgtgccggcttgccgggcatggattggaaaaacaacagtccactgcacatgaaaatttcataccgctctgcacatatgaagcaccaccagtccttcactgtccccggctgcctttggctggaatgtatgatcagatcagaaattctgactgctccgctcatcaataaaaacgtagctatgacatggaaagtgtttgatgcgtgtgcctgctgaatccaccaactccgttgatgcactatatatcagc

SEQ ID NO: 11495 - DNA, 497 bp, Setaria italica
  misc_feature (1)..(33): n is a, c, g, or t
  Peptide Sequence Number=SeqID_77469
nnnnnnnnnnnnnnnnnnnnnnnnnnnnnnnnngttcgattctaaattatcaccacattgagttttcctcaatttcaccataacatagtcagtaagttacccccgtggactcgagggaatatagtttataataatacatcttgcccacaggcacaatttttcccctaaacaaagacattatcatgagaagtgccctatgtggccagaggctcatcggcctgtacaaaaacattttttccatcatttgcaacctgtctggtaatacgcaataaggtggaattgcatgagttgccttacaaatcctcaaatgcctcttcatcatcatcaccaaacatggctgccattttcatggctagctttgcagccatctctctcctctggaagtcaggcatgagccttaggttggatctcatgttgccaatctccgacattaacttctccaggtcatctagaccataatgctcatcatcaaacaggttgttagcctctggggcatc

SEQ ID NO: 11496 - DNA, 148 bp, Setaria italica
  Peptide Sequence Number=SeqID_77470
tcctgataatatatcaaacaatagtgcaaacaatgatgcagtaaatggaattacaaatattcagtcctcaggaacatcagttcagaagcgcatccatgggtgctgctggtgtacagctgtctacaccgatcggaaactcgggctgaac

SEQ ID NO: 11497 - DNA, 557 bp, Setaria italica
  Peptide Sequence Number=SeqID_77471
atgaagagggatgtgattccagagcaacagtatctccaatctaaccagtagagtatgagtagtggctagtattgaaacagatatgacccatcttgcagatctgggagagtcactaactgcatatgatcagtggtcagcatatcttgatttggatgatgatccaactgcgccaggtgtaaaagcttctttaagtactagttttagcagagctaaaggtgcaatggaaccagatgccctgactttgctcaagtacagcaaagattcttgcagaatgcatgtgttttgtctagaacatgctttggagacttggacacgacttcaacaatttggtggtgctaatatcgtgcttttgtgccatccagaataccctaaagcggagtcagcagcaaaagttatagcagaagaacttggtatgaagcatgcttggaaagatatcactttcaaaaatgcaacagatgaagacattggaagaattcgattggctctgcaggatgaagatgctgaacccacaagcagtgactgggcagtaactttgggtatcaacatatattacagtg

SEQ ID NO: 11498 - DNA, 424 bp, Setaria italica
  Peptide Sequence Number=SeqID_77472
tgcactattgtttgatatattatcaggtgcttccgcttcctcatcagaatctgatgattcataagcagaagccaggagcccaagagcagaagcgcatccatgggtgctgctggtgtacagctgtctacaccgatcggaaactcgggctgaactcatgttgtgtattctattatcatctgtttcagaagaatgcccttgtggaggaacagtcgttatccaatttgaggtatcatttgatttcataatttctccatgttttgcacttgatgacatgcactcctgagaaataacatattggactgctgcttctttaggttgaatgatggctacacaagcatagcttaatatgccacactgaacacatggcaaccgcccttgatctaagacgcccacatccttgatgtgatcctacctttttcaatta

SEQ ID NO: 11499 - DNA, 377 bp, Setaria italica
  Peptide Sequence Number=SeqID_77473
ccttggcgtaagtctgctatgttactgaaatgatacttgttttttttacttcctgtgatgccataactcataactgttgtaagttctataggaagttacctttgaggaaccatatgtatctctagtcataattgtttttcttagcaacaattttactccataaaagttaatttgttatttcacttaagaacaggagtatgattgtagatgctcgtggtcaaataacaatccatgaacccactcgttgccttcgtaaagcctgttgtcaatgtaatacgacagttgccccaaattttcagcataagcacagacacatttcgtgatcctggaagtgtacgtgtcaagtactagaatataacttaaaataatgttccttt

SEQ ID NO: 11500 - DNA, 520 bp, Setaria italica
  Peptide Sequence Number=SeqID_77474
aagtaactaagggtaagaactaagaaaaggaaaataaccctagaataaaggttacaaataggacaattacccaactaagtagccactgtgcccaccttcttcccaggaaacatgtagcacactctctgcattggtttcttgcaactttttcctgaggtccttgttaaggtcctgtagttcttgctccttacttttcagatcaaagagctgatcaagcaacatttgattctttcttgtcctgatatgtttcagggatatctctatttggttctcaagctgctcaagctccttcatgctaagtggacccagatcctcaccaagaatatttctttgtgtagtttgaagaaattcaactctggtcttcaacttcaaataatcctggtagttgatttcaccgtccaatggagtttttatttcctgtgagccgtaattggagctgcggtatctctccagctcgtcatgcatgtacaaaacactcgagagataccgcagctccaattacggctcacaggaaattaaa

SEQ ID NO: 11501 - DNA, 737 bp, Setaria italica
  misc_feature (713)..(713): n is a, c, g, or t
  Peptide Sequence Number=SeqID_77475
taggtaaggttaggtaagtaaacttacgtaaagtaggtcggtccgtcggtcttggtaaaagtattgatttccctaggtaaactattgttagtctactacttcttcttgcattggtttcttgcaactttttcctgaggtccttgttaaggtcctgtagttcttgctccttacttttcagatcaaagagctgatcaagcaacatttgattctttcttgtcctgatatgtttcagggatatctctatttggttctcaagctgctcaagctccttcatgctaagtggacccagatcctcaccaagaatatttcttgtgtagtttgaagaaattcaactctggtcttcaacttcaaataatcctggtagttgacaccgtccaatggagtttttacctgtgagccgtaattggagtatctctcgagtgttttgacattgcatgacgagctggagaactcgaagaggcggcccggccggatgatgagggcgacctcggcgtcgcagagcacggacagctcgtacgccttcttgagaagcccgttccggcgcttggcgaacgtcacctgccggctgatcttgttctcgatccgcttcagctccaccttcccgcggcccatctcggcttcctagtagctagctccgatccccccttcctctctagagcggcaagatctttatctctcctcttcttgcaaactctctctctctctctaccttnttcttcttgcaagctctttctctc

SEQ ID NO: 11502 - DNA, 396 bp, Setaria italica
  Peptide Sequence Number=SeqID_77476
agaaattagactcccctgttctcttcatcgttttgggaagtctcaagagcagtttcaatcaaactttcattcaataatgcgtagaagagggccggaaatgcgtcctgctaggccggccatgcatcagcttatttcagtcgtctgagcacttcaaatccatccggatccaccgtgctcgtttgggtcccccatgtcttcgttgttcagctggtccatgtaggcttgttggtggtaccttcgcagaggacgaccattcattgagttagttagttataaaaagaagagtaatgaatgaaaacatgctaaagaaatgaagtgctgaatctgaaagtgctgggatcctgttctccaaagcaaatgactctgatgtgattgttgtgtatttcactggttcag

SEQ ID NO: 11503 - DNA, 812 bp, Setaria italica
  misc_feature (809)..(809): n is a, c, g, or t
  Peptide Sequence Number=SeqID_77477
ttgttgtccctacctttctttccctaggtaaactattgttagtctactacttcttcttgtctatttggttttcttctcgtaaaatgccccttaagttaactaacttaacaataacgggaagtctactacgaagacaagtttacaaatacaaatctttccaatattcaataatgcgtagaagagggccggaaatgcgtcctgctaggccggccatgcatcagcttatttcagtcgtctgagcacttcaaatccatccggatccaccgtgctcgtttgggtcccccatgtcttcgttgttcagctggtccatgtaggcttgttggtggtacccaatctgtagggaaggatcattgtctgggtgctgaaggaatccctgataaggttcaatggcattcccactagtgccactgtgcccaccttcttcccaggaaacatgtagcacactctctgcattggtttcttgcaactggcactttttcctgaggtccttgttaaggtcctgtagttcttgctccttacttttcagatcaaagagctgatcaagcaacatttgattctttcttgtcctgatatgtttcagggatatctctatttggttctcaagctgctcaagctccttcatgctaagtggacccagatcctcaccaagaatatttctttgtgtagtttgaagaaattcaactctggtcttcaacttcaaataatcctggtagttgatttcaccgtccaatggagtttttattcctgttgagccgtaattggagctgcggtatctctcgagttgttttgacatgcatgacgagctgganact

SEQ ID NO: 11504 - DNA, 731 bp, Setaria italica
  Peptide Sequence Number=SeqID_77478
tggtagtcctaccttcttgtccttcgaccttcgttccagtctttccttttcaggaccctgttggcatcttgtagcatttgttcctttctcttcaagtcgcagagttcatcaagttagcacctgagtctttcttgatcttatttgcttcaaggtcttgtctacttgactctcaagctgctcaagttcacttgtgctaagtggagccagatcttcacccagaagattcctttgtgagtgctgtaaaatctcaactcttgacttcagctgcacatattcttgatagttgttctgcaactcatcactagacggcactgcagcatcagctgaagcatagatgtacctctggtacctctccaaagtcttaagcagattggaggaggatgagaactggtagaggcggccggcgtgggagaagaggacgagcgcgacctcggcgtcgcagaggatggagagctcgtacgccttcttgagcaggccgttccggcgcttggcgaacgtcacctgccggctgatcttgttctcgatccgctgcagcaccaccttcccgcgccccatggcctggcctcccgatcgatctcaccccctttgtcggttcttgatctcctctccccttccaaatcaacctcccaacaaattaaagaagtaacaattcgactgctctttattagctgctgctaccagctctatatatgtagtatctacctctctcaaactatgattcgcctgcaatt

SEQ ID NO: 11505 - DNA, 706 bp, Setaria italica
  Peptide Sequence Number=SeqID_77479
tttctggaggacacgggcacttctcaggccaatgcaacaacaaagcaatggctatgccatccacgcaggagggtagcagctccccggcgccggcaccggctgctggttcatgtccatggtatggaatgttggctgcagagataatgggttgctctccagggcctggaagaagtgctctggctgtggagggccatccgacagcatggcgtcgccgctgccgccttgccacggcagctgcggctgcggcggaggagccacctctgcctcgacctcgtccagcttccttttcaggaccctgttggcatcttgtagcatttgttcctttctcttcaagtcgcagagttcatcaagtagcacctgagtctttcttgatcttatttgcttcaaggtcttgtctacttgactctcaagctgctcaagttcacttgtgctaagtggagccagatcttcacccagaagattcctttgtgagtgctgtaaaatctcaactcttgacttcagctgcacatattcttgatagttgttctgcaactcatcactagacggcactgcagcatcagctgaagcatagatgtacctctggtacctctccaaagtcttaagcagactgtcataggaaacacgaggtataagtgatccagccatatgtatataaatatatagagagaaacatatcaaatcatgaagagatatagaacatatagct

SEQ ID NO: 11506 - DNA, 2513 bp, Setaria italica
  misc_feature (2426)..(2513): n is a, c, g, or t
  Peptide Sequence Number=SeqID_77480
gcacctcccggcgctcccgggtcgacgccgacgccgaggacagcagctcccccgggtccgcgcggtcgccacggagccgaagccgtccacctccacctcctcctctcgccccaggacccgtaatgatctctccaacaccaggttcggtggggtgtccaaggagatccagcgcgtgcgcaagcagatggagcaggacgagcagctcgccacgctcatgcgtggcctccgcggccagaacctccgcgacgagcagttcgccgacgacaatgtccgccttcgcctcgtcgaggtagagactgcgggcaacaatgaggggctgccacttgtgtatagcccagaaatcatatcagcctactggggtaagcgtccaagggctgtcgccactcgagttgtgcagttgctgtctgttgctggtggtttcatctcacatctcatatccgatcttattaacaagaaactcaaggagaatgaagtagctcgtgctattgaactgagggaaattgtgacatctctgggtcctgcttacatcaagcttggacaagcgctaagtatacggccagatattctgtcacctgcagcgatgactgagttgcagaaattatgtgataaggttccttcattcccagatgatatagcaatggctcttctggaagaagaacttggtcagccttggcaagcaatctactctgagttatccccctccccaattgctgcagcatctttgggacaggtatataaaggacgcttgaaagaaaccggagaattggtagctgtcaaagtgcagagaccatttgtacttgagactgtcaccatcgatttattcatcattagaaacttgggtttggtactcaggagatttccacaggtctccattgatgttgttggcctggtagatgagtgggctgctcgattttttgaagaacttgattatgtaaatgaaggggaaaatggcgcctactttgctgaaatgatgaaagaagatctgccacaggttgttgtcccaaagacttacgataagtacacatctaggaaagttcttaccacacaatggatagagggagagaagctttcacaaagtacagaggatgatgttgggtcattggtcagtgttggagtcatatgctacctgaaacagttgcttgatactggattcttccatgctgatccacatccaggcaatatgattagaacacctgatggaaagctggctattcttgattttgggcttgtaacaaaactgacagatgatcagaagtatggaatgattgaagcaattgctcaccttattcatcgtgattatgatgcaattgtcaaggactttgtgaagcttggtttcatccctgagggagttaacttggatccaatcttgcctgtactggccaaggtttttgatcaggcacttgaaggaggcggtgccaagaatattaactttcaagaattggcagcggatctagcacagattacttttgattatccattcaggatacctccgtattttgctttgattattagagccattggagtattagaaggtatagctttggtgggagatcctgaattcgccattgtggatgaagcatacccatatattgctcagaggctactaacagatgaatcaccacggctaaggagtgccttgcgttacacaatatacggcaaaactggtgttttcgatgcagaaaggttcattgatgttatgcaagctttcgagaattttattcgtgcagcaaagagcgggggtggggagaacttgaagggaaacatggctgagctggctgatataggagctcaacctagcaccagtttggttcctgtatttccaatggccatagcccagcctgagcagccagttaaagctcgtgcagctcttgcttttctactctctgagagggggaacttctttcgggagttcattcttgatgagatcgtcaaagccattgatgccgtttcaagggagcaattaatacagattgctgcatctttcgggataggaaacgcgacccctgtttttagcatggttcctgttagggccagagcattgcttccaacaatcacagaggaagacagagtcatcttgaacaatgtcgagaaggttgtgaagttcctaacatctgggactgcaactccaaccgtgagtggggacgtaaacatggtgtctgtagtccaagaacttcttcctgtgttgccaggcatctcatcgaagatcctacccgatgtcttgagccggttgtcatcacgagtatttgcacggttgatcagagaggcatttttgtaaagttttggttccttttcgttctaacaggaaactacaagtagttatatcctcccaaacaacacacacatgatagaaaattgtacagcagtacgatgtatataatttttatctatgcaaattaaccaaaggttaaccaaaaaaaaaaaaaaannnnnnnnnnnnnnnnnnnnnnnnnnnnnnnnnnnnnnnnnnnnnnnnnnnnnnnnnnnnnnnnnnnnnnnnnnnnnnnnnnnnnnnn

SEQ ID NO: 11507 - DNA, 1069 bp, Setaria italica
  Peptide Sequence Number=SeqID_77481
gagagaggagggagcaaaggcaaagcagccaacgaccagagaggcagagggagacgaagctcttgagagaatcgcgagagagaaagaagaggaaggaagatgatggaacaggaggaggcgtgctcgtcttcgtcgtccctgacgctgaggcagtgcaggatttgccatgacgaggaggacggccgccgctccagcatggagtcgccctgcgcgtgctccggctccctcaagtacgctcacaggggatgcgtgcagagatggtgcgacgagaaggggagcaccctctgcgagatttgcctccagaatttcgagcctggctacaccgttcctcccaagaaacctgctgatgtcgcggtcaccatcagagagagcctggaggtgcccaggctgaactacgagccggaggagcaggaggtcgaggacgcggcggtggtcggcgccggcgacccggagtacgccgagtgcgcccgcgcagccggcaggagcgcgtcctggtgccgctcggtggccgtcacgttcacggtcgtgctgctgctgaggcacctggtcaccgtggcgacggtcggagcggcgaaccagttcgcctttagcctcctgacggtgtacttgctgcgggcgagtgggatcttgctgccgttctacgtcgtcatgaggctcatctccgtgatccagcatggccagcgccagtaccgcctgcagctgctccaggagcagaggaggcaggcgttgagattggttcggcggcagggtcagggtcagggacagcagcagcaacagcatgtcgtcctggttcgctgaggaaggaggcggcattcatcaagtgtttgtatatcttggtactacaaggttgtaaaatgtactggtacctggttcttcaggggggttccagtttttgtacatcatttgcgatctgactctgtccagcctgcgtcaatttgccgtcgcatctgcgaaatctgaaaaatgctcaaaagtgaaaatctgtgaagcctgagtctatctcccccttgttcacgaattctgatgtactggtgtcctgctaccaccgcagaatgtaaataagagcacg

SEQ ID NO: 11508 - DNA, 1816 bp, Setaria italica
  Peptide Sequence Number=SeqID_77482
gggattatttttcaggaaccacgaacgagggtttataatgagaattgggagtgatttatttttggtcctgagaagaagtatgtggagcgagaaatagagtgcgtagaaaacaagacaggagtgaaatgtgtgtggtccaacagaatgggacaaactgttgggaaaactcaaaataattgacatggagcaggtggtattaatattaatcggaaaagcatgcatccagcaatgaaccgtgatgcatccgctgcaagttgaaacagaggagcaataatagaaacagaggagcaagagaaatagaagcagtggtgaactggacaaatcatccaaagaagtattttgattagctgatgctttagtttcagaagataggattagattatgtagggctaaatggctaattaagaatcacatttggatgcctgcccagtcccaaatcggacaccaggcttagtcttcccattcataccgaactttgctgctccggacccttacgtacgtcttcgttctcatcctcttccattaacgattcccaaattcttgacagcacaagagttggatgattcgggtggccgtcaactgcatccctgattttgagctctgcatcctccacctccctagtcgtggcaccaccacagttaactacgaccctgacatgtttaagggaagtgaggttctccatgccaacatcaaaaccgccgcccactctcttccgtgctttaaagtataacttaagcctttgaagccttggcatcactccttgtccaaacaccagccagcatcttgaacaatgcataaactcaaactctgctagagagaggaaggccttatcactgccaatgaccagccgttcttcagtggtgccacctatatctacttgtagcagaaggaaacgtagcgtgggcagagccccaagcagttgaatatcaacctgccttagcacacggacgcagatggacaagcaggagagctcacagagggatgaaaaccaacgtggcaactcagagaaggttacgtcgcccccatcaaagctttgtaggtgagcagggcctctccactgctccggcatacagtctagggaacatgacctaccgccatcaaaatttagagtgacaatattgtttagattaatgagggtctggagaaatgtcttaacgagaccttcattttcatcaaatccggttatagccagcccccgtagttcagtaagcttaactagctctgccagggtgtttggtgactttttcacatcgagcactgccagctgttgcagggacactaggttcccaatcccatctggaaatttcacccctgtaccagtaatcagacgttcaagctgttttagctgaacaatactaggtggcagttcttctagggacgtgccccacaaatccaatgtccgtagactctgtaggtttccaatatgttctagaagctcagttgcaagctcccctcgtagttccagatatctcagatgatgcaaacggaaaatatccttaggatcattgttcttgcttggagaaagttccaaaaccaaaacacgtaggacagaaaaccttgaaagaggttgcatccattgaaaggcatcacctagtgcaatgagtgacctcacatgtgacatgtccaccgttgctggcattgctgtttgcccttcctttctatcttctttatcagtatctaactcgctaccttgaagcgataatcgtcgaatcttacatgctgatgttttgaggtccgggccttctgatagcatagcaaaattttcttgagctgcaaggtaaatgataagatcaagtaccatatcgtgcactcgaca

SEQ ID NO: 11509 - DNA, 689 bp, Setaria italica
  Peptide Sequence Number=SeqID_77483
agaattaattagaaaatactagaaactttaccaatgacctaaaactaattaaagtagttacgaaagccattttttaatgtaatttatatattgttctttcttgtactaggatattacccaagattttctttggtactgcacagcgctcaccatttatgtccatacgcaaccagcatgacttgatctatatgacgtagggctctaataaagtaatcatgatgcgggtgcttgcacgttgttctcatcttaggatcatggagatcacttgatccatttaatccggtgaattgatggcacaaacatgcaaacatctgtttaaacaagcacctgtgataaaagaatttgctccaagtacgcgcttgatcatctactgaatcaggcaggcagacaagctgttgcagtcacaaggatgcacaagaacacacgagacaagtctttgttggagatgtcgtcttgttaaaagatccagagaaatcggatgatttaattattcgacgactggctgccctggaaggctatgagatggtctctaatgatgagaaggatgagccatttgtacttgagaaagatcaatgctgggtcctggcagacaaccaagccctaaagcccaaggaagctagagatagccgattgtttggacctgtccctatgaccgacatccttggcagagtgatatactctttaagaac

SEQ ID NO: 11510 - DNA, 1188 bp, Setaria italica
  Peptide Sequence Number=SeqID_77484
aagaatactcccagcgttcccctcctgcgcgacgcggccgccgcctgcgcctccccttcttcctcccagctccggtcgccctcaccgtacctcgcctccgtcagccgcctcccctctgctcatctgcggggctcctctaactaggggacctggtagtaccagcttccgccgccgtgcagccgggaggaaatcccggaggaggagaggtgggatcagtacaggagcagcagctaggcgaccgagaggaggttggggaggatggtttcgctgtcgacgtggttccgctatgccgcccacaagttcgagtactccatctccctctcatggaagaaatataatgtcggccagatcaacagtagagagctaactgatgcgatatggaaaaacttcttccaaggcaagctcaccttcacgcattggaccaaagggggagaagccatgactcccatcgtatctccaactggaggaacgctccttgtcagaaagctcgcaaatttaagccccacacaagtctttgttggagatgtcgtcttgttaaaagatccagagaaatcggatgatttaattattcgacgactggctgccctggaaggctatgagatggtctctaatgatgagaaggatgagccatttgtacttgagaaagatcaatgctgggtcctggcagacaaccaagccctaaagcccaaggaagctagagatagccgattgtttggacctgtccctatgaccgacatccttggcagagtgatatactctttaagaacagccgtcgatcatggcccagttgagaacagtggcatggccatgaaccaggatgccccagtactggcagtagagcttgatgtggaagagatggcgaagaacaataagacgtagacacttgatgcttttgacatactgctctgtaacttaccgttactttgggttttgttatttacgatctgttacttcaagtagaacctccattggaatgttattcacgatttgcctgtggagaagtcaataatcgtttcaacaaataatccagaggttgctggatcgtgatctttccaactgtgtcggtaacgttgtgtgattgtaatgcctgaatttgagatcacatgttcgtttgctgcaccatgacctttctaattttgtatcattagcaaggtgaaatcaaatgtgacctgacaaattgcggcaagg

SEQ ID NO: 11511 - DNA, 297 bp, Setaria italica
  Peptide Sequence Number=SeqID_77485
gcttcccgtacttcttttcaaggctgtcataaacgtcactgcccgcaggatactcccacaaatagcatgcattcagttgaaaatcctgctcatcgctcttaatacccagacaagtgagcatgtcaaggacataggcaaaatccctttcatccgcatcccaaaaggtgtcggatgtctgacatgcctcgtcaagtggtttgcagctggcagaaactccatcatcgctcgatagagccagctcggtttcatcagcattgcctgtggcttccatcttgagaagccggagttgcatcctca

SEQ ID NO: 11512 - DNA, 295 bp, Setaria italica
  Peptide Sequence Number=SeqID_77486
aaacaactggtggcgaagtgaggggagaaggtgcttgttggtggcaaaggcagcaggtgctggcttgttgaggccacatgtcccgaatggcgaagccattttgagtacctggctgctgcaaacgcgattgattgcttgctggagtcgttgaatcacgcacaagggcagagcagggcaggggatcgcttgatttggtgtccgccggctatctatctactatgtatctagggtttcaagatggcggcggacggatcgggctaccttgttttgtagcaattgaaagaaagtaattagc

SEQ ID NO: 11513 - DNA, 399 bp, Setaria italica
  Peptide Sequence Number=SeqID_77487
ggcagcatgctccaagcaacacctcacaaccttggtgggatcaataataccagcagccatcaaatcctcgtagttccctgtagctgcattataaccatacctaaagttcttattggcaagtacctgaacgccagacatgttaaacttgctttacacacaagctgcaaactgctaagttatacaggacaaaattttgagtgcaaaccttctcgataaccacactgccattaacacccgcattcttcgcaatcaatttaagtggatagctcaaggacttccttacaatttcagctccaaccttctgttcatcattgtcaagggtttcaataatagcatcaacttttgatgcaagccttaaaagggtgcagccaccaccaacaacaataccttcctcaactg

SEQ ID NO: 11514 - DNA, 2061 bp, Setaria italica
  misc_feature (79)..(79): n is a, c, g, or t
  Peptide Sequence Number=SeqID_77488
ctatcgatgtttgaacaatgaatctttgcgtgcagttggtagttggtatgcgtcgcgttaatgatatatactatagttnaaaaaaggggacttcatgtctccgactcagtcgcactcgtctcctccaaagtaacgtgcaatgccgcaggaagggtagtggaagctcatctccagaatttttctagaacccaaaacctgaaccaccacccattggatttgcagcaggtgcttgttcgggcacctggatgtcaaccacaacagcatcggaagtgatgaaagtttttgcaaccgaggcagcatgctccaagcaacacctcacaaccttggtgggatcaataataccagcagccatcaaatcctcgtagttccctgtagctgcattataaccatacctaaagttcttattggcaagtaccttctcgataaccacactgccattaacacccgcattcttcgcaatcaatttaagtggatagctcaaggacttccttacaatttcagctccaaccttctgttcatcattgtcaagggtttcaataatagcatcaacttttgatgcaagccttaaaagggtgcagccaccaccaacaacaataccttcctcaactgctgcctttgtagcattaagggcatcttcaacccttagtttcttttccttgagctcagtttctgtctgagctcccacctgaataacagcaacaccaccggacagtttagcaatcctctcgttgagcttttctttctcatattcctgatcagtagcctcaatctggttcttgatttgcatcacccttttgttgacttcctcctgtgtagtaccatctccaactattgtagttgaatccttagttactacaaccttggcggccgttcctaagacctctttgtctgccttgtctaaggacaaacccacttcatctctgatgacagtacctccagtgagagtagcaatgtcatccaggtattgactcttgcgctctccaaaaccaggggccttgatagcagcaatcttcaatgcacctctaagcctattaaccacaagggttgcaagagcttcctgctcaatatcctctgcgactattagaattggatatccacctctaatagcgtcctccagaatagtgataagatctcttgcattgttaattttcttgtccacaaggagcagcttgcaattctcgtactccactgtcattttttcactgtcagtcacaaagtagggagaaatataaccacgatcaaactgcattccctcaacaacatagaggttattttcagcactcttcccttcttcaagggtgaccaccccctgccgtccaaccttggccatagcctcagctataatattcccaatttcgtagttatttccagcacttactgcagcaacatcagcaagctcactatcctcaacctccttggacatcttttggagttcattgactagtgctttggctgttttctcaataccacgggtgatctgcactggattagcaccagcagctacaatctttacaccctcagtaatcatcccttgagcaaggacgactgaagtggttgtcccatcaccggccaaatcatttgttttagcagcagcttggcggaccaatttagctccaatattctcaacagggtcttccagctcaacctcctttgcgacagtgacaccatcattgacgattttaggtgagccatacttgctctccaggactacatttcgtccttttggtccaagagtaaccccgacgagatctgcaagcttattgacgccattctgaagtttcctgatggcggagccgtccttgttgaagtggatctcctttgctgcattcaccgtgaaacggcacttcctctggtgcctcattttcattttccgtgggatggaaacaactggtggcgaagggaggggggaaggtgcttgttggtggcaaaggcagcaggtgctggcttgttgaggccacatgtcccgaatggcgaagccattttgagtacctgttgcagggatgaaatttggatgagcagtaacagagcaggaatcacgcacaagggcagagcagggcaggg

SEQ ID NO: 11515 - DNA, 771 bp, Setaria italica
  Peptide Sequence Number=SeqID_77489
ttagtaaagtaaattagtacgggttgtttaaattggtcagtgtggttatcgagaaggtacttgccaataagaactttaggtatggttataatgcagctacagggaactacgaggatttgatggctgctggtattattgatcccaccaaggttgtgaggtgttgcttggagcatgctgcctcggttgcaaaaactttcatcacttccgatgctgttgtggttgacatccaggtgcccgaacaagcacctgctgcaaatccaatgggtggtggttcaggttttgggttctagaaaaattctggagatgagcttccactacccttcctgcggcatggcacgttactttggaggaggaatttcattttggtgttattatagcgttaaagcggcagcaaatctgctacgggtgatctatcgatgtttgaacaatgaatcttgcgtgcagttggtagttggtatgcgtcgcgttaatgatatatactatgttgaaaaaaggggacttcatgtaattgttgccagaacagatggtggctctagagtctttttgaggacctcggtatgtggtggtgacgaatgcagaattcattcgccaagctgataaactatcatctgactactgatggaagcatatgcagtttgtatggaaacacacatttttgcagatgttccactacccttcctgcggcatggcacgttactttggaggaggaatttcattttggtgttattatagcgttaaagcggcagcaaatctgctacgggtgatctatcg

SEQ ID NO: 11516 - DNA, 433 bp, Setaria italica
  Peptide Sequence Number=SeqID_77490
gccgcggagaaaattgggggaaaaggaatcttgacggccgtgtgttatcctgaattctacctcggcctcgcgacggcggtgcgagcgcgagcagcggcaatggcgaccgcggcggcgaccatgaccatggctacgcaccacccccgcgcccgcccacgcctccgcgtctgcgccgcctgggacatgaacccgggcgccgccaccgtggccatgcccaagccctccaaggcgaaagccaagccgccggcgaccccgacgaccccgccccgcccgcctgctccgaaccacgccgacctcttcgcacgctccagcgagggtcaaggagaaaagaagagcacatatatgggctttgagaaatggtggttgccaccacccccagaggtgaagaaaccccgatcgctctacagcgcggcatcactggcttacttgggag

SEQ ID NO: 11517 - DNA, 470 bp, Setaria italica
  Peptide Sequence Number=SeqID_77491
aagcaaacattctaatgttatacaaattcgtgcaactctacctgcaatataatttctatagggaaatgctgttctgtagtcagcagtcttaaaatgtatgattgcggttatattgaatgttagtgctttgccatttgtcaagactagcatgggtatttccaagttctcatttatgttttttggaaaatgttgtatctcttcactctctctagcctgagcctcgagtctgttcaataatgaaccttcaagatgtactttgagttaccatattgatcgcattttgtagggacatacttcgttgggggaggaatattgttagcagcaaaactcgcaccaggaagcgtgcaggaattgcagtctacaatcgggcatcttcacttgaaacactgattggatacctttacctcacaaatttcaagcggttagagcaactgatgtttcaattaggcttcacaagtggtgcctactta

SEQ ID NO: 11518 - DNA, 1138 bp, Setaria italica
  Peptide Sequence Number=SeqID_77492
taaactaaaacgaaacaaagtaagaaaacaaaattaactaagaaggtagtaaatagaaactaatacaacctagcaagtctgttcaataatgaaccttcaagatgtactttggagttaccatattgatcgccgcctgctccgaaccacgccgacctcttcgcacgctccagcgagggtcaaggagaaaagaagagcacatatatgggctttgagaaatggtggttgccaccacccccagaggtgaagaaaccccgatcgctctacagcgcggcatcactggcttacttgggagactgcatatatgaactttatgctcggaggcacttcttctttccacctctgagcatcaatgagtacaacaaacgcgtgatggatgttgtgaagtgtgagtcacaggatcttttgttgaacaagcttcttggagaggattttctaactcaagaagaaagggacatacttcgttgggggaggaatattgttagcagcaaaactcgcaccaggaagcgtgcaggaattgcagtctacaatcgggcatcttcacttgaaacactgattggatacctttacctcacaaatttcaagcggttagagcaactgatgtttcaattaggcttcacaagtggtgcctcttcacaacatattgccgaggagctgcgctcaagtttccagaaaacaacccccattactacccaagctcagcaacctgctacgcagtgaacaattctgaggtgtaatgaactatcacctgcactgctgcccagggatttctcatggagctcaacgactgacatgagaatgcctggcttgcggcatattaggatccaatagtgaggctggaatcatcggcaagcgaatggagcaatatgattgatgagacgcgcacatacactggacagtatgccgacttgaatgttggggaggatctggggcttgtgactaggatagtttgctatggcaaagaatttccagattggggctggtgaaaggcaaatagaattaaggctcaatttgtagtgttgtaatcgacataaattcatgtaggaaataaacggcttcgtgtgaatctgttcacaaaaccactgaaaatttctctcaaacaaaatatacacgtcttaatgttttcctggtctaaaaaaaa

SEQ ID NO: 11519 - DNA, 763 bp, Setaria italica
  Peptide Sequence Number=SeqID_77493
tgccgaacgccacgtacacgactgagcgatcgggccacgcgtcgagccactcgaggcatctggcgtcctcgggcaggaattgcccgaccggcttcttgaactgcacgtcggcgaacagggggccgacgggcagaatgtcggggtacagcttgaacgcggccggctcggcgtctccgaacgagttgcagacggtgacctcggcgaggtccttcgcctcgttgttccggaccaccagctggaagatggccggttggtccttcggcgcgccggcgttgttccacgacagatgcgacgtgtggagcggcggcatcccgggcgcgaactggaacgtctcctgtcgctttggccagcctttctcgtcgatgacgccgtcctgtatcagctgcggaattcttaacatcgaggcgagaaatgccgccgacccggtccagaagcaggcggccctgatgccgagcttcttggcgacctcgaacgcccaccccatgccctcgtcggcaacgagccaactgatctttgtgcccccggacgcctcaatcctcccgacgagctcctcaaggtagcacggcatgtgctgcgagagtgcgtccacgagcttgccgaggtccttgcggtcgtcgccgtctgccagcccgtccgggacgcccaccaggcgtatgccgtcgagcgacggacagccagctccgttcgccgccgccatggcgtcgagcacgagcgtgtggttggcctcggtgttgacgaaggtgacctcgatgccgtgctcgac

SEQ ID NO: 11520 - DNA, 691 bp, Setaria italica
  Peptide Sequence Number=SeqID_77494
ggatggcaacagtgatgattgccgaatatgtggaatggatgggactttggtatgctgcgatggctgcccatgggcttatcattcgagatgcattggtcaaacaaagccttccttcctcagggagaatggttttgtccagaatgtgttattaacaagctcggaccaacttcgtcaagaattgagcgtggtgcaagaggagctcaaacgtttggcattgacatgtgcgggaggctattcttaggaacttgcgattatttgctggatcggaacatcttcagctgcggaatcttattcaagatattacaatcgttatgatgttgtcaaggtcctccaaagacttgctctctcagatgcatatgtggatatatgcagtcaaatagaagaatactggaagcatttagttggtatagctcagagtgagagatcaaaaataggtaaagaagttggtgtgagccatactccacaacccggtatgttgagttttactccaatgaaagcaggagatggaagtatctggacaactttaaaagatggaggggacagtaaaacagtagcacttcctcaaacatatatgcagcagaaatttgtgtctaatgaggaacaaaaatgtatgcccagcttagtcgctgccgctgagaagaatgctgaagtttgcaatcaaactctatcagctcagtataacatacattaa

SEQ ID NO: 11521 - DNA, 572 bp, Setaria italica
  Peptide Sequence Number=SeqID_77495
tagctcccgcacatgtcaatgccaaacgtttgagctcctcttgcaccacgctcaattcttgacgaagttggtccaagcttgttaataacacattctggaccaaaaccattctccctgaggaaggaaggctttgttttgaccaatacatctcgagtgatatgcccatgggcagccatcgcagcataccaaagtcccatccattccacatattcggcaatcatcactgttgccatcctgagaagtgtccgctacagtaccttctgaatttgttacatttggagtgatttccacgttctgcaaatcattcatctttttgtaagcagaggcctttgaggctctggttgagactgctcttgaaccagcctccaaaagggcgctagaatcaatctcatattccatttcctcattatagccttctcggtcctccagttcagttttgagctcatctgattcaatgacatgatcacagagtatttgcagcaccctcagcttcatggcaacaggaagtttatagtattccgtggctaggaggcttctaccaaaactccgtccccctagattcttaacgcaac

SEQ ID NO: 11522 - DNA, 254 bp, Setaria italica
  Peptide Sequence Number=SeqID_77496
taccagcagcgtgccagatcctgtggcgttatcatgtagtgcgggttcaaaccttggcagaaaagctcaagtgatatgctctgtgcctcacacagctcgagtgagatggccagctgcaggtagatggtatcctaaaaggatgctcacttttacatgaggtatcagaaacccaggtcgaatggaggaggttcaaagctaaggtctgacgctttcttagtttccaccggtttctgtgtcgactgcgaagttctttt

SEQ ID NO: 11523 - DNA, 1190 bp, Setaria italica
  Peptide Sequence Number=SeqID_77497
ttttttttttttctacgtcattcacttttccataaaagaccaggacagcaatgcagttccattcttatatattacaggcttacagcaagaagaaaaggggggaaacaaaaaaagcagagtcacccactcataccagaaggaagcaccaagacggcatgctcacctcgcatgtcgcatggcgccaaccacagcaaaacaagggaggatcacaagacgaccacgggaagaaaccaaagctgcattcaagggccatggcagtagcgcacggtggacgcatgcaggtcgagcagacagcgctcgcagagacgcgccagtcacagccgcgcgcgctggcccagcggggccggccgtgctcggcgcccccacacgcgtacgtgcacggctccagagccgcaccccctaccagccacacctaacgcgcaacggatcctataggctacgctagctttggcttccagatttccttttcgcctctttttcgtccttcagacggctatcgccgtcggcggcggcggcgccgccgcccagagctgggcgttcttcaccttggacacgctgtttagcacccccagcggcgtcacgtcgccgaccaccgtcaccttcttcgccgcgaagtcgatgtcgaacgacgtcacaccttccatcttggagaggtgcttcttcactttcccagcgcatgctttgcagtgcagggataccttcagcacaaccacctgttcttgcgcctgtgtgttcttcgcatcagctgcttcgcttgcttcctcccgcttggcatcaacggccggggcagtctccacctcctggatctcctcctgcgtggcggaggcgaagcggccgctgagcaggtacctggacgagccggcggggctgacgaggccaccgccgtttgagacggcggcggccttgtgctgctgccccttcttgccgtcgtgcctgtgcgtcctgggctcggtggggacctgcgacagcgggctggcactggcaatggccttgtgtgaccggaccatcggctgccgctccaggctcgggcatatcgcggtggacgccggcgacgagcacgagaggcccttcatgtccctgaagagcagaggagccatggtgtagtagcgactagtgaaagcaagtagcaacacgctgagctgagcggctttggctgtgttgctgaaaaaaaattggtttggttgttgcgt

SEQ ID NO: 11524 - DNA, 677 bp, Setaria italica
  Peptide Sequence Number=SeqID_77498
ggtaatgccagagacttgagcccatgagttgtgatctccaaggcttccgatgctgatcccgtggcccggtccgcacacaactttcgagacatgaagattgtgagtcccgtcctcaattgacacgcaatcgtctccagtcctgatcttgcagttggtgaccttcacatctttgctgcgagtgatgtggatgccgtcagtgttaggactggagtgaggagcagtgatggacagacgtgccagttgcacattggtgcagtcctcgaccgacacgtggatttgttggctgttgacgattttcagatcctccaccctcaaattcttgcacaagtggaacgacaaagcagtcggagcccccttgcatggcagatccgggtttatcttgcacgagtgcttccaccacgtctcgccgttgccgtcgacggcgccgccgccgtcgacggtgagcctgtcgacgcgccggaacacgatccagtgcctcctctccttctcgctccagtcgtccctgttcggcgacgccaccagcgtgcccttcaccgcgaccgcgacgctggacctgcaggggccgtggagggtgatgaccttgagcaggtagcgcctgccgcgggggacgagcacgacggccggccgacgcgaggcgcacgccgcccgccacgccctggccagcgcgcgggtgtcga

SEQ ID NO: 11525 - DNA, 532 bp, Setaria italica
  Peptide Sequence Number=SeqID_77499
caataagtatgtgggaaggtgaccttaatttgaatcacgatcaatttgggcataattctttagtatacaatttatgtgatgtggagtgacaattgaagaaagctggtagtcacacattcttagtggatttattaacagacaacattatgtgtacatgctatcgggagaatgtctgcaagggaacaaatgatgaataccatattttagtaatacatatctcctgtttggggactatgctgaataaccttggcacatatattttatttgcttcgaagccaagtaaaacataaatatatattcttttaaagaaactaaaactgcttactctgactctgtatattattttgttggttttgcagcgaagcaaatccaaggtttacacaatcaatcttagcatggcctatggtcaggctgcaatgcttctttcccttggtttcaagggcaaaagaggagtgctgccaaattcaatcactaaattgcacctccctaaggtccacaaatctggtggagccgccattgatatgtggattaa

SEQ ID NO: 11526 - DNA, 1139 bp, Setaria italica
  Peptide Sequence Number=SeqID_77500
tccatccgacaccgccgcagcggcagacggagtgaagccgtccctccctccccccttccgcgcctccacacgctccccttcccatggcgctcgcgctgcgctgccccgccgccacctcctccaggagccccttcctgccctcctcctctccggtcccgccggcgagggtcccgaggaggccgcccgccaccttcaggtgcaactactactacggcgacggcggcgggttccgcaagaactacgaccacatccccaagcagttccgcgaggagaacctcaaggatggactgatggataattacaagaatgttcctcaattcctttatggattaagtcctgctcagatggaaatgtttatgaacgatgataatccttataatcggcaatcccagaaagtcaccgaggaaagcgtttctgctgctcggagttacgaggaatttggtatgtacacgttgtcaggcatgcatgagggccctgcaagttacagcatgggcatgggcatggggggcagcatgagcatgagcatgggcatgggcagaggtgggagaggatatagaagaatgagaagctctgctccagatctgccttcattgttactggactctcgaattatatttcttggaatgcctattgttccagcagtaactgagcttattgctgctcaatttctgtggctagattatgatgaccgcacaaaacccatctatctatatataaactccactggaactatggacgaaaataatgagcttgttgcatctgaaactgatgcttatgcaattgctgactttatcaatcgaagcaaatccaaggtttacacaatcaatcttagcatggcctatggtcaggctgcaatgcttctttcccttggtttcaagggcaaaagaggagtgctgccaaattcaatcactaaattgcacctccctaaggtccacaaatctggtggagccgccattgatatgtggattaaggcaaaagagttggatacaaacacagattactacctcgatctattgtcaaagggagtcggtaaaccaaaggaagagctcgccgaattccttaagggcccaaggtacttccgtgcacaagaggccatcgattatggacttgctgatacaattctttgtctacttctattt

SEQ ID NO: 11527 - DNA, 806 bp, Setaria italica
  Peptide Sequence Number=SeqID_77501
ttttttggtttttttggttttagttttccgtttccttattttgttattattgttggtatttaaggtctaaaagtacaatgcttctttcccttggtttcaagggcaaaagaggagtgctgccaaattcaatcactaaattgcacctccctaaggtccacaaatctggtggagccgccattgatatgtggattaaggcaaaagagttggatacaaacacagattactacctcgatctattgtcaaagggagtcggtaaaccaaaggaagagctcgccgaattccttaagggcccaaggtacttccgtgcacaagaggccatcgattatggacttgctgatacaatcttgcactcattggatggttctttcaagccaaaggatctgactgcgcagctggccaaagcacaggcgatgcggcaatcaggtaagcgtgcagcagctggagctgggagatggtcaactccaactgcaccccggtagattaggttaagtttcatcaggacggtatgctcgtcttgatgatagtgtggttctgctatacaaagaagccagcctcttgtatacatgcaaataatcatttccatggggctcggaattagatgctggatagtgaaattatctaaactgtagcataagttgtgatgtgtgtcatgtacgtgtaattttggttacactcagcccacagctattgtatcccgatagatttcattccaccagtggaaatgatagcctatgtgaattacaaccaagcatccagttcagcagatggcctggtacttattgtcttgtattacttaaaaaaaaaaa

SEQ ID NO: 11528 - DNA, 1874 bp, Setaria italica
  Peptide Sequence Number=SeqID_77502
acattccagtggcatgagttttttcccctcatggaagtaacaatattggtgttgttattgcactttgggctccaataattctggtatatttcatggacacacaaatttggtatgcacttttctctacactgattggtggtatctacggggcttatcgtcgtcttggcgagataaggacactaggaatgttgagatctcgctttgaatctttgcctgtggccttcaatgagcgcttgatcccttctgatgcaaacaagaggaaaggtttgcgggctgctttttccaggaaacccaaggcttctgatgatgagaaagaggaagagaaaagagctgcaagatttgctcaaatgtggaacctaattatcacaagttttcgtgaagaagatctcatagataacagggagatggatttactacttgttccatattgtaaagatcgtgaattgaatatattccagtggccgccattcctacttgctagcaagattccaatagcgttggatatggcggcagacagtggtggaaaggaccgtgatttgacaaagagaatgggatccgatccatacttttcctatgctatcagagaatgctatgcttccttcaaaaacatcatcaatactttagtgtttggacagcgtgagaaacttgtcataaaagagatttttgatgttgtggataagcacatagcagaggaaaccctgataagggatctaactatgaggagccttcctgcactgagcaagaagtttattgacttacttgagttactgcaaaagaataaagaagaagacttgggtcaggtcgtcattttgtttcaagatatgcttgaggtggtcacaagggacataatggaggaagagcagcttggaggaatgttggaatccatacatggtggacataatagaagacatgaaggaattacaccactagatcagcaagatcagttgtttgctaaagctattaggttccccatggaggaatcggatgcatggactgaaaagataaagaggcttcaccttctgctaactgtgaaggagtctgctatggatgtccctacaaaccttgatgccagaaggcgaatatcgttctttgcaaattctctgtttatggagatgccaaatgctcctaaagtgcggaatatgttacccttctctgtcttgactccttattacaaggaagatgttctgttctcctcacaaaatctagaagagccaaatgaggatggagtttccatccttttctacctacagaagatttacccagatgaatggaaaaatttccttgaaagagtggaccgaaagagtgaggaggagctccgtgaggacgaagaattggaagaggagcttcgtctttgggcatcatataggggacagacattgacaagaactgtaagagggatgatgtactaccgaaaagctttggagcttcaggcttttcttgatatggcccaagatgatgatcttatggaaggttacagagcaactgaactgatgtcagaggactcacaattaatgacacagtgcaaggccatagctgacatgaagtttacatatgttgtctcgtgtcagcaatatggaatccagaaacggtctggcgaaccttgtgcacatgacatattgaggctaatgacaacatatccatcgctgcgggttgcctatattgatgaagttgaagcgcctagtcaggataggaacaagaaggttgaaaaggtttactactcggcattggtgaaggcttctgttacaaaacctaatgagcctggccagagtcttgatcaggtcatctacaagataaaactgccaggtaatgctattttaggtgaaggaaagccagaaaatcagaaccatgcaatcatattcactcgaggcgagtgt

SEQ ID NO: 11529 - DNA, 923 bp, Setaria italica
  Peptide Sequence Number=SeqID_77503
ttagtttagtagtattcttccccgttctattcgtccttaacctacttgttcctgcctctcccaaatgctgaccaggcctgtagccgcctggggaattataacgttgtgttcgatttgtgccagtaaaggtccatgtgtgctgtgttcatcgattttttatgatttatcattcatgtgtatgtcttgtgtgcagtcaactgggagatgtgttggggacttggggtcttcaggtgtgccagatccgcaccaggtattctatggaatccccattcgttttctgtcattgatttttgttattcacatttgatttaatcacatttgatttagcttcaatcagtttggacttcgtgattctgtgttgtaatgttttgatttaggcatataaggtttcctcgtgggctatgttgtgtctgacagttagccttattagggtttagtttggggaatcatagtctcctattgtctgatatgttctcaattatgattcagtttttgttatttgtggtatactattttccaattttgagctcaatttggatattgatctgataatggctaatttgttgcctctaagggttctgacttttgacttggggatatatgctctgttaattacaggttagagctctattaggtccccattagcttcacatttgtggtcaatgtacctttctgtgttgtgacatccagagcgcactacaagaatttgtgttcaatgtacctgtttgtttgaaattccccctcgtgagatcgccccttttccagttcaccttcttggtgagatcatcaacctatcttttctgtcctttctcatttcggatttgattggttcttctcaatttagtcatgccttttgctttttgttgtcccctgctgtttggagttcactgatgtcattgttttctgcttcccatttgtgttct

SEQ ID NO: 11530 - DNA, 589 bp, Setaria italica
  Peptide Sequence Number=SeqID_77504
agatactgttaggatgccagaatgcttcaaagatgttagttggctcagaaccagttgcagaacatggagttacctttgcacgttgtgcttttcgcatacagatactaggtggagtggccaccacatccaggttatctgaacaagaattctgctcagttttcgtcatgatatcaggcttaaccaacccctcatctgtaagcatgtcaacctgatttgccatacaattctcttcattaccattagtggcttgaggcttttcatgtgctgcgggtcctggatgatcagatccatcagtgtcatcaggcgcatctccctctggattttcaccaaaatcaagctccatgtcattattttctatcttaacttcagtctcattctcagatgtttctgcaggaggacgcctgtagttttccttgtccttttccctttgcaaattcaacttagctatgcgagacatcctgaggatatttacacctttgaaaccatcagccttaggttttgcactatttctcttgccactttgcacattctttacaggtgtcacgaaccccttggtagaattttcatccttcttcctaaggccattatg

SEQ ID NO: 11531 - DNA, 707 bp, Setaria italica
  Peptide Sequence Number=SeqID_77505
ccagaagagctgccggttcttcttcctcagctgcaggaggtgatgatcgcgcgccatggctccggctgacggctttcgccgttctcaccgtccactcggccttctcggcgtacctggccagggacgacgccaggttggtggggctggtcgccgtcggctacctcctgatgctggtgctgctcttctatggtggcctgcctctgcctgggctccagaagagagactagccagccaagacggcatatactatcccaagcatgaagtccaggtaccatgagactcttttttctcctggttctagtttgctgcctagttttatctagattttggaggctgtgtagctgtgtttgtgtacgaagctgcgtatgtggatgaataaggttgtaggcttgtagcttcgtatgtttacatgctccaagatacatatagttgtataagcaactgaacacccagtacaggctggagggttcaagatatgcagttgttgtacacttgcactagctgggttttgttactagtattgtacatatactgatctcgaaatgctttctacggatgtttttacattttgcaacttccgaatcatcacactctgcttaggggataatctgttggtgccacctttctgtctgctgggcaagtacttgaacaaagcaatagtttctacaagacaaaatctctcaccttggaatcttcaaaaaaaaaaa

SEQ ID NO: 11532 - DNA, 394 bp, Setaria italica
  Peptide Sequence Number=SeqID_77506
tcgttgaagatgccgaacccgaagtcggcgcccgagtccctgagaccctgcagcgtcaccaggccgccccacttcgcgtcgtagaagaagccgttcccctcggaagctgccgtccagccacggcgtcacggtggctttaaggaagctctgcaccgccgggatgacgtcggggcacccgacctcctccgcgatcagcgccagccgagccgcgcgcgcgatggccttgccgtagaagtaggaggaagtagtggtgatgggggtcgacgcgaggccggccacgtcggcgcggagcgcggcgaccacctctgccacgccgtcctcgctgacgccgcgggtcgagtgccacgttggggagaccgggtcggcgcggagggaccacgcgtcgccgaccacg

SEQ ID NO: 11533 - DNA, 313 bp, Setaria italica
  Peptide Sequence Number=SeqID_77507
gtggtctgatgacccacgggatgcgcactgcaagagctttgtaagcttttcttgaaatggcggcttggtgaccaggaataagtttttcatcatgtgaactagttcgcaccatgcatgcgcgttacattggtatactcagctcactattactcaatccgtttctggggtgtgacttgatctttatctgtatgctcaagttcttccagcatttttctgtacaaacttgtgagtttcttctcacttcactttgttcctgcgtattccttgtgactatgatcttaataagtccattttacgacccccaaaaaaaaaa

SEQ ID NO: 11534 - DNA, 622 bp, Setaria italica
  misc_feature (592)..(622): n is a, c, g, or t
  Peptide Sequence Number=SeqID_77508
gtaccttggtacgtccaagtgggacgcgtgcctcgacctctccatccgccgcgtcgcctactcctccctcgccggcgccttcacgggcctcctcctcttccgtagccctactactcgctgggcgtcggttgcccttggagctggtgtggggataggagctgcatacactgaatgctcgtacttattcaatggtgctcctccaaagtggtcacccaaaggggaggacaagtaagcgccgcccatcggatcggtccatctcggtggagttttggagtgttcttgaagtgattgtttcatgttggtatcgggcatcctctggccatagtatgtcattaaagttagatgcgactcacttctgagttttgtttacacttttgtgcaaacctattccaattgtggtctgatgacccacgggatgcgcactgcaagagctttgtaagcttttcttgaaatggcggcttggtgaccaggaataagtttttcatcatgtgaactagttcgcaccatgcatgcgcgttacattggtatactcagctcactattactcaatccgtttctggggtgtgacttaagaaaaaaaaaaaaaaaaacnnnnnnnnnnnnnnnnnnnnnnnnnnnnnnn

SEQ ID NO: 11535 - DNA, 885 bp, Setaria italica
  Peptide Sequence Number=SeqID_77509
cttggaccaaaatgatagtgtcatcatcaaagatctatcccgaggattggagagggtccctgtatctgttgttaacaaaatatccaatgagtgcccaatgccctatcgctacatttcacgccttcaatatccccgtaactatcggccaactccaccagcaggttgtggttgtgtaggcggatgctcagactcaaaaaagtgtgcatgtgctgtgaaaaatggtggagaaatccctttcaatgataaaggccgcattgtagaagcaaaacctctagtttatgagtgtgggccttcttgcaagtgccctcctacatgtcgcaacagagttggccaacatggcctcaagtttcggctgcaagtcttcaaaacaaaatcaatgggttggggtgtgagaactcttgacttcataccatctggaagctttgtttgtgaatatataggggaagtgttggaggatgaggaggcacaaaaaaggacgactgacgagtacttatttgctattggacacaattattatgatgaatctctttgggagggtctatcaagatcaataccctcactttcagaagggtccgggtaaagatgatgaagctggatttgctgttgatgcttcagagatggggaacttcgcaaaatttatcaatcatagttgcacccccaacctctatgcacaaaacgtcctctatgatcatgaagacatcagtgtgcctcatgtcatgttctttgcttgcgatgatattcgaccccgtcaagaactagcataccactacaactataaaatagatcaggtacatgatgccaatggtaacatcaagaagaaaaaatgcctttgtggctcagtggagtgtgatggctggttttgttatttaagttttagtatttttt

SEQ ID NO: 11536 - DNA, 803 bp, Setaria italica
  Peptide Sequence Number=SeqID_77510
cgaaggcgagcttcctgggcacggtgggcgcgtcccccccacttctcctccacccgcctcatcacgtccctcaccaccgcctccatctcctcgccggcacccttctccctcgccgtggtcaccaccgacccggtcatcacgaacccggccaggtcctccagcgtcatctccacctccatgtccacgtcggcgggcgcgccctcggcgcccaccccgacgggctcgaacgggaacggcagcgaccggtaccggtcctccgtggccagcctggcccgcgggtcctggtacggccgcagcgccgcgtagagctggccctgcagcgcgtcctcgaacgggtggatctcgtagttgtagccccacacggcgagcacgccgccgggcttcctcagggcgcggttcgccaccgcgtagaagagcgggatgtcgaaccagtggatggaggtggccaccacgatcaggtccagggagccatcgccgccgactagggccaccagctcgtcctccgagaggtgctccggggtgtggacgtaccgcacccgggggtgcgccatggcgttccggagctggccctcgctcacgtccgtcgccaccacgctctcatagtgctccgccatgctgatggcagcctggccgctgccgcagccagcgtcccaggcgcggtggtgcccggcggtgaggccggccagcatggagaaccactccttggggtaccgcggccgcttcttggcgtacgtctccgacggcttctcgtatagtcccgccattcttgctcagcttcaactgtgtctccccttcttatcaac

SEQ ID NO: 11537 - DNA, 400 bp, Setaria italica
  Peptide Sequence Number=SeqID_77511
tagtaaaattgctattgggtggtggtggtggtggagttagctgctaatgaacagaatcggatgaacaaaagggaatggaaatcggctgaggaggggggcggtggcagctaccaaaataaaagggaaatcaatcaaagaagaaaacaatcgaaatcgaaggggatcgagatcgattgttggggatgccaaaagaggaagttctggaaggggagatagaagaactctaggacgggattttggatcctgttgtgaggaagggggctttgaaagccgccgaggccggagccccggctacccccgcaaacggagcaggctgtgggggcgcgcgcggcgggaagggtgtcgtcgccggaggtggagcccgggcaccccacgccggcggtcaggagaggggcgagta

SEQ ID NO: 11538 - DNA, 279 bp, Setaria italica
  Peptide Sequence Number=SeqID_77512
gatggcgcacggcctcgccgccagcgtcggcggacccctccgctgctgcccctccgcgtcctcctcccccaccaacgttcgacccatcctggaggctcctcatcgtcgaagcctacgggcgcgtgcctcggcctcccctccgcctgccgcgccggccatcgagggccgcgacgtcgggctctcggtgacgacgcggcgggggcgggttctgccggtgctcaagggctgctccctccacgtgccgcccgggcagctctggatgctcctcggccccaacgg

SEQ ID NO: 11539 - DNA, 424 bp, Setaria italica
  Peptide Sequence Number=SeqID_77513
tggaaaccttttggtctccttaccaacagtgctgacatcttcatgctttctcttcttatggctgtgctttgaatgcttagacgtctcaccatgcaggagagctttcttgtcactccgtttctctttcttcttttcggccttttccctttctttcttagcggtcgtctccgcctcggcaacggccacggggtttcgacaacgtaaccccggacggcgggtaggggaagcacctcgacatggccgacgggcgaccgcgctctacccccgccgagagatcacaaggattggcggcggggccggcctaatcgaccgcgaatcgttcgaaatcgatcgattcgcggcgagtagcccgccgggagccgggaaatttcgggcgcggcgggattggtttggcgtggcggctagggtttcgctacggaggata

SEQ ID NO: 11540 - DNA, 193 bp, Setaria italica
  Peptide Sequence Number=SeqID_77514
aacttgatctcatttgttggaccaatggtggctcaggaacccttggtttctccaatacagctgcttgagaatcttgattacttttaatcttgatgcgcacaacgttaccagtcctagccaagctaagaatggtaacgttgtgcgcatcaagattaaaagtaatcaagatgcgcacaacgttaccattcttagc

SEQ ID NO: 11541 - DNA, 462 bp, Setaria italica
  Peptide Sequence Number=SeqID_77515
ccagggaagtcgaccctccgaaggagtacttcttgttggcgccaagcaccacgaccatggcggcgcagagcttggcctccttcaccagctccttctggatcgagctccccggcgtcgcccgcccgacaagaacgatctctttctggctgcagagggactcgtactccgccaggtagtcgtccagcgtcctgatcagcctcagagtgttcgtcctgcacaagtctgacttgcggtaaatgtgcacggcgacgacgcggtccccccttctcgccgccttgttgagcgcccaccggagcaggtccctgccgacggcgtccatgtgcagccccaccagtatgcaccggccgacgccctccccgtgctccaccgccatgacgcctgctcgccccccgactcgatcgccgtgaggcagctcgcgcaggcgcagctccagatatcaatcagcacgagccgcgcttcgcc

SEQ ID NO: 11542 - DNA, 440 bp, Setaria italica
  Peptide Sequence Number=SeqID_77516
aatagttgttcatgtcatgctggtatcagtgttccttgtactgccaagcagccagtcttgctcaccaagatctgaacatcccatctctaccgaaaccggattccagaggtgcaaggctcttctttgggcaaagaggcgactggcacctgttgctgcttaaggacagacaagtccttgggtttttgcagaaggggaagctgtggggcttctggcagtccaacggctggagacctgaattccttcggtggatgttgaactctctgcgtcatcttgaccggttgaggatcagaccttcccacagatctcgcaggtaaaggtcaacgattcccgaagacttcggaggtaggaggtcagatcttccaactgctgccttcacagataactggggatcaaccggctgcgtgatcttcactgccggctgctgtacaactctctgcatg

SEQ ID NO: 11543 - DNA, 389 bp, Setaria italica
  Peptide Sequence Number=SeqID_77517
tacatgaagtactccggcgccaggtacccgaacgtgccgacgacgtcgctgtgcgtcagggaggtcggattcgtcggcgcccagattgcaagcccgaaatccgaaagctgccgcgacggggagttcagggttcgcgatcgtcagtaagtccaaacgaaaaccttcgctacgatcccatgcgagtgtggtggcgtgtcggtgttggcactaacctggggctcgaactcctccgtgaggaggatgttggaggacttgacgtccctgtggatcaccggccgcgagccgccggagtgcacgtagctcagggcttccgcgatccccagcgccgccttgtaccggttctcccacgacagcgccggctttgacctttcccgtggaggttgtcctcg

SEQ ID NO: 11544 - DNA, 1151 bp, Setaria italica
  Peptide Sequence Number=SeqID_77518
ctcaaccgattcactggaaacctttttggtctccttaccaacagtgctgacatcttcatgctttctcttcttatggctgtgctttgaatgcttagacgtctcaccatgcaggagagctttcttgtcactccgtttctctttcttcttttcggccttttccctttctttctggagcttcagcgaccagagtaatcgtcagttctgatttagaacggacgatgggaatgcaatgcagcattttggcaatatcataatgtatttcgatacttacacaagcacacaacaagaaacaaatgtagcatttgcacaccagtgctacaaattacagttcagacatggatgcttcacaaagatttgttcagttatcattagaacgttcattacacagttagccacaaaattgtaattgttacaacacactcctttctggacaacagttaagacctgcaatactgcaaattctatatagaacagaagactaaaaatgaacacaatcaaccaaactcagttagttgctaatatacaaagaacaaaacaaagcaaagaattcaggaccccacattatataggcatcgtatggtaacaattaaatcctataatcaacacaaaatgcacaggactggcacatatcataaaataagaaagcccaaatggactgacctctcagcagcacagttaaaaatacgctcaaaatgatcgaaaaaaagggtaatccggtgcacaattctcagttcaaattagcaaaaacgtgaacaagatcaattacaaagttcaaatcaaatataacataggatacaatgctaatgccactgccgtggatacaatatgaaattctacaatgaatgtattaaattcaattggtatgaaaataccaaagattactacataggcaacattttccaaagaagattttgaacagcaaaaataattgctggtctcggaaagacttcatggttgacaacataactatccttcaaaaaatattatggtccaaccaccaaattgggcatttaccaaatctggcaggatctctccttgcctccccaagctatttgaggggagtttacatgtacacaagaaacacgcaacagttcaatctaattttttattctagtcttgtttcaattccaatgttatcatgcaaccaagat

SEQ ID NO: 11545 - DNA, 2049 bp, Setaria italica
  Peptide Sequence Number=SeqID_77519
cgtttcttcgtgatgctttactgttatcatgtatgatctgaagcttccagaaagcttgttgttgccgaaaatgtggctctgatgattctgtactgtacacggtcccggtaacaaaaccaaacgacaaacaagagagataccgggggggaaacgaaaaaatacatgtgcacaaaatcgcagtcgtcaatcagtcgaagctggacgatcggctccaccgttcccgcaggtactcctccaacgggctgaggccgctgctgtgctccgtgctagagatggactccgagtcctccacgtccagcagcgcgaggcccaggtgcgacctcacgttcgccgccgggtacgcctcgtcgtccaggcagtccagctccgcggcgccgccctggtcggcgatgctcgccgtgctctcgcctcgtagtatgctcagtatctgcgatatcggcggcctgagtcgagccgacctccggatgcagaggcacgctgccgtggccatccgcctcatctccgcctcgtcgtgctccacgtccagcgtcgggtccagcaggtccgagatgtcgccgctgctaagcaccggagtcgcccacatgacgaggctctcctggcccttgggggacgacccgtcgccgctgatgggcttccgcccggacaggagctccagcagcacgacgccgaacgcgtacacgtccaccttgtcggtcaccttcccgtacatgaagtactccggcgccaggtacccgaacgtgccgacgacgtcgctgtgcgtcagggaggtcggattcgtcggcgcccagattgcaagcccgaaatccgaaagctggggctcgaactcctccgtgaggaggatgttggaggacttgacgtccctgtggatcaccggccgcgagccgccggagtgcacgtagctcagggcttccgcgatccccagcgccgccttgtaccggttctcccacgacagcgccggctttgacctttccccgtggaggttgtcctcgaggctgcctcgggggaggtagctgtagacggagatgaggttgggtccttccacgcagacgccgatcagcgggacgatccggtggtgctggagcttggtgatgatgtccacctcccggaggaagtccttggacgcctccgccgacgccttggacagcttgatcgccacctgctgcccgcaggcgaggctgcccctgtacacccggctgttcccgccgttcccgatcaggttctctgcggagaagtggttggtgtagtcgtagagctcctcgtagcggaaccaccggcaccgcgcgccgccgccgtcgagcattgccttgagctccgacgcgaggcccgcccctgcgtgcgtccccggggactccgtcggcgcggtccgccggggcaggctcatcacccactgcaccaccgactgcttccgcggctcatggtccttggcagcgctgggcgcggggacggccaccgcagcggcggcggcgtgctcgcggcggagcagcggccacccgagcctctgctctagcgtcacgccgccggaggccgtggtggcgtcgtcgaaggacttcgtcgctggtgcggccgcggccgcgtgaccgcatccctcggcgtcgaagtccatggaccgcgcgctccggttcgggttggggatgatcaccttgggctccagccccacgctcgggtgcagcaccgtgcgcaacaccggcttcggctctgctccaagaggcggcttgggggcctcccggacgaagacgggcttgccgttctggatggcgacgacggtggtcgtcggcggcagcttcttggcgcagtacttggccagggaagtcgaccctccgaaggagtacttcttgttggcgccaagcaccacgaccatggcggcgcagagcttggcctccttcaccagctccttctggatcgagctccccggcgtcgcccgcccgacaagaacgatctgacacaaacttcccaatcaatgatagcatgtgagatgaatcaggagcagcatggcaccacacaactccgaagcaatcaacgcgctgctcgtccggcccatcctgctttgct

SEQ ID NO: 11546 - DNA, 2140 bp, Setaria italica
  Peptide Sequence Number=SeqID_77520
gtcagaatcaatgttaaatactggagattgtggatagaacagatacatcgtgtctaacaacagtaactgccaagaaataagtcacttgcagttcaactgcttacataaatgagaaaaagaattcaacaacattacagtaagtttgccataacataactgtcctgaaacgaagaaacactctggaacagagctggaaaactgcggcagggaaccattatctcccacatccacacagctctctcccaaatctcttctacttctcatctacctcaccagacgtttaaaatgggacaacatatggcaactggtagatatggaggtctggcaaaagagttgccctgggttgcaacgaaggctgctgctccatcgattggaacggtactgaacaatcacttgctctgcaggtcatgctggcatcagtgttccttgtactgccaagcagccagtcttgctcaccaagatctgaacatcccatctctaccgaaaccggattccaggtaacaaacagatctctgtacttcttctcttttttttcagccttgcggattttctttcgatcggaccgggacagcttcggctcctgaactggagcagattctgcattccttccagaggtgcaaggctcttctttgggcaaagaggcgactggcacctgttgctgcttaaggacagacaagtccttgggtttttgcagaaggggaaggctgtggggcttctggcagtccaacggctggagacctgaattccttcggtgccacctttgtactaaccgcatagctttttctttgaatatcctcagatggcaactgaagatctttctgcaaaatcttggcaggtggatgttgaactctctgcgtcatcttgaccggttgaggatcagaccttcccacagatctcgcaggtaaagggtcaacgattcccgaagacttcggaggtaggaggtcagatcttccaactgctgccttcacagataactggggatcaaccggctgcgtgatcttcactgccggctgctgtacaactctctgcatgacctttgcagggggttccgtaactgatcgtttttgtactgcttgagaatcgccattgatcctttgctgtgcagctgcagatctcccatttactttattgtgatgctggattgaattttgcttgctcaacagggaacttgatctcatttgttggaccaatggtggctcaggaacccttggtttctccaatacagctgcttgagaatcttgattacttttaatcttgatgcgcacaacgttaccattcttagcttggctaggactgggcagcacaacctttcttctcttgctgctgtcctgcgagctctcaggagagtcacgcactgtttgtataaaacaaggagcaccaagctcctctgagagtccactcttctccaactgctcaaccgattcactggaaacctttttggtctccttaccaacagtgctgacatcttcatgctttctcttcttatggctgtgctttgaatgcttagacgtctcaccatgcaggagagctttcttgtcactccgtttctctttcttcttttcggccttttccctttctttctggagcttcagcgaccagagtaatcgttcctttgtcctgactaatagagggagtttacatgtacacaagaaacacgcaacagttcaatcaatttttattctagtcttgtttcaattccaatgttatcatgcaaccaagatttgaaaactcggagttaaccaatctcaacaagcggtcatgccacttaaaattcccaatcgacctgaaagacctcgcgcagctaagctacacgagattcggagacttccctccgccgcaagggttagcttcccggcacgtgcgatccccaaatcacacacgcactacccacagatctgatcaaaaccaacaggcaagaacaaacgatccggcacgtgcgtgtgtaaatccgatggttcaacaaaccttagcggtcgtctccgcctcggcaacggccacggggtttcgcacgtaccccggcggcgggtaggggaagcacctcgacatggccgacgggcgaccgcgctctaccccgccgagagatcacaaggattggcggcggggccggcctaatcgaccgcgaatcgctcgaaatcgatcg

SEQ ID NO: 11547 - DNA, 614 bp, Setaria italica
  Peptide Sequence Number=SeqID_77521
ttccgtgcttcctcccgcgcccgcttccgccgccggcgccggggacctctccgtggaggcggaggccggacgtggacctcgaggggaacgcagtagaccgggatccgggaagctgcggcggcgtccctaacggcgtcggcgactcgttctccgtgtccctcatcgaggcgcagtttgggccactcttgtagctgccactgcaactgggccgggcggagctcagatctgatcccaaataacctgcagccggctgcagccactcctcatcggccatggatttcatgaaggttttcgatcagactgtgcgtgagatcaagagggaggtcaatctgtgtaaggttgtcttccccgagattgagcagaaggcacttgatgccacaagtgatgaaccatggggccctcatggtagtgcgctttcagagcttgcacaggctactaagaagtttgctgaatgccagatggtaatgaatgtcctatggagtaggcttgctgagagaggcgcgaattggcgtcatgtgtacaaggttattgcttcttcatgaccattctatgatattatcttttcagcagtgatgggtctctattctgtaatttccccattggccatactgacc

SEQ ID NO: 11548 - DNA, 467 bp, Setaria italica
  misc_feature (425)..(467): n is a, c, g, or t
  Peptide Sequence Number=SeqID_77522
accagttcggcttcaaatgagccttgagaaatacctgggagatccgattatccgctgtttcctctgctggcctgccccttctatatatgcctattgatttaatttccttctgttcgttctttggtgatttcgccactatacattttgtgccaaccaatcttgccctgtattgtcactcttgcatggtatttatcaggtttgtggggcatgatatttattgcgtttgtgggtaagcatacaactccccattctgaccccgtttcagttgggatgatacgtccggttgctatgcagcatgtgtaaatcctgtggcttccctctgcagtctgtctgtctgtgtaattacagtaccatcttgcaatgcttgagattttgtttcagtaataaggagaatctgtgcccttggtagaaaaaaaaaaaaaacnnnnnnnnnnnnnnnnnnnnnnnnnnnnnnnnnnnnnnnnnnn

SEQ ID NO: 11549 - DNA, 668 bp, Setaria italica
  Peptide Sequence Number=SeqID_77523
tttttttcaggctgcaaccgaagcttgaattacgtgacctccatacaaatttgtagaatcacagtgccacgaattctaagagttacatcgtagataagttaattatggtctgggaaggttcttttcccctaaacaaatggacacacaaaaactggaacctcctcctgatcaaaggttacaaggcaagtaaaagaacaaaatctgaagagatgtgtgtctatgtcttcagctttaggtctgggtcggacggcagcgctctcccgcggtggttgaagatcatgaaatccaggttagccgggagcgagacgatcctattctcctcagaatgtggaagcaccgagcaaaactttgctggaacagcaaggcctgcccacatgcacaaggccaaccccaggagcaactcaatcatcacatccatgggtggccgagtgaactcttcctccgtgatcttcagcaccgtgcgatactggatggtggcgtaggcggcgtgggcgaggatggcgccgccgaggacgcccaccacgtagccgatccccatggcggaggcgaggctggctgtggcttccccctgctcctgctcgccgcgccgcggggaatctccttcgggttcgatgcggttcgatgcctcgacgagcacgttgctctagttctttacgttttttggtttt

SEQ ID NO: 11550 - DNA, 2234 bp, Setaria italica
  Peptide Sequence Number=SeqID_77524
tcctcatcggccatggattcggagctcagatctgatcccaataacctgcagccggctgcagccactcctcatcggccatggatttcatgaaggttttcgatcagactgtgcgtgagatcaagagggaggtcaatctgaaggtgctaaaggtccccgagattgagcagaaggcacttgatgccacaagtgatgaaccatggggccctcatggtagtgcgctttcagagcttgcacaggctactaagaagtttgctgaatgccagatggtaatgaatgtcctatggagtaggcttgctgagagaggcgcgaattggcgtcatgtgtacaaggccttgacaattattgagtacttgatagcaaacggttctgagagggcagttgatgacattcttgaccattattctaagatctcggttctttcaagttttgagtatgtggagcctaatggaaaagatgctggaataaatgtgagaaagaaagtagaaactattgtgggcatcctaaatgacaaggagagaataaaggctgtgagagacaaagcggccagcaatcgtgacaagtacgttggactatcgtccacagggataacatataagtcaagctcaaccgcatttggcagtaactacagttcaggcgaacgttatgggagtttcagtggcacaagggaaggtgactcattcggtgacagttacagggacaaagaacctgttaaaacctccacaagtaatactggcagccagaaatctggcagtaagttgagaaaggacacaaagcctgatagaaggaatgaggattatagttcgcccagctccttgaagcccccatctaatacaaacaacagcgaggacgactttgatgactttgatccccgtggatctaatggcaaagctactgctaaatcaagcgaggtggatctgtttgggccaaacttgatggacgatttcattgatgcatctccagcaacagacagtgccgtagaaccacaggccgatctgtttgctgatgcagatttccaaacagcaactgcaagcgcagagacagctgcaaatacggatgtccaggataacgttgacctttttgcggaaaagacatcttttgctgcagcatttctgccacagactgggtttattccaccaccaagttctgggatatcttctgaagtaaacacttcggtatccaagaaagcggctcctgaaccttttgatccttttggtgctattcctttgaacagtttcgatggatctgacccatttggtggcttcagctcaaatgccggatcatctactgtaccaccacccacccacagttctactggaaatgtcagcacatcaagccagaaccttcaggctgcatcagactttggtacctttgtatcgaacaatgaggaagcagctaaagatccatttgatctttcttcaactgtcaatgtcggaaaaacacctttggcagctcccaagacagatgcatctgattttggtgcctttgtatctagcactgaggaatcagcgaaggacccttttgatctttcttcgagtagcaacattggaaagacagaccaaacacctttggcagctcccaagcctagcgcaaagaaagaaaattttcaggtgaagtctggcatatgggcagactccttgagccgaggattgattgatctgaacataagtgcaccaaagaaggtgaacctagctgacattggaatcgtcggtgggctcggtgatgggtctgatgagaaggccatgccctcttggaccatgggcacggcatctggcctaggaatgtctggtatcccatctactcaaggtggaggcatcgagagcttagcaaactacaacaagcaccagttcggcttcaaatgagccttgagaaatacctgggagatccgattatccgctgtttcctctgctggcctgccccttctatatatgcctattgatttaatttccttctgttcgttctttggtgatttcgccactatacattttgtgccaaccaatcttgccctgtattgtcactcttgcatggtatttatcaggtttgtggggcatcaattgtattattttagttcgtctttgtgggtaagcatacaactccccattctgacccccgtttcagttgggatgatacgtccggttgctatgcagcatgtgtaaatcctgtggcttccctctgcagtctgtctgtctgtgtaattacagtaccatcttgcaatgcttgagattttgtttctagtt

SEQ ID NO: 11551 - DNA, 610 bp, Setaria italica
  misc_feature (1)..(40): n is a, c, g, or t
  Peptide Sequence Number=SeqID_77525
nnnnnnnnnnnnnnnnnnnnnnnnnnnnnnnnnnnnnnnntttttctagaatgaaacaaaatttcacatattgaagctccatatgaattcagatgaacacttcggaaatcaaacatgcatacaacagattcgcatgagttgagtattacaagaacaatgtcatttccaaatgctatataagcagagtttcatgagcggttgacaagtgggcatgtctccctgattacaaactacatgatggtcatgcctgaccttatgagctcagactggtaaaagaaaaacactggtgcttggtaaagtttgctccagctactttaccttggagatacagatcccggccggccatctagtggtggtggtcgccggaggggcggtagaggcggttgtaggcggcctcgcccactaggtagatcccgaaggcgacgatggcgatgccgaggcccggggtggcgtggcgcagctggttccccaccatcgggtgcctcctccactcgtccctccgccggaagaactccccggtcgcgttcagccccttccctccgctcgccatcgcctccgccgctctctctctttctctctcttgccactgttagaagcaggaagaaggaag

SEQ ID NO: 11552 - DNA, 417 bp, Setaria italica
  Peptide Sequence Number=SeqID_77526
gcgcgctcgccgacgccgagcgcgcgttcgaggcgctcccggaaagggacaggaacgccttcgcgtgggcggccgtcatcgggctctggagccgcgcggggcttcacgccagggcgctcgacgggttcgcggccatgctcggggcgggcgtccccgcggacaactttgtcgtgcccaccgtgctcaaggcgtgcgcggggctcggtctgttccgcgccgggagggcggtgcacgggtacgcgtggaaggccgggatcgcggaatgcgtgtacgtgatgagcagcctcgtggacttctacgggaagtgcgggcaggtggaggacgcgagaggggtgttcgacgcaatgccggagaggaccgtggtgagctggaactcgatgctcatggcgtacatacacaatagcaggattgacgagg

SEQ ID NO: 11553 - DNA, 332 bp, Setaria italica
  Peptide Sequence Number=SeqID_77527
ggctgcggcggcgtgggccgctacctcctccgccacatcgtgtcctgccgtcccctccacgccaaccagggcgtggccatccgggtggttggcgtcgccgatagctcctccctgctcgtcgccgacgacgtccactccagcggcctcgatgatgcgctcctcacccagctctgcgccgccaaggccgccggctctcccctgtctgccctgctcggccaagggcactgtcagctgttccagaaccctgaggctaggagcaaagtcattgacgccgctaccacgcttggaagaacaactggaggattttcaaaagttggtctccaacttccgtc

SEQ ID NO: 11554 - DNA, 801 bp, Setaria italica
  Peptide Sequence Number=SeqID_77528
cggcccactcattgggcccacacgccagagagacgagctccgtgagtgcgagtacaccacacgagcacacggcggcggaggattcccggcggctcttggcggattcagcggccagtggaggtgcgccggccgcggcccatccagttcctagcccctgcccttaattccctcccgacgaatcgaagttgtggaaatgccggcgccggtgaagtcggtgctccccgtagtgctcctcggctgcggcggcgtgggccgctacctcctccgccacatcgtgtcctgccgtcccctccacgccaaccagggcgtggccatccgggtggttggcgtcgccgatagctcctccctgctcgtcgccgacgacgtccactccagcggcctcgatgatgcgctcctcacccagctctgcgccgccaaggccgccggctctcccctgtctgccctgctcggccaaggttgatattgtcccatttgattctactcaccttccttgccatgttgtagaataatagatgcttggatgtgcaatttcagggcactgtcagctgttccagaaccctgaggctaggagcaaagtcattgacgccgctaccacgcttggaagaacaactggttggtttttctgtgctcaactgcatatacacatatcttcatcttcctctacctccagtatattttgctctctgccttttatgttccaatctgtaggcaccaaaaagctttacatcctgctgttttatctctgatagatttgaatcatatttttggtattgtacccacatttatcattttattgtcacg

SEQ ID NO: 11555 - DNA, 1466 bp, Setaria italica
  Peptide Sequence Number=SeqID_77529
tacgttagggtaccgtacttaaccttaccttaccgtacctaactaattacgttgttcctgccgtcccctccaccccaaccagggcgtggccatccgggtggttggcgtcgccgatagctcctccctgctcgtcgccgacgacgtccactccagcggcctcgatgatgcgctcctcacccagctctgcgccgccaaggccgccggctctcccctgtctgccctgctcggccaagggcactgtcagctgttccagaaccctgaggctaggagcaaagtcattgacgccgctaccatgcttggaagaacaactggcctggtactagttgactgttctgcaacctatgacactgttagtctgctgaaggatgccgtggaccatggatgctgcattgtattggcaaacaagaaacctcttaccggtgcttatgaggattttcaaaagttggtctccaacttccgtcagataagatttgaatctactgttggagcaggtttgcctgtgatagcttccgcaacccgtattattgcatctggagatccagtttcttgtatagttggcagtctaagcggtacacttgggtatgtgatgagtgagctggaggatggaaagaaatttagtgaagttgtgaaaaaagccaagtctcttggctatacagaaccagatccacgtgatgatcttggtggaatggatgtggctagaaaggcgttgatccttgctaggcttctggggcaacaaatcagcatggacaatatcaatgtcgagagtttatatcctagcgaattaggacctgatgcagtatccacagaggacttccttgaaagtggtttggtacaacttgacaagagcatggaagaaagagtgaaagcagcatcttcaagaggaaatgttcttcgctatgtctgtgagattggaagcacagggtgccaggtaggccttaaagaggtcccaaaagattcagcgctcggtagattgaggggaagtgacaatgtggtggagatatacagccgatgctacgagagctcccctctggtgatccaaggggcgggggctggcaacgacaccacagctgcaggcgttcttgctgatataatcgacctccaagacctgttcaggaagacggcatgattagtgcccacccccatcctgttagtaccagagcgttcgatagctgtacgtaatagccatccttgagtaatgagtggtggtgtcctctgtgggatgagagggttggtcgaggagttgaggtcgtatggacacttttgttcgtccagctgctgcatactgttgcgagcaaattggcaaactgcgacatgcgttgccgagttttttccaacgacgacaacaacaaagcgtttcagagtagtgtagagttgaaacctaacaagaaccaagagtcataaatcagagttcgggttttcaagcacttctatccagagctaaatctttgggcatattccatcccttc

SEQ ID NO: 11556 - DNA, 385 bp, Setaria italica
  Peptide Sequence Number=SeqID_77530
catctgtgtccctgcactcgagcacagcacgcacgaggagaagtgaggcttgagcacgccgccggcgggcgcaatggtgatggagaagcacgagcaggcggcggggaaggtgtctgccttcaacctcgccgaggccggctacggcgaccggccggacctcgacgacgacggccgcgagaggcgcacgggcacgctggtgacggcgagtgcgcacatcatcacggcggtgatcggctccggcgtgctgtcgctggcgtgggcgatcgcgcagctggggtgggtgatcggccccgtgtgctcgtcgccttctccgtcatcacctggttctgctccagcctcctcgccgactgctaccgcgcaaccccgaccccgtccacggcaagcg

SEQ ID NO: 11557 - DNA, 455 bp, Setaria italica
  misc_feature (1)..(56): n is a, c, g, or t
  Peptide Sequence Number=SeqID_77531
nnnnnnnnnnnnnnnnnnnnnnnnnnnnnnnnnnnnnnnnnnnnnnnnnnnnnnnncaaaaactaaaacaaataaggaatagactctgatctagaagatgaggccgccaaggttcagccatccagcgagacgagtccagtggttgtgaatgatggaagcgcagaggagccttctcctgcacgtacagacagtgtgattgaggatagcctggagaaagagcaggctgctgaagagcaggctgctgccagtgaagctgtggaagatgctggtgccaagaaactcaaagaggttgaaaatggtgctgctgctccagagctggctccagaatcaagcaatgaatataatggtgctgatgagactaaaggtgctactgaggttgctgaccatgaagaggaggctggtgacagtgacataattgaggcagaggctgtggcagatgttgaggatggggttgg

SEQ ID NO: 11558 - DNA, 1054 bp, Setaria italica
  misc_feature (1006)..(1054): n is a, c, g, or t
  Peptide Sequence Number=SeqID_77532
taagtaaaaaaggaaaacaaatggaagctcttgtggataagctctgcaataggtttgctggtgtaaatgatgttagacagtgggagtatatctcttattgcctctctcagctaaccttcactgaaaagggtctgaagaaactcatcgacaattttaagatgtttgagtatgcattatctgaagattctgtgatgaaccacttcagaagcgtgatatcaaagtgcaagaagtttgcgaaacctgagctcaaagtttgcatcgaggaatttgaggagaaacttagcaaggttcatcaggaaaagaaagaacaggaagagacaaccaaaaatgctgaggcacacagacagagaattggctcgcttgacgaagttctggctagtaaggaagttgggcagagttgtggacattctgttgaagaagaaactagtgagatagttgatccttcagtggatggcagcactgaagataaggagaacatgccagaatgcagtggcaatatttctacggaaaattgtcagacatcaacatctacaggatcagaagatggtggcgaagagattcagtcaaagcaacctgtccgcaaaggcttgtcaagatcaagggcaaagaaaaccagagatcctgtcgtagaggactcagcagacagtgctccagttagacgctcaactaaaagacaaggaaggtgacgctccaacgctccttgaatttattgcgagtccagcttttgggtaatatggacctagtggcaactccttttgtggctgtgcattgtgttggccacttggccttactcagtgatgatctcgccttgagatcctggaataccggatgtgctggtgcccttgacgattcctcaacactggaaatctaaatccaacggtggcgatctcccgtgaaattgtacgaggaagtctgttaactgctccttgtaacttgtaaggggcacttgtatctgtatttgttggttgcattagttctcctttcaaatcgactgcatgcttaccgnnnnnnnnnnnnnnnnnnnnnnnnnnnnnnnnnnnnnnnnnnnnnnnnn

SEQ ID NO: 11559 - DNA, 704 bp, Setaria italica
  Peptide Sequence Number=SeqID_77533
cgccccactgcctccggtcgcaattcgcaccaccgccgccgcctcccagagaaagccgtcgagtttaggagaaagtcggaggggaagagaaggatgggcttcgagaaggagatcctgagagacggcaccggccccaagccaacaaagggccagaaggtcaccgtccactgcaccggctacgggaaggatcgtgatctatccaagaagttttggagcaccaaggacccagggcagcagccattcagtttcaacattggtttgggttcagtgatcaaaggctgggatgagggagttatgaccatgcaagtgggtgaagttgctcgtatccagtgcaccccggactatgcttatggagccaatggattttcagcctggggaattcaaccgaactcggtgctggtgttcgagattgaagtcatcagtgcccagtaattcgcagtgcaattctggatggagctatggagcattggccatgccttaagtactgaaataattccgttgtcacctcatgctacacagcagactggtgtccttagtgaatcctgtgaaacttttaacacttcgtggccgtgatatattgagtttatggtgtttcttgtggtacaactcttggtcaagttctcgtcgctgacagtaaaccgtttactttcgatgctgtccttgccttatgcttgtcaattagtactgtatatgatgacaaaatt

SEQ ID NO: 11560 - DNA, 985 bp, Setaria italica
  Peptide Sequence Number=SeqID_77534
agggtaaattaaatacgacctaagaaggtctgtgtgctgatgggtcctgtgagctgtctgacttcagcagagaaattaagaaagcctttgatgccaacccaggtgatactctgatcgacaacattcacactttgtttgaattcttccgtctaaaaccaacaacagattttggaatgcttaaagcgacaagtgcagtgttgcaggtttgtgataataattctgaaaaatccactatcatacatttgtgggttaccagtgggtgtcagctttaacatatctctgtggaacatatctagtcatcatagattgtggctccgcatgagtattggtgagtctgtgcaacataccttcttagacatttgcagtgttgaaggtaatgaggaggtgaagacctgttctatggttgttcctcttgattctactccaatggcgcattcatttgttctaagagtatgtctgctgatggaatgttcatatggaagtatcagcaccaaccagggaggacatggaggaccgagtgattgtgtggtccaactctccgatgaactggatgtttattttgtcaggattgggcaaaggtagtcgttaaaacaagtgatcatatgctctccgtcatgcgcattatctccaacacttgcactacgaagtgtggatagttcgcatgctttcacaacacataaggtggattagaacagcagaccacaaatgcgagtatcatgtaatccatcaaaatactcatgtccgttttggatggatgaggcaagtgactgggaagaattcacacctcataaaggtccaggatctcagagaagaaagattcttttgtgctgagatctttgtagcggtagcagaagcaagcagatgtgccacatatttcataactgtatgaatagtttggaggtgcaaatggtttgcaatcttgttcaagcgcttgaagtttgtcaggagctactgcttctcttggattgtgagcctgatgatagaa

SEQ ID NO: 11561 - DNA, 490 bp, Setaria italica
  Peptide Sequence Number=SeqID_77535
ttgacagaaaggagacaatacacacactagtggtatatataagggctacatcgaagcactaggagatgcgaaagatctaatgtgaaaagccgaagatagcaaaaaacagcgaaatgcgctgcttcttcaggtatgtagcaaagcaggtcttattggatggcatctaaggtccctttcctcttgatcctcttcttgatctccttctccagctcctcagtccctcccacctccttcagctcctgcagacattgttcatagacaatgaagttagttgccaaaggtcaatttgaaatctgcatgatcaaactgatgttacgaatgatgaatcagagctgagtccaaagtaaccttggggccgaggaagaggccgtagggcacgccctggaacttgtccatgtggtgtatctgcaagcacccacagagtagcagcagctaagagccagatcccggcaaggttgtaaaaaaccggtaagtaagtaacttgttacta

SEQ ID NO: 11562 - DNA, 948 bp, Setaria italica
  Peptide Sequence Number=SeqID_77536
tactggtccaatagcctgtaactccaatatgaattccgtcgatatgtcaacacttgcatttttaacagtgtcttctgcaatttccttgctgggagccgacaagagaccatcatcttctcttatgaagtagacacagtcattctctgatgctgaataacagcaatcatcaccgagagagacacaggagtccaaatattcaccattcactatagtgacattccgaaactgcaacctcttacaccccagcacatgaatgaaactctcagagctaggtcttgagaggagtttcccctccctatccagcaaatataacttcccacccttcccatcatatataaagtgatcaaatctttcactatcaacaatcaagggcttctgaggtgaaagactaaatgttgaaccctcctgataataaatctgatcattcaatattactggagaaatcatgtgtagaagatccttgtcttcatcgttggataaaagactccgagcagatggcacaaagaactcaactattgctagtaagaagtcaagtgccacaagaaacttgggtcgctgaacacatagatagagagatgacgaagatttccggaagatggcatcaagaatgagcagttggggggattggctcaagacctagatccttttgtattctttgttcacctgaatcaagttcattatgattatcatagccatcaacagatgatgtgtctcgaacagttgcagatttcccaatggcaagccttaactcatcttttgttccttcacgaccatcaaaaacagaaaagcctttgagggtagcgtacagaaaactctcctctcgtgtgtttgatttgtatagaagccatgcgccactcgcctgcacactagccagaggagaatctcttgtcgatcctgaatgcagcgaaagctcaaccagatttactgagacagaaaatttattagata

SEQ ID NO: 11563 - DNA, 889 bp, Setaria italica
  misc_feature (7)..(7): n is a, c, g, or t
  misc_feature (13)..(13): n is a, c, g, or t
  misc_feature (830)..(830): n is a, c, g, or t
  Peptide Sequence Number=SeqID_77537
ctcgtgntagtcnttttgtttttttttttttgtcaggcaaagccattcacggatcaaagtgattgatgctggattgcgttttcggttacaaacggtatcatgataatattcctcctttcagttacaaacggtagtaggtaggagtgcttcagaaacggcagtgacaattaattgctacgcagtttcataatgttttttattttctttcttttcggtgcaaacactatttgtgccatatattgaccctctgatcccgaccaaactgaagaggctcaatggcaaaatgacctctgctacttaactttgccgtttagaaatgcttcacgtattgcttgtaacctgagtcgcaacttgtccagcggtggcaggtgatccttcaccaccggcgagctcaagaaattccccatccacgcagacagggaagggagcttctcctctgttatcatcttgacgccggtgatctcctcatatatcggaatcacatacgacagcgggccaagtgataagtccacgaagccgatcttctcgccggcaaagaatcgcttcccatcaagctccttctccagaaccagcagctggtctatggcagctccgtgtgcatcctcctgttgttggccttgcgtggtgaaccacttccaaatcggtggcgagagcttatcctggagaaatctaacccagaaacgggccatggcgcgctcgtagggatcctctggtaagattgggtcaccacggtccttccacgcctcatcgatgaactggataatgacctctgactctgcgatgggtttaccttgatagaccaggacaggaactttctgtgcacggggttntactccagcagctggtcgctcttgttgctgagatcctcctgatgtagtcgtactccacg

SEQ ID NO: 11564 - DNA, 268 bp, Setaria italica
  Peptide Sequence Number=SeqID_77538
ttactcagcttgttttgtcattttcttttagtctcagtaggtcaattttgtaggctaccaattcagaactttcaggtttagcttatgacttgagctgaccgtgattttaacattctgtacctaaaatatctgttacatcgacctattacctaattctgatctttatgaaacatacagtttattgttcataacttcgcatgagataaattaatgggacaggaaacccatgataataacgagattggagaagcatgttcaaaacttgaaa

SEQ ID NO: 11565 - DNA, 2244 bp, Setaria italica
  Peptide Sequence Number=SeqID_77539
ggtgctggttggcttagttcctttatcaaggctttgttcctctggtacagttcagagttcttgtatatctcactgaagtccacaccaagaatctgttcctgagagactgtagtcacttccagcatccatgttgccggattgtagccatctttaattttgctgaccccttgaatcccctcgaaatacttgataagctctgaagaatgatggccaagtggaccagcatagatctcttctccaccacgcttcatcaggaaaagctcatcgaatgcttcaaatatgtcaatgctaggctgatgtatcgtgcagaccaccgtcctaccagtatcgacagtgttcctcaccgtccgcatcacaattgcagctgcccgggcatcaagccctgaggttggttcatccataaagatgattgacggatttgcaacaagctccacagcaatggtgagccttttcctctgctcagttgacaggccattcactccaggaagtccaaccaaagaatccctcagtggtttgagctccacaagctccatcacctcctgaatgaagatctttcttgtgtttgaatctacatccttgggaagccggagccatgctgagaaaagcagtgactcatagactgtcacctgtggcgagtggatatcattttgttcacagtatcctgatatgcgcgcgaaggtctcttgtttcttcgggtatcctgaaatgctgatgtctccttcaatgtatccacctgtctttctcccagccagcacatccatcaaagtagtttttcctgcaccactgacgcccattagtgccgtcagcacaccaggcctaaaagacccactgacacctttgaggagctccagacgatcttcttgtacaccttgtgctttcatttcctgtggcatgtcaacagagtatctgatgttgtcaaacgtgagtgaaagcgggacaaatggaaggatcatccccctttagctggggaagaatcatcttccccgattgctgaatcagtttcagtgttggctcttgttgatcgatgacttcttgcagataccaagtgattgccatccagaacctcgcctttcatgttggcatgcttctcattcagctcctcttcagatactgatggccgcgagttgccatatggtttaaggtatgtaagggcaagagtgaagagagcattgaagagtatggtgaacccaaccattgcaccaaagccaatccagtaccactttgcttctgtgaaaactccacgggacttaaggacttgcacacctagggtctcattggaggcagtggcattcaatattttgtcccagctgtgccccaacatctcattcactgaaatggcattctgcgcatacatcattggggagatccagtagccccagatccaccatttctttatttttctcttactagaataaatcctcccaacaccatgacaacaagcaacataaacgacgcaaagacattagcaacaatcatgttcctcgctgccccaccaataaaccggaagagtgctgctgccatctgattgactgctaacagaagcagatactgcttgaagaacctgccgacatttgggtcaaatccaatgacatagtatgtcaaaaacacataaccgccaacctcgataaatgtgataggtatcttgaggatccatgagggtatagtgtaggaccatgccggaaagaaaaggagatccctctgtttgaagaatacaggcagcttgaagacagtgagtgccagctcagagaaaccattaaacatgatcataagcacgccaaagaagagagcacccatgtagaggcccccatcggtcactgtgtcatgcttcatcttcgttcggaagaagagagtcattgcaattattgacatcagcatcagctggaaagttctgaacatgtagacaaaagagttcctcttcatgagaaggatctccctgtctatgtttgctttcagcagctccttgccactcacaccatacctcgtggtggttagtgcggctgggtggcttttgctcttgtcgaatggaacagcaagttcatttgctatagccctcccagcgtggaatgacttgaacgcagttgcaaattccttcaccggcacaaacctgtagggctcatcacgccgcgcccagtactgtttctgatcttttttcgaagtcacttcttgcaagaagtcagcaacacccttcctctcagggcatctgaaacccagggactcgaaaaactcaagaacttcctctcagat

SEQ ID NO: 11566 - DNA, 279 bp, Setaria italica
  misc_feature (275)..(275): n is a, c, g, or t
  Peptide Sequence Number=SeqID_77540
tcaaacagatatgcaacaagacccgacgtcgtagaggtctgggatgcaactgctgcagatccaaaattgctcgtatatctcaaagctttgagatatacagtaccagtgcctaggtacaggtactgtatttctgtaggctttgagatatacgagcaatacagtacctgtacctaggcactggtcccagaagcgaaagttcctgcaggggaagagaggtattgagaaacagcctttccagcttcctgattttcattgctgcaactggaatgaaaagntaag

SEQ ID NO: 11567 - DNA, 370 bp, Setaria italica
  Peptide Sequence Number=SeqID_77541
acgaccacgccacggtgaatgactcaaaagtccaacacagtcgaggtgaggttcatcagccgacccaaagcattcggagcaaaaggaggacttcagtgacatggtggcagagaatgctcacaagaggaagaggaagcaagagaaggaaggcaagtcgaagaagaaggaattcaagttttaggctgatttgtgtccatctggcgaaccaaagtcacctcacctagatgtttttgcaagctattgtactagcacgttaacgtttgtgaaccttagaacttagtactaggaaatagaaacgtaggtacttagttaggaatttagacaagactagtagaatagactacaaatagtttttaaattagtttttaga

SEQ ID NO: 11568 - DNA, 2001 bp, Setaria italica
  Peptide Sequence Number=SeqID_77542
gatcatcgttctcctcgtcttcctccccgctaccacgccgccgccgaaatccatggccgccgccgaggtgaacccgacccccaacccggctccaacctccgaccctaccgacgggaacaaagccaaatcgcgggagacggaccgacgccggcgccgccgcaaggctaagaagaacaaggccgccgccaaggacgccgacgccgacgctaaggacacggatgagggagcttctgccaaggagaacgatgatcccaactccaatcctcaggtagaggtagaggtagagtacgtgccggagaaggccgagctggacgaccccctcctcgatgacttcaaggccatcttcgaaaagttcaccttcaaggacgctgccgcagcagccgccgaggatgacaagggagatgagggtgctgcggatgccgcaaacaagtcgtcactggatgacgacgacgacgatgacgacgatgaccaggaggcacaaaagaagaaggaaggagggttgtccaataagaagaagaagctggagcgcaggatgaagattgcagagctcaaacagatatgcaacagacccgacgtcgtagaggtctgggatgcaactgctgcagatccaaaattgctcgtatatctcaaagcctacagaaatacagtacctgtacctaggcactggtcccagaagcgaaagttcctgcaggggaagagaggtattgagaaacagcctttccagcttcctgatttcattgctgcaactggaatagaaaagataagacaggcttatattgagaaagaagacagcaagaaattaaaacagaagcagcgggagcgtatgcagcccaaaatgggcaagatggatatagattatcaggttttgcatgacgcgttcttcaaatatcaaacaaaacccaagttgactagtcacggtgatctgtactatgaaggcaaagagtttgaggttaaactaagagaaatgaagccaggcatgctgtcccgagagctcaaagacgctctcggtatgcctgatggtgccccacccccatggcttataaacatgcagcgctacggtccgcctccctcttatcctcaactgaagatcccaggtctaaatgctccaatccctcttggtgccagttttggttatagaccaggggaatggggaaagcctcctgttgatgagaatggacgtccactctatggagatgtttttggtgttctgcagcaggatgaacctaactatgatgatgaacctgttgatcgcagtaaacattggggagatttggaggaagaggaggaggaggaggaggaagaggaagaggaagaagaagaaccaatggaagacgaggaaatggaagatggaactgagtctgtcgataccatctcaagtactccaaccggtgttgaaacacctgatgtgattgacctccgtaagctgcagaggaaggagccggagaagcaggcagaacggccgttgtaccaggttctcgagcagaaggaagaaaggatcgcccctgggacactatatgggtcaagtcatacgtatgtgctgggaacacaagataaatcatcagctccgaaaagggtggatctgcttaagaatcagaagtcggacaaagtggatgtcacgatccaacctgaggaactggaagtcatggatgatgttctggcagccaagtacgaagaagcacgggaggaagagaagcttcggaatcaaaaggaggacttcagtgacatggtggcagagaatgctcacaagaggaagaggaagcaagagaaggaaggcaagtcgaagaagaaggaattcaagttttaggctgatttgtgtccatctggcgaaccaaagtcacctcacctagatgtttttgcaagctattgtactagcacgttaacgtttgtgaccttgacttgtctggaatgaacgtggtcttgttggatttgcagctgtgatgctcaattgttttttaagttgttttgtattatggtttaaaaaaaaaaaaaaaaaaaaactag

SEQ ID NO: 11569 - DNA, 1488 bp, Setaria italica
  Peptide Sequence Number=SeqID_77543
ataaaagaagcgtgctccctttgtcacaaatagatacctcatgctgatgagatcattcataccatgaactatagttgggtgtccagcatccaatacttgaaggtgataaaacttgctcagagaaatagcattccattgttcccaaattttaggtagcgaagatgggtaggatttaccaaattcagcacggaagtataaaaattagcttgtgttgcggaaatctgtagcaaacgtaagtgacatgccttctggaatatatcttggaaggactggaagaagaaagactcgcatctcccgattaatatcaatgtcctcaaatttctcactaatggaactatagtttgcaatttttcttcaaactccttatgattaagtatgctgtgaattgaaacatgacgtatggttggcagaatttcgttccgctctaaaccacatattgttgcaaaatgactccctgaaaccacccttgcaaattcatacatgattccacacataacatagcatgtcccagtgggtggagtggactcttccgctccttgagtggggctggactcttctttttccacttcctcaaagaagcacaggtccactaaatcatggagatagtcccgtcctgtctcctctggtgtcttcttcgagtttttacatcttaaaaatccttgtgaaatccaagtacgaaccagatcctcagcaagaaacttataattatcaggaaatattgaacaatacaagaaacactgctgcaaatggtagggaagcttatcatagctaagcttcaaagcatgcatgatgcctgtattaagtagcatggatttctggtcttcactattgagaatggtactccaatgatcaatagtaagatgttttttaaatacttctcctgcagtttgcgctgctaatgggtttccctttaactttgcagcaatttgacgtccgatgatgtttagacttggatgccttccgtaattgtcatcaccaaatgcgcatgctttaaacaataaccaaaaagcatcatttttcagagcaactaacttaatcggttcaactgtacctagccttcgtgcaacagacaaattttctagttgttataacaatcacattgccctttttctgacttgatttcaaaggagacaatagttcattccattggtagctatccatgcagtcagtgacatcatctagaacaaggaaaaacctatgggaccggtgtcccatatgttcctttaatatctcttgaagctttgagtagttactcatttgtccttcatggctttctttgttacgaggaggcctgttgtggctttctagggcaacaacatctaacatctcatttgtaagtctcactttatcaaacatgtcggacacccaaatccatatccgctcaaattgacttataacagttggatcattgtagacaagttgagctagagctgtcttcccaatcctacaatgcctacaataggcagtacagttatgacattagattct

SEQ ID NO: 11570 - DNA, 706 bp, Setaria italica
  Peptide Sequence Number=SeqID_77544
tttgtatccttccaggacaagataagcttttctaattgctgtttgtctctcaattttgccccatcagcctcggacctacttacattgacgagatgaaaaacaccaagttgtacaagcttattcatggatcgaagctgtgttatctcaaagcgactagaattttgatccgtggaattctgcatgtcctgactattactcgtttcaccaactctaggaataaaagagcgtgctccctttgtcacaaatagatacctcatgctgatgagatcattcataccatgaactatagttgggtgtccagcatccaatacttgaaggtgataaaacttgctcagagaaatagcacttccattgttcccaaattttaggtagcgaagatgggtaggatttaccaaattcagcacggaagtataaaaattagcttgtgttgcggaaatctgtagcaaacgtaagtgacatgccttctggaatatatcttggaaggactggaagaagaaagactcgcatctcccgattaatatcaatgtcctcaaatttctcactaatggaactatagtttgcaatttttcttcaaactccttatgattaagtatgctgtgaattgaaacatgacgtatggttggcagaatttcgttaccgactctaaaaccaacaataattagttagacaaaaatagaactaccctagaaaaccaacccttagacaa

SEQ ID NO: 11571 - DNA, 448 bp, Setaria italica
  Peptide Sequence Number=SeqID_77545
tgcatcacgttgtgttgaactcgcagagcaatttgcacctagcaatcagtggtttatccagaccatgaataaagtctttgagcatgctggagatcttgtcaacataagggtggcacacaatttgatgcggcttattgctgaaggctttggtgaggaggatgaaggtgctgacagtcaactaagatcatcagctgtagattcctatctccgcattgtgggagagccaaagcttccttcttcattcctgcaggtatttattttccattgcccttcattttccaaattatagttttttggcatagtttatattgattcattttgcttcagataatatgctgggttttgggagaatatggaacagctgatgggaaatattcagcttcttatattatcgggaagttgtgtgatgtggtcagaggcccacctcacagatgacactgtcaaggca

SEQ ID NO: 11572 - DNA, 1460 bp, Setaria italica
  Peptide Sequence Number=SeqID_77546
ttgttagttttgttaacatcctcaaacaagttgcggagaggaggcttccgacttcctatgattatcaccaaatgcctgcaccatttattcagataaaattattgaagatactcgctgtgctgggtagtggtgataaacaagcaagtggacatatgtacacagtgttgggtgacatatttaggaagggtgacactgcaagcaacattgggaatgctatactgtatgaatgcatatgctgtatttcatccattttcccgaaccctaaaatgctagaggctgcagctgaaacaacatcaaagtttctgaagagtgatagccataatcttaagtacatgggcattgatgctcttggccggctaataaaaataaatccagatattgcggaagagcaccaattggctgttattgattgcttagaggaccctgatgacactttgaagcgcaagacttttgagcttctttataagatgacaaagtcaacaaatgttgaagtcattgttgataggatgattgagtacatgatcaacataactgatcatcattacaagacagaaattgcatcacgttgtgttgaactcgcagagcaatttgcacctagcaatcagtggtttatccagaccatgaataaagtctttgagcatgctggagatcttgtcaacataagggtggcacacaatttgatgcggcttattgctgaaggctttggtgaggaggatgaaggtgctgacagtcaactaagatcatcagctgtagattcctatctccgcattgtgggagagccaaagcttccttcttcattcctgcagataatatgctgggttttgggagaatatggaacagctgatgggaaatattcagcttcttatattatcgggaagttgtgtgatgtggcagaggcccacctcacagatgacactgtcaaggcatatgcaatctcggcgattttgaagatatttgcatttgaagttactcttggaaggaagattgatatgctgcccgagtgtcaaacattggtagatgaattgtcagcttcacattcgacagacttgcagcaacgggcatatgaactacaggctttactaggcttggacaaacatgctgttgaaagtgttatgcccgcagatgcaagctgtgaagatattgaggtcgacagaaacctctcgtttctaaacagttatgtgcagcaagccttggaaaatggtgcagccccttacattccggagagtgagcgctcaggtgcgataagtgtgggcagctacagaagccaagaacaacaggaaacatctgcccacactcttaggtttgaggcctatgagatgcctaaaccttcgatggcactagcaacatcacaagccagcatgtccgcaccacctactgacttggttccagttccagaaccaggttaccagaaggctgggaccttgatgtttggtggtcttccttatagtaacctggttctg

SEQ ID NO: 11573 - DNA, 1743 bp, Setaria italica
  misc_feature (2)..(2): n is a, c, g, or t
  misc_feature (1666)..(1743): n is a, c, g, or t
  Peptide Sequence Number=SeqID_77547
tnttttttggttcagctagactagactaaaagactagaataaggaaaagacaacaaagactttgtgttatcgcagatgcaagctgtgaagatattgaggtcgacagaaacctctcgtttctaaacagttatgtgcagcaagccttggaaaatggtgcagccccttacattccggagagtgagcgctcaggtgcgataagtgtgggcagctacagaagccaagaacaacaggaaacatctgcccacactcttaggtttgaggcctatgagatgcctaaaccttcgatggcactagcaacatcacaagccagcatgtccgcaccacctactgacttggttccagttccagaaccaggttactataaggaagaccaccaaacatcaaggtcccagccttctggtgatgcaatttctggtgagtttggtgtcaaacttcgccttgatggggttcaaaagaaatggggaaggccaacctattcctcttctacaccttcaagctcagcatctagccaacaagcaaccaatggggcctctcattctgatgggggaggtgcaaccagttcacaggcgcgggagtccacgtatggttcaaagagacagcagggcacagaaatttctgcagaaaagcaacggcttgctgcttcactttttggttcagcagctgctaaagctgataggaaagcacaagcttctcgaaagacagcaaaggagagtgcttcaacggagaaagcatctgcgagtagtgcggcatcccagcccattaaagagcaagtaattcccgctgtcccaccacctgatctgctggatctgggtgatgaaccagtctcatcaagtcctccaatagccgaccctttctcacagctagaggggcttcttggaccagcatcagccactccggtggtttctggaactccagctgccagcacttccaacgcaccagatcttatgtcgatcttctcagatgatgtaccaactggagcaaccagtggatctgctgatcctgctgtaggtgatgctaatttgatgagctcccacaaaggagcaacagcagcggctgcaaagaagggtcctagccttcaagatgccttgcaaaaggatgcgactgcacggcaagtaggtgtgacaccaacagggaacaatcccaatcttttcaaggacttgctaggctagaggatacaccagatgctctgcgtgcggtctctttgggcaaatggagttcatctccaacatggtccgatcactgaaacggccatgatccatcttgctggggttacagcttgcaaggggtatatttgttgagtcacaagacacgacctttcccctttcaattgggaggggaatgcgctgttgagatttgtggatggttgcgggtatttttctttccctcttgcgtttttcacatggtaattttctgccgagactagtgtacatgatgtgtaatttgtacatgagaccgtggtccagaagcgtgtgccggcgcttttttgttcagctgggagggggcctgtgcatctgtgcttttagagttccccacattggatgatcgaatgaatatacagtacaatagctggccactgaagagtagaatgctcgtgtcattttctctggaactgggtggaataaaatgttcaagtgcaaggttgttagtccaaaaaaaaaaaaaaaannnnnnnnnnnnnnnnnnnnnnnnnnnnnnnnnnnnnnnnnnnnnnnnnnnnnnnnnnnnnnnnnnnnnnnnnnnnnn

SEQ ID NO: 11574 - DNA, 487 bp, Setaria italica
  Peptide Sequence Number=SeqID_77548
aggagctgggccctactacatgcccgtcttgaggtggtaattgggcctcgtcttcttcatggcctgaggcgtcgtagtgcagagcagagtacttgccggaatgcatggagctcgtgtcatcgtcgtcgcttaaacaagtgtaccagtgatctgcaccaacatttgcccaaaaatgcacacgtgtcaagccacaataattcatgtattattgttgtggtgtctggtgtagccaaaacagaagcaccagtgcactagaaacaaaacacacagatgccatatctgtagatggtgacgcgcctagatgatggctacggagaacaaccaccatggacaacgaaccagaacagccataccatagtagtcaacaatttccagtccaaaatttcggttgtcttttgtgtcatatccggtacacgtatgcaggtacacgcaaaaatacaagttaggaaccaaagaataataatagacaatagaacaatagacgaca

SEQ ID NO: 11575 - DNA, 1088 bp, Setaria italica
  misc_feature (1085)..(1085): n is a, c, g, or t
  Peptide Sequence Number=SeqID_77549
tttctgaaatcatatcaatgcccttaacgacatttccaaacacaaagtggtgtagcgaaatgcgatcggccagcatagctactgtttttgccgttactttattgcagcaataatgtacagagtgtcatagcttatatgtcgcgagcttgtcacaaaaccataccactacttttctgctcgaaaaatacacactatctacacatttttgcggccatgcatgccatggtgacacatgtacttcctctgtacagtagtaacggttgtgctttccaagtacaaaaatcaggttgctcaattaaagcatgacgtactgatgatgatgcttgtcgtccttgcttctcctgccacgcgtggacgacgacgaggaggtggtggtggccgccggcgcccggaagccgatgtcctcgacggcgccgacggtgttgaagaagaggcggcggttgagctcctccaccagcgtccggtgaagcagctggctccgcatgtccaccatcgaacggttccgcgtcatcctattattccttccatggtggcggtggtcgtcgtcacgccgccgcggccgcccggcgtgcggcgacaggctgcactgacgctgcagctgccgcgcgagggactgctgctgggccgtatctgctctccctgggcttctgctgctgctgctctctcctgggccgaatcttgtgttcttgacctgctggcctgatgcttttgagcaggagctgggccctactacatgcccgtcttgaggtggtaattgggcctcgtcttcttcatggcctgaggcgtcgtagtgcagagcagagtacttgccggaatgcatggagctcgtgtcatcgtcgtcgcttaaacaagtgtaccagtgatctttggaccagccaccggcatgcggccccaccccgcagtgagaaccctgggaggaggtgggggaagaggagaggtagtagaagggaggagggcgctcctcgttttcgtcatcgtcgtcatcaccatttgccgtggacacactgtactcgtgctgctgctctcgcccaggcagcagcctgttgatctcctgctcgatcatggccgcgatctccgatgggtcncgg

SEQ ID NO: 11576 - DNA, 590 bp, Setaria italica
  Peptide Sequence Number=SeqID_77550
cataaaataaacttttatcaattaccatgaaatggagggagtaaatataattttgtcttaaaaagacaaactaaagcgtgttggtactttagaaatggagggagtaaagtgtatatccacatccacgaggacaggggcctctccaccaagcactgtccgtcctggaacgagaaggtcaggtccggggcagcaggccccgtacttgacaaggacactactggtgaatcaaatgcactctactcgtccacgtaggggggcgctctcacgcgctggagtacgtttggtttgcatacatcgtcgctcccccatccacgcgaggtgagagaggtttgccgtggaggacgacgcgccgagcctagcctagccgatcttccccgaccactcgccggaagatgcaaggacgacgacagctgctcgtggtggacagagcagggaatggctcgcctcgtgcacatgcaatcatcgatttatactgtgctgcttcgatttatgggctacagtaacttgaccctgcaacgtcagtcagatcgccctacttcttctacctgatcggacgatgcgataatgttgaattgaagcggcaagtgcgg

SEQ ID NO: 11577 - DNA, 837 bp, Setaria italica
  Peptide Sequence Number=SeqID_77551
gggaagccaacctgaaatggtccttcagttgatggaattcatgaagcaaaacagattccattgaaccaaaaggcttattttgagataatagcttcatgcagcatgctacgggaatggaaaacagccagtgaaataatcgaacatttggattcatcactatcatccatttcggttggcacactaaatcatcttttgaattttcttggaaaatgtggcaagacagagagcatgatgaagctgttttataagatggtgacttcacgctctactgtgggcctgtctacttatacggttctgttgagaaacctcttagttgttgggaaatggagaaagtatattgaggttttgcactggatggaagatgctggagtccatccaacactatatatgtatcaaagtgtacttccatatatctggagagacaacagcatggactatgttactctcatgcaagaaaaaataaatgcattgagagagaaggtaacatgagctcgatatatttctgcatttgtttgatatggagtactagaagtccataaccgaatatggaaggcagcatcagattgaagctagcagcattcagggaggacaggattttgattgtgccgtagttggcatcgaagcaactttcccatctttcgaaaaatggagatggacttggagaactgagaaaatgacatgtttctacagttggtgagaggttgtggcatctgaaaagcatggcctccatgaattatctcctatggctttcgttgattacagaaattgggtttgttacctggtatggcttgtcttggagcaatcatgttacagttactctagtagagcagagtcttt

SEQ ID NO: 11578 - DNA, 529 bp, Setaria italica
  Peptide Sequence Number=SeqID_77552
ggcggtttaagaaatggatcccaagaagcaccatttttgggagggcgacgcgtagtccattctctgctgcgatcggcgtggcttggagaagaggacggaggagaagtggtggcggcggccggcgggtggcggccgtggagcgggacccggagcgtcttgtgcgcgaacatctgcaggtcggtggtgaggccgttggcgcgcttgacgtccgccacctcgacgccgtacttgatggcgactccggcgagggtgtcgaacctgcagactcggtgcaggacgtagcggccgcaggaggacatgggcggcggcgacggcgactggtccagcacgacctcctcgcgagcgccgctgccggtgctgctgccgcggtcgtcgtcgtcgtagcgacggcggtagccgcaggggcggacgaggacctgcttgacgcccatgggtcgcggcgcctgctatttttggcggggcgcagggctccccttcctcccctccctttggcttctcgccttctcctctcctcccacagggcacaggc

SEQ ID NO: 11579 - DNA, 542 bp, Setaria italica
  misc_feature (541)..(542): n is a, c, g, or t
  Peptide Sequence Number=SeqID_77553
gtatggactaatgttcgatttggtgatatgcgtcgtgctttagcagcatgtgagcggctgatactactacaacacgatccgcatgaactgcgggattacgccgcgctcctgtaccactgtggctactatgaagagtgcctacactacttatcatcgtaccaaacagccatggtcgggcagtcgccgagcaaccgattggagatactagaggatgaagctgtaaatactctcagagcacggataactctaattttagcagaggatggctggagcagctgcagaccagcagcaagttactggaccaagaactccgagccgtggtagtttagctagctgaccatcgttgcatctgaagcaaatatctacagattgtatatactgtatagcatgttcagccatgagcccatgatgtacatatgatggatcgtcagccacttgtagatacggatgatcgaacacgttgtcactctacagggactactcttataattcatcttttaaaattgatttgatacagcacaaatacttatatcaaaaaaann

SEQ ID NO: 11580 - DNA, 1182 bp, Setaria italica
  Peptide Sequence Number=SeqID_77554
cgcgaccgcgcacgccagggaggcgcgggaggggttcgcggagcaggtggggcggctcacccggttgaacgccgggaccagcatcgccatcagccgcggcgccgacctcgcccgcgccgcgctctgcgtcgccgccgaggacgactcgctcgtctcccactcctcggtcccgctccccgtcgacgccttcatcgcgcgcctcgacgacctctccacgggcttctgcgccggcggcaacttcccgccctcccacgcgccgcccgaggtcttcttcgattacctcgaccgctacctctacgtgcacaagggctttcgaagaacaaatggaatctctgatgtgcgggctatgtatcttcattcggtcttgacatgcagatcaggatctgctctaatgcttgcattgatatattcagagatactgaagactgtacgcatctatggcttactggatttcgatgcagagatattctttcctactgatctcgatagcctccctagaggctatgacaaacaaaaaagcaagttgggtcaccagcaacacattatgacttcaaagtcacttttggttgagattttgagaactctgaaagctacattttggccattccagtctaatcagtctagtagtttatttctgaatgctgttactgcaaatcaccatggccctggtgctttaaatataagcgccgtagagatggctgcagctaaagctgctcagcatagattgatgcgtggagtatggactaatgttcgatttggtgatatgcgtcgtgctttagcagcatgtgagcggctgatactactacaacacgatccgcatgaactgcgggattacgccgcgctcctgtaccactgtggctactatgaagagtgcctacactacttatcatcgtaccaaacagccatggtcgggcagtcgccgagcaaccgattggagatactagaggatgaagctgtaaatactctcagagcacggataactctaattttagcagaggatggctggagcagctgcagaccagcagcaagttactggaccaagaactccgagccgtggtagtttagctagctgaccatcgttgcatctgaagcaaatatctacagattgtataaaagaaactaccgaagaccgtaggtaagtttaagactaagactagaaaccaaataacgttaagaacaata

SEQ ID NO: 11581 - DNA, 455 bp, Setaria italica
  Peptide Sequence Number=SeqID_77555
tttttttttaaaaactaaaaactttaaaaagtaaaaaactttaaaactaaaaaggtaaaactaaaatttttaaattaaataagaagaaactaggaataacaagacctttaagacctactagccctattacatcctccttcaaaaggtataatgcatcccatttataactcatagattagctttcggaacttcaccatgtgctcagcctgcaacgagatggcgatggacaggctaccatctccattggcactagggaggacgaacgccagaccctcatatgcaatgccgcctggccccatgaacacaggccggccccaaccgaagttggcatcatgaatcggcaggcacacccattccacctcctcccacaatccacgcactccttctccttccttccaccggcctctccgcaaccaacccagatgatgcttagggtttccccgtccccggccgcc

SEQ ID NO: 11582 - DNA, 254 bp, Setaria italica
  Peptide Sequence Number=SeqID_77556
taagccaaattaaatgccgtgcagagcttgtatggcactatggtacgctacttccaggtgaggatactggatactggtaactgaactcacctggagcacgaggagcgggaaggccgagatgtcgtcggtgtaatcgaccgccgggatgaggcgcttgagctccatggtaggggcgaagtcgccgtagtcgtcgatggcggcgttgggcgcgtcagcctcgacgaaagcaccccttcgccgttgcagtcgatctc

SEQ ID NO: 11583 - DNA, 1734 bp, Setaria italica
  Peptide Sequence Number=SeqID_77557
tttttacttcaattaaaccccatctataatctggtactctggtatatgagtgtgttcacttggttacaatgatttcaccatgtccctttagaaaaatgtctaacctttctctattattgatattagtccatacaagtagaagttacccaaaacatccccagccgagggtaaaaaagaacactgatcttgaagggtgaaagcgcagcaacttggttcacttgaaacttcaggcattttatatgagaactggatacagcctttagcctctagccctattacatcctccttcaaaaggtataatgcatcccatttataactcatagattagctttcggaacttcaccatgtgctcagcctgcaacgagatggcgatggacaggctaccatctccattggcactagggaggacgaacgccagaccctcatatgcaatgccgcctggccccatgaacacaggccggccccaaccgaagttggcatcatgaatcggcaggcgcacccagctggtgagtcctaggttcgggcaccggaaggtgtgtgctccacgcaccagtgctgacaaatctggctgcagctccaggtagtccagcgctgagcggcagtagtcgttgtccatcctatctagtgctccttggatgactgctgctccttctgccagcccactggtcaccttgcctgcctcggcaagtggtgtggcggtgaagatgacatttccgaagtaaccatctggaagtgggggctgtagccgttggcgcccgtcggtggcacagtacaatttggtgggctgttcaggagtcaggccacgtgcaagggagacacatttccagacatgcgcagctagcactgcatacgtgttgaaccggggtgcaccttcacctgtgggaagctgtgagcgcagccgaccaaggtctgagcgagtgagcttgaaaatgtctacggcggtggcaggtggctttgatatggaagtgagggactgaggtgtggaggacaacatagctggggcaggctggtactcgatatgttggaaagatggagttggtggatcacgggcgcgaaggagagtgcggtcaatgaagggcatgacagaaatttgagctccacggcagaggtcagaccatgagttaatgaagtgcaagccagacatgccatctgctacgtggtgttgcataccgacaccaagggagacgcctccacatttgaagtaagtcacctggagcacgaggagcgggaaggccgagatgtcgtcggtgtaatcgaccgccgggatgaggcgcttgagctccatggtaggggcgaagtcgccgtagtcgtcgatggcggcgttgggcgcgtcagcctcgacgaaaagcaccccttcgccgttgcagtcgatctcgaccctcccgtcctcgtcccgcgcgagtcgccccgccatcgggtagaacggcacgagcgcctccgccagcgcgcgccgcatccgctcgccgtcgaagaatccctccgcctcggggccgccgccgcggcggtagaagtagacgctgggcgtgtggaagcgcggcacgacgaggtcgaggttggaattccacagccgctgccgcggcgtctcccgcgccgggcgcaccatcgtcgaccgcctcaccgtgatcgccatctcggcggagacgcggcgccgtggatcggatctggggtcgccgaaacgggcaaagctctggacgaatccagcgacggtttggtggtagcagcagctcttggtgg

SEQ ID NO: 11584 - DNA, 1032 bp, Setaria italica
  Peptide Sequence Number=SeqID_77558
gcgccgttccctcccaaaaacgcgcaccccctcctctcctcccgtgaccaccgcctcagcctcgcgtcctcgggttccctccaatccgtgccaccgggcttctcgtcccggctcgtgctgcggttcagtgtgcaagtaatggagcggcggcggtcaccgaggctgctgctccaagtgttcttcttgctcgccgcttcttctccgctcgggagtgcagggattggaggcctcggagttggcccggagagcaatggagcttccgttagtcctaggaattccagaaggctgttgcagattggagatggaaacgaagatagcctatttcatctcccacatgcaaggactttctcacacaagagcagatctcgtaaaagagctccaacgccagcagcagcaccaacgtctgctccatcaccgtcaccattcatatccccaccagaaagctcaccttctacatcaccacatgcttcaggatccatgccacgccaatctccttcacaccatcatccaactgcagcccctccacatttggacaggtctaggcctacaactaagccggacgaacacgatcgttcagttgaaactccagttcattcttcgcataaacattcctggacaacctatggtttggttgcagcagggattgctgttttcattctggtatcagcagccagtgttctctgcttccgagctaagaaaatgggaactgtgaggccatgggcgacaggtctcagtggtcaattgcagaaagcctttgtaactggtgtaccttcattgcaacggtcagagctggaaacagcatgtgatgatttcagcaatataattggttctacctctagctgcatgctgtacaaggggaccttgtccagtggagttgaaattgcagtggcctcaagcttggtaacatctgctaaggattggtcgaaagaaaatgaatcacagtacaggaagaagatcaaaagtttgtccaaagtaagccacaagaatttatgaatttgcttggctacgtgcgaggaagagcatccatttacc

SEQ ID NO: 11585 - DNA, 969 bp, Setaria italica
  Peptide Sequence Number=SeqID_77559
ccacgggttcctccgcctgccgtcccaccggctccgccaccaccgcccctgccgccacggccccttcttccaccgccaccacctctggtgggcgctccaccacggcgccttaggggacgcgccgatgcgccggttccaccaccaccgccacggcgaggctctgagccacctggcggccttgcctttgcctgcggaggaggccagggaggcggcgggggaggaggtgaaggccgtggccgagccggacccggatcgctcgctccccggcggtgacggtgagccggctttcggcgacgccgacggcgcccatgaggcagagacagaccacgaggacgagagcgcggcggtcacggcgttgaagaaggagatgctgcggaggtggttccaccaccgccacggcatgcgcctccaccaccgccaccacgacgagccggaggaggaagccgcggcggagggcctgaagcggttccaccaccaccttcacaaggaagaggaggagaaagacatgacgagaaagcggttccgtcacgccgagcacgatgacagcgacagcgacgacgaggatgaggaggtggaggagatggtccggcggttcaggaaggccatcatgcggaggaggttcggccacggccgccgcttccaccaccaccaccacggctacggctaccgccacgccgaggagaccgagaaggcggatgcacaggatgagggcggcgtggtggcgtggatcaagggcctcatcaaccggttctagagctggtccatttcccccggcccttcttgcattggttgagtcacgcgtacggccttgcctgcttgttccttcgtgcgccccctctagtgctcctgcagtgcagcatttcgttggtatcatgcatgctgtgttttttatctacggtgtgtctacgtacttgtgtgacagtgtagtacctgctcgtgtgcagcgtgctttgtcatgtgattctatat

SEQ ID NO: 11586 - DNA, 545 bp, Setaria italica
  Peptide Sequence Number=SeqID_77560
cttgcacggtacaaatgtgtccccataatagtagacaagaaatagcctaagtagaatacaacaaatcttaatgaaaactagaaataaaggaaggttgcattgtgtatttgcaatattcaccttaagtaccaagaatgtgtgacaaggcagggcaaaaagttgcaggtgcccagttaaaatatgatttcacattctcaaccaaaaactaacccacaaaaaataaaagataggagctcatgtcaaatctcagaaagtaagaaaaagatcacataaaaaatatatatgttattcatcgactggatagaaatattttggcttaaaatcatgcttttgaatgctaaacagcatggacaaagcataagagcagatttaaatttaggaagaacctccagcaaataacgcatccctccatccacgaagtagaaaggtgaattggtaagaagaaataacttttttcctttctctctaagcatctttaagaaacgaaacacctggctttttttttatcagaaatttctgggggctcagaaagaatctgcctgtga

SEQ ID NO: 11587 - DNA, 1047 bp, Setaria italica
  Peptide Sequence Number=SeqID_77561
ggaaccggtagttctcactgttctgtatttctatttcatcctcgagttctcgaattacagcagctgttcgccaaccagcttttgaaggtcctctcaagtcactcaaaagatgatcaccaaagtatatcacctctgggcctctccactttgtgatctgcagaaacgattttaaacagccgtggtagtatacttgatccggcagaaacttatcaactgcagtaaaagctaatgtgtccttttgagtgtcatacaccctgaatgggtggtctgagttatagaaagtgggtttatttgcctgcgcaatcacaacatcaaaaagttcccgccaggaatttccatcaaaatgctggtcctccagcaaataacgcatccctccatccacgaagtagaaaggtgaattggtaagaagaaataactttttcctttctctctaagcatctttaagaaacgaaacacctggctttttttatcagaaatttctggggctcagaaagaatctgcctgtgaattaaaccacttctgtggacatgctggatcgattgatttacatcctcatatacgtaagaggcatcaaactccagtttggcatctataaagtgttgaacaatatcagcgatgagacatgcctcactaaaacagaagacatccatcagtccaacaagttggcgagcttgatctcttccaatatgccgtgtgccatagagctcttttatctcactcaaactcagcttccgccgcccaaagaagcaaccctctggttcaatagaaccgaagaaatcaagcttgagaaggcaccctttgagtctgtcatagtaaaggcccctgatcgggaaagagcggtcatactcgtaccgcaagcagctctctgggtatttcaactcattgaccaagtgcttcttggcgagatcgtagatgaggcactgcaagtgctcggagtagtgcgagagcgtgtagtcgtagtcgaagccatagacctgcaggtcatccagcttgacgttcttgttcacgtaaatgccttgcgggttcatcttgggcatgtccttgata

SEQ ID NO: 11588 - DNA, 727 bp, Setaria italica
  Peptide Sequence Number=SeqID_77562
ttttttttttttttttttgttaagaggtatcttggattcaatcaatttgattggcaaattagcttatgaaacattgcagccaaacctaatccttgcgattgtttttccctgattattactttaccacacacaaaaagaaaagatttacagtataaacatcacctcattccttctagacagtcaggaacggcgaatccatacataattgcatattgaactggacatgacaatacgccacaattcaaaaccttgatctcagtctcagccactaggcactatttgcatcattttttgttagacaagccctggcaaatattcagttgctttcccagcagccaggagaatctgattcaggcacagggcatctattcatctgaagaatggcaggtcccttcaactgcagtgtgccaagaaggccagaacaggataaggtgacgcaaatcaagctggctctggatcatcaaatgataatcatgatgcgttgacagcccatgcaccaggtccgtattcgtttgctttaagagcaaaaattaacagatgtcctctgaaagcacctacgatctgacctcatactttccagcttgactctgggctctaaaacctttgtatggagcgcttggtgtgtttttcacgtccagcttatcaatttgaagaccagatagagcaactcccataatcttgaatttcacctgaaatgttggcagcgtatgcaactgagcaagtcctt

SEQ ID NO: 11589 - DNA, 376 bp, Setaria italica
  Peptide Sequence Number=SeqID_77563
cgggtcgcgattgaggatgtcgcagatctccaggttcatggcccagtccggaccgatgagcatgtcgctcgtcgcccgttccaccatcgccgacgacatctccgctccgtcagaacaccaccacacaacgcctcactgaaagccggagccgccggccaacgcaaacgcgagggagcaggaaaagtaccaaaaccgccgcctttcgcccacaaaaaaaatccctcctttctcccttgttcttcttcgtcggccggcgccggcctccggtgaataggaaaaaaggaacccaagaaatggtatggtgatttttgtggtggattcggtggcggaggaagcgaaggtcgccgactcgccgtgtcgtgtcgttcgaggcggc

SEQ ID NO: 11590 - DNA, 582 bp, Setaria italica
  Peptide Sequence Number=SeqID_77564
ttttgagtccgaacatgcatttaataagatcattaagtttgacagaagttgtatctgaacaagcgcaattaaataaaaggtagtcttcaggtttatggaggaaatcagcattgccatcagagtgcttgtcgatgtggtgttggtttcatcactccagaaaggtggaaggtacttctaagatgatttgttagtagatgtgatgaaataagaaaagtgagtatgtaaatagaagagatgtcaaggagagaagcaacattgtgtgtaccttgatactgccttgaattgtttagttgttgaatgataatatgggtgaattcaccatcactttaacatagtgatggaaacagttattctgaagtatataaaatatgctatgctacaagaaggaacagtgctgggaatctgattaaattcataataaaaggcttacctgctaaacgtcggttctttgtttgagactccatggtagcacgcataatgaaggtatgagtttatattcatataattacttcaaagtaacatctttgcaaaatcgtattctcagtccacaaaattggtatttcttaaaatattttagtatac

SEQ ID NO: 11591 - DNA, 660 bp, Setaria italica
  Peptide Sequence Number=SeqID_77565
ggcagtgcctgtgaaggatcctccaacacagcatcaggaacaaacacatggtggctgccaccagatgcaaacgcagcagtgacagctgctgttgcaacctgctgtgacgcggaagcaatgcgagagagtgcagaggcaacctgtgcttggccagcaggggagggatgatgcagcgatgatgacagaggagagagagcacacttggggcccagcgtgttgttgcatgcgctgcttccagtgtggttgctatcctcaaccaaaaaatgaccgtggtgggatgcactgagcatgccaccaccgtcctgtgggaaagggagctgctttggtgttcttgagaatgatatggagaagggtggctgacgatggaccaagtgcatagtgtcagaattctcgcggactgttggagttgtttgtggataaatttcaaattgattaacttgatggtacggaatgaaacccccaagatttgtcagatcatgctgtggctttcttcgacgcctattatggccatccaaacgcttccggcaactttttttcccctcgtcaaactcagacagcatgtgaaaccggctgcattgctggcagaagcgctgctcctggccgccgacgaccaccaccggcgtcttggagtgcgcctcgcagactctgtgccgccggtgg

SEQ ID NO: 11592 - DNA, 785 bp, Setaria italica
  Peptide Sequence Number=SeqID_77566
tgggtgctctcagtgatgggatcagggaggttgaggataacatggatgatgatgacgatgaggaagaaaggaggtgggaggaggagcaattcaggaaggggcttggtaggagggtggatgatgcttctgctcaaagaacagcaaatggtgcaccagcttctgctcaggttcagccgcaggcatttggatactctgtggttcccatcaccagccctctcttagtggtgctgtacctgcagcatctgttttttgcctcaggaagcgtggaattcttgtccattgctcaacaagctgatgttgcaaataaagccctgcaagagaacatccggaagcttagggagactcacaagacaacagtgagcgctttagtaaaaaccgaaacacatcttaatgaagctctttcggaaatatctagcctggacagtggtttgaaggatgcagttagtaagtttgtgtatatgcaggagctccgccactatatttcagtgatgtgtgatttcttgaatgacaaggcattttatatagaggagttggaggaacacatgcagaaactacatgagaatcgagctttggctatttctgagaggcgtgcagctgacctagccgatgaatcaggtgtgattgaagctgctgtagatgctgcagtgtctattcttagcaaaggatcaagctcagcttacctgtccgctgcatcaaacgctgcgcaagcagcagctgctgctgctagggaaagttccaacctcccacccgagttggatgagtttggcagtagtattattctaacc

SEQ ID NO: 11593 - DNA, 406 bp, Setaria italica
  Peptide Sequence Number=SeqID_77567
ggcggggaaggggagcgcgtcgcgcacgtagcgggcggtgcgggagttggccctggtccccgcgacgtgcgggtggagggtgagcgagcggaggtgcgcggcggcggtgtcgttggagccgagggagaggaagagcgcgccgtagttgggggacgggttgtgcgcgggggcgcggcggagcgcgaggaagaggagcagcgcgagggaggcgccgaggacggcgagcgtggaggacaggaggtagaggaagcggccgcgatggtggggcttgccccgcggcggcgagggggctaggagcgacgctgcgtcgaggcgggacagcatggcgcggcgcgggaggtcgagggagtgcgggtgcacggcctctggtggcggcgccggcgcctccacctccttcgccctgaag

SEQ ID NO: 11594 - DNA, 1823 bp, Setaria italica
  Peptide Sequence Number=SeqID_77568
tttaaggtttaaggttaacgttaacgaaagaaaagaactaagaacaaggtacaacgggacgtaagacggactatgctacaacacatttggagcgctcccttatttggatacagattattctttttctataatgatacagcagtgatggataatgtgtattccttttttcacactatcttctccaatcacatttctttatcctgatctgaagaaagaatgccagaagcatagctatgagcaaaactggtggcgtcgagaagctgacaggtcacgggcgtagcggctcggcaaattaatcgaggtcacttcgagtttccacttgttgccatgttatgctgtgctggtagcttaacaggttgctactccggttcagttggtactatttaccagctgaaagcatcttctggagttcaagcacctgctgctgctgctccggtggcaacgaactcagctgctccggtgtcagctgcaacacttgttgtagaagagctgactccacatcaggcgtgagctgcgcttcgttccctggttgctgaaagctaacagcaccagcactatagctccctgatggtccactagggcccactgcttgaggtggagctgtataagcaggatgatggctgatgtttaccattccaggcactgaggttccatcctccaattttctcaactttgaaggatgggcaaactctgccaggtgacttgctggatcagccgcccttatttcattcggtagtgtctctggtgcagcagctacctgagagtgggtcaaaggcccctgttgtacacttgtgggcataacaggtggcctagagtgctgtggcataaatgggggctgaacttgtgacattaagcctactgaggccacaagggattgagtaggaacactggaggaacccccaaggggctgagatagcattggaggatgtgtgaccaatccagactgatgtccatgtggaaagattttgactggaggctgagatgcatgttgatactgaggaaaattatgtaatgtggcagtttgttcctgcaggacagttgggtttggtggtatgttagctggcaaactcaacggtcttgagacagccggaatcatagcatctggctgtagaaatggctcattgaggtgagatgaagattgtgccaaggaactcgagggctgttggttctttgccatctgcatcatctgtggcgtcaccagaccaagcattatttgtgcctgaaatagggcctttggcagctgtggaactccttgtagtaaatttctggaaagttccttattttgagtagttaaggccttcaattcagccatgatttcatgcaattgatgccttgacattctggccaaataatgagtaagagggtcgtttccaagtccatactggacaggtaaaccattttgaacaattgcagtttgagctccaccaaggacgccagccatcacagatgcagcgtgtattgccggtgggagaccaacaggctgatgaagacttgtatctccaacaacagaagtcccacctgactgtttctgactatcagcaccagatgccatccctggtcctccacgacccttttctctatttctgtcagtattcctcccattttcagcaaaatcaacacgtaactgacgaccattaatctcataaccctggaggttccggcgtgcacttagagcagtctcctcatccttgtactcgcaaaaagccataacccttaggcttcccagtttcttgtcaataaccaatctgaagagacgaccgggccgacctcctcgcaaatctgcacgagctgctcctccgtcgcatcgtacggtatgttaccaa

SEQ ID NO: 11595 - DNA, 962 bp, Setaria italica
  Peptide Sequence Number=SeqID_77569
gatggttgtaccggtggaaaagggcggcgatagacaggtggtttaagccgggggcgggcccacgtggcggccagagctagtctggtgcttatcttagtagctgggagcactcgagagcgtcacgccgccagcctctgccctgcccttgccaggttaatcaccctgcctctgctctggcgtctcaacaaaagggagctgaactgagctcagtgctgggaggctcccactctctcgcccaccaccaccctcctctcccttatctcttccccccgggcaacctcctgcttcctctgtcctctgcacctgcaacaaaggtggcaaggccttctccaagcatccatagcagcaccccaagatgtcgacggttgtcatgagagtggatctcgagtgtgagaaatgctacaagaagattaggaaggtcctctgcaaggtccaagacaaggtgagcatcaggaccatcacctacgacgagaagagcaacacggtgacggtgtccggccccttcgacggcgaggaggtcgcggaccgcctcacccacaacgccggcaagatcatcaccgacatacacgtcgccggggtcggtgcctggggcggaggcggagggaagcagaagcacggtgcccccgcagccgccgccgccaaggcgcccaagcccgggaagggtaacgaccacggtcatggccatggccacgggcacgggaacgcccagggcaagggccacggcgggcacggcggtggaggccacggcgggcatggcggtggaggccacggcggcggcaaggcgaagccggagaagaagcacgtcaagttcgacgacgacgacgacctggacgacgacgacttcgacgatttcgacttcgacatgggcaagccggcgggcggtggcgggcacgcgcaccacggtcacgggcacggccacggccacggcggcggcggcaagccgaagatcatcaccaccaaca

SEQ ID NO: 11596 - DNA, 377 bp, Setaria italica
  Peptide Sequence Number=SeqID_77570
caatcgagctcatacaaagcctctgaaatctgaattgcgaactccgccgagcttaggagcagtagcagcaatggcgaagcttctcgcattgctgttggccgcgctggtcgtgctctcgctcctagtgagccccattgcctgcacccgcaagctcagcaaggccaagcccaagccaaagccaaagccggccatcggccaccggccggcggccaagcccaagccaaaccctgtcggctacaagccggcgcctgccgcggccaagcctccccgcagcaaccacaccgctaagcactcgccgtcgatcgtctacggcggtgcctggctgtccggcgccggcgccacctactacggcgcgcccaacggcgacggcagcgacg

SEQ ID NO: 11597 - DNA, 479 bp, Setaria italica
  Peptide Sequence Number=SeqID_77571
tacgacaattacaaggtaggaaccaaggcgaccaacccttctacttcgacgtgctcatcgagttcgaggacgacgacggcgacctcaaggccgtggagactacaataggaaggccggcagcaccgtgtggacgtccatggcgcacaactggggcgccacgtggcgcctcaacaacggcaggaagctcaatgcgccgttcgggctccggctcacctccgactccggcagggtgctcgtcgccaaccacgccatccccgccaagtggaagcccgggacgacgtaccgctccctggtgaactacccatgaaaagggggatatctcgagaagtccatggcgggtagtgtgcggccgggtgttgtgagaggctacgatgtcagaagtcagagaagaggaagaggaggttgaagaagagaatggacgttcttccctccctccacggtctctgcatgcagtccccaagtgatgcgtgacatcgtag

SEQ ID NO: 11598 - DNA, 1182 bp, Setaria italica
  misc_feature (1092)..(1182): n is a, c, g, or t
  Peptide Sequence Number=SeqID_77572
tcggcgcccgcagccaaaccccaccggaactacaccgctatcccctccgtcgccgtccaccgtgtacggttccggcggctggctgtccggcgccggcgcgacgtactacggtgcccccaacggcgacggcggcgaaggcggcgcgtgcggctaccagaccgccgtcgggaagcagccgttctcgtcgatgatcgccgccggtagcacgccgctgtacagggacggcgagggctgcggcgcctgctatgaggtgaaatgcacgaccaacgcggcgtgctccggccagccggtgaccatcgtgatcaccgacaggtcccccggcgacctgttccccggcgaggtcgcccacttcgacatgagcggcacggccatgggcgccatggcgaggcccggcatggccgacaagctccgcgccggcggcgtgctgaggatcctgtaccggcgggtgcagtgcaagtaccccggcgtgaacatcgcattcaaggtggaccagggcgccaaccccttctacttcgacgtgctcatcgagttcgaggacgacgacggcgacctcaaggccgtggagctcatggaggccggcagcaccgtgtggacgtccatggcgcacaactggggcgccacgtggcgcctcaacaacggcaggaagctcaatgcgccgttcgggctccggctcacctccgactccggcagggtgctcgtcgccaaccacgccatccccgccaagtggaagcccgggacgacgtaccgctccctggtgaactacccatgaaaaggggaattgttccgctgccaatggtgagcagtgcatggtgagaaatgtgcgtccgggtttcgcaagaggcggtgtggaaagaggaggaggttgaagaagggaacggtgttcttccctccctaccacggtctctgcattcccctagtgatgtgtgaatcgtgcctgtaattttattttcttacttggtcaccgtcgtgttgtgaaggaaagggagaagcttgagctgcgactaacgttgcatgccatggatcaagttgtgtcttttgaatttttgactttcaggattcaaagaaatgaattactgccttgaagggttttcnnnnnnnnnnnnnnnnnnnnnnnnnnnnnnnnnnnnnnnnnnnnnnnnnnnnnnnnnnnnnnnnnnnnnnnnnnnnnnnnnnnnnnnnnnn

SEQ ID NO: 11599 - DNA, 962 bp, Setaria italica
  misc_feature (959)..(959): n is a, c, g, or t
  Peptide Sequence Number=SeqID_77573
cactagctaaatagctatcagatcagaccgacactaaaaaaggtgcagatagtgcaagtacctcaactattgttgcaaaacaatttctcccgcagaagcttcaagcctattgcatgttcagctttcagctcatcagtcatttccctagtattcatgcccataaaagagttgtatgttttcagcatagcagcctccctcttgagcctcgccgcctcaacctttgcatcagaaacccgcagctgaacctttacgaactcttcatggcgttttttagatgcagcctgaatatccatgtacctctttatatcttcatccaaaccattgttattagccctgaccttgcctttgccattgcattgtttcttagcttcttttaccgctgttggatattccttttccctggtatcttcagatgtgggtgtgctgttccccacctctccctcatcacccagtttccttttgtttgatttctcaaggtcctccaggactgcatgccacttgggttcgtcacggagaaccttccagcaatgcataactatgaatgggccttctttatagtcgtccaaataaatttgcagagccttttctatcaattggtcatccgattgtctggtttcttcaattgatgcagccttcttcaatgaccagcagaaaaatccaacccatctctttatcttttggaatcgatctttgagatgcttcactttccttttccgttttgtagatgtagtgctgttgtagaatgcaagtacatctccccagtattgctcatttttcttgccatccgggtcactggaatggtttaaccaggcttgcaccaatctcaagtcttcatctggtttccatgacaagcgcttctcagtcctaacatcatcaccatcatcaatgttgatggcaggtttgactttttgaagccaatgcagcatgttgagtcattggatttgttagtggttgatttntta

SEQ ID NO: 11600 - DNA, 721 bp, Setaria italica
  Peptide Sequence Number=SeqID_77574
ttctgctgctgctgctgctgcgttggggtggctggtggctgctgccgctgctgtggtgcagccactggccatgcctcctccctcactgtgtccattcaattaccaccacagcaaaccacaatatcgattcaaagtagagaaaccacgaatcaaggaatagcgcaccgcacccagcaaggatcaaaacattagggcttccgccgcttcctgcagagcgtgagcccgtaccccaattcccagctcgctggccatggaggggatctcatctccgctggcgccgcaccaatcgccgcgaaatcaaggagcctcgcagggagcggcggcgcaggcccgaatcgagcatagaggctgcaggcctggcgagccaattcgattaccgcccaaaccctagagcaatggagcatgatccccgacccgcgagctccggcgagctcgtaccgcctggatctccggcgaggacgacagcgcgcctggcggaaccaaatcgaatccgagaaacagcaggaattgagctgacctccgaggggggaagcaattgggattggcgggcggagccgggtcggggaccagccggagacgaattgcgccctccctgctcgccggcgggcgggctgctctccccggcgttgctcagggcgcgcggcgaggcggctgcctgctgctgctgctgcttcgtgggttgggatgggctcgctcgtgttcttgtctttcgtcttcccct

SEQ ID NO: 11601 - DNA, 1271 bp, Setaria italica
  misc_feature (22)..(22): n is a, c, g, or t
  Peptide Sequence Number=SeqID_77575
cccctgtgtgccttggcagtcncttttagttttttttttggtcctgactaacccacctgtaagctttcttgcaattatccagaaaggtttcagaaaccccattagccatccccagcttgcgccaagggaatacaacacattgtgttagcaactgtacatatctttttctacaattctacattttacctcttcaaaccaaagcatttagctgcctatggaagctcccctcaactccatccaagtcaccaatatcctcattaacaaatcaaaacttgtcttcatttgagtaacattcttcagacactaagcgagattagtctgctggatgctgttgtcaagactagttacattgtaaaatgtcctttccaaatactatggcagatctcatctttacaccccacgcaagtgcatcttcatcacagaacagactaacaaaaccaccacttgttgcactcaatttaaattgcctccagtgccccaaacttcccatgtcaaaacctcaagcaagttcagtttacaactttatcaagaaggtctccagcagttaagtgtgtgaatatcagacctggctggtagcatctgaggaacaacatgacctggtagtggtgctccagatggcaaatggtttcgaacagtatgttgatgattcataggattcattgaagatctgtcaatgttcgaccttgaatatccatcctgcacaaatgacccttctgagcaagataatgctctgccacctgctagccaattattatgctggtcatctggactgaagttaccagatgccatccgccaacgttcttcagatggataatggctctgactgtttggaaaggactgcacaacataaggattgcacggaggtggtacagcttgttggcccatgggattcatgtgtgcaattcgagggtgggaatgtactggtggcgtttgcgtagacggaaaggcactgaaattcccttgctgaaaaggtacaccagtaggccgaaactggtaattaccactagaagtttgtggtgccataaacacgttgttgtttccatactctgctgacattgaaggtacaaaattaaccgcagcttgtccattgactggtccaccaggaacgaagttcgctgtatttccaataccttgaattgatgtatttcctgtcatctgggtcaactggttaccattgggtgtcctgaagtactctggagctggaggccgataacccaatgatgatggagatgacggaacaggcggcggaatagaaggaagaggtggggcct

SEQ ID NO: 11602 - DNA, 304 bp, Setaria italica
  Peptide Sequence Number=SeqID_77576
catgcataggaactgcagtacttgctgtttgcctccgtattcaagtgaacaaagacaacaaggaatttaaggacttccccggagagggcctttgctgactttgttctgtgcaatctggtgctccacctggtgatcatgaacttccttggataagcaactgctgtaccaagtggttaagattttgtagccccagattatggtcgctgatcagtgcggtttaatgtttggaactgtcataatgtttgagtgtccattcgactaacagttcattgaagaatcctgggcttacaaaggtaatctgtga

SEQ ID NO: 11603 - DNA, 764 bp, Setaria italica
  misc_feature (7)..(7): n is a, c, g, or t
  Peptide Sequence Number=SeqID_77577
ttttttntttttttttttttttttttaactatagccatttcacttccttgaattacgcaaatgctcggtattactttgtcaagactggatcaaccaaactaccaaagtgaaacatactgtccattcgactaacagttcattgaagaatcctgggcttacaaaggtaatctgtgagagatcatatggatactcaaacattatgacagttccaaacattaaaccgcactgatcagcgaccataatctggggctacaaaatcttaaccacttggtacagcagttgcttatccaaggaagttcatgatcaccaggtggagcaccagattgcacagaacaaagtcagcaaaggccctctccgggggaaggtccttaaattccttgttgtctttgttcacttgaatacggaggcaaacagcaagtactgcagttcctatgcatgaaaggacacctgagaggaaggagttgaaggggaatgacccaactaatcccatgtaagcaacctgaataagggcagtagcaacagcacaaatcacgtacaggtcgataatcttaagatttgttggtgtggcagcatatgcgttgctgagggactggatcagaagctttgcgtcgctcgtggccctcggcatcttgaagaagcgtagtctgccgctcgaagcgaggagacaaggaagaagataggtggcgtcgcgtgccccggtgccgcgcgaccgccgggaggggaagaggagagacgacgacggcgagtaggaggaggcgaccgac

SEQ ID NO: 11604 - DNA, 338 bp, Setaria italica
  Peptide Sequence Number=SeqID_77578
gcagatgaaattggttttgtttagacacagcttctaagaaaatggaatctaaatgttctgtcagtaaccaagataatggacaataataggaagatgaaacagcaaagcaattgaatatatcagttgctaagctgaggcggaatgggatgaggccccactgacggtttagccgcctcctgacggacgtcgatgttgtgaaggcgaaaaccattttagctgccgagttgcagatttcttctgatatcttgtcagagaatgaagatgaaacaccttgaagttccagtgcctcatgtcgcttctcctcccgccaccacttcctcaatcctgaggctaacgct

SEQ ID NO: 11605 - DNA, 572 bp, Setaria italica
  misc_feature (42)..(42): n is a, c, g, or t
  Peptide Sequence Number=SeqID_77579
caagaagcttgaggaggtgtatggaacatttgacaccccgtnacagaagaagaagggcttcgtgctgccaaggcccaagatggccaacgctgacctgggcagaatcatcaactctgacgaggtccagtctgtggtgaagccactcaacaaggagcttgagcacagcagccatgttcttcagcgggttcttcctcttctccctgcgcttcacttataagcccattacggcccacagcaagacccaaagctggatggactgcagcatgtcagagagggcgatcaccaggtcgccggactggatcatgcccctggcctttagcagggagaaggtgcggttcaggttgctctccatgtcgtctgagaagctgaggcggaatgggatgaggccccactgaaggtttagccgcctcctgacggacgtcgatgttgtgaaggcgaaaactgggcagtcaggacggcaccgtgagagcaaggaggccatgtggccagtctttgtgaaaacaagacggcgtcagctcccaggccgttagccattttagctgccgagttgcagatttcttctgatatcttgt

SEQ ID NO: 11606 - DNA, 655 bp, Setaria italica
  Peptide Sequence Number=SeqID_77580
caggataaaacaagagtgatagacctctcgagataagttcagtgacactactactcaaacttaactagatagcaccggctcactgagtcacgccgagccactttgagaagttctcaaactcggtgtagtcgctgtctgagatcatggtcctgtgccatgcctttccagcagccttgaccttggcagcctcctccgggctaagcttggtcctcttggattcgagcttctccttccttgccttgatgtgggcaaccttagcgagggtagccatcttgcgggcagtgccgaggtaggggttgagcttgagcacagcagccatgttcttcagcgggttcttcctcttctccctgcgcttcacttataagcccattacggcccacagcaagacccaaagcttgcacattaaagagtcaccccaaggtcagactataaataaagctaatagtaatataacagttttacagcagggcacaaagctgcaaattattgccacagttctctagtcctgcccagcatctaatacagggtgaaagcgaataatttcggtgcaaggaactgtccttcaaggtgccgataaagttcatggtccatcttccatctcatatgatcatcccacagaggattaggctctttcttagggtacgctcatcacctt

SEQ ID NO: 11607 - DNA, 1399 bp, Setaria italica
  Peptide Sequence Number=SeqID_77581
ttctcactataacaaggtaatatgtacactagtagtaaaaaaaaacttgaaggtatacttgaacacctgggtaattaccttctaaactttaagactgtgcaaaacacaatacctaatcaacaaacagaggaacaaccccacatgcttgtaaaactgcagcagtggctaccactaccagaactttcagaatgtttcatgggaaaatggtgacgggattcatcacaatatctacaaccttaaatcgaacgttaccggagaaatctagcacctacgggctctctcaatacagcacataaatcctccagctacccaattcataatttttgtggtcactgtccttccaacagatcgtcaaggtgaatatttactagaatgatttcacagcaacgcattaacaaaaaggaagacttgtcttaaaatcccacagattgaattcttatgatgatgcaggataaaacaaagtgataaaccctctcgagataagttcagccacactactactcaaaacttaactagatagcacccgctcactgagtcacgccgagccactttgagaagttctcaaactcggtgtagtcgctgtctgagatcatggtcctgtgccatgcctttccagcagccttgaccttggcagcctcctcctacaacaatggatctacagatattgttcagtacgtgtttgttgacaaaagggcatacagctgaacgaaataatcagcatctgatacattaaaccaacagtagttcacatattggtcagttctgtagtgttcagaagatatatgggcatgcaacgaagaatcttgacaacaatgtaaacatatcaaactatacagttacacaaatattcaggagatgtatggatgtgcagggattcaggaagttttgggattcagttttcgaaacatggataatgtaataacattcattcaagaattctgtaaccaaaacacttactaaaacatcaatctattcatcacattctaacaaggcatactcccaagttaccaattcagaacacaaatcaacaagagggatcaaactaaaacattcaagataaaccctgacccatgagttacagggcttgtcatatgctatatatgcaaagattaccgaagcttccagtaccataatcatttctaagaaaagagtagaacaaacaattgctcagatatctcctagcatataaagaaatggaacagaacacagtcgaatgtcttactaaaaacaattaacgatacagaaacaccctgagcaaatagtaaacaatgacaaactaggctacccatgcatactgatacagcacaaacgcgcaattacaagaatatttgttggcacaacattagatcaatgcacataactaaaccccaacaagaatcactacagcagaatcatgttg

SEQ ID NO: 11608 - DNA, 1108 bp, Setaria italica
  Peptide Sequence Number=SeqID_77582
ttaaggagcaaaaattcagaatggtctccagttctcaattctcatgcatggccacaaatggagaacaagattgaccatcacggtgcacggatcacaagcataatttaggtaaccagtttgaaactgctcatactctatgttctcacagcaacacattaacaaaaaggaagacttgtcttaaaatcccacaggtcttatgatggtgcaggataaaacagagtgatagaccctctcgagataagttcagtgacactactactcaaaacttaactagatagcaccggctcactgagtcacgccgagccactttgagaagttctcaaactcggtgtagtcgctgtctgagatcatggtcctgtgccatgccttttcagcagccttgaccttggcagcctcctcctacaacaatggatcgggctaagcttggtcctcttggattcgagcttctccttccttgccttgatgtgggcaaccttagcgagggtagccatcttgcgggcagtgccgaggtaggggttgagcttgagcacagcagccatgttcttcagcgggttcttcctcttctccctggatggactgcagcatgtcagagagggcgatcaccaggtcgccagactggatcatgcccctggcctttagcaggagaaggtgcggttcaggttgctctccatgtcgtctgagaagctgaggcggaatgggatgaggccccactgaaggtttagccgcctcctgacggacgtcgacgttgtgaaggcgaaaactgggcagtcaggacagcaccgtgagagcaaggaggccatgtggccagtctttgtgaaaacaaagacggcgtcagctcccaggccgttagccattttagctgccgagttgcagatttcttctgatatcttgtcagagaatgaagatgaaacaccttgaagttccagtgcctcatgtcgcttctcctcccgccaccacttctcaatcctgaggctaacgctcctcagaacactaagagccttctctggatatcttcccattgctgactcaccagaaagcattagagcatccgcacgctggcggacagcttcagaaacatcggcaacttcggcccttgtgggagtaggat

SEQ ID NO: 11609 - DNA, 1049 bp, Setaria italica
  misc_feature (1041)..(1041): n is a, c, g, or t
  Peptide Sequence Number=SeqID_77583
cgcctgcccgcactggccacgaccaaaccctaggcgccgccgcccccggggcccccagggctgctcgctgggagaagaagaaggaggagatcggaggagagacacagggatttatgtcccagcgaggggacaggggcgaggggcacaggagacccggccggtccagcagcttcggcggccaccgcggaggcggagtcggcggcgcgggcaagggcggcgggggctcctccggccagcctcccctctcatctaaccgcagcttcagaaagccgggcaatggccacggcgggcaccagagggtggtgagccagcctgacaccaccggcttccagccagctcctgcgcccgttccccaccagacacctgcgcgccctccggtcgcgcctcagaatgcgccagcgcatgttcccgtccctgcgccacggccacagcaccatgatccacaagtatcgtcatcatcacctgccagtgagaagccggctaatgcgccattgccaaaagctacccatgctgcccccagggcaccaccaaagagctctaacccccctattcctcagggagcatcaaaaggagaaccatccaagggatttaactttcagtttggtagtataaatatgaatggactaccgcaatttcctgctaggacaagctcggctcctccaaacttggatgaacaaaaacgtaatcaggcacttctggaggaactcaaggttacacctcctggtccgatgcaaccagctccgaaacagcagccattgcagaagcagcagcagcagcagccacagcagctgttgcagcagtcacaacaggttccccagcagccacaacagcagcaagcaagaaaggatgctgttagttccagccaaccgaacaccatcaaccctcatgtgccatcacaattgaaaagagatgtgcatgcttctccatctgtccccaatgttacatctcttaggcctcctactgttcaaccaatgcctggggtgcaaatgtcgatcccctttcaccatcagccagcaccagttccattacagtttggtggtncacggtcc

SEQ ID NO: 11610 - DNA, 2052 bp, Setaria italica
  Peptide Sequence Number=SeqID_77584
cgtttcaagagatttttcatgctaaggtgcaatttacaaagcttcccgttaaaaaatctacacgggctgggtaagaagatgaggcatgagttttgaagcccacataaatacaaacaggatggatggtggaagatttttgcctacttataagcccatcacggcccacagcaagaccccaaggtcagactataaataaagctaatagtaatataacagttttacaacagggcacgaagctccaaattattgccgcagttctctagtcctgcctagcatctaatacagggtgaaagcgaataattccggtgcaaggaactgtccttcaaggtgccgataaagttcgtggtccatcttccatctcatatgatcatcccacagaggattaggctctttcttagggtacgttcatcacctggatggactgcagcatgtcagagagggcgatcaccaggtcgccggactggatcatgcccctggcctttagcagggagaaggtgcggttcaggttgctctccatgtcgtctgagaagctgaggcggaatgggatgaggccccactgaaggtttagccgcctcctgacggacgtcgacgttgtgaaggcgaaaactgggcagtcaggacggcaccgtgagagtaaggaggccatgtggccagtctttgtgaaaacaaagacggcatcagctcccaggccgttagccattttagctgccgagttgcagatttcttctgatatcttgtcagagaatgaagatgaaacaccttgaagttccagtgcctcatgtcgcttctcctcccgccaccacttctcaatcctgaggctaacgctcctcagaacactaagagccttctctggatatcttcccattgctgactcaccagaaagcattagagcatccgcacgctggcggacagcttcagaaacatcggcaacttcggcccttgtgggagtaggatactcgaccattgattcaaggagctgagaagcaacaatgactggcttgttgagctgcctgcacagttgaactatctttagttgtattgaggggacctgctccaagggaacctgtgcccccatatcccctctggctaccatggcaccatctgatgctcggatgatctcctccaggttctttaaagagtcaatgctctcgattttcgcaatgactgctatatcactgccacggctccttgcagctatgtagcttttcaaatgtttaattacttctgctgacttgacaaatgaaacagcgatgaaatctacaccttcggcaattccaaagtctatgtcaagccaatcctttgaagaaattgtaggaagcatagcattcctctcacggacaatactgccatcacgccagaatgtaagattcgcacgtggcaacaataaaccaggatccgtgcagcgacacttaacatctggtcccaacttctcaatcacctcaaaccgagccattccaccatccacaagaagctcatcaccaactctcacatcttcagcaaacccgtcataattcacattaatagttcgttctgggagaggcaattcaaatgacctaacactaaatgtccagacttctccatcctccgccttggccgatgaggcgccgccgaggtcccccatgtggatctcgctgccctcggtgtccatcatgacggcgacggcgtagcccttctcctcgttgagcctcctgactgcccggatgacgccccggtgccactcccggtccccgtggcacatgttgaggcggggcgacgttcatcccgccgacggcgagcgcctcgagctgctcgggcgacgaggtggccgggcccacggtgcagacgagcttggtgcggcgcgtgctccggaacccgttctcgcgaagctccgcctccgtggcggcgtccacgtcgatgggcgcgaggatgccattcgggttggggaagtcggtgaagtcggaggcggcggccggggaggtggagcgaaggcggagcgggaggcgcgggcgcgcgggggccgggaggcggaggaatggggaaggggagggagagggagaaggtgggggccttgcg

SEQ ID NO: 11611 - DNA, 435 bp, Setaria italica
  Peptide Sequence Number=SeqID_77585
ggcgacggcgacgcggcggaggtgaacgttgacgcgacgatgccagcggcgccagatcttggtgggcgcgaacatgcgtccgccacggcacatgttgccgaaggctccctggccggcgcggtgggtaccgccgccgggaacacgggggatacgggacaccgcacgccccgtcccccaggactccgcggaggtctggtggccggcgcgtcgagacaccgcgtagggctggcggctgttgcaggactgaagcttgtggacgaagcggacgatgtcggggcggatcggcgcgcggaggacgtccggcagcgcggtgccggctgagtccgtggccatgtcgccctccagggccttgacggagaccgaggggacgcgcggcggcggccatttgcggcggcggcgaggggtagcggcgcggtggctgcggcggcggggtgg

SEQ ID NO: 11612 - DNA, 1799 bp, Setaria italica
  Peptide Sequence Number=SeqID_77586
tttttttaggtacagaagttgcatgcgaatgcaatttattcaagtgatgaacgatcgattctctttgacataaccaagcctgatatcttctgagcttacactgcgcatcagtgaactcgatacacaataagctctcacaactcataaaagaaagttgtccgtccagctcagttccaaaattggtcgggataaagattgtacaggaaacaacaggatactgggatcctattcctagggtacattcatcacttggatggactgtagcatgtcggagagcgcgatcaccaggtcaccggactgcaccatgcccctggccttgagcagggagaaggtgcggctgagattgctctccatgtcgtcagattcactgagccgaaacgggatgagaccccactggaggttcagccgtctcctaaccgacgtcgaggacgtgaatgcgaagattgggcagtcggggcggcatcgtgagagcagggaggccatgtggccatccttggtgtagacaaaaacggcatcgactcccaagttgttggcaatttttgccgctgaattgcatatttcctctgatatcttatcagaaaaggaagatgagacatcttgaagctccagagcctcatggcgtttctcctctctccaccacttttcaatcctcaggctaacactcctaaggacactgagagccttctctgggtaccttcccatggcggactcaccagaaagcatgagagcatctgcacgctggcggactgcttcagaaacatcagcaacctcagccctggtgggtagaggatactcgatcattgattccagaagctgagaagcaacaataactggcttgttgagttgtctgcacattctaactattttctgctgtaccgaagggacttgttccaggggaatttgtgcccccaagtcccctctagctaccattactccatctgatgcacggataatctcctccaagttcttcaaagcatcaatgctctcaatctttgcaatgacccctatatcacttccacggctccgtgcagcaatgtagctcttcagatgattaatcacttctgcagacttgacaaatgatacggctatgaaatctacaccttcagcaattccaaaatctatgtcgatccaatcctttgatgaaattgtaggaagcatagcattcctctctcgcactacactgccgtcgcgccatatagtaagattagcccgtggcagcaacaaaccaggatcagtgcaacgacacttcacatctggccctaacttttcaatcacctcaaacctggccattccaccatccacaaatagttcatcgccagctttaacatcttcagcaaagccatcgtaattcacatgaatgattcgatctggcagtgatgtgtcagaagatctaacgctgaatgtccaaacttctccatcctcagcctttgcggagggcgcgccgccgaggtcgcccatgtggatctcgctcccctcggtgtccatcatgaccgcgacggcgaatcccttctcgtcgttgagcctccgcacggcgcggatgaccccgcggtgccactcgcggtcgccgtggcacatgttgacccgcgcgacgttcatgccgccgacggcgagagcctcgagctcggcggcgccgcaggtggaagggcccacggtgcagatcagcttggtgcgccgcgtgctccggaagccgttctcccgcagctccgcctccgtggcggcgtccacgacgaataggaaccgaacggggtaagggaaccgaaccgaaccaaaaacgtaaagtaaaagaaaacgaaaccaaa

SEQ ID NO: 11613 - DNA, 1330 bp, Setaria italica
  Peptide Sequence Number=SeqID_77587
atccaaaagatctgcactgcattgtataacacacttgcggagttgctgtagtcaatcgaatccagcatcatgaaactaacatacataggcaggcaccagctgctaatactactgctgctactagaacgtacagcaggggaatgggggaaaccggtcaggtccttctcactgctacagcattgcaagccatccccggtggaagcaaacacataggccatcatcatatacaaacggacactcttgctacaccaaccaaaccttcttctttcttcttcttcttcttccagcactccaaaccgatctgcgtcaagttaaaaaggcaaaaaaataaaatcccaatctgacggctagctaagcttcgtttcttccttcaccgatccacggttccaatcgcctgcccattcttcttgactagttgattgcttcaggcgccgccgccccgccgccgccgcaggctatgcgtgggccacgcggcgtcagtagcctaggtggcccatctcccagttgagcgtggacgccaccctgtcgtgataaggcacgtactcctcgagcttgtccatgagctcctgcgcggtgggcgcgagcacgatgatgcggcgggcgctggggttgatgaacccttcctccacggccttgtcgatgaaggtcagcagcgagttgtagtagccgtccacgttcagtagcccgaccggcttgtgatggatgcccagctgcgcccacgtgatgacctcgagcagctcctccagcgtcccataccctccgggcagcgcgatgaatgcgtcggactgccgcgccatctccgccttcctctggtgcatgtcggccaccggccgcacctccccgaccgtctcgccgcttatctctggtgtcatgagcgtcttgggaatgaccccgatgacgtggcggccgccgtcgtacacggcctgggagacgagccccatgagcccgatgctgccgccgccgtacaccaggtcgacgctccgggccaccagctcgttgccgagctcaatggcggcgtcatggtagctccgcttcttgccctggctgctgccgcagaagacgcagatcctcttgaacctcgactgcctcatcgtcatgggtggctgctgcagtgctgctacctccctccctcttgtgtgctcctctttcttcctctctcactactccgtgtaccctcgcgtatttatctctctttagctagctagcctcggctctcctcgctcccgttgccgcgcgcacagtgcctactgtaccgctggctatagctagtgcaggcgagaagcgcgcactaggatgagaagagaagatgggctctggctctcctcgcagc

SEQ ID NO: 11614 - DNA, 1550 bp, Setaria italica
  Peptide Sequence Number=SeqID_77588
tttttcagaatggtctccagttctcaattctcatgcatggccacaaatggagaacaagattgaccatcacggtgcacggatcacaagcataatttaggtaaccagtttgaaactgctcatactctatgttctcacagcaacacattaacaaaaaggaagacttgtcttaaaatcccacaggtcttatgatggtgcaggataaaacagagtgatagaccctctcgagataagttcagtgacactactactcaaaacttaactagatagcaccggctcactgagtcacgccgagccactttgagaagttctcaaactcggtgtagtcgctgtctgagatcatggtcctgtgccatgcctttccagcagccttgaccttggcagcctcctccgggctaagcttggtcctcttggattcgagcttctctttccttgccttgacgcgggcagcctcagcgagggtagccatcttgcgggcagtgccgaggtaggggttgagcttgagcacagcagccatgttcttcagcgggttcttcctcttctccctgcgcttcacctccttgttgagtggcttcaccacagactggacctcgtcagagttgatgattctgcccaggtcagcgttggccatcttgggccttggcagcacgaagcccttcttcttctgtgacggggtgtcaaatgttccatacacctcctcaagcttcttgaaggcactctcggtccagatcacaaagcgcccgaggtggccaccaggggcgaggtcgagcaggttgaggcgctcgacgttggcgacatccacaccggggaggttgcggaaggccttgacaatcttggagccctcggttccgtagacgatgagcgggcccttgcggttgatgtagcggcggttgcgcatcttccctttgccggggcggatgccgacagagtccttggccttctcgacgtcggcgtaggcgccaacctgcttgaggatcttgagcgcctgggaggtcttctcgatggactcagcggagtcggagatgactaggggcagctcggggacggtctcgatgcggtggccgcgcgcctggacgagggccgggacggcggtggcggcgagcgccgaggcgacggcgacgcggcggaggttgacgttgacgcggcggtgccacttgcgccagatcttggtgggcgcgaacatccgcccgccgcggcacatgttgccgaaggctccctggccggcgcggtgggtgccgccgccggggacacgggggatacgggacaccgcgcgcccggtaccccaagactccgcggaggtctggtggccggcgcgtcgggagacggcgtagggctggcgcttgttgcaggacagcagcttgtgggtgaatgtgaccacgtcggggcggatcggcgcgctgaagaccgccgggtaggggaggcccgtggcatcggtggccatgtcgccctccagggccttcacggagacgagggggcggctgaaggcgaccatggcggcggcggcggcggcggcggcggaggcggctagggttttggggcggcgcggcgcggcg

SEQ ID NO: 11615 - DNA, 1669 bp, Setaria italica
  Peptide Sequence Number=SeqID_77589
ttgaagcaaggcaaaccgttcttccattcacccaaactagcgatcaagaagctacaaccaagaaagcataccacaatcgatagtaacaaacaaacgaaggcacaaattgtttgttgaaattcgcatatactttgttctcataataggtgtctggaagtgaaggtgcagcagcaaacaactaccaaagccataaccaaaacgagataccatgtctgatgatcccaataacaagtgacataagataatagaaaccaaaatcataatttctgactggggcagtgataaactacgaaggcttgaaccagaagatcactgtgtaacaccaagccacttggtgaagttctcaaactctgtgtagtcgctgtctgagatcatggttttgtaccacgcctttccagcagccttgaccttagaagcttcctctgggctgagcttggtcctcttggagtcaagcttctccttcctggccttgacacgcgctgcctcggcaagagctgccatcttgcgcgcagtacccaagtatgggttcagcttgagcacagcggccatgttcttcagcgggttcttcctagcctccctgcgcttcaccaacttgttgatgggcttcacgaccgactgcacctcatcagagttgatgagcctggacaggtcagcgttggccatcttaggcctagggagcacgaagcccttcttcttggccgaaggcgtctcgaaggtaccgtacacctcatccaacttcttgaacgcgctctcggtccagatcacgaaccggccaaggtggccaccaggggcgaggtcaagcaggttgaggcgctcgacattggcaacatcaacaccagggaggttgcggaaagccttgacgatcttggagccctcggtgccgtagacaatgagggggtcccttgcggttgatgtagcgacggttgcgcatcttccccttgccggggcggatgccaacggagtccttggccttctcagcatcagcgtaggcaccgagctgcttgaggatcttgatggcctgggctgtcttctcgatggactcggcggagtcggagaccacgagcgggagcgtcggggacggactccacgcggtggccgcgggcaagtacgagggatgggacggcggtggcggcgagggcggaggcgacggcgacgcggcggaggtgaacgttgacgcgacgatgccagcggcgccagatcttggtgggcgcgaacatgcgtccgccacggcacatgttgccgaaggctccctggccggcgcggtgggtaccgccgccgggaacacgggggatacgggacaccgcacgccccgtcccccaggactccgcggaggtctggtggccggcgcgtcgagacaccgcgtagggctggcggctgttgcaggactgaagcttgtggacgaagcggacgatgtcggggcggatcggcgcgcggaggacgtccggcagcgcggtgccggctgagtccgtggccatgtcgccctccagggccttgacggagaccaggggacgcgcggcggcggccatttgcggcggcggcgagggggccttcggcaacatgtgccgtggcggacgcatgttcgcgcccaccaagatctggcgccgctggcatcgtcgcgtcaacgttcacctccgccgcgtcgccgtcgcctccgccctcgccgccacgg

SEQ ID NO: 11616 - DNA, 309 bp, Setaria italica
  Peptide Sequence Number=SeqID_77590
atcagcctcagctcccctccactatctccgagcagcgcagccacaccgcaccagagccagagagagagctctgcgagggaaagccgcagcacaagaggcaaaccctagcacaaagactcactttctccggagcaagccaagccaagccaagccggatagatagagcatagcatccgcatcgccgccgtacccaaccatgatcttcccccctgccttcctggattcctcgagctggaacgataaccagcagcagcagcagcaagcccaccaccaggttgcgggaggaggaggaggcggcggcggcgacgg

SEQ ID NO: 11617 - DNA, 627 bp, Setaria italica
  Peptide Sequence Number=SeqID_77591
gtcggaggacgaggcgcagagggagtgggaggcggagctgaaccggcggctgaaggaggctgaggagatggaggagctggagcgcaccgccgagcagctgcagagccaggccgccgccgaggccaccgaggagtcggaggaggagaagcgcgagcgcgtccgccgcgagctccagaaggtggcacaagagcaggcagaaaggagggcaacggccaagcaaatgtttgaattggggcaaaaggcatacgggaggggaatgtatggccgttcaattgaattcttggaggctgcactcactatcatacgtccctcctctctcctaggtggcgagatccaaatttggcttgcaatggcatacgaggccaataggaggcacaaggattgcattgcattgtacaaagaattggaaagtagccaccccatgatcaatatcaggcggcaggccgctgaactcagatacattttagaggcacccaagttgaagatatcaaatgacgaggtggtcacaataccacaaattgggagcagctgggattggtatgccggaacatggagcgacaaaatcaaggaacaagaggacaagaaaagaatgatgagtgctgctagcaaccaagttcaaccttctcc

SEQ ID NO: 11618 - DNA, 983 bp, Setaria italica
  misc_feature (1)..(28): n is a, c, g, or t
  Peptide Sequence Number=SeqID_77592
nnnnnnnnnnnnnnnnnnnnnnnnnnnnaaacagaacattgatcagtctattgcgctgcttataattttttttcgacggagcacgtatcagctcagatcaaggtacttacaaatcaactccagatgcaaatagtatcaagtgtgcacatgagcagacagatgggttgctaatcaattgaactagctagcatctgcttgcattgctagttacaatagttagtatttacattgcagcaaaaaaatatcttcaaagtgacaaatggcccatgccagtccggaagagtatatatgatgcatccttggattgcatagctaaaataacaaatgcaatccaccatgacctatcttgtcttagagtgttctgagacaaagccatattagcagcacctccagagttgtcgaaccatggatcagtgttcggccaacatgcaattggcttgttccagagttgcgggagttcttcatgtttgcagatagattgctgtaccaatcaaaaggatccataaagtaatgaccacccatgcgctcttcttccattcacttggccgtcgcaagaaggagaagtctccaaagatgtttggagaaggttgaacttggttgctagcagcactcatcattcttttcttgtcctcttgttccttgattttgtcgctccatgttccggcataccaatcccagctgctcccaatttgtggtattgtgaccacctcgtcatttgatatcttcaacttgggtgcctctaaaatgtatctgagttcagcggcctgccgcctgatattgatcatggggtggctactttccaattctttgtacaatgcaatgcaatccttgtgcctcctattggcctcgtatgccattgcaagccaaatttggatctcgccacctaggagagaggagggacgtatgatagtgagtgcagcctccaagaattcaattgaacggccatacattcccctcccgtatgccttttgccccaattcaaa

SEQ ID NO: 11619 - DNA, 267 bp, Setaria italica
  Peptide Sequence Number=SeqID_77593
tcctagccttctccactctcccattccgtccccccgatctcgccgggatctcctcgccggcggcggcgatggcgggcaacgacaactggatcaacagctacctcgacgccatcctggacgccggaaaggcggccatcggcggcgaccggccctccctcctcctccgcgagcgcggccatttctcccccgcgcgctacttcgtcgaggaggtcatcaccgggtacgacgagaccgacctctacaagacatggctgcgcgcgaacgcga

SEQ ID NO: 11620 - DNA, 1441 bp, Setaria italica
  Peptide Sequence Number=SeqID_77594
atctgtgccagggaagaagttaaaagcatgggcattctccaactgccaggccttgctggatatcaagcttttgcagtccttcttaaaactttcccacccacagctaatgtatataagggtttcaggccaggtttcactgctgtcttctgtcgttgtattatcaacatgaacagcagcctcccttgcccgtaagatccatggtctcttctcatccttaacctttgcaagtgaacttttagccttgtatgccttgcgctccgacaacgcaactttctgtaaagcaatgataacagatgggtgcaatcccttcctgggaggatccacaataacgacacttgacccttcaagccagtgaacaggttcaactgaagcatcagtattgtgccaagtgatggtgcaacccaggttcgttggaagtcggcttgctgatttctcaaaagacatcttcgattgtttgttaatctcaacacatttcacagaccgacatttccttgaagcagcaaccgatagtccaatgacaccagcaccagagtacaaatcaacaactgttgaaccacgcggtacatacttgttcagcttatgcagcaaagagttaaatgacagagtattagcctggccaaagctacatgggtccagcgaaatatcaactcctccataacgctcccacaggtctctctcccctttgagatgtctccatttgtgcccaaaaattatattgctggttgatgtctgaaaattggcccatatggaatggatcagatgaacactactctttggcccaccatttctccacaagaattctatcaataaagccaacttctctgcattttgggaacgctcatctcttgaattccaaactaacgaaatttgaactctcccttgctcatatcttttatcaactggaatagatgtgttgtatgttgtcacagccatctgaacatatctgagttcaccagttccagcgtcctcgtcaaatggttggatattcaactcggatataccttgccttagcagcttaacagcagcattaatgcttgggtggtgagctctgcactctggaatatctgtaacaacatgcgtcccttcctggtataaaccaatcaacgggttctctggtgttccacgaactgctaactttgcccggcaccgccattgggacagcctgcctctgctgaaggtgaaatctccgaccccgtggcccttgaagaaattctccacctcctgcagcaccggcggcttgtcgaggtccacctcgtgcgtgcaccctgagcacttcccgaagtggacgcaatcgaggcaggtggacgacgaagacgcggtggaggcagtggagggaggcagtggggtggaggcggtggttggtttggcgcggcgggctcgaggcgaggcggtggtggcgttgtaggaggcggagggggaggaaggcggacgcgagtgtagg

SEQ ID NO: 11621 - DNA, 752 bp, Setaria italica
  Peptide Sequence Number=SeqID_77595
agaagacagcagtgaaacctggcctgaaacccttatatacattagctgtgggtgggaaagttttaagaaggactgcaaaagcttgatatccagcaaggcctggcagttggagaatgcccatgcttttaacttcttccctggcacagatagcattgaaatcctcgcgatcttcaaacgggaatcagaagctggtcaaaagaaaagaagaaagcaaaaaggaagaaggccaagtagactaacagaaggctgaccgtactgtaactggaaggctgacgtggtacggccatagattttcatgctgtgggttttgcaaaccttttttgaaacgacagttttgcaaatctctaatgctggtccagaagaatactttcattggtgctctgaggaatttttacacgctccaaaccaatcaactcagtgatctgtgactagcgcatcgtaattggacacaaggtaactcgagaaacttgctcaattatacaagtcttcctgaacaggaaattctatagcaatcggaaacttctattctgcagcacgattttttttttaaaaaaaacagacatttgttttggggggcaccgaaagaagccccttttattcaattatgaatattcaacttttgatttgctatatctaataatttaaatgtagccgttccaaagggccagctttatcagattgcgtttttgtgtgttcaggttaggctagggtgctcatgtgcgaaatgactgtccgcacctcctaaagcagac

SEQ ID NO: 11622 - DNA, 715 bp, Setaria italica
  Peptide Sequence Number=SeqID_77596
tcattgctttacagaaagttgcgttgtcggagcgcaaggcatacaaggctaaaagttcacttgcaaaggttaaggatgagaagagaccatggatcttacgggcaagggaggctgctgttcatgttgataatacaacgacagaagacagcagtgaaacctggcctgaaacccttatatacattagctgtgggtgggaaagttttaagaaggactgcaaaagcttgatatccagcaaggcctggcagttggagaatgcccatgcttttaacttcttccctggcacagatagcattgaaatcctcgcgatcttcaaacgggaatcagaagctggtcaaaagaaaaagaagaaagcaaaaaggaagaaggccaagtagactaacagaaggctgaccgtactgtaactggaaggctgacgtggtacggccatagattttcatgctgtgggttttgcaaaccttttttgaaacgacagttttgcaaatctctaatgctggtccagaagaatactttcattggtgctctgaggaattttacacgctccaaaccaatcaactcagtgatctgtgactagcgcatcgtaattggacacaaggttaggctagggtgctcatgtgcgaaatgactgtccgcacctcctaaagcagacaactcaaggcgggaatttcagggtgcgtttggttgggagacgatgtaggacgggacggtcctgtcctta

SEQ ID NO: 11623 - DNA, 1115 bp, Setaria italica
  Peptide Sequence Number=SeqID_77597
gttcttctcccccgttcaggtacgagcccctgcgcctcccaatattgtcaacgaaaccctccaaggcgttagagatcggtagaacagaagagagcttggaccaggaggaggagcagtggagttgggagggagcctgtatatcccaccggcacgaggccgcgttacagggtgtgcagtacgcacggcggcacgggcccttttctggtgcgcgccctcaatgcgctcttgatatccccgccccaccggctcctcctgtcctcttcgatccacttcttctgctctggttgctgcgcgcctacctcgagcggcaacagcggtgtggaagctggcattttgatccggttttccggcgtgctttatccgccgcaatccctggaaggattcttggggaaccctctatgtgactgcctcctccaacaagctctgcaaattctaggatccatttgcctgtacttggcaagctccgggcccttgtagattacctgtatgatacacaacttgttgcaagaattcgactgtaaatgggccaaggaatcgcccccgcgattcctggtttgatggctttttgttggtgtttccagtgacagattctttttctcctcaaaattccacttcaacatgtggtttctatggatccagacttccaaagttggaatctgatcacttgtggcagtgtttcttggcttccttattttgtcgttatggaggagcagaactcatggcttaggaggaccaagttctcccacactgtctacacaagagtggatcctcgaagggtacctgttgctccggttggcaaggatgtggtggtacctttcgctccacttggcaaggatgttgagcggaaactgcagaagtttgtgagtatggggaagtctgtgtcgatgcccgttcatcgggatgatgaaggtacagggactgcacttaagcactgtgatagcttgcctctagtccgatcttcgcttcagcttgatagggacaagtccaacaaaccgaagagggcgactttggagattccttcaagccctccaatgaactcagagaactgccggtgtccaagagccaggagcctggtcaagagcccaagttcaatgatgctcctcagttacttgaac

SEQ ID NO: 11624 - DNA, 260 bp, Setaria italica
  Peptide Sequence Number=SeqID_77598
tacgagaggcttcgtggcaaggggtaccggcactacctggtgatggtggtggccatcccctcgttcttcgacctcaccggcgtgatcgccatgtccgtcttctcgccggtgctattccggacggtcgggttcagcagccagaaggccatccttgggtccgtgatcctcagcctcgtgaacctggcctcgtcgtctctgtcctccgtcgtcgtggaccgcgccggccgcagggttcctgttcctcaccggtggcgcagcaa

SEQ ID NO: 11625 - DNA, 254 bp, Setaria italica
  Peptide Sequence Number=SeqID_77599
tttatctccactctctcctcgcctcacgctttccacactgatacggcacccagtcgccgcctcgtcacgatcttggagagagagggagagacagagttggaaggatgagttcttgggggtccgtgtccgcggcgccggagcgggacatcgatgacctgccgcggaacgacgccaactacacggcgctcacgccgctctggttcctggagcgcgccgcgctggcgcagccgggcagggcgtccgtcgtgcaccgg

SEQ ID NO: 11626 - DNA, 291 bp, Setaria italica
  Peptide Sequence Number=SeqID_77600
ctctttctcccttcggttccgatccccccaccatccccgcaggcaaggcaggtcaaaggcgacgccgcgggctcaaccgagggcccggcgttggtggtggtggcgcggagatggcggtggagcgggacatcgacgacctgccgcggaacgacgccaactacacggcgctcacgccgctgtggttcatcgagcgcgccgcgctgacccacccggccagggcctccgtcgtgcacgggcccgtgcgctacacctgggccgacacctaccgccggtgcagacgcctcgcctccg

SEQ ID NO: 11627 - DNA, 400 bp, Setaria italica
  Peptide Sequence Number=SeqID_77601
agacaaggtcattctacacaattttgtgccgttgacaaacttcgtgtttctgcagtaaaacctttaagtgagcgaaacatgaaggatgcgtctgccaaaagaaatagaacttccgaaactagtacttcagaggctgctgaaaaagctgcctccagatcaggaaatcaatcagagcaaatcataaaatgtggtacttatcagaatcctacatatgggcctaaagatgttttacctgcctcattcggccatgtgaaaaagccctccccgttgtcagctcgatctaatgaacaggatatgagatatattttgtccaaccctgggagcacagcttcagtagattataacaagataaaagtgggatgatcatctttgaacttcagcttgttataatctactgaag

SEQ ID NO: 11628 - DNA, 1882 bp, Setaria italica
  Peptide Sequence Number=SeqID_77602
ggccaacacaatttcaggaaaatggtccaacaatagaaaatagttaggtacttttacttctttgctagagatattcagagctatgaaaatcactatagtaaattagttgaaaatatgctgaagaatgatttagttctcagaggaagtgttgatgctgttgagttgcttatattcccttctaataccctgtcaaagaacttccaaaggtggaatatgttctattttctatggggggtattcagagttagcagaaaagattgctcaaacctttcatctgatgtaccgacaagtaggctggaacctaattttattgaggatccccggggtgtggatcccagtacctctgttttgtcatctagtctttcattctcaaaagacaggaatagttttgctgaacaggacagtggtttggtaaagtcagctaattttctaccgagtttagaatccaatcatgaggtgtgtttgaatggagagaactctatacatcagcctgtgaatggaagagctctagatgatcatctagattcaacaaatagcaagggtgctatgggtccctctgccatggctacagaattaaaacacaagaaatctgatgttaaaacattggacacttttggtggcaatgttagtgaaagagattttgatgtgaacacggaggctgttgcttgttctgtctcctcaacccatcaggaagaatctggcaaggagagcacaatcatcaaccttaacgatgcagaggacctcatggatatagaacctgtaaacaccggtgagattagcacagaagcactagatccacatgcatcaggtggtgcacgcaaaagaaattttgagatggccaatggagctgctgaagttgatggagtactcgagcataagaaaatcaaattggatactgtagtgtctacaaactctgagttaagtgagaataccaacaatggaaggttatcatctaaggtgcatcccctcgctgctttctctgtggatgacggcactagcaataaatcgatggcaggaccctccagcagtgatagaaagtgcgtatttcctctagatctaaatgcagtggataatgcagtgtctgagaacattgtaaatattccatcttcagatgatgaagagtccctggaacctgttccatcaaaggttggagagaagcaggccaggggagataacccgtcaactgatatagcaggtgccctctccctcacgcttgcatttccgtcaaggaagggacaaactagtaaaccgcaatcggagccacagagacagtttcctgagaggagcaatgggaataatacatcatccatttgaacattgatggtgagctacccaagcagtcttgctctttgaagccacccataacatcctaatcccaaaacagatgcacttgcaatgatgcctcgttggaagtgccttttagctgataacctcgtatacttggtgtcacatccatctggactttgttgcaatgagctccaatgctctgactgtgggtcgattcagtgcagaaagagtgagctggtctttcagaatttagattggattggagcatcaaatgagaagtgtcatgttttagaagatatgcattgtaaatctcatgtccatttttgcccttagcctttagtggtccgatagttggatgttaccaagcgctcgaaaaatgctggtgttcgactgttcgcaaaacgttcgtttttgttcattgtttctttttagtccatgaatttgctgtggttgctgcccgaacagcattgcactggtattaggcaaataactcgtcactatcttatatatgtagttaaaacaagaaacttgtagaatcaaatctttgaagcagcgctggttattcgtttccaataagtaaaaaaaaaaaaaaaac

SEQ ID NO: 11629 - DNA, 1548 bp, Setaria italica
  Peptide Sequence Number=SeqID_77603
aagtttcaaggaatcgtggtcttcgaccattaaaaaggaaagggccaatcagcatgacaactaagtctgcaaccttcaaaaagcctaaaccttgtgagccagcaaacaaggcaaagtcttccatcttgtcacctgctgaggagccaaggtcggtgaatcagctggtgagccaaaatgctacaaatgatcaatgctcttctatattggggactccctccactactgcgcaaatgattgctcctgttatttcaaaaactgataccacagctcagccctttgctacaggaaataacacggctgactcaaataatttaggcactgctcatttacagggtggtaaaagttgcattggaaacagtgaactaaagaagccacttttagcaaaagtgcctggaagtacgatgccacctaatcctgaaagatccttgggtggtattcttggtcctggtgctcagagaaaagtaattcaaaactcagatccttcacatcgggatgctaaaataaaggactccactggcctcagacagggtgcttctagcagtaatcgcacaatccgttgccaaagatgtaatgaagcaggtcattctacacaattttgtgccgttgacaaacttcgtgtttctgcagtaaaacctttaagtgagcgaaacatgaaggatgcgtctgccaaaagaaatagaacttccgaaactagtacttcagaggctgctgaaaaagctgcctccagatcaggaaatcaatcagagcaaatcataaaatgtggtacttatcagaatcctacatatgggcctaaagatgttttacctgcctcattcggccatgtgaaaaagccctccccgttgtcagctcgatctaatgaacaggatatgagatatattttgtccaaccctgggagcacagcttcagtagattataacaagctgaagttcaaagatgatcatcccactttatctgccaccacaggaatccctgttgataatagttgcactatgccaagtgatcgaagggatgaatctgctcaagccttttcagctggtgatgaaccaatggcttcaactgtcccagagctggactggatatggcaaggtggttttgagctgcggaggactggaagatcacctgagctatgtgatggtttccaagcccacttatcatgttctgcttcacagttagtgctggaagtagcgaagaaattcccttctaaagtccagcttgaggaagttcctcggcagaattcatggccaacacaatttcaggaaaatggtccaacatatgaaaatgttggtcttttcttctttgctagagatattcagagctatgaaaatcactatagtaaattagttgaaaatatgctgaagaatgatttagttctcagaggaagtgttgatgctgttgagttgcttatattcccttctaataccctgtcaaagaacttccaaagtaagaattcttcaaccacttgaagttttattttttctcatgatggtttctgtggttgctgaattgatcgtattcttattctgtactaaagggtaggaaataatagta

SEQ ID NO: 11630 - DNA, 266 bp, Setaria italica
  Peptide Sequence Number=SeqID_77604
gcttctacttcacccctggtcgagcacaagtacaccacaaaacgcgacgagaagccttgctagttgtacgttcatagccacgacgcacactagctcggcatacacaccatgggcatcctgaaccacctctcccatctctgcagcttcacggacacgaaggaggccctcaagctccggaagaagcgcccgctgaatgtgagatatgattcaattcgtgtttgtgtttcgatcgagatttaaatttgcagtgtttgtttttgcagata

SEQ ID NO: 11631 - DNA, 624 bp, Setaria italica
  Peptide Sequence Number=SeqID_77605
aggagacctttgttatattgccaagatggattcgttttgttgttgatcggctgaaagagttaattaagtacaaaggctaccaggttcctccagcagaactagaaagcctgcttcagacacacccaaatattgatgaagctgcagttgtgccataccctgatgatcaggctggggagttgccggtagcattcatcgttagaagctcaggaagtaacttatatgaagcacaaatcaaagaatttgtcgccaaacaggttgtgcactataagcaaatacaccatgtcttctttgtgaatacaataccaaaaaatgcagcgggtaagattttaaggaaggacttggcaaagttagcattgcagcatattaggtctaggctatagtatgcatctgtatgtgtacgacctaagtaattgctgtttgataaatagaatgattaattgcaatgtgaattcagatgtacatgaacaagtattggacaatggcattaatagatagaccattgtttgcaagctatgcgaatgtacaaaagatcttgccggtattgtattcaaagatgacgtatggtgtatttgcttatagtgcacaacctgtttggcgacaaattctttgatttgtgcttcatat

SEQ ID NO: 11632 - DNA, 285 bp, Setaria italica
  Peptide Sequence Number=SeqID_77606
ctcccatcaatttctgttattagcttcccatctgatgtttgacagaagtcgatctttgtaccctgcagttatttgacagatatattatcaataatcaatgtaataatgtggagcacaaaggacggatgcagagtcactatattcagatctaaaaatcaatttataaaatgcatcaagggaaattttcctggatcataaatctactatacatttcaaaggcatactaaaacaaaacgactgcagttatagtcatgaatgctaatattatttagtcttattagtctt

SEQ ID NO: 11633 - DNA, 292 bp, Setaria italica
  Peptide Sequence Number=SeqID_77607
gtttttcttccagccgcatcgagctcgagcgcttggcggcccaatcgccggcgaccttctccatcggcccccatcgccggcgaccttgggtccgcacagaggggaggagcggcgtcggtctagcgcggaggggaggggccgcgacggaccggcgcggaggggaggagtgccgtcgggtccagcggaggggaggagccccaggcctctgtccggcggcagagagagggaggaaacgggggcgcgggcaccggtgtctcaccgtgatcttgttttggtgattggttgggggagg

SEQ ID NO: 11634 - DNA, 465 bp, Setaria italica
  Peptide Sequence Number=SeqID_77608
tgcatgatgaattaattaatccaggttcgatggaggaacctggaacagatacaaactaaagttcagggcaccactgagtagtttgttatattgatcgaggtttacatacgaatatacgatgatttaaatgaagtgtaaataaacaaacaaactgatctgcgctttcccggagagataataattatctccgctaaagttggtctgttcttatctgaaatattacactgaaggccgttattctttacagttccaagctacatatggaaaaccattgctagcagccaaagattctaaatgttcagcaaaaggatgctgaagctggtattcttgcaatggaagcgttgcacaagcaggtcatgccatttctactgcgaagaacaaaggatgaagttttatctgatcttccagagaagattaatccaggatagatattgcgatctcagtctgttgcagctcaaactttat

SEQ ID NO: 11635 - DNA, 2051 bp, Setaria italica
  misc_feature (2027)..(2051): n is a, c, g, or t
  Peptide Sequence Number=SeqID_77609
ttttgtgtgatgatatggggaaaagctaactctgatccacgtcggctattgtagcaagtgacattgctgaatcgcgtgcacagaatgatgagaaagatccgacatctttgattatatgcccttctacattagtggcccactgggagtatgaaatagagaagtacatagacagctctattatgaaacctcttcagtacgttggttcttcacaggacagagccacactccgtagtcagtttgagaagtttaacgttatcataacatcatatgatattatacgtaaggatattgattttcttgggaatatcccttggaactattgtgttctggatgaagggcacataataaaaaattcaagatccaaaataacgtctgctgtgaaacagcttaaagcgcaacaccgccttatcttgagcggcactcctatccagaataatgtgttggagttatggtctttgtttgacttccttatgcctgggtttcttgggacagaaaaacaattccaagctacatatggaaaaccattgctagcagccaaagattctaaatgttcagcaaaggatgctgaagctggtattcttgcaatggaagcgttgcacaagcaggtcatgccatttctactgcgaagaacaaaggatgaagttttatctgatcttccagagaagattatccaggatagatattgcgatctcagtctgttgcagctcaaactttatgacaaattctccagctccaatgcaaaagaagaggtttcaactatagtaaaagcaaatgaatcggaggaatctgcacctcagccaaaggcaactcgtcatgtgtttcaggcattgcagtacctattaaaactctgcagccatcctttacttataactggagagaaccctcctgatcatcttgtggatcttcttaaagaaataggtgtggggtccggtggtgagcttcatgaactccaccattcacctaagcttgttgctcttcaagagatacttcaggagtgcggtataggttcagaaatatcaagtcctgatgcttcaacagctgttgggcaacacagagttttgatttttgctcagcataaggcttttcttgacattattgagaaggacctgtttcaatctcatatgagaagtgtcacatatttacggttggatggctctgttgaaccagagaagagatttgaaattgttaaagcattcaattcagatccaaccattgatgtacttctgttaacaacacatgttggtgggcttggcttgaatttgacatctgcggacaccttggtcttcatggaacatgattggaatccaatgaaggatcttcaggcgatggacagagcgcaccgtttgggtcaaaggaaagtggtgaatgttcaccgtctcattatgcgtggtactcttgaggagaaggtgatgagtctccagagattcaaggtgtcagttgccaatgctgtcatcaatgctgagaactctagcttgaagaccatgaacactgaccaactgcttgatctgttcacatctacccctgcttcgagaaaagcatctgtccttccacggggctcgagtgatggccagagtaaagatttgaagaagaaatctggtggcaaaggcttgaaatccattcttaatgggttggatgagctttgggatcagtcgcagtatgctgacgagtatgatctcaaccagttccttgcaaagctcaatggctgaacatagaggatcaccggcccgtgtacagtgtaaagtaaattgggacgtgcgatctaggtggttcgcagattttgttgccaacctcaagaatttttttgttgtttgataggggaaggaaaagagaagatcgcaagatcaaatgcgacatggctaacatataggtggttgaggtcacgacctcaatttttgttttcatcttttgttaggaggcttaggtctggtcgtcagaggctgtaaagtttttgaggagttgtacatactctctaggcttacctattaattaatcaaagcagctcctttcaagaaaaaaaaaaaaaaaannnnnnnnnnnnnnnnnnnnnnnnn

SEQ ID NO: 11636 - DNA, 443 bp, Setaria italica
  Peptide Sequence Number=SeqID_77610
tcttcggttcttcttcttaaaggtagttattgcaaagttccaagcttcatatgcaacagttcttaaggcccatatgcatgctctgaagaaaagggagaggaaagacaggaagaaggccgcagatgctgagaaggtacccgagaccgcgcccaagaagcagaagaaaagtcttcgaagaaatcctcagggtccaaatcgtaaggcgcttgtaggactcactgtgccttctgttgtctacagccagactaatccgagtgtcgtcaagattttctcatccgtttttattcgtgttcgtgtctgggaggtaaagcctgtgaatacacctctatagagctgtgccgtcgatattagcatttttgaagatgtgttttgaggtgaatgtgagccgccatggcgtttttctgattggcatcaaaggaaaggccctttgaacttctatagat

SEQ ID NO: 11637 - DNA, 1550 bp, Setaria italica
  Peptide Sequence Number=SeqID_77611
cgcctgcaccctgcaccggccccgaaagtggccgccggcgaggcggaggcgaaacccaacgcgggccgcagccacgagaagtccctcggcagaatcgtgaaggccatcttccaggagcgcgatccggaaaagctggtatccaagttcatcgccgcatctccgtcgtcccagcgcttccgcgagaagcaccgcgtgtacgaggtggccgtggcccgcctcacatcctttggccgccacgacgccgtcgcggcaatcctcgactcgcagaagcccttcctcgaggcctccaccgagggcttcgccacgcgcctcgtccgcctctacggccgcgcatccatgccgtcccacgccgccacgaccttccatgaccttcccccgaagcacaagtccgtcatgaccttcaacgccgtcctcgctgcctacctcaaagcccgcgacttcgacgcgctggccaccgcgttccagcagatcccggcctcacacccaaccattgtccccagtgtatactcttacaacatactcatcagcgcgctgtgccagaagccggacctctctgccgccctcgacgtcatcccgctcatggagaagtgtggtcttacacctaatgaggtatctttcggcattctgcttaatgggttctacagaaatggtcgctttgatgatgccgagaaagtctgggagatgatgaaggacaggaatgttgagccgaacacaaagagctataacgcaaagctgcggggtctggttgccaatggaaggattgaggatgcagttgctttaattgaggcgatgcagaaggatgggcctaaacctgattcagtgtcctacaatgagctgattcgagggtattgcaaggaagggaggttgggtgaggccaagaaggtatatgatgatctggtaaagaatgaatgtgcaccgaacaaggggacatttgaaactctcgtaccactattttgtggaggctggggagcttgatcttgctctagattgctgccatgagatctttagtaggaagtgcagagtgaaatgctcattgctgcagggggtagtgactgcattggttgctgcatctagggtggaggaggctaccaggattgtaaagcttgggtggaagaacaactatcctccaaggggtttgaagatgccagaacttattgagaaagacaaagctgtagaagctgaaaccgattgcgataattttctaccgtatgaagaggggagcgaggaggaattggagtctaaaactgcttgagggtctcatgaggatatacattcgtagaatcgtaggttagccattgatgtgtcatgatgctatgctgatgcacacggtgcctgctttactgttttgttggtctgataacagaggtgcatttaaaactgcagtcctctaatacttaaataagatagtggttatttttcttttgtgctacaatatgcttagggggaaaaacatctataatttcttagagtatatttgtagtaattgcttgtgttgcctagaatgtctatcttgagaattgagaatttttgtcacatggacaaaaaaaaaa

SEQ ID NO: 11638 - DNA, 368 bp, Setaria italica
  Peptide Sequence Number=SeqID_77612
ccctggttctggtaactcagcagaacatcacggagctcccgctggaaatggtcgaacagggtggggtagtgcgtgcaggccttgaggcagagcgcctcgagaccctggggcatggggatggccgagaggtaaggctgcgcctggatcacgaacccaagcctgccttccgccgacccccactccagagccaatgcggcggcggcgaggtcgccctccagctcggctgcggcgagcttggacgccatggatcgcatgccctgccggagccactccaccacgcaccggccgagctcgttccgccccagcgggtccccattttggtacagcgttcccacgcagatagacgcctcctccgtcgacggcacgca

SEQ ID NO: 11639 - DNA, 446 bp, Setaria italica
  Peptide Sequence Number=SeqID_77613
catctaagctaccaatgcacagctccgtatgtcttgaagaatttgcttgattgcaattggcttcctgaagtgagataggaacatagaatggcctctctttcacatttagtagggagattatgttagtaaaagagtccatatgctttgagaggccttcagtctggagaagaaacaccacaatctcctgaatccgatcatttgatacagaatgagcatgatttgagcataactcctcaatttgagtaattgtaaatttcctcccttccagactcaaatctggattttcagaatctgacagagcaagtccaactccaaccctctcagctgcagatagctcaagttcattggacagtgtttcaaggaacccattgctgacaggtattgccctcagtgcttcacagaaactggtgctgaaatagggtttatccaaacaatatctgaaaatg

SEQ ID NO: 11640 - DNA, 1882 bp, Setaria italica
  Peptide Sequence Number=SeqID_77614
ttttttttaggattggaattctgaagtttttttttcgaatttagaaatactaggtcaatggtaagttcacgcgacgacagagcaaagaaagagggtactcgtaacacaagacaatcggcactggcgtcagaaagcagcttacaacaccaaaagttagttcagaaatcctaacgacctcgagttctgaacagatgaacagactaggcgactagcaaacaaacccaagcaccacccttcccaagatctgaaacaaggtttttcttctgactagtatccatagctaggcgggtatggtgcggcgccatagcttcctccattgtgcgggcctggagctgcgccgcctggaggagatccgtatgatgctccgccgtatggtgggtaagagctgtagcccgtgtcaactggttgagcaggtggagcaggagctggcgggccttggggagaagcttcagccatgaaattcttgatcagctgttgagcagtttgtacttgtgaggcgcttcctgttatctccactgtcatctccccaggagcaccttcttgaatacttattgttgcaccactatgcctgcggatatagctgatgctggcaccagctgctccaatcacagcatcagcataggaaagaggaacttgcatgctctgtgtcacctgagaagacccatgtgcttggtgttggttccctgagggaggaccagttggaggtgcatcgcgtccatatgaagaaattccatagtgtggttgcttttctacagggggcatatcaggaggaggataatagttgtcttgtggtcgtggaggcatgtactgtggattcccagcataacctgggcccccaggaggaaggtttggtggatgaccccagggtgagggtggaggaggaccccatggctgtggaggtggcataggttgctctctgtgcacattgtgcgctttcatctgtgattcaaacaaagggagaacactgcggtcaacaagaaattttcttaaatggcttgcaatcagctccactgctttgtgagcatcaagaggttcaccctgtatctcaacaactctatcatcatttaatgccacaggtggaacattctcaagaattcggagaacacacttagaagcatcctgtatggatttaatagttcctccttgctttccaatcaggctgccagcttgggaagctggcaccagtagccttgtaggcccagcagtgacagtgcctcgttgaggctgctcagtttcaccatctaaaccaccagttatccttttatgaactctaagcaaaccatcaacagctggaggtagcaccgcatctggttcatcctttgctgaaatcattacagctctttctggcacgccttgtgggccctcaagaacctttattcgagctttggattcctcaatcattttcttgatgaaatctccttttcgcccaatgacagcacccacctttgagacaggaaccagtatgcggaacacactctctccaggccacccagaccatttctgctcatcaggcaccgcattatcctgctgcttcgccccagcttcctcgccatggacacttgcaggctcctggtgcttgggggtagtttgatcctctttgttcagatcccccacaacctcattgttcatgttggcatcctcagggttccccaactcgtcaggcgttgggtctttggattcctcatcatacggcttttctggctctgcatcgagctgctcttgcacatcagcacgaggattagcttgctcctcaacgctgagggtaggaggagttccagtcaggttattctccacagggtcctcaacaggtacatccatatttcttgtggagtaggaggaggcctcgccggagaaggaactactcacactgagtcggagacac

SEQ ID NO: 11641 - DNA, 1266 bp, Setaria italica
  Peptide Sequence Number=SeqID_77615
tttttaacattcagatagctctgttcacatgtagataacattcagatagctctgttcacattcagataatattcagatagttctgttcatattcagataactcgctcattaatttttcaggaaactgaaagaacacattagataatttcagaaaaaagcatttttcttaaacacttcatggcagcaagtcgctcagacgtttcgtcgtctgtcattgaacttgtatcttgtgagatgaggttgttatatgcatccatcatctttgattctttctcaaagcttcttcccctccatctcaagcttctttgattccatctcaagcctcctcccctccatctcaagtttcttggaccctctgttctcttgtgctgttaaatgggtaagccttgtggtctcaatcttatcggaagacaacttttgctgcatctctagcaccttcatgcggtttgcattagcttcttctgggatatgctcaatttatcaagcttttccacatgaattgcagattcctttgattttccatcatcacccattgcctttgacttgccttttgcagcaagagcggactttttagctgccttttgtcccattggtcgctttggcatctcatcttcactgtcaacattttccacatcttcttcgaggtgatatgacttccttttacgagcgttcttcagctcttcgttgtatgtttccacttcgccacttcacgacaaattttccaaacattcttaatcacaaagggtgcttgtgatccaaatagaacttcttggctgtatccatccgcatctcatcggagtagccacttgtgaacaccctacgagccttcaaataatcagattcaaagaggtcacaccacctattaatcttgtgccaatgatccttggcttgctttgcattcctattcctttgcggtggggtctccttgttgtatgccttgataacatcaccccaatatgcttcgcccttcctatcggctccagtggttgagtccgttgaattttcaatccaagcactcatcaatctttcatcttcttgtggtgtccacataatcctcttgtggtgtccacataatccgcttctcagtcctaaccatttcgttctcatcattgactagaataggtagctgctctgataagaattccaccactgagggagaacttcctccattggtttcaggaatagatatattgacatggctattgtgagaaggtgtaccaaccaaatgaaaattatgtggctgattgccgaagtacctcatgaaac

SEQ ID NO: 11642 - DNA, 867 bp, Setaria italica
  misc_feature (1)..(56): n is a, c, g, or t
  Peptide Sequence Number=SeqID_77616
nnnnnnnnnnnnnnnnnnnnnnnnnnnnnnnnnnnnnnnnnnnnnnnnnnnnnnnngtagaactcagccgatgtcataaatattgattcaggtgggcctcgaaggtgcaccactggtcaagtcattaaccacgaagacatgtaataaactgataatagcaaaaattttaggtcacaagatctctcaagatatgtcaatggctggatgttgcaaataatcaggttcttctgctaatcctgctcatactctgctacaaaaaaggcttcatttcaaattgacagcacccatttcaagtatgtcgatcaaagaacttctcaattgccactgagaaagcagcaaaaccagcacatccaatgcatgtagctttagggccaccttttactgctagagctcctcctgtgacacagccagctaccgctgtattggtagtgtcatgctttgcccgagccttctctacgacacattcagctgctgagaaaatcagacccatgaccgcgaaggttttggcattgcttatacttctcctacccatctgttttgctgtgtatacaatttgttgccttgctgtcatctcctctgccattattggattgtccaaagctccaaagaatagtcccataagtacaccaagaccacctcccatgacgccactgacgacgctgcggacggcgcagttgttccagatgtcctgccccttgatctcctccaccgtcggcatccggatcggctccaccgccgccgcctggctcgccgactcgcccccggcgccggcacccgccgcggatggctccggcgaggccatctctcgctatctggtcccctcccccacctcctctcggcgtcggagctagcagcagcccgacgcac

SEQ ID NO: 11643 - DNA, 1001 bp, Setaria italica
  Peptide Sequence Number=SeqID_77617
tctccgaacaaaaaagtacgcttggtaaaaaggaatgttgcaagcataaacaagtggatgtttatgaagttaaaggaacatatgcaaggagatgttgatgctgaaaatgaagcatatgagaggtatacacagaatgttggactactggaggaaacattctgtcccatggaagatgctgctgctgaacctgaacctgaagcaacttcttcagaagaagaaaggatggacttgttggtttcggaggcaaaggtgaggctgaagtcagataacgaaaatgcagatagcttcaaggagaggattgccactatcttggcccagaagctgaagaaactgcatgagagtcaaagcacctatgaggatgacaagccagctgatcaaagccaggatgatcatacaaccccagtgaagcttagcacaaagcagaagatggagaaagctgcaaagtttaatgaactgcttggtaagatgatgagagcacggagtgaggacgatttaaagccttgccgtgatcttatcgaacagctgtttggaaaggaggatggttcgtccatggacaagtcaaacagaatggaaacggagccgagcaaccaagagtcagctgcagcaacagcacagccatattctttcccaaagctgtgcactaggatagaagttgatgaggatttcgccgccaaggtcgatgctgaattctcttctctgagtgaggtcgtgcagctatgaacctgaaacctgggcctgatccctgtgtcactgttcagtaggtgttaatgtgttatcacagacacacaacttctttggtgcgtactaacttgatagtataatgcgtctgtgtagtgacctgtcatttagtgtagctgtttgcagtgaagccaaatcggcgtggcagttagagtgatgctgcgtttcttataccctgtttcttgagctgtgtaactgtgtttgttctgataacatgaagcatgaatagaatggttgtctcagttaaaaatagcaaaaaaaaa

SEQ ID NO: 11644 - DNA, 365 bp, Setaria italica
  Peptide Sequence Number=SeqID_77618
tgcccctgcaggcacagcttcccctgggacagctcgtgcgccacctccgcctccgagatggacccgttgggcttcgccgtcggcttccacttgaggtacttgagcagcatcgccgacgccttgccgatgtggtggtcccgggcgcgaaggaaacgccgcagcatgtagtcgtcctcctccttgcaggcagggtcctgcgcctcggtgacggccctcagctcggcgacctgcttccactccgcggcgtcgccgtcgttgtggcggccgtgcccgttggtcttcacggtttgctgggagtccatggcggcctgccccctcgacctttctttttgttgttagttgtgattgagaatgaggattgtagt

SEQ ID NO: 11645 - DNA, 668 bp, Setaria italica
  Peptide Sequence Number=SeqID_77619
gcccggatgtcgcagttggagtagccccagcccttgaggtcggcgacggcggcgaacttctcctgcccggggggcagcctcgccacggtggcgtccaggacgtagacgacgtagcgcttgaactcgtcgaggtcgcggttcgacgggtggtgccgggcaccgaacccgtagatcatgggccgcccctgccggtcctgcccctgcaggcacagcttcccctgggacagctcgtgcgccacctccgcctccgagatggacccgttgggcttcgccgtcggcttccacttcgaggtacttgagcagcatcgccgacgccttgccgatgtggtggtccgggcgcgaggaaagccgcagcatgtagtcgtcctcctcctggtatgattcattgagcaaaatgcagttgacatcagagatggtgagcagatcagtaaaggttggcatgcaattcttcatcacgtcgtcatctatcagttggttaggcctgtgtgtgtgtgatctgacatctgagattaggaggccggagtgaatcgacaggagagctgggcatcatttatggggggcttttccgtgccacgagtgatgcgtggctgaaatcaaaagcccgcatggcagtatgggtagctttcatcatcatccattccaatccagtgcaccagtacagccgtctt

SEQ ID NO: 11646 - DNA, 838 bp, Setaria italica
  Peptide Sequence Number=SeqID_77620
ttttttaccaataggaatagacaatacatcgatgctgctgcagttgctatatgtttgagccggcagcagatagccttaattattaatacagatgcaatgcactgtacgcatgcagtacatggagagaggatagctacatgcagaaaccttgcatctttctgagccttgttgtagtactcgatttgcctaatgctatagtgtttgacactcgagctagtgcctgtgtccatagccgtgtacgtacgtagctctggaccacccctcatcagaatcagatcgatcgatcacatgcatcaccgatagatcgaagcacggtcgatatgattgacgtctctgccagccagcaatagatcagtacgtgatgatcatcacatcatttggccgccggcgccggcgaggcgagcttgagcttgcctccgtacatctccggcagctgcgcgtcgtcgatggcctcccggagcgtcctgtcgaggtccttgtcggagacgaagacgaacttcttcttggtgttgtcgtcgatgaaggggtatacgatcttccaggccgccatgaacacgtagggcacgtggacgaggaacacccgccccagccgctccgggtagtagttctgcatgatgtccagcgccgcgaggtaggcccggatgtcgcagttggagtagccccagcccttgaggtcggcgacggcggcgaacttctcctgcccggggggcagcctcgccacggtggcgtccaggacgtagacgacgtagcgcttgaactcgtcgaggtcgcggttcgacgggtggtcggtcttcttgtcctagtcctagtctaatagtattctagttacgttgtatta

SEQ ID NO: 11647 - DNA, 318 bp, Setaria italica
  Peptide Sequence Number=SeqID_77621
ttccttattggtagttactgtagtccatatgatgtttgcttgttgcttcatctagaactctagcaattccaaagtccccaagacgagctctcatgtcctgattgagaagaatgttgcttggcttgagatcacaatggatgaccggtggctggcaatcattgtgaagatagtccaaagcatccacaatgtctacagcgatatctaacatctgtgacaaactgagttttccttgtccattttgactttcagaatttgagtggatccatctatctaagctgccgttagccatgtactcaaagactagggctctgaagtctt

SEQ ID NO: 11648 - DNA, 644 bp, Setaria italica
  Peptide Sequence Number=SeqID_77622
ttttttttttttgttataaaaagaagggaagcaatatatgtaaagcatagcaatggcagtggccagttggccactctgacaaaggcctctctgaaaagacgaggagaaaatgaaggttgcaagaaagtaatacaattacacgaacatggtttttcagaaccatatatcatgttgccaacagcatttcctagctctaaagctcccaaaaataagttaaactctaaagaatggaaaatggtctccgtgacccatcctttagtatttacagtgtaaactccgcagcagtcattgctagtctaactgtatgtcatcaaataatcaaccctcagtagcactgcatcataacagcttgatggaaaattttcatccagatccgtggcgcacttcaccgtataccttccacctgctatcacagctggcgctgccactctcaacagatgcaatgaagttcagaagtaatcatcgccattctcgacaaccaccacaactccaatcgccactctcagcaggcagcacattttcatcccaaggtgagcattgccggtgtatgtgcaggccacagactgcacatttgagatcaggtggtggctcagtgttctggcacttgttaacatgctaccactattctaggggtagggtattct

SEQ ID NO: 11649 - DNA, 1697 bp, Setaria italica
  Peptide Sequence Number=SeqID_77623
gtcatagcaatggcagaccactctggcaaaggcctctatctgaaaaagacgaggagaaaaatgcaagttgcaaggtagtaatacaattacacgaatatggtttttcagaaccatataccatgttgctaaagaatggaaaatggtctctgtgacccatcctttagtatgtacagtgtaaactccgcagcagtcattgctagtctaactatatgatggttaaacttatgtcaaatgatcaaccccagcatccgaacaatcagtagcactgcatcataacagcttgatggaaaattttcatccagatccgtggcacgcttcacccgtataccttccacctgctatcacagttggcgctgccactctcaacagatgcaatgaagtacagaatgtaatcatcgccactctcgacaaccaccacaagtccaatcgccactcgcagcaggcggcacattttcatcccaaggtgagcattgccggtgtatctgcaggttacagactgcacatttgagatcaggtggtggctcagtgttctggcacttgtgacatgctaccacatcaggggagggatcatctgctgggaagttcatatttgaagctccatcttctatcataaaatacatttcatcaaaaccagctccctgttgatcgaagtttcctgtacagttgccattgccttgcagattagtagacatcccaaatgcactgtcaagctgtgtatcatcagcttcaagcagctcagtaaatgagaaataagtctggggttcatattggtcaattgcaaagttgccacagctagtgtcatttgcttggtgagtagcagtggattcaggaggggcagcatatgcagttccttgggaaaaatcccaccccaatagctctgaagcatccacgctgtcagcctccgaaaaggaatattcattcatgtggctgaaattgatgttcccattcccttgagattgattctggatataatactcattcgcagatcttgcttgatcaaggtattcacaatttttagcttgtgctcttcttattgacagcttcttgttgcttcctggggcaaagcttaccatgttggttgataaatcagcatccactgtttcttccccagtcggttcaacgattccatatgaagcgagcagtgggtcctgatctactaaagcgaaagtcgcctcactagatagcattgttgactgcgatgatgtagcaactgtttgttcactacattctggttcaggctttatataatcatctgaatgaggacattggggtatggctctccttcggcacctacagcatcggtacgcaaccaactcatcaatcctttcatcctcaagttgcaaggcatcaccatgaaaccaatttctgcacctctcacagcgtacataaaggaattccggagaataagttttgttacagaggcaacaagttggttttattgacgaacctatgccatccttacttttaaggatcacatcattcgccctgaattcatttccatcatccttgtcgttcttatttttcttccatacgagaccaaaatatgtgatcgcttgaacttttttaggtttcttaggtttttctgattttgacttttttgcttttgtctttggctgagctggtacgctaatgatattcgtagttgccgcatttgtgattggcaaggcttccacttttgcaagtgttctgggattcca

SEQ ID NO: 11650 - DNA, 724 bp, Setaria italica
  misc_feature (643)..(724): n is a, c, g, or t
  Peptide Sequence Number=SeqID_77624
ctcgtctcaccattagacatctcgttcccagttataatttgcgaggttagatcaggctgcgccatggcgtccgcagctgctgtcaagatcgccgccatcttcatgctggtgctgaccatgggccacctgatggccgaagcatcaccgcagcctcggcgtctgcttgcagaaacggagcatgctgcggtgtccgggaatcctggcctcccaggtgatgctagcgtcatgcaggtcctcgaacccgccctagtttctcctcttgcctgcaagccagagtgcacagtcccttggcctccttttgtatgtatctgctagatcctcttcctggatcaacggaacttcagggaaatggctgtgacgtcggccaaagaataaattggctgaacataatataccccgggtagtgtagcttgggcttttgttgagcgtctggtactagttgtattttgtttgctcatgtggctttgtttctggttgcatattgtctttcctatcgctctctgttgcagctatggtttctgccaggtgtgtgtcaatgcggtttgtaagcggtgcttgttcctaccttctgttttcaataaaagaagtcggagtctccctccgactcttgttatcagtcaagaaaaaaaaaaaaaaaacaaannnnnnnnnnnnnnnnnnnnnnnnnnnnnnnnnnnnnnnnnnnnnnnnnnnnnnnnnnnnnnnnnnnnnnnnnnnnnnnnnn

SEQ ID NO: 11651 - DNA, 979 bp, Setaria italica
  misc_feature (912)..(912): n is a, c, g, or t
  Peptide Sequence Number=SeqID_77625
tggctccaagaatccgggccagatcttttccttcccctccctgccgcttccgtctcgcttccggcttctctggcacgcctccaaccctccgccatggccctcgcttccggcacgtccagcaccctcggccggcccgccggcaccgctcggccccacctcgccgtatcgtcctccgccgcctcatcgatccggttcccccgccgcggcggcagggccgtctcgctccgcatctcctcccctccagccgcagcagcagcagcatctggtagcattgctccagctatttcgttgaccgaaaaggccttgaaacatctgaacaaaatgagggctgaacggaatgaagatctgtgtttgagaattggagtgagacagggcggctgctctggcatgtcttacaccatggagtttgaaaatcgagcaaatgccagccctgacgattccattgtagaatatgatggttttgcaatagtatgtgatccaaagagccttctcttcatgttcggaatggagctggactacagcgactcactcattggcggtggcttctccttccagaatccaaatgcgacaaaaacatgtgggtgtggcaaatcttttgcgaccagcaaagaaactgagagcgcagcgactgcttgcaacaattaaaatagttcgataatcatgtcaaacagtgttgtaacatgacatatagcttgctcctgttggagtctggtggctataccacagatgcatacacaagactgtaagattgacacgatttataataacattcgacagtctagtatgtattcagcatccagtgggacttgttactgctgtaaacctgtatgcttcaatggaattcaaagatagttaccataaaaatgggtaacccaaaaaaaaaaaaataacgtacgaaccgaaaaaaaaaanaaaaaaaaaaaaaaactaaaaagaagaacaacgacaacaagggaaggtaaggacgaagacgacaacg

SEQ ID NO: 11652 - DNA, 372 bp, Setaria italica
  Peptide Sequence Number=SeqID_77626
gttggggggaggaaggaaatcctctggctttggttgatgctgtggggatgtctgtgatgatgatagttgacgaggatgtcggtggattcggtttcaccagtgacaatgaactgatcaatggaaaagccgctataattggctttctcttattgatagattttgaacttttaactggcaagggtcttctcaagggaactggtttcttggacttcatctatgcagtttcaggagctttcaactgataaatatgttagttctttggtgttggaatgttataaaggtacttcactactcttaaaagtctagaattagcctactattgagtgcatgagcattacgtttacgtgtacatgtaaatgaacattactttta

SEQ ID NO: 11653 - DNA, 1284 bp, Setaria italica
  Peptide Sequence Number=SeqID_77627
accctcctccaccctcccgctcgcctcgctccaccctgactcccctccccatggcggccatcacaaccacagccaccaccgcggccgcctcctcttccttcctccgccgccgccccgccggccaccctctcgtttcgctccgcgcgtggcacggccactgccaccatcgtcactcttgcaggctcgcctgccgtgccgccgaggtgtccggggccgagccctccgccgcgccagcgacggcggaggccggaggtggcgcggtgtgggtgccggtcgtgccgctggctgcgctgccccgccggggagcgccgcgtgatcgtgcaggacggggaggagatcttgctgctctggtacaaggaccaggtcttcgccatcgagaaccgctcgccggccgagggcgcctacaccgagggcctcctcaacgccaagctcacgcaggatggctgcattgtttgcccatcaactgaaagtacatttgatcttcgtactggggaaataaaggaatggtatcccaaaaaccctgtcctcagggcccttacgcctgctttgaggaaactattcacttaccgtgtgaaaacagacaacgaaaacaatctacatcagcatcagtggggctgacagtgcagcatctgctgagattatattcagtgggaaagctcaacctggagttactgcatctgatgtcaatgtggaagaggtgaggatgatagttgacgaggatgtcggtggattcggtttcaccagtgacaatgaactgatcaatggaaaagccgctataattggctttctcttattgatagattttgaacttttaactggcaagggtcttctcaagggaactggtttcttggacttcatctatgcagtttcaggagctttcaactgataaatatgttagttctttggtgttggaatgttataaagtttcagatcatgagaaacgtaagggtggatgttgcggcaatacaagacatggatggttatataagaatgggtcatgggaaagaaaaaggaccgaccattgtagaaaaggttgattgataaaattttccttatgtactctgggtaatgctgtaatagagtgacttctaggagagcaacattaaaaatgaagatggtgtgctgagtgtcatggcagcttctgatgcaaacttcaacctatttaggagatagtacatttatcaatagagttgcataatgaggttgttatatgtcgcgtcaatgatgtttattattaccgtgaaggtgcaaattgtgatgcttggttttgctgctaaaaaaaaa

SEQ ID NO: 11654 - DNA, 1165 bp, Setaria italica
  Peptide Sequence Number=SeqID_77628
taatatatttaccggtgcacataagaatgtgcctcttgctacaagagagatggaggaacttttgcctcttgctacaagagagatggaggaacatttttatgagaattgccagcttgtcgattcgttaagagaagatatgcaggttatgcgccaacaggaaatttcaatgagatccgttaaggaagttcttatctctcgtttggaagaattgctggataagggcaagatggcaatagagaacccccgagaagttgaagacgatcataaaatatgctctgacatcctaccagaacttgaaggttcatatgaaggaattttaaaggaaactttcatgctagctgttggtgttttaggaaagctcactgattttgaaatatgcaataatggagctgaagattcaccagtggggactattacatcttggaaagatgttttgcagtcatataccgtgaatcttaaattgaaccacatctgtgatgctagtgaaaagctttgtattacagtgaagcgactggttgactgtaaacctgagattcgttctaatatagaggtccacctaatgcatcttcatgcttggctgggtgtaatcctgtcatcagcagaagggatactttctgaacttttagaagcacacagaacaactgctgaaattacgcatgcacttggggacctttttatttatttatttgtggagggatttggttccacagaagatacaacagaagctgctgatgatgaacagcagcaagatgcagtagaaactggaactggcttgggtgatggggatggtggaaagagtgtaagctctaaaatagaggatccatcggaaattgaggacaaagcaacggatgctacgcataagccagatcaagctcctaagaatgataatgaagcagttgaaatgaaagaggacttcgatgcagatctatctgatgtttctgaggatcccgaaggcaaggagtcaggtactgaagatgaagatgaagacatgaacttggatagtcagatgggtgatactggtgattcaagcgaagtggttggaaagaaatcatgggacaaggatgaagatgatgatccgaagacatcaactgagaaatacgattctagttcatcagtgagggcagagaagaatgatagggagctgagagctaaggatgatggttct

SEQ ID NO: 11655 - DNA, 256 bp, Setaria italica
  Peptide Sequence Number=SeqID_77629
accagcagcagcagcaagaggacgtgcggaagagctcccatgacctcccaccgtcaaggaaggcatcgtctctgcaaaggatccctgaggatcacaggcctattgttgggggccatgaggtggggccctatcggcagtgctcctatattcaaggggtcatgaatggagtgaatgtcttatgtggtgtggggatcctgtcaacaccttatgctgtcaagcaaggtggttggcttggactagtgatactggctgtgtt

SEQ ID NO: 11656 - DNA, 603 bp, Setaria italica
  Peptide Sequence Number=SeqID_77630
ggtaaggtttacctaaccccgaccttgtgcgtcagaaacacacccaccgcctcgtgccgcagcaccgcctcctgcgggcaccagctcgccaggaggcccttcccccgcgtcgcctccatgaactccgggggcagcacggcggcgtcgccggccaccaggtcgggcctgatgacccacaggaagtcgtagccgctgcccgccaggccccacgcgaactccagcagctgctggttggtcatcacggtgatgctcccgtagttgacgtacaccacggaccgcgctgacctgccgccgagccactcgaggcacgtgctgtcctccttccagaggctggagcccagcgcgtcgagcgggccgcccgccgggacgagctgctcggcgaggaggctgagcgggccgacggtgtaggccgccggcgtgaagtcggcccgcagggcgtcgagcgccggctgctccagctcgtcgaaggtgttgtagatgatggcggccgcgtccttgcagtgctccatctcgtggagcccgtactcgagcatcttgtcgccggggtccgtggttcgcaggaagctcggatagtctcggagccgcatgtgcttgctcatcccg

SEQ ID NO: 11657 - DNA, 259 bp, Setaria italica
  Peptide Sequence Number=SeqID_77631
tcgaatggatgctatgctacaacaaaacatgtacaaaacctgtatgtactatatatttgcatagagaatcgaagagggagaagaaaagaaaagggaaatctaacaaccaagctaataatgggtgacggcgaccgcatcgttcaggcgtcgctgcaggcgctgcggctggacgcgctgcgcatggaagcgcggccgatggactcgtcgatccggtcgaggcggggcctccacggcgccggccgccccggcgcggcgggct

SEQ ID NO: 11658 - DNA, 242 bp, Setaria italica
  Peptide Sequence Number=SeqID_77632
ctttccgcgtcttccagtactcatactagtttgcaaaagacccatttttaaaaagtgggaatttttctacgtaagcaggagaaactgactggggaagtctggtgaagagaccaatgcttcgtgttcctgaaaatatacgtggggatctttcatatgcgccaactttatgctctgaaccactgatgaagatgctactgaggcctcaaatggttaaccttccagggaaccaccttacagcagga

SEQ ID NO: 11659 - DNA, 386 bp, Setaria italica
  Peptide Sequence Number=SeqID_77633
tttgaagaaattttcacgaagcatgcaaaggtcagaccagatgcgttaacatccatggagattgaggagatgattctagcaaatcgtgatccattagaccctcagtcatggggtgcacctgaaggggaatggggactaatatacaagcttgcaagtgataagcaaggatttcttcacaaggatagtgcaagaggtatatacgatggcagtgttttctacatgttggaggaacagaggacatcttcacgaagtgatatgtgatgaagttcagcattcagacacaacacattatatatgaaaaagtatgcagacacaacacattatatatgaaaagtatgcaaagtccagtattgtgtataacgttctagttttcttttcttacttaa

SEQ ID NO: 11660 - DNA, 541 bp, Setaria italica
  Peptide Sequence Number=SeqID_77634
ctacgaggatggcctctgctccattgctagttcttctgggagctacttaagcagagccatggaatgctataccttctgtgaggtgcactcccacagtcacacatctggagaagaaggaataagtggtggtaaactggtgatggcgggtcggcaacgattgccggcagcagcagtgtctgctctcctgcttctgtggatagtcagctgtgatcatgtggaggcaagcattgattttgcaaacatgactgcactggaaaagcatgttgaattttttgaccgggataaggatggcattattacagcttcggagatctttgaaggtgactggttaaagtactagccatttatggatatacaaaaaatttaaaagcttgtgctagttaaatttgaaagatgaagaggactcaatttagtgcttaaatcatacgtacatgatatcgattatgaccttcgtgttttctatcatatatttttctagcggctcctagtttcctatagcttctgtgttgattttctttttctgtctaggtttttcttgtcg

SEQ ID NO: 11661 - DNA, 647 bp, Setaria italica
  Peptide Sequence Number=SeqID_77635
taacttaaagacaaagaagaccaatggaatgaactaaataaaccttactagtagaaggtagcaactcccacagtcacacatctggagaagaaggaataagtggtggtaaactggtgatggcgggtcggcaacgattgccggcagcagcagtgtctgctctcctgcttctgtggatattcagctgtgatcatggtggaggcaagcattgattttgcaaacatgactgcactggaaaagcatgttgaattttttgtaccgggataaggatggcattattacagcttcggagatctttgaaggatatgttgcaattggatgtgatgctgcatttgccagagcttcagctgcatccattagtgccggtgttggtcctattacaagccctgttgaagcaccactgcctcacttatcaatatacatagagtatatccatagagcaatgcatggaagtgatacaggagcatatgatgctaaaggaaggtttgttccagaaaaaatttgaagaaattttcacgaagcatgcaaaggtcagaccagatgcgttaacatccatggagattgaggagatgattctagcaaatcgtgatccaattaagaaccctacaagtacaataggggtagacaacctagaaaggggaaatagggga

SEQ ID NO: 11662 - DNA, 820 bp, Setaria italica
  Peptide Sequence Number=SeqID_77636
acagtcacacatctggagaagaaggaataagtggtggtaaacactagaccggacatctcgttgcatacccggcagcagcagtgtctgctctcctgcttctgtggatattcagctgtgatcatgtggaggcaagcattgattttgcaaacatgactgcactggaaaagcatgttgaattttttgaccgggataaggatggcattattacagcttcggagatctttgaaggatatgttgcaattggatgtgatgctgcatttgccagagcttcagctgcatccattagtgccggtgttggtcctattacaagccctgttgaagcaccactgcctcacttatcaatatacatagagtatatccatagagcaatgcatggaagtgatacaggagcatatgatgctaaaggaaggtttgttccagaaaaatttgaagaaattttcacgaagcatgcaaaggtcagaccagatgcgttaacatccatggagattgaggagatgattctagcaaatcgtgatccattagaccctcagtcatggggtgcacctgaaggggaatggggactaatatacaagcttgcaagtgataagcaaggatttcttcacaaggatagtgcaagaggtatatacgatggcagtgttttctacatgttggaggaacagaggacatcttcacgaagtgatatgtgatgaagttcagcattcagacacaacacattatatatgaaaagtatgcaaaatccaataatgtgtactagaacgttatacacaatttttaatagtatttgaaacaaattcgttcactgtgcaacgaaaaaaaaaaa

SEQ ID NO: 11663 - DNA, 203 bp, Setaria italica
  Peptide Sequence Number=SeqID_77637
gatgcttaacggggcagataccacttatataagatgacaaatttcagatcacaccacaattagggggtggatacttcagtcactagcatctaaagccgtccactgttctcggttcaaatcgacacaagacatggaccataagaatgctatgtagatagctctactttctctctttatggtacatgtcttgtgtcgatttgaac

SEQ ID NO: 11664 - DNA, 481 bp, Setaria italica
  Peptide Sequence Number=SeqID_77638
ggacttgaaggatgcactgcggttgccacgcaatgctggcttattctgctgcgtcaaagctgtgctgctactgctggatccttcaccgtcttggctctctttcttgtcctcctcttcagggactttggatccaacctcatggccctccatgtagtatttgcatgcagccagaatggcacgaccgcgttcacggaagtggcccccaacaagatcttcaaagtgctgaaataaggaatcaacaatagcatcatatttctggaacctagattcttccgcagctgaaataattattagcctactacccaatgctactttggacatggacataggtgtcggaatagagaccaaactcaggtgccttccaaatgtaaacttcattttgacaaaaatcacaatttaataaagtaccacatcagcaaatctgtcaataaattaccatccatttgattagtactctaactcttttccaaaataaaagagc

SEQ ID NO: 11665 - DNA, 1624 bp, Setaria italica
  Peptide Sequence Number=SeqID_77639
ttttttttgatgcttaacggggcagataccacttatataagatgacaaatttcagatcacaccacaattagggggtggatacttcagtcactagcatctaaagccgtccactgttctcggttcaaatcgacacaagacatgtaccataaagagagaaagtagagctatctacatagcattcttatggtcaggcaaaagcgaaaccaacaccttctttggtttctcactccattatggaaccgcaaaagtcagaggaaatccgctgctccaatcattccgttcaagcagccgcctgctggttcttcaacaacttctgctcacggaatttcgcagtgtcagcacccttcacattgaactccatcaggagctcctcaaacaaaacctccaggttggacttgaaggatgcactgcggttgccacgcaatgctggcttattctgctgcgtcaaagctgtgctgctactgctggatccttcaccgtcttggctctctttcttgtcctcctcttcagggactttggatccaacctcatggccctccatgtagtatttgcatgcagccagaatggcacgaccgcgttcacggaagtggcccccaacaagatcttcaaagtgctgtggaggtctacgaagtgagtataacatcgtcctgcatgagtactgaaatgttgtatcattataatccaaggcagccctcagtccctcagggctattggcgtagcgttcgtatcctggctcattgaagtatggcatctcattcagtacgagagcttgaatggagattagcacctgaagcatggttgattgagctgagttccatttctcacaagaagaaccctgccaggtgcctaggaggctaagacagacttttccacaagcatataaatttggattaagccttagccctcctgaatggtagtataccactgggggagtagcaggataagaagcggggaattgagcatcaaagaagaaaaggccatcatggtagggtgttccttgaggcccaatcattacagccctaagaaggtccattcgattttccgatacacgaacatatattaatgctggtaaatctttctccaggagactccattcatgctggattctttttgcccattctttcctagcctttccaacagaatttttagcatagtgatgatctgagaaatcctcaacagtatcaaactgtttgaaaaagttatacttcttagcaatttcctcctctatttctgacatcgacttaaatttgccaggcacatccctactttcaactttctgcaaccatggtactgtagcctccacacctggaggcagatctaaattatcaaatttatcagccagcagttgattataatcagctgggtcaagctcatagtcggatccatcattatcatcatcatagcagtcatcatcgtcatcttcaaaatagtaatcttcttcctcattttttccatactcaaactttagctcaggtccagatgcttcaagagatttgttctctgtgctagatccaacttgatcattagaagaagaatcctgtaaagcatgccaacattaccaataaaatatcaagtaattctcagcacagtctaatttagtaccctaattaattttttaattgta

SEQ ID NO: 11666 - DNA, 1418 bp, Setaria italica
  Peptide Sequence Number=SeqID_77640
gttttaatgttgtagcaaggctgatggggcttgacgataatgcggatcttcctaagcctctgccttcaaacaggaggactttcccggatggccatttatctgctacattggcaagagttaacaaccaaatgtcatttgagaagcgtgcaagttccatggaagatgtggagtataaggatgtatatgaagttggataccagccaccaagaggtgaatgtctgagcaatgaatctccaaggaggcccaatgaagatcacgacaagagaaggatggatcttgtccgccagaagtttgttgaagcaaagcagctagcatcacatgataatctcctccagtcgaaagagttccatgatgctcttgaagttctgaattcaaacaaagatttgtttctcaaatttctcgaagaacctaactcgctctttgcaaagcaatctggagaacttcattctgcaccaacatcacctcaaagaaagcgcattaccgtgttgaagccctcgaaatcagtggacacaagggatgacaaagcaattaaaaggcagaaaaaccatgcagttgatggaaacagggtagaaagaagcaatagtcacaagtctgatgctgctcatgtgaaagtcgaaaggcttccgaaacacacccggatagtggtcttgaaaccaacctcagcaattgcttccatggagcaatttgaccaaaattatcatgctgatctggatgattctgaagcacctgctatatcaaggcgtttgagtgatgagatagattggtcagtgcatgggatgtgtcgacgccacaatgaatcaaatcctatgagcgcatatagaccatatgatcaatatgctgaagaagagggcgctagcttaagtgactcggatattggaactccaacatcacgtcattcttgggagtacatctaccggtttagcaatccttactttggctcatctttgagccatgcttcttgttctcccgagtcacatgtgactaaggaggctaagaaatatacttctgacagatgggcaattgttccgtccagtgagataacccagggaaaggtgctagtgcgaagaagtttgagcacacttggtgaaatgcttgccatgcctgatatgaagaaagaagaggttgctgatcaagcatctccggatgctactagccaattgtgcagcaatgagccaacagttggtgtatcatctaattgtgctgttggtgatggtgagggagaaagctctctcaggaagatctcaaggtcaagatctgttccggtctcttcatcagcttttgacagcctaaggttagatggtggatgttcagaggctcaacacaaagaatctacagcgtcgaaggatgtcaaacctaagaatgggaagtcatctctgaagggaaagatctcaagtttcttctcaaaacgtaagaaaaca

SEQ ID NO: 11667 - DNA, 1596 bp, Setaria italica
  Peptide Sequence Number=SeqID_77641
aaacaaaataaagaaaacctaaagaaaataaataagaaaagaaaagaaagaaggttagctagatgatcaagcatctccggatgctactagccaattgtgcagcaatgagccaacagttggtgtatcatctaattgtgctgttggtgatggtgagggagaaagctctctcaggaagatctcaaggtcaagatctgttccggtctcttcatcagcttttgacagcctaaggttagatggtggatgttcagaggctcaacacaaagaatctacagcgtcgaaggatgtcaaacctaagaatgggaagtcatctctgaagggaaagatctcaagtttcttctcaaaacgtaagaaaacagaaaaagagaaggttaacccatctcccttgggaaccccgaatagtcaagttccgtcagccagtactgttgtaattgataaatcagatgttccagaacatgtttgtactaacttacaaaacggtgttgctttcggctatttggaagagcggttcgagaatggaccaactgtagttccgcttgatgaacttgaagcaccctctacttctaagtctccagtttcccttgagaaagcactgccatttgagatccgcaattcccacttcgatcagccaagccctacatcagttcttgatgcacaatttgatgatgtcaatgagaaatctcccatttcatcagagagagcaattactgttaagcaagaacctctatctaggtcgcttccaattggatcaattgcaaggaccttatcatgggatgatgcttctcaagaggcttcattgtgctgtaccaaaggtgatagccatgagcaagaacagtatgagtttgttgagaagattctaacgtctgttggcttctgtaatgagaaggcccaagacatctttgtccggtggcattcacttgactgccctttggacccagttgtgcttgaccaactgctggagcgcaaagtggaagatgccaagtgcagagagagacggtcaaaccagaggctcctcatcgattctgtcaatgctgctctactagacattggccaacgtaaactttggggtgcatacccttgtactgcacggtattccaatgcaccgagagttgctacatgtgatgtgctagtaaccgatgaagcatggaggttagtgaaaagttggctcttcgatgatgagaacgatattgccggtttgggagacaatgcaggccttgcagcggattgggttgtcgataaggagattcatggcaaagggtggtctgaaatgctgcggtccgaggtggatgaaatcagcaaggagatatgcggggatgtcctgagcgagttggttggggaggcattttcagagcttgctgatgctgagtgccattgaagctgctttattttccctgcttgtggcgtccacctgttgcttttatttccaatctggtggagaccgtcccctgaggctgatctgcactacccagagctgttcttgtgtgtatattgccctcataactgttttgtatgccgctcaaatgttcctcatcaccatcgatccattcacagcaataactttatgaatacagctgcttgtctattttctaaaaaaaaaaa

SEQ ID NO: 11668 - DNA, 332 bp, Setaria italica
  Peptide Sequence Number=SeqID_77642
gtgacgctgccgaagccgtcgtcgtagaggacgtctagccccttcttctcatcctcgtccttcaccactggcacatcggccttatcctccttcaccttctccatcctctccacgggcgcccctgccacgccattcagcaccgtcacggccgccgacggcgactccagggagctcgcgcggaggccgaaccgcgcctggcgtcggaaccctcggcggccggccccgacgacggccgggagggggtggagcgcggcgacgggcatggggcacggctgggcgggaagacaggaggagaaaacagaggagctgaaggtgaaacaggggagcacgag

SEQ ID NO: 11669 - DNA, 325 bp, Setaria italica
  Peptide Sequence Number=SeqID_77643
gtgcctcttgattatccttctctgcaccttgccccttcagtttggatggagtcactgggctatcagaaggaaggtgcaaggccctctcggtccactggaaaggctaaggatgatgttgtcaaggcaagcaacaaagatgagactggtagtactgacaactcaaaggacgaggctggcagtgaagacaaggattcaaaagatgaagtgaaatccagtgatgttgatggatccaagaccaatggtctgtcaaccaaaagaaagccaaaggagaaagaagatgagtcatcagaggaggaagagaaggggtctgctaaaatttattagg

SEQ ID NO: 11670 - DNA, 222 bp, Setaria italica
  Peptide Sequence Number=SeqID_77644
aagaatagctgcctctgataaagacactgatgaggatatcagtttgaaggaaatggtgtccccaacaaagatggataaatcaaaaaggccagcatcttctttctgcaacttcatactggctttatgttgcttcttcccagattctccttcagcagccttagttgataaagcttggcatcatctttatcagccgcctttgtagcttctccctcagaatcactg

SEQ ID NO: 11671 - DNA, 880 bp, Setaria italica
  misc_feature (49)..(49): n is a, c, g, or t
  Peptide Sequence Number=SeqID_77645
tctcggatgctgagacctggttgtccagggtggacccaatccccggatnaggacatgcacaacactcttcgccccaccatggctatcttgattacaaatgagctactggagcaccctgatcccaacgtgaaggttgctgttacctcttgcttaactgaagttaccaggattaccgcgccagaggccccctatgatgatgatgtcatgaaggatgtgtttaagagaattgtggaggcttttgctgagttggatgatatgaacagcccctcctttcaaaggagggtttcgatccttgattctgttgcaagggtccgttgttgtgtcctgatgttggatcttgacttggaccatctgatcctagatatgttccgtcatttcttcaaaactgcctcaatggggcactcagaacaagtcaccaactgtatggaaactataatggtgtatgtaattcaggagagtgatgatgtccatgctgaactggcatcgtgtctgcttcagaatcttacaaaagaagcacaagaaactctcccagcgtcttttggaattgcagagagggtactaggcctatgcaaggacaagctcaaaccagtgcttcttgagttacttaagggcactcccttagatgattacagcaatgttgttacgttgttgttccaagatgctggagaaaacaatgttgatgcatcaggaaaggacatggcagctgaaggtaaactttctgagaagtctgtttctgatgagtccccgcgggaaacttcaaagttagagcaagagtacctagaatagttaggaatacttagaacttaggaaccaatactagaatacctaagaataatagttaccgtacaatttacttacaaaaactagacctacaaataga

SEQ ID NO: 11672 - DNA, 893 bp, Setaria italica
  Peptide Sequence Number=SeqID_77646
aacaataggacaagactagaaaggtaaaactttactttaggttagtctgattatgatgagtccccgcaggaaacttcaaagttagagcaagatgtcaattgtgtaggacaagatggtactagtccaatcagtactcccgcaaccaccattagcaatgttggcgctccagttgacaatgtcaagtctccaggtggaccagcttcctccaaacagaaccaagaagtgccatctggcgacgagcaaatcaaaatttctgatcaattgatatctggtgacaaagaagtgccagaaccagtgaccgctgaaaatgaaaagctatctgatatcagttcaaagaaaagccacaagcttggttcttccactggacctgagatgactgaacaatccaaggttgttaaagacaatgagagtctggtagcttcagaggagttatctccggagacaaatgatggtgataaaaagcagctcacggagactagcaatagagctgctgctgattcatcaaaaccagtcgatactaagcctgccgtggttaaaccaaagcgaggccggcctcctgcagcaaagtctcaggagaagaagtcttttggaaagaaacaaggatcaaacatagaatctgcaaaagttgatgctgtcagtgattctggagggagagctacaaggcggctgaataaagatgatgccaagtctttatcaactaaggctgctgaaggagaatctgggaagaagcaacataaagccagtatgaagttgcagaaagaagatgctgcctctgataaagacactgatgaggatatcagtttgaaggaaatggtgtccccaacaaagatggataaatcaaaaggccagcaagaggatagctggggatcgaaaaggaacatctgcaggaagct

SEQ ID NO: 11673 - DNA, 1793 bp, Setaria italica
  Peptide Sequence Number=SeqID_77647
ttgtaattaaagtattgtattgtcctaagttcttttattctaacttaaggtcttgtcttgtaaggtagtaattcttgggtaagtagggagatttctaaggcggctgaataaagatgatgccaagtctttatcaactaaggctgctgaaggagaatctgggaagaagcaacataaagccagtatgaagttgcagaaagaagatgctgcctctgataaagacactgatgaggatatcagtttgaaggaaatggtgtccccaacaaagatggataaatcaaaaggccagcaagaggatagcgggggatcgaaaaggaaacatctgcaggaagctgaagaggccactccatcgaagaaaaacaaaatgcttgatgaaaaccttgttggctcaagaattaaagtttggtggccagatgacaaaatgttctatgagggtgttgttgaatcatttgatgcctcttcaaaaaagcacaaggttgcgtatgatgatggtgatgttgaggtactaatgctcaggaaggaaaaatgggaatgcattgttgaggagcaagatgatcctgatgcagcatcaaatatgccacgtggcagaagagccaaagggagctcagggcagcaaatgaaggaagtaaagacaggaacacctcaaagtggcagtgatagtaagaatcctcccaagaagagagggcgtccaaaaggtgtgcgctccagcaataatacgccaaattctgatagcccagtgactccatccaaactgaaggggcaaggtgcagagaaggataatcaagaggcacctaagactggcagtaactctaagaaggaaggtgcaaggccctctcggtccactggaaaggctaaggatgatgttgtcaaggcaagcaacaaagatgagactggtagtactgacaactcaaaggacgaggctggcagtgaagacaaggattcaaaagatgaagtgaaatccagtgatgttgatggatccaagaccaatggtctgtcaaccaaaagaaagccaaaggagaaagaagatgagtcatcagaggaggaagagaaggggtctgctaaaacttttattaggaagaagcgcagaagaaagagccgcaactagttgctctgaaccttgcggtcaggggcgttccaccctcagtctcaagatgttggcatgaggcatgccatgtatgccttctactccttagaccgggtacctgcttagtgcaatggtgattgaccatcatgaggtagctcgtagttaagtcttaaactctcaataggagctgtaatgtttggcgttacatttctattctcctttccattggctgtgaagcctctggcgaaaatggatttcatgcttgctttggttcaagcgttcttgttaggtcgtaatgcagtttgagttatgttctagcaaacaaaaatgtgttcccgttatgaagtgaatgttgcaaaagaaagttggttcaagtttatagcatcttatctgttctctgatttcaaaaaaaaaaaaaaaaattcttgttctcaatggactatagtacttgcaatttaagtagtttctttgcacttcagtcatgcctgtatatcatttggtaaaggttagattttatagtgtctatttatagactatagtttcattacatgctttactgttctaaggtagttggcaggtaaagcattactaaaggtggacctgtaactcagtttatctttccagacgtttatttctatcgtccttggttgctgttcatcatgttttgaacttctctgtatacaccttttctaatgtggtttcccacaataac

SEQ ID NO: 11674 - DNA, 303 bp, Setaria italica
  Peptide Sequence Number=SeqID_77648
catagagcaagtgagcaactgagcgagcaagaaagccggccgtcatggagatggtgctggactggcggtcgctggggtccctgctggcgacgctcatggtgttccgcacggcgatgcgggacttcctccctccggaggccgagatgtgcctgcgccgcctcctcgcgcgtgtcgccgccgcgttccgcccgcccagcggcaccatcctcatcgacgaggccgacggcgccagcggcggcgccaacgacctctacgactcggcgcagctctacctcggcgagcgctgcctcgccacggcccccg

SEQ ID NO: 11675 - DNA, 363 bp, Setaria italica
  Peptide Sequence Number=SeqID_77649
tcaacacaggcacattgccgtcaccggtatcaatattcatcatgattcaggctgcgttactcacctgtttcgtttccatgtacgcagacatggagcggagggctctacaggagcgtgtctgggaaaccggcttacagcaacgacgatctccaaggagacggcagcgacggcgccgtcacggcagagttcttcctttcctgctcttcagtcagcgcggcaaaggcgccctgaacgtggacgccggcaaggtcttcgcgctgaatatgcagatcatggtagcagcttgccttgtgctgatttaccatttcttctcctcatgcttgtacgcgatctggtaacagtaacaggcaaacagcacagctg

SEQ ID NO: 11676 - DNA, 681 bp, Setaria italica
  Peptide Sequence Number=SeqID_77650
ggcagcagcgcgtccggcccggtcagccaagacgacgtcctgcggatgctggtacggagctcgcgatgctcgcgcgcctcgccctccacctctgctccggcgcctcggggttccacgtctctcccggcgaggctggtcgaggttccggcccgtcgacggcgccgtcgtggtcaccatcggggaccaactgttcgtttccatgtacgcagacatggagcggagggctctacaggagcgtgtctgggaaaccggcttacagcaacgacgatctccaaggagacggcagcgacggcgccgtcacggcagagttcttcctttcctgctcttcagtcagcgcggcaaaggacgccctgaacgtggacgccggcaaggtcttcgcgctgaatatgcagatcatggtagcagcttgccttgtgctgatttaccatttcttctcctcatgcttgtacgcagtcgctagacagtaacagggaaacagcacagcttgtttgccactgttagtcgcctaaaatgtcaggagaaaagtaccaaccaaattcagtttcagttatcgaaaggaaagtgttaatcatataccaaagatctctaaatcaccacaggcgttgcaatcggcactctgctacagcaagtttccatgcactgactccaaatatccaataacctaaaatcaacagccctgac

SEQ ID NO: 11677 - DNA, 256 bp, Setaria italica
  Peptide Sequence Number=SeqID_77651
attccaattaatggagtcgtcgtcggtgcccggcagcagcttcgtgatcctgtccgtgtccatcgtcggcatcctctccaccgcgctcctgctgctggcctactacctcttcctcacccgctgcggcctgctcttctggcgcgccgaccagagcatctccgtcgccgtctccgttacgcaagaaccaccccgccggagcggcggcctcgaggaggtggccatacgccggatccccaccttccgctacggcggccag

SEQ ID NO: 11678 - DNA, 852 bp, Setaria italica
  Peptide Sequence Number=SeqID_77652
gagttgttgctcgactgttcttctgccactttccattgcaagctatataagtatttccatctaaggtgatatgacctgtttcagtggctaaaacttatttctaactatgttgcttaaccttagctaagtatgcatgctcaaagggaaaaaagagcttccctttctggaaagtggtagtgttgttagaagttttgtactcgaattatggcgattgaaagtaatcagtgaactttattcattatgagagtcctaatttggtcaagttttttcattcattagatacaatagtcaatcccatgttccttagttatttgtaacagaccattccccattgagtgctctttccagtggttattcttgttctaaatctgtgcagtaattttttctccagaaaaaaaactggtaggtattgtacttactacatttttaagaggcattctgtactctgccatgattcaagactgaactttactttatgatgtaactactaggatttgtcaaagctgaacagaaatcctgctcaagttatttatatcagtgctcatgctttggagtcaagcctgcagcctgaaaattctgtgcaaattaaaccttggaagcttgaaaatgatgacactcaactgctcgatcttattccatttctagaatatgttgctatggcaagaccttctgacatcagggctgttcttgcatcctatcaaggtagtgacattgctgccgagtttattgagcgctcgtcttctcaacaaaggcgcatgcaagaacaaaagcaatcaggacgcatatggcggcgatgatgaccaaaagtttcatgtctctatagaagtgtgtagattgatatgttttcgttcc

SEQ ID NO: 11679 - DNA, 1529 bp, Setaria italica
  Peptide Sequence Number=SeqID_77653
gcttgatcatggcagcctcctcctcctcctccccatccacggctgcggcggcggcggcggcgactgcggccgcctccgaggcctcgtccacttccggggacccatcctcccagccgccccccgcggcccgtaagctgtggggcgcgctcaaggtcgccgccttcgccgccgtgtccgccgcggtcggcggcacgggctacgccagctacgcttattctctagaggaattggatcagatgacgcgggagttccggaagaaatcgaagcatcccattcctgaagacgcatccggctttgagaagtttcaggctatggcttatgcagcagctatgaaagttcctgttgccgctattgagggatacctggatgtcaggagccaaattgaagatcaaattcggggctttagcgaaccagtatcagacaaacttcttccagatcgtgctcctcaagaacagcatatattgaccctagttctggatctgaacgagactcttgtatactcagattggaagcgtgagagaggatggaggacctttaagaggccaggagtggatgcatttctggaacatcttgggaggttttatgaaattgttgtgtattctgatcagcttagtatgtatgttgatcctgtcgttgataggctggatccaaagggaaatattcggcacaggctatcaagagttgcaactaaatacgaacacggaaaacattatcgggatttgtcaaagctgaacagaaatcctgctcaagttatttatatcagtgctcatgctttggagtcaagcctgcagcctgaaaattctgtgcaaattaaaccttggaagcttgaaaatgatgacactcaactgctcgatcttattccatttctagaatatgttgctatggcaagaccttctgacatcagggctgttcttgcatcctatcaaggtagtgacattgctgccgagtttattgagcgctctaaggaacaccaaaggcgcatgcaagaacaaaagcaatcaggacgcatatggcggcgatgatgaccaaaatatgttggaacgaaaacatatcaatctacacacttctatagagacatgaaacttttggcacttcaatccaaatgaagtgaatgaatccatcatccatggattattattttgtcaacttctggagagatcacccttggcaggttttaataaatgtttccattttaatgggtgccttacagtgatatcaaacttaaccctatcaggattttataatcaagcatgagatgcggccttggccaacatttttgaaatatttttatggcagattcacttgcattgtttttagacatgtagattttaatatgctccattgaacaaattactgtgttccagggtttctgcaggcgttttaggttggcagttttctactgctggtgggagtacaatatttctgttgattgttgcaattttgtgaattgtactagctgagcttgcaatagtaataaatagtgactgatggatgaacagaaccagttttgtgtttgatgaaccaaaaaa

SEQ ID NO: 11680 - DNA, 682 bp, Setaria italica
  Peptide Sequence Number=SeqID_77654
cagttttttcttctgtcttggtagaaaatgtttggtaaaatatttctattggctgtctaacttagaaagacgaaatgtccctttgtcttttttattttcctttttcattttctttttcctttcctatttttccccttgtctcctttcttttccgctcaccgggtgcccagccagattcttatcttcttgcaaccagaggggaacccgccacgatcagttagctagctacacgtcatggatagattggttcaagaaagcaatcaaatgcatagccgccggcgagtgtagtccgcataggatggaggcgtgggtctccgagacccaggagccccaccggcgctgccgcacgccgtgatgccgtcgctgtggctgtgctattggagattgagagaacagcttgctctcgctcgggcgctcggcgtgggagtcttgcacggtgagctgagaaggttggtgcgcccgtgctgcgccgctctccggctcctccgcgctgtccctccccacgccgcccctttccatggtactgcctcccctctcctcccccgcctccccatgctgctcggtgggcaaaagggtcagatgcccccacgtccgagggtgaagctgcggggggctgtttttttcagctcctcctaccttgaaaggctccaaagagcggagtttggggagcttcttcccagaa

SEQ ID NO: 11681 - DNA, 913 bp, Setaria italica
  Peptide Sequence Number=SeqID_77655
ccgggaggcccaaaccctagcgcggcggcggctatggcgtccgcggcgggcggcgcgccgaagcgctgctactacgaggtcctgggcctcccccgcgactgctcgcccaccgatatcaagctcgccttccgccgcctcgcgctctccctccaccccgacaagcagggccccggcgccgacctcgccgccgccaccgccgccttccaggagctccagcacgcgcactccgtcctctccgacccgcaggagcgtgcctactacgactcccaccgctcccagatcctcttctccgacgcctccgccgctggcgccaaatccgcctcccccgtcccggacctcttcgccttcttctcctcctccgccttctccggcttctccgacaccggccgcggcttctacaaggtctacggcgacgtcttcgacagggtcttcgcgcaggagctcgcctacgcgcgccggatgggggtccccgagcccgccgcgccgcccgtcatcgggaacctcgattccccctacacgcaggtcaccgccttctacaattactggctgggctttggctcggtcatggatttcgggtgggcagccgagtgggacgccgcgcgcggggagaaccgccgcgtccggaggctcatggaggaggacaacaagaaggcgatgcgcaaggcgcgccgggagtacaatgacgccgtcaggggcctcgctgcgttctgcaagaagagggacaagagggtggtggacatggcgctgaagaagaaagcagaggaggagaagaagaaggctgaggagaaggagaggaaaaaaggaggaggagaagaggaagaaggagcgggccatggcatatcaggagcccgattgggcgagggtggaggagaggaagggttgtatgatgacgaggaggaagaggagatgaagg

SEQ ID NO: 11682 - DNA, 1482 bp, Setaria italica
  Peptide Sequence Number=SeqID_77656
tccttggtttcttttgtaagtctactttggtcctttgtattattatctgcatcgaataccgtaaacagaagccactctaaacagtgtgaaaagtgaggttttttctgctgacaaattcgccaagcgcaaagcttcttcaatcttgtccctctgaagtagatgtcgtaataaacaatgcaatattgtttgggcttgaggtgaaggctcaaagcatggaaactcagcagttgagaaggacattctctgagaaacaccaacgaccacaccaacatttggaagaagaccaagaggatacacctcacgatcaaattcaagctcaggatccaactgcaagaaatcttcttgcttaaaaggatctgctccatgtgatggataccatacctgcataccccgatgaccatagtcaagccatgaaacctctttaataaggctacccttctcttcgaattgtgaacaggtgacccaaaagagttcaactgaatttgtgagtgcatgttcgtgtccatcatccatgtccagcacagaaagttcaccattggtccgcaagatcaaacatcttgatggttgctcggataaaagatcagaagatccactagcattttgtttcagcgctcctttgtcattttgatcaggaatgaagcgcattgaaacaggggggctctttggactcatgattgaaagttctcgtactgttgaaagctgtaaaaccggattgctagcaggtgacagttctcccgatatcaccacatggaagatatgcacatcaaatggactgtaggtaactaatatgtaattctggaaaacatccatggcaattggccttccaagaagtggtttccggtagagtaaggagctataatcaagatgatatcttgggaaaaagagaagctcatacgtatttgatgattcaacatagttgcatacaataacaatctttcccagccacaataggcctttgcattggatcttttgctcttgtgtaacatcaccaaaaaaacgccaccttttatttcgcagatcatacagcactagcccatgagaaccagcaactgctaagtacataccatcgttgctcgccactacatgtagaactggccagttctgggaaatgtaggaaactggaacattaaggtgtaataacttcagttcatcagcatcatccggttgcaccaacaggattcgatcatctccataaagaacctggtgggaatatgttgtgcctgaaagtcctctgtttaggcaacatttggcaaatgagaaagcaagaaccctttctgacaagctttcctcaacagcaaataacttgtatccattatcatcccattgtatgtgtgatgtccctcccattagaggctcaaattttagagcactaggtttcaccattggagatgaggcagaatttgatccagtttgacgaatagtacacatcaatcggcatccagacacagaccatacagtaagtcctctaaaattccacccaaa

SEQ ID NO: 11683 - DNA, 987 bp, Setaria italica
  Peptide Sequence Number=SeqID_77657
tttttttttttagttgttattagttgtattaggtctaacgttgaatgtataccttgacacgacctaacatttccagtttgctacacactggagcattctttagatttttatagagtactcatttaagtctacttggacgggcttgcaatgaagctaaatgtgcacgcgctgtagataaacgtacaggatgctgccaaaaagtaaagatacatcgctgcctatgtacctattgtaattgtataagaaaaatacatttcctatcactatagaaatacttcaaatgatggcttccctccaggttacagtttactaacctgccaaaggacaagggagcgtatcattgtatgaataccccatccaatgtatgaattcctcagtaaggcgacgaatgcacactcaactttgcttcaacaaactaatgatacaacaatatggtgctcagcagatcactgcacaaaaagctgccatagcctctaggtgttgttcaaagggaaaacccctgaataattctatttacatcagatttcccgcgctgttctcatctaactgtatgtgttaaattagcacaaggctaaatgccacattcaatgggttttttcaaacagtctcattcagcattcatgacaatggtccattttgcaatgtaagaccagatacggacgaaagctgctcctccaacatattaagaagatcaagatattctctgaatacatcatgtgactgtagagtaatgctatatgctttccacaatcgcaaatcatgccgaaagagatccaccaaaacctctgcacgtcgcaataaagtagccagcaccacgatccattccttaaatttgactgaacacatatgagctagaaggaactcagcatcaagccggctttggagtgtgtccatttggagcttttgtccaatcagttcaagtgcagatgcaaaattctccagccgagcagaccctaatctttctcgttgaagatattccacaagatc

SEQ ID NO: 11684 - DNA, 1179 bp, Setaria italica
  Peptide Sequence Number=SeqID_77658
ttacgttacttttattaatttggttgtaacggtaattagtaaagttagtcctaagtaaattctttgcaacgcaataaagtagccagcaccacgatccattccttaaatttgactgaacacatatgagctagaaggaactcagcatcaagccggctttggagtgtgtccatttggagcttttgtccaatcagttcaagtgcagatgcaaaattctccagccgagcagaccctaatctttctcgttgaagatattccacaagatcaaattgtgtccctttgacaaaagcgacgagtttagaaagctccttgccagacatcaaatagctagcatggctctctagaatgttcataacagaggcaatatgtggactaagttctttcattgagttacttttcaaatcagaagattgccgcttatatggtgaacggaatagaaagtagccaagaaatcttggagagagcttctcggagtctgaggttgcattttcaaagtctcttccagatcttagcaagaagcgaaccaactccccagcaagctcatacaaagattcatcaagtgtagcttgtagcaaacgaagtgcacagtactgactgactgcagggccctccagcttagcaatgaccagtatgtagcaagcagcagtcctgtaccatctccgttggaagcattcctcaaacatctccgtggatcgtccggctgcagagaaaagatcagcccagtgtcgaccatctgttttcctagcaacactgactacaacatccatatattcaggaaaattccgcaataggtcgcatgtcttctcaagaagagacttctttggagaatttactttttgtaaaacctggttctttgaagcacttggccttgatatatctgcatcgaataccgtaaacagaagccactctaaacagtgtgaaaagtgaggtttttctgctgacaaattcgccaagcgcaaagcttcttcaatcttgtccctctgaagtagatgtcgtaataaacaatgcaatattgtttgggcttgaggtgaaggctcaaagcatggaaactcagcagttgagattctctgacccacaccaacaggaagaagagggatacgacctcacgatcaaattcaagctcatgaccaagaacaatacaaaataagactaagacaataggactactactaagaaattaga

SEQ ID NO: 11685 - DNA, 1009 bp, Setaria italica
  Peptide Sequence Number=SeqID_77659
taattggcgtttgccataacgagcaatttcgtatgtgatagcaaaagcatgctcctcggattatccaatgggcatgtgcaggtcgtgtcctggaatgctgagttctcagatagcttcaagcttggttgctctgtgtgttcatctgagaaacctactgctgtcatagatgcgttggtgtttgatcctcccagtttgcgagaaaactctgatgcaaggcctgctccttgctgcacaggcaattcttctattgtccatgttgagctgtcggtgctggacatggatgatggacacgaacattttgtttcagcgctcctttgtcattttgatcaggaatgaagcgcattgaaacaggggggctctttgtactcaggctgtcacattgccctctgtactgttggtaagaagggattaaagcagcctggcagcatcagagtggagagatggttgaacactgatgatgcaatgtgtacttctgtggcttctgagcaacagattcttgctgtaggatgcagcagaggtgttgttgaattgtatgatctagctgagaacacacgtcatatacgaacaatttcgttatatgattgggggtattcagtggaagatactggtcctgttgcctgtatatcttggacgcctgacaattgcgcttttgcagttgggtggaaatttagaggacttactgtatggtctgtgtctggatgccgattgatgtgtactattcgtcaaactggatcaaattctgcctcatctccaatggtgaaacctagtgctctaaaatttgagcctctaatgggagggacatcacacatacaatgggatgataatggatacaagttatttgctgttgaggaaagcttgtcagaaagggttcttgctttctcatttgccaaatgttgcctaaacagaggactttcaggcacaacatattcccaccaggttctttatggagatgatcgaatcctgttggtgcaaccggatgatgctgatgaactgaagttattacacctta

SEQ ID NO: 11686 - DNA, 1839 bp, Setaria italica
  Peptide Sequence Number=SeqID_77660
tgtgtgagtagttttagaagaaaagtgcctgcacctactactgcaaggccggcccatgacataggcgactcccagccaatataaaagatgataatctctctctacagtaccaccttattagcacaacaatatagcacccaaacaaaagtatacaaaacgaaacgagcaaagctctactgtccaagttctacacatgcagggagcttggttggttggtcacacacacacaatttgcaccacacgatcacatcacgaaagcatggagttaaacacaagctccgccgtgtcaggatcgaaatgcgcctcaacatgcatcaccgaactcactggattcacttgcacaggcctgctaagcagctgcactccttgcttccagtatctgctctctggtccggtgcttatcacagtcgaattttcctcatcaagtacccagtcaatccaaactgcgaaaccatggcatattccatcatgggcaaacttgatctttgttttgccaaagcaagagtgaataggctcagaaaagttgaagtccatgagagagtagactttacttaatttcttggtataaccgctttgccacacataatatggcaggcaagggccttgttgctctctaggaagatcaccacaggctccaaaagtatcattaacaaccaagtgatcaaagccctcaacagttttaaggctgcaacggctcctccacaagtccggaagtgacatggcacataatcttaatattcctttacaaggcatgatgaatgcatcctcagatagcaatggatcaagcagagttctttcattccagaaacgcatattttgccatggcagcatcccttcacttccaaggtagaaaggttcccccactactagattaaccttttcatgctttaagtcattcgttgtaagggatgaggcttttttaccaatgactttaatccggtccatggataaattatttgcatccgcaacagctcgaaggtagttgaaacccttgtccctgagaccaggaaacatcgtaataactgttgaagatggtaatagagaagaaactatgagagctaggagcacgctgtcatcggccacaatgcaggttggagaagaccttccactcgtagcatttctaactgcacctatcaatgctgatctccaagctttatcaccataaagtgctatcctttctggcaacaatgttagatggtcatttttggggcttctactgcttacttcatcattcatattcaagtgatatgagatactagtttcgtcatggctagctctcaaagaaagagtttgatctttcatagcaggagcccctgtcccttgtataaaccagacacactgcttccaatgatcacaccaatccttcatgccattgacacattgtggtaaatccacaccactcaattgtctcacccatctaggagcagttgagtaaaagactgatccagcagaatccagttgaagcacccaccatgaaataatagcatgagcatgtccatcagcagtagcttttatctcgatctttgtttcacgatgactatctggtcgtttccaaaagtcaaattcaaaaactttgaagggttctgacagcaatcgtatttcatctgccagtgcatcacattgcatcgcatgttgttgtggctttacagaaagaatattttctatcccgctaggagtaagccacacgccatcttcagcatttgcttcactgctgtgcagatcatgcatcttccacaagaatgtgctctcaactaacactccatatgtaatagctcgatacggaactgtctttggatttttcaccaataactcgtcatgcgcgtgctgtaagaagtaaga

SEQ ID NO: 11687 - DNA, 331 bp, Setaria italica
  Peptide Sequence Number=SeqID_77661
taagtgacatggcacataatcttaatattcctttacaaggcatgatgaatgcatcctcagatagcaatggatcaagcagagttctttcattcctagagtcagaaaaacatgattctttaaaactagttacaacaaaaacacaaaaatacaaaatgagtttcagataaaataaaaaagcttcaagttgtcctttgatgcggacaagaaaattccatattagttaaataaatttgtttctcaacaaatctcatcaatgtggacgagtggaactctacaaggtggagcaccctgatttcatccagcgcgtaccgagtctcaaacttttgtcctt

SEQ ID NO: 11688 - DNA, 463 bp, Setaria italica
  Peptide Sequence Number=SeqID_77662
gtacgaaattttacctacaatcaagtacccagtcaatccaaactgcgaaaccatggcatattccatcatgggcaaacttgatctgcaaggtggtatgaatggagtccgcagagtgaaaaaaaaaaacacaaaacagcacaaaagtagaaaactacagaagcatttcagccaagtgagcaaagctgcatcgcagtgtatggttaacttgttcaggaaaaaaaataaagaagcttccatgcttgccaaataagtgaagaacataatttcagtataaatctgcaaggccactactctacaaatcatagtgctttgaggtttggcatctttatgatttgcttattatgtatcaatccagatttcactactaacactgcaacttcttatatacaaaaatgttacagcagaatcgacacccaaaagtcatcatctaagtcttttgcatcaggtctgaattactgaattc

SEQ ID NO: 11689 - DNA, 368 bp, Setaria italica
  Peptide Sequence Number=SeqID_77663
cgcgtgctagcctccgaggtcgtttgtccttcccgccacaggtggctccacgacaagcgcgccgccgaggccgataacctcacccgcttcgtctacaacctcgccggcggagcggggtccggcggcgccgccgtcgacgtcaggcacgtcgcgcgccactattgtgggaacgtcgtccgccgcctcgtcttcaataggcgctacttcggcgagccgcggcccgacggcggccaaggcccgctggaggtgcagcacgtggatgcggtgttcacctccctggggctcctctactccttctccgtctccgactacctcccctggctgctgggcctcgacctcgacggccacgagaagatggtcaggggagg

SEQ ID NO: 11690 - DNA, 316 bp, Setaria italica
  Peptide Sequence Number=SeqID_77664
ccttgctagaggccaagttggcgttgtgcatgatccttcagcgatttgaattcgagctcgcaccatcatatactcacgcgccacataccgtgataacactacatcctatgcatggtgcccaaatgaagctcagagcaatatgatcacatcatgatgttcatcttcaataaaatcaaatgggcccttccgtgttaaaatgtatgtggcccgtgagtttatgatggtgcgagctcgaattcaaatcgctgaaggatcatgcacaacgccaacttggcctctagcaaggcgaagttctgaccaatgcaaatgcgtggtc

SEQ ID NO: 11691 - DNA, 1083 bp, Setaria italica
  Peptide Sequence Number=SeqID_77665
tgccgcttcctgcaaaaaaaatcacaaaaggtgattatatattatatgacaatgaatttcagaaaatccatctaatttctttagagcatagaatagtagagcacctaaaatgctcttacaggcccctaattgtaagggaaacattccagaagaagtacaaaagaatattttccatgttacagtttgcataatgaagtctgatgtatacatcaaattcctttaggttataataaaaagttttccatgttatgatttgcatactagaaagcatcacatatcaccaaacttgaataggaaaagatcagggctgcatagacccaaagtatcaaactctaattacaaaactcagagtagttggagaaagactacgggcttgtttggatgcgatcctgagcgcagcaatccagaccgcagaacacaaaaccaagcgcctggatgtgctgcttgtgccaggcagctttcccaggatcagaagcaaacgagccctatataactgaactcagagtttctccatcttggtaccagtgagaaattaatgcagcataagtttattacttaaaaacaaactggtaattttgactattgatgcacccccgatttttctactatgggaaaagaatgtgctgtttcagtggtaagagagattcccactgtatggaaataaagggatcacacctccgctttagagggaaaaggaaatgtcaaagaaaaatgagcataagagaattgaggcaacattcatagacaattcaaaaacatcaagttagtcctatcaaaatgttaacatgacattattattaagcttgaatttgaaaatataatggacacaaaaaagattatgtagaattgaatatcttaaggccgaaataagacaattagaatttaaatctcaaatggtgcaactacatttttcaaccataaatttattattatagtgataagcaagataaacaaatttgattgtttggttagtcattcaaacagtaatcaaatttcatctttgagtttgacctaaaattgtaaaattgaattttttgtgattaaatgtacaacaaaaatcaatatacctaacactttccagtt

SEQ ID NO: 11692 - DNA, 324 bp, Setaria italica
  misc_feature (273)..(324): n is a, c, g, or t
  Peptide Sequence Number=SeqID_77666
cgggaaaacttatggtggggaaagaagaatgtggaacagatgacagaaaagctggggcatctcacctcagcagagaaaacctaactgctcgtatttcttgtagctgaaaaacagttagcacagaaactcataggaccttggtacctctgacatgtacttcacagtgtatcatatctttgcctcctgcagggcgatatgttgactgacatctactttgtagagtaataacataccatttttcccttgtactttacccatgtttagaatgatgannnnnnnnnnnnnnnnnnnnnnnnnnnnnnnnnnnnnnnnnnnnnnnnnnnn

SEQ ID NO: 11693 - DNA, 280 bp, Setaria italica
  Peptide Sequence Number=SeqID_77667
tcttgtacccctacctccccacaccaacatgtgagcaagatctgtgattgatgatccatccacttcatgaactgctttgaagcccatccttgtatagaatctaatgagcttgtcgtggtagagcggcgtgtcgttgatagccagcagctcggcgcgcttgcacccagcgtcgaaaccatgtcgcacggcgacggcgcccaggaacatccccagcccgaacagcggccggtcggagacgctcagcgtggcgcgcgtcaatccgcatggagtcgaggtgcag

SEQ ID NO: 11694 - DNA, 259 bp, Setaria italica
  Peptide Sequence Number=SeqID_77668
tagcattgacatacttgtgcattctcttgctaatggtcctgaggtaacaaagcctttattggagacatcaaggagaggctatcttgctgcgatttcagcatccagttactcctatgtttcattgcttcagcacttccttcctataatgaatccaggtagtgcatatctcctatgctttgctggcactcatacaattattttacatgctacaaataattctgctagtgctgcttgctatttgttttttgatttttgagta

SEQ ID NO: 11695 - DNA, 573 bp, Setaria italica
  Peptide Sequence Number=SeqID_77669
ttggttgtgtaatctggtctttagttggataagttcagggagtcgtgaacttcaaatcctgctcctcggtgaggaggctgagctttgaatcttggttctgtcaccgattcgttagaatagtagttctataattcagaaagcattatctgtttgtctggaaatggagaagatctctgttctgcatcctgggatgaacagtgtttctgctcttgtgttgaacccatacgagtatatttgtcaccgctccgttgatgttctgactgcccaagcagcacgcgcatcgcgccgcattccccgaggccaggcttagctggcagtgaagaagatgagtacttcagcagctgctggtgtgaagatggtggctgcacgcccctgcatctcggcctcacaaggaatgctcgcctcgagggcagcagtttccaggattgaaaccactgctagatttgcaagctgccccaaaatcttctgctccaggcctctcagttctaagcgcactggttttgttgtaagggcaatgtcaggagagagtggcccacaggcgcttcccattgattctactaagtaaggtactaa

SEQ ID NO: 11696 - DNA, 1415 bp, Setaria italica
  Peptide Sequence Number=SeqID_77670
taacaataacataactaaggaactagttaaagggtacttaggtaattactaattactaaaacctgtgaagatggtggctgcacccctgcatctcggcctcacaaggaatgctcgcctcgagggcagcagtttccaggattgaaaccactgctagatttgcaagctgccccaaaatcttctgctccaggcctctcagttctaagcgcactggttttgttgtaagggcaatgtcaggagagagtggcccacaggcgcttcccattgatctcagaggcaaaagggcatttattgctggagttgctgatgataatggctatggatgggcaattgcaaaagctcttgctgcagctggtgctgaaattcttgttggtacatgggtgccggcacttaacatatttgagacaagtctgaggcgtggaaagtttgacgaatcacgcaagctgccagatggatctcttatggatattgttaaagtctatccacttgatgctgtctatgattcccctgaggatgttcctgaagatgtcaaatcgaacaaaagatatgctggatcatcaaactggactgttaaggaagttgccgaatcagtgaagaatgattttggtagcattgacatacttgtgcattctcttgctaatggtcctgaggtaacaaagcctttattggagacatcaaggagaggctatcttgctgcgatttcagcatccagttactcctatgtttcattgcttcagcacttccttcctataatgaatccaggtggtgctagcatctcattaacatacattgcatctgaaagggcaattcctggatatggtggtggcatgagttctgccaaagcagctcttgagagtgatacacgggtgcttgcttttgaagctggacggaaaggcaaaatcagagtcaacaccatatctgcaggtcctcttgggagtagagctgctaaggcaattggatttattgagaagatgatagagtactcatatgtcaatgcaccactgcagaaggaactgttggcagatgaggtggggaacacagctgcattcctggtgtctccattggcttctgccatcacaggctcgaccgtgtatgtcgacaacggactcaatacgatggggcttgcagttgacagccctacaataacatcataggcatggccgaggtagatagacgggctttcctgcttctttgcggcgtgattcttgaataaagaccttaattagttagtgtgagaggtaagggcaggaaaggttaaaaaatatataagaagaaactggccttatgccgcctttggtgttcggaggccatattaatgtaattttcatgttgatgggtacttggtaaatgctacgatgtggtttgaaatgattgaagcagtccagtaatcccttttggtccatttctgatatttcagc

SEQ ID NO: 11697 - DNA, 537 bp, Setaria italica
  Peptide Sequence Number=SeqID_77671
ccccccccccccccaccccccaaaactagtaacaaataggaacatgcttctccatacatacgctgctagctacacatattcaacccaaaaccgaaagttgctgcgaaggcggccagacaacatgtaaaatcaccagtaagattggagtgtgaggggcaaagcagatttctgttttcatcatgtgaagttgcttacatttcagactttctgcacttcagtagtagtaagctccttcggcttgccaccttttacacaatccacttccttgccggtagcctcgtagtagtcgttgagcgcccactggtacttggactgatccaacccgaaccagttcgccacgtactcgtcaaggctcgcgtgcgcttcctggacgcgcgcgacagcgtcccagaagaagtccgaggcctacccgtcgtgcttgcctcccgcggacgccttctcgtactgcggtggaggcacctgcaccggcggcggcgcgaccttcacgggagccggaggcgggggcggggtgaacaccaccgcgggcgccgcggccgg

SEQ ID NO: 11698 - DNA, 511 bp, Setaria italica
  Peptide Sequence Number=SeqID_77672
cccccccccaccccccaaatgtaacaaatggaaccatgcttctccatacatacgctgctagctacacatattcaacccaaaacggagttcatttcagactttctgcacttcagtagtagtaagctccttcggcttgccaccttttacacaatccacttccttgccggtagcctcgtagtagtcgttgagcgcccactggtacttggactgatccaacccgaaccagttcgccacgtactcgtcaaggctcgcgtgcgcttcctggacgcgcgcgacagcgtcccagaagaagccgaaggccgatccgtcgtgcttgcctcccgcggacgccttctcgtactgcggtggaggcacctgcaccggcggcggcgcgaccttcacgggagccggaggcgggggcggggtgaacaccaccgcgggcgccgcggccgggatcgcgggcttccgcggcgagggggaggaggagggcgagtagtccgccctctgcggggtcggggtggagaaatccgag

SEQ ID NO: 11699 - DNA, 785 bp, Setaria italica
  misc_feature (1)..(4): n is a, c, g, or t
  Peptide Sequence Number=SeqID_77673
nnnnttttttccaaattagtcatcgcatgcgcttcttattttgtacaaatatcatcctatgttcctgaaatagcaatcaagcatcatacaggtaggagcacaaaagcaacggagataatcctattcctttacttgtccacacgacaacactacaacacagtttatgacacgtaggatcagagggcaggatgcttacatcaattttacagacgttgttcgtcgtagttggtaacaacagccatctagagcctatgctggagtccagctactggactactaccaagtccagtaccatagcacacattcagctgccctctccgtgcttattattattacaaacggaagcttggtgcaagggcttgttgatacaataaacactagagcttcggaccaggtttacagcattgcaaccaaagcaatagcggatgcaatggtttatcttccaggacggatgtggcgacaacatcaatggtagcagttgcagtagtttatcagcaatggggtccttgccatccatatgtacatccgtcatggtagagtcatgaaactctgaactgccttttcttgtaggaccccctggcaatgtagcacaaaccaatcagctttcttcatcgtcagtttgatttgcacctttcctcgattccttctttgaatgttgagatttgccatcgacgaagtaggatgccgatggccacccccgcgcggtggagaaggagagcgcctcctcctccgtcatgggcgcgtcgatctccacgacctcgaccgcggcgcccgcggacccgacg

SEQ ID NO: 11700 - DNA, 258 bp, Setaria italica
  Peptide Sequence Number=SeqID_77674
gccaaatattattcactttatgttaaaaagaacaccatgagcatctgcaaggagggaaagatgtggaggaacacctgctgaagctagtaaccttaaagcaccgccgttttggtgatgtctaaagagtagagatggtgctgattctctgtcaggcccacaaatccttgcctttatgcaagaaaagggtccatccatctcatgaaacgcaccctagacttgtagagtaacacggaagattaattctaaatatgatcggtg

SEQ ID NO: 11701 - DNA, 405 bp, Setaria italica
  misc_feature (379)..(379): n is a, c, g, or t
  Peptide Sequence Number=SeqID_77675
acctcatagtgtgaaatatttgacaggagaggatgcgcggaggtggcgacggggcggctgccccggagcgaccccgcagcaggagttctaggtggagatttcggagtccgtctcgtgactctgcagcttcgacgctggtgcacgacgacgagcattggacagccggtagaggggcggttgccggcgccgatcgagcagagcttgctgtgcgcggctgctttttttccaaaaatatctttggtggtgggcggcataagcacccaccatcacaaaaatcatatgtgccagcgcaaatagccatttttgctggctcaagattgctggcgggtgcggttcccaccagtataaacctcttctagccgccagcataaaattttcnggcgcagtgtgatgcagctgaatttt

SEQ ID NO: 11702 - DNA, 278 bp, Setaria italica
  Peptide Sequence Number=SeqID_77676
cggacagcgcaaggcacacctcccaaacacagcagagccggatcgatccggcggccctcttgccagtgcgcggcggcggcggctagttctcggcgggcgccatggcgcgtgggggcgacaacctgcaggtgctgagcgcgctggacgcggccaagacgcagtggtaccacttcacggccatcatcgtcgccggcatgggcttcttcaccgacgcctacgacctcttctgcatctccctcgtcaccaagctgctcggccgcatctactacaccgacacc

SEQ ID NO: 11703 - DNA, 719 bp, Setaria italica
  Peptide Sequence Number=SeqID_77677
cgctcagcgccaccatcatgtcggagtacgccaacaagaagacccgaggtgccttcatcgccgccgtgttcgccatgcagggcttcggcatcctcttcggcaccatcatcgcgctcctcgtgtcggcggtgttccggaaagcgtacccggcgccgtcgttcgccgacaaccccaaggcgtcccttgtgccggaggccgactacatgtggcgcatcatcctcatgttcggcaccatcccggccgcgctcacctactactggcgcatgaagatgcccgagacggcgcggtacacggcgctgatcgcccggaacacgaagcaggccgcggccgacatgaccaaggtgctgcagaaggagatccaggacgaggaggaggaggtgcagcgccaggtgatcgccggcgacagctggggcctcttctcgtcgcagttcctacggcgccacgggctccacctcctggccaccaccagcacgtggttcctgctcgatatcgccttctacagccagaacctgttccagaaggacatcttcaccaaggtcgggtggatccctccggcgaagaccatgaacgccatcgaggaggtgttccgcatctcgcgcgcccaggctctcatcgcgctgtgcggcaccatccccgggtactggttcaccgtcgccctcatcgacgtcatgggcaggttctggatccagctcatgggcttcctcatgatgaccgtcttc

SEQ ID NO: 11704 - DNA, 588 bp, Setaria italica
  Peptide Sequence Number=SeqID_77678
acttcgggcccaacagcaccaccttcgtcgtgccggcggagatcttcccggcgaggctccggtccacgtgccacggcgtctccgcggccgccggcaaggccggcgccatcgtgggcgcgttcgggttcctgtacgcggcgcaggaccccaagaagcccgaccacgggtacacgccgggcatcggcatccgcaacacgctgttcctgctcgccggcaccaacttcctgggaatgatcatgtcgctgttcgtgccggagtccaagggcaagtcgctcgaggagatctccaaggagaacatcggcgacgacgccaccgatgctccggccagagtctaggggcctgcagcctccccccacacactttctgcgcgcgtgcctacatgatgcacggatggttttcaggttctgtttgtatgcttgactgtgtccttgtgtggtttacatcatactcctaccttccgatttattgcattctgtgtgatatttgaaaatatttttgggtaatttctccactgagaatttcgtttgtgctagtgtttgtgtctgattgaccgacattcttatcaatgaataaaaagctgttgtactt

SEQ ID NO: 11705 - DNA, 1804 bp, Setaria italica
  Peptide Sequence Number=SeqID_77679
gtgaagaggcggcagcatcagctaccatggcgggcaagcagctcaacgtgctgagcgcgctggacgctgcgaagacgcagtggtaccacttcatggccatcgtgatcgccggcatgggcttcttcacggacgcctacgacctcttctgcatctccctcgtctccaagctgctcggccgcctctactacaccgagcccaacagccccgaccccggctcgctgccgcccaacgtcgccgccgccgtcaacggcgtcgccttctgcggcacgctggcgggccagctcttcttcggctggctcggcgacaagctcggccgcaagagcgtctacgggatgacgctcatgctcatggtgctctgctccatcgcgtccgggctctcgttcggcaacacccccacgggggtcatggccacgctctgcttcttccgattctggctcggcttcggcatcggcggcgactacccgctctcggcgaccatcatgtccgagtacgccaacaagcgcacccgcggtgccttcatcgcggccgtcttcgccatgcaggggttcggcatcctcgccggcggcatcgtcacgctcatcatctccgcggcgttccgcgccgggtaccctgccccggcgtaccaggacagccccaaggactccaccgtgtcgcaggccgacttcgtgtggcgcatcatcctcatgctcggcgccgcgccggccctgctcacctactactggcggatgaagatgcccgagacggcgcgctacaccgcgctcgtcgccaagaacgccaagcaggccgccgccgacatgtccaaggtcctccagacggagatcgtcgacgagcaggagaagctcgacacgatggtcacctccacgggcaacagcttcggcctcttctccagggagttcgcgcgccgccacgggctccacctcctcggcaccgccagcacgtggttcctgctcgacatcgccttctacagccagaacctgttccagaaggacatcttcaccagcatcaactggatccccaaggcccgcaccatgagcgcgctcgaggaggtgttccggatctcccgcgcccagacgctcatcgcgctctgcggcaccgtcccgggctactggttcaccgtcgccctcatcgacgtcgtcggacgcttcaccatccagctgctggggttcttcatgatgaccgtcttcatgctcggcctcgccgtgccgtaccaccactggacgacgccgggcaaccacatcggcttcgtcgtcatgtacggcctcaccttcttcttcgccaacttcgggcccaacagcacgaccttcatcgtgcccgccgagatcttcccggcgcggctgcggtcgacgtgccacggcatctccgccgccgccggcaaggccggcgccatcatcggggcgttcgggttcctgtacgcggcgcagaaccaggacaagagcaaggtggaccacgggtaccccgcgggcatcggcgtccgcaactcgctcttcgtgctcgcaggggtcaacatgctcggcttcatactcacgttcctcgtgccggagtccaaggggaagtcgctcgaggagatgtccggcgaggccgacgacggcgaggaggaggccgtcggcggccgcgcggtgcggccgtcccagacccagatggtgtagtatgaccgtccgtggtgattggtgatacgtgtaggccggttcacttgttttcgttttccatgtagaaagtcaaacctgctgtttcacatgggcatctgttatttttatctctatataaaatataaaaaagaaaatatcaaagtaaaaaaaaaaaaaaa

SEQ ID NO: 11706 - DNA, 533 bp, Setaria italica
  Peptide Sequence Number=SeqID_77680
ccggacaaggacgccatcctgcaccgggacatcaagcccagcaacgtgatgctggacgacgcgtttgaggccaagctcggcgacttcgggctcgtgaggcaggtccatcccgggcagggctccctcagaggcacggccatggtcgggagctgggagtacatggaccctaagtgcatcaccaccgactcggcgaccacggcgtccgacatgtacagcttcggggtgctgctgctggagatcgccaccggcaagaggccacgggtgccgcgggacgatgaagaactaagcctccgaaacgtcctcgtcgacgctatccgggagtcttacggcaagggtgcggtcctcgagatggccgacgcgcggctgaacggcgacttcgacgagaaccagatggagcgcgtgatgctcgtcgggctcttgtgtgtccaccgggatcgccggaagaagctgtcaatttgctctcgaatctcaagcacccgttacctgaacctgaagttgtcactacctgagcactctcaccctagtagggcatg

SEQ ID NO: 11707 - DNA, 621 bp, Setaria italica
  misc_feature (1)..(25): n is a, c, g, or t
  Peptide Sequence Number=SeqID_77681
nnnnnnnnnnnnnnnnnnnnnnnnncctagtttaagacccaagcacaaaacgtagattccagtgtgctgcaactgttcacctctggaactggggatgatcgtcaccttacaactgcgaaagagccgagggatgcaggcttggcacgccagcagctgaagaatggggcctttttcagaagctcaagcgtatgctggtactcatgagcctcatccttcattgcacgataagacagatccccagattggaattttgttaacaatgaatgttcaagtgacatgaaagcttccgccaatcttctcttgcagagcaatgactcggtggaggagaagcatgctgcctttgaagacgttccttgtttccttccggttgttcccaggacaacttcatgcaaaccagatttattccaacaaattgagtacccgcaagtcaaaggtggtacatctccagaaaatctgttgaaactctttaggtggaacaggtgcctcaaaaaactttggacgtgctcaatttgaaagaagcaggcaatctgctggatagagaggacaagcgagcattgagaactttctcaatattattttcaatagagaacccttcaggagcaccatcaggtaactgtccaa

SEQ ID NO: 11708 - DNA, 230 bp, Setaria italica
  Peptide Sequence Number=SeqID_77682
tgatatgtagtatttgctgatatcttcctatacgtttcatatttgggtggtctgggagcaacatatatctgatcgagcagtatacagaaggatcacagaagctttctatcaacttataatagcaggaagctttgctcaactctaggatcgtaacttgtgttttgtttgtagtgcattctgcggggacagtgttcttagtttcagccgtagcggtgcagaacagctgcctg

SEQ ID NO: 11709 - DNA, 196 bp, Setaria italica
  Peptide Sequence Number=SeqID_77683
attggttcgttccaacagatctatttctagcgccgaatttgagtttctcccacactccattccaggaacctcttgcattccatcagcactttgcttaatatccaaccttgaaatgcaacaagataccatgcgtcagcaacaaattctttcctcaaccaaaggacaaagaaaggaaatgtacctttttgattgatcg

SEQ ID NO: 11710 - DNA, 413 bp, Setaria italica
  Peptide Sequence Number=SeqID_77684
tagctgcacttgacaattgcatgatgatgatgaactcctgaatgagttagggaactgggactgctgaagaatgaagggaaggagaggtacggtgttctgtacaagcagtggcagaagaatgctgccaatttcagcattgacgggcactacccagtgcgggagctacgggaccgtgctccggtgcgggagctacgggaccgtgcacggagctgctgggagaggattccagcacacgagggcaagtcggtacttgtatctgaaggtcattggcctggctggaacaagttgggagatgtgattcctggctccatcgcaaacctttcgatgtgtatggagtacttgagcataagtagcaacatgctaccatattgtgaagcgaaggtaacatattatgaacaaacgtataataatgt

SEQ ID NO: 11711 - DNA, 351 bp, Setaria italica
  Peptide Sequence Number=SeqID_77685
ttaagtaaataagaacaataacaaattagtttacaatccttaacatgtcttttgctatatcgttaactcattcttgtgtttggttgatatggttcaacatccatagcattcaaggttcaggttttaactgctgtatggttgtttaatctattttagggcagtgtcttcagagtgattttttttatttgcaagcttgttgtttgatgaagccaccaatctggttaactacatgcttgatttgagggtggagagaaggcatccattgagtcctgtagcatgtgagtttgaggagtgtggtggacacatgaagttagctgacactcttaaggttatatgtgacatttacgacaa

SEQ ID NO: 11712 - DNA, 264 bp, Setaria italica
  Peptide Sequence Number=SeqID_77686
gtttgtaacgcccgcagaaatcactaactaaaatcacctgttaaaaaaccgtctttaaaatctttttaccgctgagctcccggaaatcggaaatctccccggtgttttcgccgtcccggtacccatgccggcccccacctatctttttccgtgcccgtgaatctcgccgcgtgccgttgtcagacgccgtgcgcgtgccccgaccgcgtgccgcgaacgccgccggtctcttcttttcttctcttttccctttctcctttcttt

SEQ ID NO: 11713 - DNA, 258 bp, Setaria italica
  Peptide Sequence Number=SeqID_77687
ttcttgtgttttgctgatatggttcaacatccatagcattcgaggttcaggttttaactgctgtaaataatgtatggttgtttaatctattttagggcaggtaaaacattagccatttgtctgccaataaacttgaagtctatggcttgtagacacatcaacctattgaagtattctgttctatgattttcagtgtcttcagagtgatttttttatttgcaagcttgttctttgatgaagccaccaatctggttaact

SEQ ID NO: 11714 - DNA, 486 bp, Setaria italica
  Peptide Sequence Number=SeqID_77688
atggtctcgtggatgagctgtgaaccccttgggtgcttccgtgtggactagtcagttttagctaaggtgggtaatggctttgttaagatccgcaccggtactaaggtgatcgtgctgcggtaccctacttatgggaaaagtgtacaacctctgcagagttaaaacctatccgggtagccgtgtccacggcaatggacgaattacggcttggtcacataactagcacttgggcagggatggtcacgtgtgtgtgcgcgcgcgtgtgtgttggattttcggaagtgtccggcagttgtgccgtgagctatgacggacggggagtccgatagcaataaaatttggatcctttgtgtaggatcaaccccagtcaatatttcggttactaaaggaaaagctttaccaaaaacttgtttgaaacaaaccgtgcatgtgttgaaaatctagctttattgcaaatgaaccttagcctatccttgttatatcctg

SEQ ID NO: 11715 - DNA, 358 bp, Setaria italica
  Peptide Sequence Number=SeqID_77689
tgccgctgttgtttatttacttcttatcgctgcatggctttcacgcccactccctcgggagttgtacggtaactgaattatctgtcgaataaatgtgttatcagcctcctgggactgatatttgcaccacatttagtctctacttttgtggggacgcttcatgggtgcacgccgttggtctccacttcggaggcccgcacgccctcgcctccgacgaggagctgccaccaggctgcccgcgtgaggggccgctgccgctacccctgctatggatcggatcggggtgcttggaggtctggaggcgcagcaacggcggcctggaggcgtaggcgtgtgacgtggcagaaaaggaaaatgg

SEQ ID NO: 11716 - DNA, 307 bp, Setaria italica
  Peptide Sequence Number=SeqID_77690
ccccttggttgcttccgtgttggctagtcaagcttagctaaggtgggtaatggctttgataggatctgcaccgacactaaggtgatcgtgctgcggtaccctacttgtgggaaaagtgtacaacctctgcagagttaaaacctatccgggtagccgtgtccacggcattggacgagttgcggcttggtcacataactagtgcttggagatggagtattttcatggcgtgcgttggatttcagaagtgtttggcagttgtgccgtgagctattgtggatggggagtccggtagcattaaaacttggat

SEQ ID NO: 11717 - DNA, 457 bp, Setaria italica
  Peptide Sequence Number=SeqID_77691
tctagtcagtgttggctaaggtgggtaatggctatgttaggatccgtaccgtcactaaggtgatcgcgatacggtaccctacttgtgggaaaagtgtacaacctctgcagagttaaaacctatccgggtagccgtgtccacggcattggacgagttacggctcggtcacacaactagcttttggggatgactggtattctactgcgtgtgtgggtaagtggaattttggaagtgtccggcaggtgtgccgtgcgctacgacggacggggagtccggtagcgataaaacttggatcttttgtgtaggatcaaccccacttgatatatcgtttactaaaatgttttcatgaaacttctttgaaataaaaccctgcatgtgtctaatattcagctttactgcaaataaaccacaactttatccttgtttactcgtatgcatattcttgttgtatccccct

SEQ ID NO: 11718 - DNA, 340 bp, Setaria italica
  Peptide Sequence Number=SeqID_77692
cattgcaagatggtaagaagagcaatgcgctgttgttcaacaccaggttgggaacaaacaattgaccaaatgactcaaggtgaaaacaaaacaaggaagtcatgattgtcgacgatgttgtctcaggaagtcatgattgtcgacgatgttgtctcaggaagtacaactcagccacccgagaccatattcaacatcctcaacaagaagatctacaactacttcccctacccatactttgtatcggcgatccatcttttagtgggtgtcgtatactgcctcatcagctggagtctcggtctccctaagcgtgcgcctgtcaatgcgaatctacctaaagctg

SEQ ID NO: 11719 - DNA, 509 bp, Setaria italica
  Peptide Sequence Number=SeqID_77693
tgggccgcggcgtcgttagaaccaaggattggattggcctcttcctactctggcgcatcggcgaggtcgtgcgtctccgactcggcgcagcgcggccgccccgtcgaccccctccgcgtgctctccgtcgtcgcctccctccgccgcatcaatccgaaggtggggaatctggttcctcgattacttaccaacgcgcgattgcaggccgtttcttctgaagtttcgcaccgatggctctgctcgttgcttccagatgttcgccgaggccacaggtgcgctgttccatagcggggcagagaagaagcggaagggagtgtggatcgaggtcgacaactacgaggaccagagcaagaggagcagcgtggtggccagcgaggggagcaccgtcacggccgccgcgtccgcgggctccacagccacatcggggagatgccgccggcctccacgagcgagcggtggcggaggtgggggtggtgagaaggcgccgaggagggtggaagcaatcatgc

SEQ ID NO: 11720 - DNA, 400 bp, Setaria italica
  Peptide Sequence Number=SeqID_77694
aacaccaaaaggacaatgacgcctctagggacacttggatacttgcctccagagttcattaacaatcaaataatctccagggaatatgacatatatagtttaggtgttataattatgcagataatcactggagttacaggcttctctgattttgctgacatggagccccaagaatttattgaacatgtacatgacaactggaaaagaagtctagaagagatcccagagtatgcgtcacttgaagcggattgcaaacaagtgaaaggatgtatggaaattgcaataaactgcaagaagaagaagcgtcatgaaaggcctacaatagaggatattatcagcaaattagatgagacggaaactgttaaaaattgacacgcagttgtcaattaaaagggtcttg

SEQ ID NO: 11721 - DNA, 286 bp, Setaria italica
  Peptide Sequence Number=SeqID_77695
acgagcacaaatttccagccacaaaagaaatgtttactttcccaaaacatttttcttggcatctcacggcagccagggcagttggattatatgaacataggtataattcactaattcagtgtaaaagtgaagcaggcagtgatacatgagaaacatgcactccatagaaagtaaaactgataaaattattctccaccaatgcaatgacttgcaatctatttctattttgaatttattgatgttttaagatcctgcctccgcattatgcatgattgtttacaactgt

SEQ ID NO: 11722 - DNA, 455 bp, Setaria italica
  Peptide Sequence Number=SeqID_77696
gttgtgtgtctccgactcggcgcggcgcggccgccccgtcgacccctccacgtgctcttcgtcgtcgcctccctccgccgcatcaatccgaagatgttcgccgaggccacaggcgcgctgttccatagcgggggcagagaagaagcggaagggagtgtggatcgaggttgacaactacgaggacaagagcgagaggagcaacacggtggccagcgaggggagcaccgtcacggccgccgcgtccgcgggctccacggccacatcggggagatgctgccggcctccacggtcgagcggcggcggaggttggggtggtgagtgtaacatccgcagaaatcaccaactaaaatcacccgttaaaattgcctttaaaatctttttaccgctgagctcccggaaatcggaaatctccccggcgatttcgccaccccggtacccatgccgacccccacccc

SEQ ID NO: 11723 - DNA, 400 bp, Setaria italica
  Peptide Sequence Number=SeqID_77697
cacctttacaagaaagtttctaccaacaatcatgggttccaattccaggtgcctcttgttggaaggaattatggcccgtccacgggcaacttctgtccgaacaaattcaggactaaggttctcgcgcttggcacagtataacatctcctctgttatgattccatgtttagcataatacatttgtgtgtaacgaggactacccatcttctccctcctatcaatccattccttccttatctttgggagtcccagtgcgaaagctcccacacaaggtggggtctggggaagggaattcctagacagcctttacaagaaagtttctaccaacaatcatgggttccaattccaggtgcctcttgttggaaaggaaatttaattaggtacccgttacctaacggta

SEQ ID NO: 11724 - DNA, 322 bp, Setaria italica
  Peptide Sequence Number=SeqID_77698
cgtcgttgccggggcggtttggctggcccgggtacggaccttggaaggacgtggacagcgcgaggatgaccccactatgctgcacatggctgcctaccttctcaccttggacgagctctacgacgagcaggctgctaagttgaagtagcagacccgtagggccgaggacgcagaagttatggtgaggaggcttcaggtgaagttagccgccgccgaagcccgagccgcagccgctcaaagcaatgaggccattgccgttgaggctctcaaggaggccgaggatcggcactccaaggaactgaaggatgcccacctcaccatt

SEQ ID NO: 11725 - DNA, 408 bp, Setaria italica
  misc_feature (331)..(331): n is a, c, g, or t
  Peptide Sequence Number=SeqID_77699
ggtgtggccatgtactcttacatcaaggctaagattgaagaggagaaaggaaaaagaagagcgcgtgatgaggtgaatactgttaatatggtctcgggtggctgagttgtacttcctgagacaacatcgtcgacaatcatgacttccttgttttgttttcaccttgagtcatttggtcaattgtttgttcccaacctggtgttgaacaacagcgcattgcaagatggtaagaagagcaatctacttcttaccatcagaacagattatcgtggcgtgagcatgaatatgtagaaaataaacgctcatctgttctgatggtaagaagagatanctaccttcgttaccatcagaacagatgatcgtggcgtgagcatgaatatgtagaaaataaacgctcatacttgaaag

SEQ ID NO: 11726 - DNA, 568 bp, Setaria italica
  Peptide Sequence Number=SeqID_77700
tactcgggctcctcctcctcctcttcctactctggcgcatcggcgaggtcgtgcgtctccgactcggcgcagcgcggccgccccgtcgaccccctccgcgtgctctccgtcgtcgcctccctccgccgcatcaatccgaagatgttcgccgaggccacaggtgcgctgttccatagcggggcagagaagaagcggaagggagtgtggatcgaggtcgacaactacgaggaccagagcaagaggagcagcgtggtggccagcgaggggagcaccgtcacggccgccgcgtccgcgggctccacagccacatcggggagatgccgccggcctccacgagcgagcggtggcggaggtgggggtggtgagaaggcgccgaggagggtggaagcaatcatgcagtggttttcgcggtcgcaagctggaccggccacggagaacgacatatgcgtcgccgttggtgacaactccgggatgagcaagacgatacgctggctgctgaagcaggagggtggcttgcggcgtgcaggcaccggcggccttttggatccgtatgtttatatgaaatggg

SEQ ID NO: 11727 - DNA, 598 bp, Setaria italica
  Peptide Sequence Number=SeqID_77701
gaaaagaggttagctccctcgtccctctccctcgagggatcgagatccgccgcactccgtccggccgtctggctccgagctcagcgccgcccagcagtagactggctagagctgcctcagggcccggcagtggactggctctgccgtcgtctgcacccctcccccctctctacaccaggctgagccgcccgcccgcccacctggagctgccccatccgcagccacccggatctttcccactgcggccgctgcccggagctcatcgactggagttccccatctgcggccgcccggatctcccccgccacggtagcttcagatttcagaacacgaccgtcaggaacaaaaatcccaccatgcttttatgccagcgcagtcgccgtcgccagcggccgctgaccggcggcgtaccctccggtgttgtatccgctgctcgagcgtgcatgatctggagaggtccactgcccctcgcccaggctcatcgctcccgccactgcgggcggcgaagcgggtggtgctggtgcggcacgggcagagctcttgtgatatgtagtatttgctgatatcttcctatacgtttcatatttgggtggtaatt

SEQ ID NO: 11728 - DNA, 823 bp, Setaria italica
  Peptide Sequence Number=SeqID_77702
gctgctcgttaaaacttccagaaacccggattagcgctctgcagaaaccaaatttggcttgaagacgctgctagcaccaaattcacgcaagaggcaagttcatatacctgcccatgtctgttcttttgacgacaatgagaactgtttcacagcgaatattacatgacaaaactaacacactgaaaaaggctccaaatttccacggcaccaactcggcatgctccccctatgtacattggcaccgatgggctcagccagcagcaatcgtcgccattgctcaatcctcccagtgctgcgagctgctgcttgtcttgtccgtccggtacggtcgagaacaggctgttgagccactgtagggacgccggcagccgcctgccgctctcgtcggcttccgcaacgcctgccgtcagccgcctgcccctctcttcggcttccgcaacgctgatgcgctcgggctcagcattgccggcggaccctgccccgccatccccgccgccattgtcattgccttcgttataagcatcgacgctgacgtagccaccgctgtcgccgtcgccgccgccgccgcatgagctcttattgtcgtcggccggcagctggaaccggcagacggggcaggagctgtgcatctccagccacggcacgatgcagttggcatggaacttgtgcctgcagggcatctcccgggcgcgctcgccgggcgcgtagtcctccaggcagaccgggcagctggccgcgtcgtcgccgttgctgccggcgatctcgacggttggcatcgcctcgacggcctccttcttggcccggcggcgtgccttggcgcccc

SEQ ID NO: 11729 - DNA, 829 bp, Setaria italica
  misc_feature (815)..(815): n is a, c, g, or t
  Peptide Sequence Number=SeqID_77703
cagatgaccatccaaggaagctacaatactcactagttaaagagattacaaataattttgcagatgaacttggacgcggtacatttggacgtgtgtttaaggggctgcttgatgatggagaagaggttgctgtgaagctgcttcgttatttcacgcctgagatcagtgaccagcagttccaaaatgaatttggaaaccttaagaagctcaagcatcctaatattgtacgattgttggggttctgcgatgaacctgaggaagaaattattgagcacaaaggaaaattagtactttgtgataggatacgcagggcactatgtcttgagtatgtgcccaatggaagccttcgcaagtttctttcaggtggatgtcttagcaagaattggcccatacgctacaaaataattaagggaatctgcgagggtctacagtaccttcacaagattcccattttccatcttgacttaaaacctgataatatactgctagatgagaagatgttgccaaaaatcgccgatttcggtttatctaggctcattggtgaagggaacaccaaaaggacaatgacgcctctagggacagttggatacttgcctccagagttcattgacaatcaaataatctccagggaatatgacatatatagtttaggtgttataattatgcagataatcactggtgttacaagcttctctgattttgctgacatggagccccaagaatttattgaacatgtacatgacaactggaaaagaagtctagaagagatcccagagtattcgtcacttgaagcggattgcaaacaagtgaaaagntgtatggaaattgc

SEQ ID NO: 11730 - DNA, 1109 bp, Setaria italica
  Peptide Sequence Number=SeqID_77704
tggggttggacttgttgagtacgttagtaatcacccttgcttcattactacagaggaagaccccgatttcgtcgcagaggacctcgagtagaggttgtgtccgcacccgacgctgcctgtggtgttgtcttgcccaagatgctgctgctgccgtgtagtcccgagtgctgtcttttggcagtcgcttggttagccgccgttatttatttactgtttatcgctgcgtggctttcacgtccactccctcgggagttgtacggtaactgaattatctgtcgaataaatatgttatcagcctcctgggactgatatttgtatcacatttagtctctacttatgtggggacgcttcattcctccagtaatattcaggaggattatgaaatcccaactcttgaagtgtcttccacagcagctgtgtaaatccaagtttgtccagatagtgcccccgggtccatccatcttgatcagtatacccctcttggaacatcagaataaaaaaagtcccccgaatgttgacgatgaggtgctggaggatcgagccctctcgtagttcgcgtccagagcaatgaggaacacgagcatcggatccccttccgccttgttgtcaaatacgagaagatgccgggatgaggaagacgaacgccgggttcccttccgctagtcgtcgaaaacgaaacgatgcgcgcgaggaagatgagcaccggccccccatcgcctcctcgtcgaagcaggcgaagttggtctagatctgatttccgcctccccctcggtgcaggcgaaatgatggggtggcgagctcgacgcatggccgggcgtcccctccacccggcctcatctccccctgagcgtggatgaatctgagggcagcgacggtgtcaaagaggacgccgcggcttccctccccgtctccggcgatttggaacaggggcgagcccacggctgccgcttatgcttcgatgtgggcgaatcggcgatcgccggccgcgagctcgatgcaataattgggcgcgtgggggcgacggtaaacgcggcgagatcggtgatcgtctctcaccagcggcgatttggatcccctttcgcctctccctcgagattgtttgaacggtg

SEQ ID NO: 11731 - DNA, 1618 bp, Setaria italica
  Peptide Sequence Number=SeqID_77705
atctattggtaattggtttcgtgtttctttctaatttcgttctttcttttttttctaaaagattgatttgataggaagtggtaggaaacgaattgaagagaaggttttcttggtagtacctgtacaaggctgctagtcttgatgtagaagaataacgccatgaagggttggacagatgaccatccaaggaagctacaatactcactagttaaagagattacaaataattttgcagatgaacttggacgcggtacatttggacgtgtgtttaaggggctgcttgatgatggagaagaggttgctgtgaagctgcttcgttatttcacgcctgagatcagtgaccagcagttccaaaatgaatctggaaaccttaagaagctcaagcatcctaatattgtacgattgttggggttctgcgatgaacctgaggaagaaattattgagcacaaaggaaaattagtactttgtgataggatacacagggcactatgtcttgagtatgtgcccaatggaagccttcgcaagtttctttcaggtggatgtcttagcaagaattggcccatacgctacaaaataattaagggaatctgtgagggtctacagtaccttcacaagattcccattttccatcttgacttaaaacctgataatatactgctagatgagaagatgttgccaaaaatcaccgattttggtttatctaggctcatcggtgaagggaacaccaaaaggacaatgacgcctctagggacactgtaagattattgtctcctgtgaacttttgatctgctaaattgtagttattccttagtctcactttgctatgtcatttatgttctgctgcagtggatacttgcctccagagttcattaacaatcaaataatctccagggaatatgacatatatagtttaggtgttataattatgcagataatcactggagttacaggcttctctgattttgctgacatggagccccaagaatttattgaacatatggccgtaggaaggatgggtcaacagccactgcctggaagagcctggttttcccagattgctgttcgcctgcatggaccgcctcgggatttatgagcgtccggagtacaccagcagggagtacgaggaccgcgggaccccctcgatgtgagatgatcatctacatcgggcggagtagccactatccggatatccagccatggaacgtgactgccatcggcttccggcacaaggatacctatcaagtggcagcccggaaggccctccgtttcctgtgtcagatctatgagaggcacattggccgcactccgatgaggttctacccgcctgtcaagaaaaccgcccggtttggctggcccgggtacggaccttggaaggacgtggacagcgcgaggatgaccccactgtgctgcacatggctgcctaccttctcaccttggatgaactctacgacgagcaggctgctaagttgaagcagcagacccgtagggccgaggacgcagaggttatggtgaggaggcttcaggtgaagttagccgctgccgaagcccgagccgcagccgctcaaagcaacgaggccattgccgttgaggctctcaaggaggctgaggatcggcacac

SEQ ID NO: 11732 - DNA, 1020 bp, Setaria italica
  Peptide Sequence Number=SeqID_77706
ctcagccagcagcaatcgtcgccattgctcaatcctcccagtgctgcgagctgctgctgctgccgccggacggcgagaacaggctgttgagccactgtagggacgccggcagccgcctgccgctctcgtcggcttccgcaacgcctgccgtcagccgcctgcccctctcttcggcttccgcaacgctgatgcgctcgggctcagcattgccggcggaccctgccccgccatccccgccgccattgtcattgccttcgttataagcatcgacgctgacgtagccaccgctgtcgccgtcgccgccgcctccgcaggggaggccaagcccgctggtttcctcagcaagtaccctgccctggtcaccggcttcttcttcttcatgtggtacttcctcaacgtcatattcaacatcctcaacaagaagatctacaactacttcccctacccatactttgtatcggcgatccatcttttagttgggtgtcgtatactgcctcatcagctggagtctcggtctccctaagcgtgcgcctgtcaatgcgaatctcctaaagctgctctttccagtggcgctgtgccatgctcttggtcatgtcacaagcaacgtctccttcgctgctgttgcagtctcatttgcccacactattaaagctctggagcccttcttcaacgcagccgctactcagtttatccttggacagcaggttcccttgtctctgtggctgtcccttgcccctgttgtcattggtgtttcaatggcatccctcactgagctctcattcaactggactggcttcatcaatgccatgatatctaacatctccttcacttacaggagcatttactccaagaaagctatggtttgtgcttcttttgttttaatctcttaggtagctatgatttgctttgttttggactcttgccctaactattgtactaatcattttcatcattgcagactgacatggatagcaccaacgtgtatgcttacatctcaataatttctctcattgtttgcta

SEQ ID NO: 11733 - DNA, 909 bp, Setaria italica
  Peptide Sequence Number=SeqID_77707
ccccttccccatcctcggcaccaccgatcccccttcctctccaccgccgccgcagcctctcctcgtcgtcgccggtgacgatgattccgcagagccagagcagctccctgcagcgccttcaccacgtcgagaagcggatagtgcgggtgctggagcttgcgggtgcggtgatggaggagctcggaaactctcagggcccccgcaccgatgcagtcggcgcgcactgccgcgagttcatgctcgctatgaaggatattcaaacgactttgcgtgaggaaatcaaaagtgcttgtgaatatcgcccatttgaaaagtgtgattacagcgcaaggattgctaacgagatatgctgtaagaagctggagtatgtaattgagaagttggataccatgcaacagaaccttggacagagccctgatgatatttagcctgctggctgcatattggtctgggagcaacatatatctgatcgagcagtatacagaaggatcatagaagctttctatcaacttataatagcaggaagctttgctcaactctgggatcgtaacttgtgttttgtttgtagtgcattctgcggggacagtgttcttagtttcagccgcagcagtgcagaacagctgcctgctgatgcccagtagcacagatcttggctcgagtagcattcttgggcttaaaatggaggaagtttaaggcactatattttactgatgagagtttgcacttctgtatgcatacaattgtttcatcctagagttgagcaaagcttcctgctattataagttgatagaaagcttctatgatccttctgtatactgctcgatcagatatatgttgctcccagacctgaaaataatcaaccgactatgagtaatgtaactctagaggaaactgatcactgttcagaag

SEQ ID NO: 11734 - DNA, 472 bp, Setaria italica
  Peptide Sequence Number=SeqID_77708
ttttggcaacagaatcacgacacaaactggtattggcacatccattgccatagctggtgtggccatgtactcttacatcaaggctaagattgaagaggagaaaaggaaaaagaagagcgcgtgatgaggtgaatactgttaatatggtctcgggtggctgagttgtacttcctgagacaacatcgtcgacaatcatgacttccttgtttgtttcaccttgagtcatttggtcaattgtttgttcccaacctggtgttgaacaacagcgcattgcaagatggtaagaagagcaatctacttcttaccatcagaacagatgatcgtggcgtgagcatgaatatgtagaaaataaacgctcatacttgaaaggcttttcgttttgtatgtgataactgtgtaaattctgtttgtggaactagcagggatacatatttgggttcttaaataaattggtcccgggtagactaaaaaa

SEQ ID NO: 11735 - DNA, 1529 bp, Setaria italica
  Peptide Sequence Number=SeqID_77709
gtgctcgtaccttggtggttgagcaatgtcgggagatatccatcctgtcgtaattaaggaccgagttgatgtgtcatcttgcctaattccactatcgtgcaaccactcgaccgttgtatgggcaacgccttagcataaatcccactagctggatggttagtcctcaggggtgctggtgagcaacgggaacccatggaaaaggagtaagatcttggtgacttaggtcccggttacggtctcatggacgagccgtgaaccccttgggtgttttccgtgagggctagccagccttagctaaggtgggtaatggctttgttaggatccgtaccgtcactaaggtgatcgtgctacggtaccctacttgtgggaaaagtgtacaccctctgcagagttaaaacctatctgggtagccgtgtccacggcattggacgagttacggcttggtcacataactagcaattgggcaagaatgtcatgtgtgtgtgtgtgtgtgtggggatttttggaagagtccggcagttgtgccgtgcgctatgacggacggggagtccgatagcgataaaaacttggatcctttgtgtaggatcaaccccactcaatgtctcgagtattaaaggaaaaccttacaaaaaccctttcaaaacgatcccctgcatgtgttaaaatttagcttttccgcaaataaactctagcctatccttgtcatacttgtgcataaacttgcttgtatcccctccgtggatggggttggacttgttgagtacgttagtactcacccttgcttcattactacagaggaagaccccgatttcatcgcagaggacctcgagtagaggttgtgtccgcacccgatgctgcctgtggtgttgtcctgcccaagatgctgctgctgccgtgtagttccgagtgctgtcttttggcagtcgcttggttagccgccgttatttatttactgcttatcgctgcgtggctttcacgcccactccctcaagagttgttcggtaactgaattatctgtcgaataaatgtgctatcagcctcctaggactgatatttgtatcacatttagtctctacttatgtggggacgcttcagtgagaaggcgccgaggagggtggaagcaatcatgcagtggttttcgcggtcgcaagctgggccggccacggagaacgacatctgcgccgccgtcggcgacaactccgggacgagcaaggcgatacgctggctgctgaagcaggagggtggcttgcggcgtgcaggcattggcggcctcttggatccgtatgtttatatggaacctcttgcattccatcagcactttgcttaatatccaaccttgaaatgcaacaagataccaagcgtcagcaacaaattctttcctcaaccaaaggacaaagaaaagaaatgtacctttttgattgatcgttgctctcatcaagcaggtctctgattttctcattgtagacttccaatatgcttacaagaaaatgtgtaggtaacggatgtgcttctcttatcagacattctga

SEQ ID NO: 11736 - DNA, 1937 bp, Setaria italica
  Peptide Sequence Number=SeqID_77710
tcgagatccgccgcactccgtccagccgtccggctccgggcccagcgccgcccggcagtggattggccggagctccctcagggcccggcagtggactggctccgccgccatctgcccccatcccccgcgctgcaccaggccgagccgcccgcccgcccgcctggagctcccccatccgcagccgcccggatcttcgccgctgcggccgctgcccggagctcgtcgactggagctccccatccgcagccgcccgaatctcccccaccatggcagcttcagatttcagaacacgaccgtcaggaacaaaaatcccaccatgctcttcctcacgccagcgcagccgccgtcgctggtggccgctggccggcggcgtacccttcggtgctgtatccgttgctcgagcgtgcacgatctggagaggtccactgcccctcgcccaggctcgtcgctcccgccgctgcgggaggcgaagcgggtggtgctggtgcggcacgggcagagctcttgtgatatgtagtatttgctgatatcttcctatacgtttcatatttgggtggtaattgttgtttccttcataatggtgatggagtaattgtcttttctggcactcatctttgatgaattgtctaccttctgaacagtggtcagtttcctctagagttacattactcatagtcagtcgattattttcaggtctgggagcaacatatatctgatcgagcagtatacagaaggatcacagaagctttctatcaacttataatagcaggaagctttgctcaactctaggatcgtaacttgtgttttgtttgtagtgcattctgcggggacagtgttcttagtttcagccgtagcggtgcagaacagctgcctgctgatgcccagtagcacagatcttggctcaagtagcattcttgagcttaaaatggagaaagtttaaggcactgtattttactgatgagaatttgcacttctgtatgcatacaattgtttcatccttaacatgtcttttgctatatcgttaactcattcttgtgttttgctgatatggttcaacatccatagcattcaaggttcaggttttaactgctgtaaatagtgtatggttgtttaatctattttgggcaggtaaaaccttagccatttgtctgccaataaacttgaagtctatggcttgtaggcacatcaacctattgaagtattctgttctataattttcagtgtcttcagagtgattttttttatttgcaagtttgttgtttgatgaagccaccaatctagttaactacatgcttgatttgagggtggagagaaggcatccattgagtcctgtagcatgtgagttcgaggagtgtggtggacacatgaagttagctgacactcttaaggttatatgtgacatttacgataagtgtcttggggatcatacctctgctgaacagaggaaaatagttagggaaagcagttacttctgatgtgatgttccttatgactatgcatacctttgcagtggagaatatggtaaattatcctgctgaaattatatggagggccaaatatctgcacttgacaatagcatgatgatgatgaactcctgaatgagttagggaactggtgcttgtggaaatgcctgtgtgcgacgagctggtgattctgatttccagggactgctgacgaatgaagggaaggagaggtacggtgttctgtacaagcagtggtagaagaatgctgccaatttcagcattgacaggcactacccagtgcgggagctacgggaccgtgcacagagctgctgggagaggattctagcacacgagggcaagtcggtacttgtatctgaaggtcattggcctggctggaaacaagttgggagatttgatttccctggcaccatcgcaaacctttcaatgagtatggagtacttgagcataagtaag

SEQ ID NO: 11737 - DNA, 1596 bp, Setaria italica
  Peptide Sequence Number=SeqID_77711
atattgggtggtaattgttgtttccttcataatggtgatggagtaatggtctttctggcactcatctttggggaattgtctaccttctgaacagtgatcagtttcctctagagttacattactcatagtcggttgattattttcaggtctgggagcaacatatatctgatcgagcagtatacagaaggatcatagaagctttctatcaacttataatagcaggaagctttgctcaactctaggatcgtaacttgtgttttgtttgtagtgcattctgcggggacagtgttcttagtttcagccacagcggtgcagaacagctgcctgctgatgcccagtagcacagatcttggctcaagtagcattcttgatcttaaaatgaagtttaaggcactgtattttactgatgagaatttgcacttctgtatgcatacaattgtttcatccttaacatgtcttttgagaatttgcacttttgtatgcatacaattgtttcatccttaacatgtcttttgctatatcgttaactcattcttgtgtttggttgatatggttcaacatccatagcattcaaggttcaggttttaactgctgtatggttgtttaatctattttagggcaggtaaaaccttagccatttgtctgccaataaacttgaagtctatggcttgtaggcacatcaacctattgaagtattctgttctatgattttcagtgtcttcagagtgatttttttatttgcaagcttgttgtttgatgaagccaccaatctggttaactacatgcttgatttgagggtggagagaaggcatccattgagtcctgtagcatgtgagtttgaggagtgtggtggacacatgaagttagctgacactcttaaggttatatgtgacatttacgacaagtgtccgggaacatacctctgctgaacagagaatggatagggaaagcagtaacttttgatgtgctgttccttatgactatgcatacctttgcagtggagaatatggtaaattatcctgctgaaattatatggagggccaaatagctgcacttgacaattgcatgatgatgatgaactcctgaatgagttagggaactggtgcttgtggaaatgcctgtgtgcgacgagcttgtgattttgatttccagggactgctgaagaatgaagggaaggagaggtacggtgttctgtacaagcagtggcagaagaatgctgccaatttcagcattgacgggcactacccagtgcgggagctacgggaccgtgctccggtgcgggagctacgggaccgtgcacggagctgctgggagaggattccagcacacgagggcaagtcggtacttgtatctgaaggtcattggcctggctggaaacaagttgggagatgtgattcctggctccatcgcaaacctttcgatgtgtatggagtacttgagcataagtagcaacatgctaccatattgtgaagcgaaggtaacatattatgaacaaacgtataataatgtgagagtaagtaataacgcgtagcaacgcatgggcatttctgctagtctatatctatatctatatctatacctattattaaagcaaaa

SEQ ID NO: 11738 - DNA, 1219 bp, Setaria italica
  Peptide Sequence Number=SeqID_77712
gcccgctgccggcgcacctccgcttcccatctgctcctggcgccgggctacatgcggctgcacgcgcgtgtgccgcatcctccacgacggggaaccgccgtggcagcgccttcctgtggagccaccgctcagccactgcccaccggatcacgggcaaggccctcctcatgctgacaagcagggcacacgagaggctccgctcacccaacctcctcctcggttgcccgcttgtccaacgccagcctgctccgtgtcgtccgagataattggcacaattgttggcaatagcaactctgaactctctttgccatgcttgatgcagcagcaccaacgcgctgcttctgtaagcgtcgaaggaagtgaacaaattcctgaacaccacttggtgcaggtgattccaccttccagggatgcctacagttgtttggggcatgtaaattatcctgctaaaattatatggagggtcaaataactgcacttgataattgcatgatgatgatgaactcctgaatgagttggggaactggtgcttgtggaaatgcctgtgtgcgacgagctggtgattctgatttccaaggactgctgaagaatgaagggaaggagaggtacggtgttctgtacaagcagtggcagaagaatgctgccaatttcagcattgacgggcactacccagtgcgggagctacgggaccgtgcacggagctgctgggagaggattccagcacacgagggcaagtcggtacttgtatctgaaggtcattggcttggctggaaacaagttgggagatgtgattcctagctccatcgcaatcctttcgatgagtatggagtacttgagcataagtagcaacatgctaccatattgtgaagcgaaggtaacatattatgaacaaacgtataataatgtgagagtaagtaatgacctgtagtaatgtacgggcatttctgctagtactcttaaaaaaactaatctcctaaaaattactctaaaaaaactaaaaccaagataaaacttagtacgtcgagtatcctccacttcttcgtcccgcgctgcgtctaattattgccgtccgctgaccctgtgcccatctgcgctcaacgcttacaccgttgattctttggatgcctccaagccgtccctcagctcccacgcagatccgctgccatccgtgtccctccaatggagcccaagatgcctccccagctcatacgccgccgcc

SEQ ID NO: 11739 - DNA, 2057 bp, Setaria italica
  Peptide Sequence Number=SeqID_77713
gttgaagatgcccgtaccagagggcacactgggtttggcccgaccaggtgaattaagtgaaaccgcaacttttttctggatgctgaaacacagcctgcttgtgttcccaggacctcctgctggtgccattccctgcttatgctgcggtgttaacaatttgttcaacatgccaaaaggaggggggggacttgtgaacttgctgctgctgccgaaatcaattctccttaacttagctccatctggggttgcatcaactgccccatgtcctgctaggggtgttgatgggattgatccaaatgctgctactgatcttcttggcacataaacatgagacagtcgagacgctgctctcttttcattgagcacagacagctgctcgctcagagatggtaggattgccattgaggatcgcctcttgggctggatagggatctgtcggatcaccggagtaagagatacacgccttgctttgccgacagccttattatcagccccaagatgtgctttgttagtcatcacaggaatgttctccttgttttgacctgcgggtgctttactgaacctcgacctagaagggcctgaaggtggtggatagttgttattccttccctgaggttgcctctgcctcataggaacaagtggtggcctcgaggatctagcagaatccctagcagccttcctctcattacctaattcattttccagctctctaatccgctgctgataatttcggcatgcttgctcagcatccttcaccttttcatttagtgtcctaaatacattctcacgagacgtatacttgagctgcatcaactgcaagctttgattcagctgtgcattttccttttcctcgtgccgtagtttctcggacatctgtttgaacttcaaactttctgctggatccgcttgcttacgagcagggccatgttctaccgcccggactctactagcaaaattgagggaacagagagtttctcctgaatctgtggagcttggacttatctgcacgaacattagagtcttgcaatctccacctaatgagctttggagcaaatgagtcaacttggagttcctgtatgggatatgggaattttttgaggcaagggcagatataacatcacccaaggcagatagtgatttgttgatgaactgtgactccttcagcctatctccttgtactccagttttagcaattctttcacttcccgcaaggtcaaccaaccacatatggcttctgctcctctgacccgtcaccaaatgctcgctcctaacggtaaccctcaccaaactgtgcgagcggctgctgagttcattagcattggtcgttccaacagatctatttctggcgccgaatttgagtttctcccacaccccatcaatattacagattggagcctcaactaagccagaaacctcttgcattccatcagcactttgcttaatatccaacctttttgattgatcgttgctctcatcaagcaggtctctgattttctcattgtagacttccaatatgcttacagaaaatgtgtaggtaacggacgtgcttctcttctcggacattctgaacagttcttccaaagctctataatttacacctctattttctggaaccccttccattgtgaaagttttcccagtccctgtctgtccataagcgaatatgcatacgttgaagccatccatcactgacctaacaacaggcacagtctctacaaatacagcctcttggtcatcctctgggccaaacacacgatcaaatttgaaggcctttcttcttttttcagaggggacgaactgcagctcggtctcctgtgatgggtcaatctcgatcacagacgagcacccacgagtgacttcatcagagctcagaggcctgcatctgcagaataccctaatgttccccctcagctcaataatttcattgtatagacgcctcctctctgcacactcatctgtgtacttcttcttcaggccatcatattcatatctaggcgtgcactcatcagcgcactttgccacctgatgtttgtacctctccatgaggctgttatact

SEQ ID NO: 11740 - DNA, 1508 bp, Setaria italica
  Peptide Sequence Number=SeqID_77714
ttgtttccgttaacgaaacttatactcgggggaacattcagatttcagacagagttccacataaatcagaatgtaagtttataataacagttaacatctcaaatttgctagggaagcccttataagggatggcatgagaacttgagcaccaatatcacagtacagtaacagggtgcctttgcccagctcatctctgaatgatttgaaactccattgtagaagcacaatcagagttcatcttcaatttgtaaatgagcatagtttcattggtatggtggtaccgcaacgagcacaaatttccagccacaaaagaaatgtttactttcccaaaacatttttcttggcatctcacggcagccagggcagttggattatatgaacataggtataattcactaattcagtgtaaaagtgaagcaggcagtgatacatgagaaacatgcactccatagaaagtaaaactgataaaattattctccaccaatgcaatgacttgcaatctatttctattttgaatttattgatgttttaagatcctgcctctgctttcacatacagttgtaaacaatcatgcataatgcggaatttgaaactgttcacatgagatatttacaatattctttgttaaaaagattttgtgaaattttggataacactatctgaccatcctgatgagaagggcagaagtttgtttacagaaataactcctatctcagtagacggctacaatacgatggtaggatcaagttaattgcaattctggttggtacttccactctcaagggggcagaatgcagctaaaaaaacaatctgtagcagttctaaatatcttgctctatacgcctaatgtaaataaatgtagttagacagatgtcgaaatagattatgtagggatagcaaattcttcacaaaatttcatgggtgtattgatgggttgagtgtcatgatgaggcacactttactctctatgggaacggtaacagagctggttgatgaaatcatgcaaaaggatcatggaatggaaccatgttacctcagatgtaagacacaggcggacccatctactgagctctttacgtgcacggacagttggtacctcaatttccaccagaaggctgacaggttcctgaaaaacaagaaaaaagaaatgcacactcccttcgcaggcattatcctgttcaggttcaaagggactttctcagcccatctcacaacagtcaaggccaagaagccttcacattgttgagaatgcaggcaccccatctcctaacataagatggtacaattgctgctgacgaaggctccagccagcaaatctgcttcacttggaaggctccgaggagatcttatttttgagctgcatagctttctggtacgtagatctcccctccagcttcaccatgctgttccccactgattgtttccttgcagccaaaaaattcagcactcatagcattcattccttcgttcacagcttcctctactgttccgtaaccataagttacaat

SEQ ID NO: 11741 - DNA, 2408 bp, Setaria italica
  Peptide Sequence Number=SeqID_77715
ccaccagaaggctgacaggttcctgaaaaacaagaaaaaagaaatgcacactcccttcgcaggcattatcctgttcaggttcaaagggactttctcagcccatctcacaacagtcaaggccaagaagccttcacattgttgagaatgcaggcacccctggtgcaactttcataaataacaatcccataacaatacgatgaatacttgagggagaaacagaatccaaaggggcacagaatagagtttccttttattacaatccataatggcattcacaaactgaaggtaagcaacgccagctttattcacattctgcttaccatctcctaacataagatggtacaattgctgctgacgaaggctccagccagcaaatctgcttcacttggaaggctccgaggagatcttatttttgagctgcatagctttctggtacgtagatctcccctccagcttcaccatgctgttccccactgattgttttccttgcagccaaaaattcagcactcatagcattcattccttccttcacagcttcctctactgttccgtaaccatgttcatctgcatattttctaatatcctctgtgattttcatcgaacaaaacttgggcccacacattgagcagaaatgcgctactttggcaccctcagatggcaatgtttcatcatggaaagccatggcggttactggatccagagatagagcaaattggtcgagccatctaaactcaaaccttgccttgctaagggcatcatcccaagcttgtgcgtagggatgaccctttgccaaatcagcagcatgagcagcaattttgtaggatatcacacctgtcttaacatcatcacgattaggcaacccaaggtgctcctttggtgtaacataacaaagaagtgcagtgccaagagctccaatgttggccgcaccaatggctgaggtgatgtggtcataaccaggtgcgatatcagttgtcagtggacccaacgtatagaaaggtgcttcattacaccactccagctgtttttccatgttttcaggaattttatgcattgggatgtgccctggaccttcattcatcacctgcacatctttcgcccatgctcgacgtgttagttcaccttgagtcagcagttctgcaaactgagcactatcatttgcgtcataaatagaaccgggcctcaaaccatcaccaattgataatgccacatcatattgattgcatatgtcaagaatttcatcccagtgttcataagcaaagttctccttgtgataagttaagcaccattttgcatgaattgagccaccacgtgaaactatgccagtcattctctttgctgtaagaggaatgtaacgaagcaggacaccagcatggattgtgaagtaatcaacaccctgctcagcttgttcaatcaaggtatccctaaagatttcccagctcagattttcagcaataccatttactttctcaagtgcttggtaaataggaacggtcccaataggaaccggagagttacgaataatccattcccgggtctcatggatatgtctccctgttgagagatccatgacagtatcagctccccacattgtggcccactggagcttgtgaacttcatcctcgatggagctcagaacagctgagttcccaatatttgcattcacctttacaagaaagtttctaccaacaatcatgggttccaattccaggtgcctcttgttggaaggaattatggcccgtccacgggcaacttctgtccgaacaaattcaggactaaggttctcgcgcttggcacagtataacatctcctctgttatgattccatgtttagcataatacatttgtgtgtaacgaggactacccatcttctccctcctatcaatccattccttccttatctttgggagtccaatccttgggcttatattttgaggaccactggtgtcatatgtatcaaagtgcttctgatctccagtcaaatggactctccggaatggaaccttgaggacatgaccagattcctcgtgaacgatttcacttgattctttggtactccttggaaagcattcttcaaatgatgggagtggcagaaattctggagctgtagggtcgactgtgtgcttgctttgcctgggttttgatggctctgatgttgattggtcagtcactgaagcaaccttggggattaaataagcgaggctagcattcctgtcttgaatgtcttgacgtgaaatgccaccaaaacaaggtagaagtgcagtttttgggaacttcagcccactgcagctactcttcagagccattgttgacgaaaatgagggttgaagtgcagccatttcctcagaggaacggcggctccggacgttgtcgatcggcgggagaggaccggaggagcgacgcgagcgccga

SEQ ID NO: 11742 - DNA, 2030 bp, Setaria italica
  Peptide Sequence Number=SeqID_77716
ggttatacagatggtagaacagtccaactaagaaaaggtactgtaacaaacttttagtcagacctacttttgtcaatagcatcattaaatccgtgctgcatcagtttaggcccttcaaacatcagtgcaggtggaatgcaaacaatgagagaaattattgagatgtaagcatacacgttggtgctatccatgtcagtcatagctttcttggagtaaatgctcctgtaagtgaaggagatgttagatatcatggcattgatgaagccagtccagttgaatgatgctattgcaaaagtaggtctgcaaaagtttgttacagaccttttcttagttggactgttctaccatctgtataaccaggttgctacaaatactttggagcgagtggctcctctgacacacgctgttggcaatgtgttgaaacgtgtgtttgtcatttggtttttcaatcattgtttttggcaacctcttcttatcccatcccaagggagcccgccgtcctccccaccagccactccttcccaccacttcccagcctccccaccccaccatagcaaaggactagcaatgtcggcgctcggcgccctctccggcggcgccgccggtgtcgctggcctcctcagcctccgccgccgtgcagccgcgccaccaccaccctctgcgctcgcctcctcgtcgcacctcccgccgcttaagtgcgccgccgttcccgatgccggccacctcgtctggggccgccagctccgcccggcgctcgccctcctcccgttcccgtcgcaggccgccaggaagcagaccccacgcccgcccgccgccgcctccgcaggggagggccaagcccgctggtttcctcagcaagtaccctgccctggtcaccggcttcttcttcttcatgtggtacttcctcaacgtcatattcaacatcctcaacaagaagatctacaactacttcccctacccatactttgtatcggcgatccatcttttagtgggtgtcgtatactgcctcatcagctggagtctcggtctccctaagcgtgcgcctgtcaatgcgaatctcctaaagctgctctttccagtggcgctgtgccatgctcttggtcatgtcacaagcaacgtctccttcgctgctgttgcagttcttcatttttgcccacactattaaagctctggagcccttcttcaacgcagccgctactcagtttatccttggacagcaggttcccttgtctctgtggctgtcccttgcccctgttgtcattggtgtttcaatggcatccctcactgagctctcattcaactggtctggcttcatcaatgccatgatatctaacatctccttcacttacaggagcatttactccaagaaagctatgactgacatggatagcaccaacgtgtatgcttacatctcaataatttctctcattgtttgcattccacctgcactgatgtttgaagggcctaaactgatgcagcacggatttaatgatgctattgcaaaagtggtctgcaaaagtttgttacagaccttttcttagttggactgttctaccatctgtataaccaggttgctacaaatactttggagcgagtggctcctctgacacacgctgttggcaatgtgttgaaacgtgtgtttgtcattggtttttcaatcattgtttttggcaacagaatcacgacacaaactggtattggcacatccattgccatagctggtgtggccatgcactcttacatcaaggctaagattgaagaggagaaaaggaaaaagaagagcgcgtgatgaggtgaatactgttaatatggtctcgggtggctgagttgtacttcctgagacaacatcgtcgacaatcatgacttccttgttttgttttctaccttgagtcatttggtcaattgtttgtagcaacctggttatacagatggtagaacagtccaactaagaaaaggtctgtaacaaacttttgcagacctacttttgcaatagcatcattaaatccgtgctgcatcagtttaggcccttc

SEQ ID NO: 11743 - DNA, 496 bp, Setaria italica
  Peptide Sequence Number=SeqID_77717
aatcaccaggagtattccaccaaggtagggcgttgaattcgcaagagatccaaacgacaggatcatgaactgctgaatcaaagcacctccagatttccccaagggattgcagaccacatcaatagctgctttacctttaaccttcatatcctcatccaaaggaaatagtgtgctaactaaactttctgagtactaaaggcttattgagactgttggccagatttctccggggtggtactctcggtttcttgagactgcttgatggccgagccgtttgcagaggtctcgctacctagactttcttggagagaaccgtttcctgtcccgactacttgggcggttgtttcgacagtctttgctttcagcatcttttctctctcgagatcttgctttgccaggggagagaactgtgagtcaagggaccttacagcacccaaccatgcaaagaaacaaatacaaccaaggaagtaattaccaaccaaaggtaaggacgtta

SEQ ID NO: 11744 - DNA, 1547 bp, Setaria italica
  Peptide Sequence Number=SeqID_77718
tgctgtaaggtcccttgactcacagttctctcccctggcaaagcaagatctcgagagagaaaagatgctgaaagcaaagactgtcgaaacgacaggatcatgaactgctgaatcaaagcacctccagatttccccaagggattgcagaccacatcaatagctgctttacctttaaccttcatatcctcatccaaaggaatgtacgccatctctttgcaaggatcaaataaactgtattttgcactcttactgaaaatgttctgcattgctccaacatagactgccgcaagcaaaggcgtcattccaaactgggtcatgagaggagtcagtggctcaccaaacaaaatcagagagaagaatccaactcctgtgagaagcaacactgcaggtgtgatcgtagctgcaactccccacccgaactttctaagaattactctccctaacaacatcattgtaaatgtagctatgccagtagcagttgagaaatcgcccatgaatgaagaatattcgttagggctcgggaactgcgccttcaattttgatttccatgtcacctcaacaaggttaatgcttattccataagcaacgaccaatgtggcaagatccctcacataccgagatgacaatagcaccttcatgctctcgcccatgctgagcttcggcttgtccttctttttccgctcaaccactggcatagatgatttgtcaataacaaacttgttcactccccaatagataccagtgatgaccagacccagtacaaccactatgctcatcatggccttcaatgaaattgcccatccatcaaccccagggcccaaattcttcctcatgtttgagaagtatttcaccgtgcggccagagaaaatgagcgccacattggcccctagcccgaacagcgggtaaaactctttggcctcttcaaccgtggtaatctggttggcgaacccccagaagaggactgatatgacgacgctgccccagagctcggccatgacgtagaagaggcagaagctccagactcggaggatggcgacgggcccgaggaagctgggtccgagcgaggcgaggagtcggtcggcgagcgcggtggggtggatggcgtcgcgcatggggtagagcacgtatgcgaaggccccgaagaaggcgatgaatgggaagatgacggcgtagaagagcgcttccttggagaggacgtcggcgagcttggtgtagaggagcatgaagccgacggccatgggcaggttgacccaggtcttgaggaaagggatgatctcggcgctgctgcccttggcggtgacgacgagcacgtccttggtgtcccgcaggatggtgtagttgaagaggatgcagaagaacatgagccccaggggcacgatcttcttgagcgtcttcgtctccacgcccaggaacttgggcgcgtcgtcaccgggcgccgcggcggcggcggcggaggcggtggcttgcgacgaggccggactccatggcggcgcggcgtgggcgtcgaaatatctccggatggagaggagggaggaggagataaggtc

SEQ ID NO: 11745 - DNA, 584 bp, Setaria italica
  Peptide Sequence Number=SeqID_77719
tcaggtccagagtgttgctagcagttggttctggaacctcttctgacccactggacctgaagcagactccggtgaacttccaatctgggtctatgaagttgggtgatgtggttacagcaaaggtctatcagattcgagcctttggactagtacttgagctgagcgatggagcacgcggaatgcataaatttgaggcaaatggtcaaaaggaatttgaagttggacaggaactacttgtgaaatgtgcaagtttcaacgcgaagggaatcccagtcttctcgttgttggactagtggacaagggagaccagacacctgtaaatgtgtagcaagctagcagctgatctaccaacgtgaggaacacggggctagcgaaattttgttctttagcggttgaaagcattgtcctgattttttcccccgacatacaagcatgaacataatggagttaaaattacgtccagacaatcacgtgaaagttagcgtacgaaccacccggcgtcctgaacctgctgcagcaaatgtatattactagggcaaggttgcttatctatatactgatttaaataataccaaaaaaaaaaa

SEQ ID NO: 11746 - DNA, 469 bp, Setaria italica
  Peptide Sequence Number=SeqID_77720
aaaggtcattatagtttcgggtcagttggaacagtagtttcaggtcgatatgacgcccgtgactaagttttggctccaacaaagtgcaaagcccaaacaatttaaaggcttttcaataactcaaagcaacattctcagctcagaataattatttggcattattactagacacaagggtgaggaagaagggctatcttgggcagtatgctgtggtgccggcaatggagcggagcaggcaagcaggacaaacaaaatcaacagctattgcatcagtctatctcaccgaaatgtacacaaggtccagcagctagacaggtccatttttatttttatttcacatgactcgagcagctgatagccagcgcagatgggtaaagccagtcaagacaaatcaagcaagcgtgttgtcgtacacctctccagcgtatttccagttcatcaccttccagatgttgctcaggtaatccgg

SEQ ID NO: 11747 - DNA, 278 bp, Setaria italica
  Peptide Sequence Number=SeqID_77721
ctcgtgcgctcgccttttggtgcgctcttggtatctgtgctcttcctcccgtgcccctcgtcctcctcgtctctgccacgcttccttcttcttgtcttgcttgctaccccggccgcactcttcttctctcggctgacgccgccattgcacgcgagagctgtgcgcggcggagcgtgacgatgtcgtcagcggtggaggccatctcctgctccaaggtcgacgtccccgcggcgccggagccggaggcggcggcggcggcggcggtggcggcggtcaag

SEQ ID NO: 11748 - DNA, 478 bp, Setaria italica
  Peptide Sequence Number=SeqID_77722
ccacggcgaaatatacaaagccccggcagcctcggcgcgacgaagtgatgacccgggacccctctcctcctcgctgagcgaaacccacctccaccagtgggcgcgggggcgcctgcgcgcagcggagaaacccaagcggcgcgagcgaccgagaggaggaggcgcgcgcgggggacgggagggatcgagagcggggatggcgtcgccgggggtggtggccgcggcgctggtggtggcggcggtcgcggcgttctgcggcacggacccgctgcggatgggcagcatggtggacttcccggggttcgaggcgcacttcgtcgacctcccggacccggccgagatgccgccgcacgcggacgcgcgcgagcggctgcgcagcgcggaggtgcggttccgcggcgaggtgcaggggcccgagagcgtggccttcgatccgcggggccgcgggccgtacacgggcgtcgccgacgggcgggtc

SEQ ID NO: 11749 - DNA, 381 bp, Setaria italica
  Peptide Sequence Number=SeqID_77723
ctcgacgccaaagaagagggaggagcaccaaggacttccggcgcttgttcaggatctacatcttcccgagcgagttcttggttgatctcttcctcttcgaccacctcccgagggtacgcaccgcaccccttcccctttccccttttttgaagaaatccgttgattgttgtttgtgcccttgtaatttcttcccggtttagctgtttggggttcgtttagtaggaagatcttggttgttttcgtagaaaccgtttgggatttagggtggagacttggagttcactcttcttactcttcgaggtagaatctcggttcttttagttgtgagatgagatgatgctaggtgattaattttttattccatatgtgctgagacaggga

SEQ ID NO: 11750 - DNA, 328 bp, Setaria italica
  Peptide Sequence Number=SeqID_77724
ttatttatatgcatgtgttatttagagctcatatttgtgatttttagaataagctacaactttttggatgctatgtttcttattagtcaaagaaattgatatgaggttagaggaataatttcatagtttagtcctttacaaatatgagctaaataaattacgggaaaaaatataatttattcatattttagtcatttgtaaatatgagcgagataaattctggtacatagagataataagatgaaatagaggtatgtaattagttatttttagaataagctacaatggagaagtttttcattttatgtttgagctaaataaattgcag

SEQ ID NO: 11751 - DNA, 676 bp, Setaria italica
  Peptide Sequence Number=SeqID_77725
ggcagccacagctcggcctggcagcagcagcagcagcaagcgctgaactatgcgcacaagcggcccgacggctccaaaaccctagccgcgggtacaagtgggacccaggtggccagcggatcgtgcttcaagtgcggagaccctggccactgggcgcgggagtgcccccaatcggctccgactgccggtggaggaggtgtaatcggcggcggtgccggcggcgggtacgtgaatgcgggtggggaggtggaggagaaggcgtgcccctgcggcgccgggagctgcctcgtgcttacttctaacacgcccaggaaccctgggcgcaagttctacaagtgtcccttgcgggacaatgggggttgcaacttctttgagtggtgtgatgctccatctcccggccctgcaaatgctcgaagtaacacagtttttcagtcagagacatcagcaacagatatgctttgcccatgcggtgctggagcttgcttaattctgaccacgaagacagggaaaatgttgggaggcagttctaccgctgcccaggaaatcagggtatcgctgttagcggcttttcaagtggtgtgacgagcaacagcccagggttggtgcaccgctgcaagcttcaccacagtaccaaactgatgcaacatcaagcatccaaaactccaacaagaggagc

SEQ ID NO: 11752 - DNA, 660 bp, Setaria italica
  Peptide Sequence Number=SeqID_77726
caacctctagcctaccccaattgcttgggactgaaaggctatgttgttgttgttgttgttgtgatattccatgttccttttcatcttttcattcattagttttataatgtacccacttttttttaacttgggcatttcatgtctctttctggtgtgcgattgggacaaatcacccagggtggtggctcttgtggctttttcaagtggtgtgacgagcaacagcccagggttggtgcaccgctgcaagcttcaccacagtaccaaactgatgcaacatcaagcatccaaaactccaacaagaggagctcctcatcctgcttcaagtgcgggcaggagaaccactgggcgagggactgcccaaatcaatcatcggatccttatcctgacaagggtgggagaacaataacttcggcgagctcgcctgatgggtgcttcaagtgtggtaaggctggtcactggtcccgcgagtgccccaacctcgaatagtggtggtggtggtggtggtggtaccggcgccagccgtgccaagtcgtcttctgctttgggctcgtggaacagtcagagatactgatagcaagctcctgtgaactcaattgaactgacatggacatgctgtacgaaacttggacaagtgcgcccagccacgtgttgcttaggtat

SEQ ID NO: 11753 - DNA, 295 bp, Setaria italica
  Peptide Sequence Number=SeqID_77727
tggcaagttccttcgctgctgcaaaatgtgagctcacatcattccagtgatcccaatcatctccagttattctgtacatattaacatgatcgctaatattctcagctaatgctggagtaacttcagatactggagctggacgggcctttttaagatctctttatcgacaatatgctgattgggatgttgattttgtgaaggttgattgtatcttcggcacagattatagcccagaagaaatcatcactatttcagaggaactgaagttactccagcattagctgagaattattta

SEQ ID NO: 11754 - DNA, 434 bp, Setaria italica
  Peptide Sequence Number=SeqID_77728
gtggttttatctttcaataaagtaggattggtattatgcttaatgtaccatcatcaagatgtgtcaaatctcctccgtacataagaggcgatttagccattgaccaaagtgccatctgtgttttctgttcatcaagagtaaggttacatttcctgtgagggccctgatttacacttggatcggtaagccatccaaatggaagcatgtctaagtctggccaagatcttcctcgcaacccagtggctccaatcttctttgcagcagcgaaggaacttgccacagaaaaatgtgagctcacatcattccagtgatcccaatcatctccagttattctgtacatattaacatgatcgctaatattctcagctaatgctggagtaacttcagttcctggtgaggagggacagggagagtcggacaatcacaattctctt

SEQ ID NO: 11755 - DNA, 1334 bp, Setaria italica
  Peptide Sequence Number=SeqID_77729
acaaactaaaataagaactcaccgagtccttttagaccatcaaacaaaaacataatgttcaccttccttgtttatttttagctgttataacataatccttcagctatctagttacatggtttatcaacctatcggttccatatccagcgtgcatttcatcacaacattcatggatggagctttagaagaaatgacgattacaaactatcagaactatttgcccagtaccgcaatctcaacatacgatttcaaacaccatggagccatgtggattaaccactgctgaaatcacttccttcgtgagactgaaattcttcccgctccaaacttcagtgcatctacataggtcttttctcaagaatgctcttctgagaacctttccaaggtctgatattcgtgcagccatcttcctgctcgtggagtcaaggttgaagaatgcgagatagatttctcctttacttccagttgcaacccatgcacgagctccaatagtacctccttcatcccttgattccaccgtggcgcataatcctgaatagctgctcacaagatttccattcgcatttagctcccacatctgttttgcatgccacctgcatgcagagaacatcggaaacctgatatctgaggcagaccgtcttcggccagcagatgcatccaaacaagtatcacctgtgtttctaactgaaagatgaaactttgattggtgctctatgctgtccatgataatgatatccgatgcaagaagtggttttgttttccccaggcaaaatgatgtacttttgtcattctgtatttcatagttcctgcatatatgatctggcttcccatcttgtgaaaacacataccatccattagctgtatcatcgctgcaggcagtgagaccgacaaacatgccatcgttctttgtaaggtgaacatgataaggagacctaaagcggccagaatgttcttcttttgacgtccttccactgtacacataacggaactccatgttatttttactgtagtggtttatcttcaataaagtaggattggtaattatgcttaatgtaccatcatcaagatgtgtcaaatctcctccgtacataagaggcgatttagccattgaccaaagtgccatctgtgttttctgttcatcaagagtaaggttacatttcctgtgagggccctgatttacacttggatcggtaagtccaactgcactaacagaagaaaagggtctgtttctgatacaactgcatatctattatatcattcaaaataatacctaaaaaaagggaaagaaagaaaaaacgacatatagatatgatgtactcaagaaaacattcaag

SEQ ID NO: 11756 - DNA, 450 bp, Setaria italica
  Peptide Sequence Number=SeqID_77730
agagagggcggaggcggtggcccgcgccgccgaggcgctccagacgctggagggcgcgttcgaggagtgctccaaggggaagcccttcttcggcggcgacggcatcgggttcgtggacgtcgtgctcggcggctacctcgggtggttcggggccatcgacaggatcatcgggcgcaagctgatcgacccggccaggacgccgctgctggccgcgtgggaggagcggttccgcaccaccgaggtagccaagggcatcgtgccggacgacgtcgataaggtgctcgcgttcctgcagaccctgctcgctattggctccatgaaatgagctccatctttctgtcagtccaggaacagtcggcctttttatggctcaataaatgtacaacagtacttgtgttgtaacatggactgttgtttatgttgctacttgctagcaattcgcaatttttg

SEQ ID NO: 11757 - DNA, 616 bp, Setaria italica
  Peptide Sequence Number=SeqID_77731
taaacggaaattagaagactaaaaactagctacacccccggtttgacaaactagctgcaccacggattcgccggtcggttcactacctgtggcataagcaggccctccatcgtacaagtacctgctaaaagcctgcctgagattctccacatatccagcatcaaccatggcacgggccacatgcaatctgccgggagccactccattcccagctatcttacacacatcttccagcttcattggcatgttaaggctcctaagcttcagtagcatctcgtttgcgcgtgcatatcggccctccctgatacccgctagaaacctctctaattcttgaggtctagcaggaccccaggtaccatagtatgcaagaatgtgcacaggatcctcagacccagattcgtcactaggcgaatgcacggcgctgatctcgacgccagggatgatcctgattggatcccgttttgccgcttccatggcctccgggacgccggccatggtgtcatgatcagtcagcgcgaatactttcaccccgttgcggtgcgcgcgctcgacgagctcggcgggcgagagcgagccgtcgctgcgcgccgagtgcgcgtgcagctccaccgcaacg

SEQ ID NO: 11758 - DNA, 1089 bp, Setaria italica
  Peptide Sequence Number=SeqID_77732
tccaaacgttgactggcttcttcctcggttgtaatggcgtcgccaatctctgcacgacgctatcaacaatttcctttagtacataacaatggacttccaagattttctcgagtaaaaatggcatgcttgggaataaaacaaactaggtatcattctgataccatcgtatcttcatcagcaagtcatggagatgccggaaagctccatcctgtagtcaaaatgtgtggcatcacatcagctagagatgcagaaatggctgtagaggcaggagctaaacttattggcatgatactgtggcctaattctaaacgctccgtctcgttatctgaggcaaaagaaatatcaagagttgcacaatcttatggtgctgaatcagttggtgtctttgtggatgatgatgaagagaccatattacgagtgtctgattcatgtgaccttaactttatccagctccatggagatgaatctcgtgcactggttcataatctttccaagaataaccgcattgtttatgtactaaatgctgatgaagatggaaaactaatcaagctgcctcctgttttggaatatgcacttgattggttcttagtggatagtgccaaaggcggaagtggaaagggattcaactggcagaagttccagatgccatcagtcaaaagcaagaatggatggctattagctggaggacttcatgcagataatgtttgtgaagccttttcttctctgaaaccaaatggagttgacgttagcagtggcatatgtggtcctgacggtatccagaaagaccccaacaggatttcttccttcataagtaatgtaaaatccctgagttgcagatcataacgtcatttggtgttgggagcttagtttcatttcatttgctcacattgtggagactagctaattcgtgctaaacgcaacctgaaggcaagctgttcagcatgatagcaataattgcatttgcacccgagggaaaaatgaccgaacgttatatgcattgtatttgttttgtagtgtaataagtggattttgtatgcatctccagttcaaaggcaataataaacaccacattgtaccaaaaaaaaaaaa

SEQ ID NO: 11759 - DNA, 455 bp, Setaria italica
  Peptide Sequence Number=SeqID_77733
acgcgttgatcacgaccgcgtccgagccgggacgtggtagctttgcagctcggtgtcctcgagggtctcccggggcaggaggagaggtcccggcgggtgcagccggagcgtctccttgatcacggccttgaggtatggtagcctaggtaggtcgtcctcggtgacgccgccggcgacggcggcgcggatctcgtcctggagcttgcgcatctgggtcgggtggttgatgagctccgccatggcccattccagcagcgagtacgaagtgtcagtgccagcaacgagcatgtcctatgtataaccaattaaccatgcctcattttcccgtcaaattgcatctcgtcgtcaaaaatgtgtgtgttgcgcttgcgcacagtaataggcataccacgacggtggctttaatggtgaccgtgtcgagctggactccccgacctcttcctctgtctcgctca

SEQ ID NO: 11760 - DNA, 844 bp, Setaria italica
  Peptide Sequence Number=SeqID_77734
tggaacctcccagtcgaaatggtacagcaagctcgcgagcgccagctcgttggccggcacggcgaacccgacgcccgggcaccccctcctcccggcgccgaacggcaagaacctgaagtccagccccatcttctgatactccgcctcgccgtccgccgcgaacctctccggcatgaagtcctcggcgttctccccccaggtggccgggtcccggccgatcgcccacgcgttgatcacgacccgcgtccgagccgggacgtggtagctttgcagctcggtgtcctcgagggtctcccggggcaggaggagaggtcccggcgggtgcagccggagcgtctccttgatcacggccttgaggtatggtagcctaggtaggtcgtcctcggtgacgccgccggcgacggcggcgcggatctcgtcctggagcttgcgcatctgggtcgggtggttgatgagctccgccatggcccattccagcagcgagtacgaagtgtcagtgccagcaacgagcatgtccacgacggtggctttaatggtgaccgtgtcgagctggactcccccgacctcttcctctgtctcgctcaagtccaacagcacgtccacgaagtccctgcgatcgtcctctccgtctccgaccacccgccgcgcaccacgacgccggcggcgatgatcggcgatgaccctctcgagaagccgatctatctcctcagaggtgcgcctcgccttccgctccagccccgtcgccacgtccacgggccacagccacggcaccacctccgccatcggtaccgtcccgagcagctcctcgaactcgccgaacaccttcctcagcttcgttcctcca

SEQ ID NO: 11761 - DNA, 569 bp, Setaria italica
  Peptide Sequence Number=SeqID_77735
tgtttgttcgttctttgtcgtctactagttaattaggtctattacctacgtacggttggtctttaatggttgaccgtgtcgagctggactccccgacctcttcctctgtctcgctcaagtccaacagcacgtccacgaagtccctgcgatcgtcctctccgtctccgaccacccgccgcgcaccacgacgccggcggcgatgatcggcgatgaccctctcgagaagccgatctatctcctcagaggtgcgcctcgccttccgctccagccccgtcgccacgtccacgggccacagccacggcaccacctccgccatcggtaccgtcccgagcagctcctcgaactcgccgaacaccttcctcagcttcgttcctcctccgccgtcgtcgccgtcgagcccgtagcttccgtcgccgaacgtggcgcgcgagatgacggcgttggagtaggtgatgaggagttcgctcaggttcaccacggcggcaccgtcggccgcggcggcggcacggacgcggccgagcagcgcagcgacctcctgctcgcgggcggcacggaagcagaggacgtct

SEQ ID NO: 11762 - DNA, 435 bp, Setaria italica
  misc_feature (222)..(222): n is a, c, g, or t
  Peptide Sequence Number=SeqID_77736
atgggtgagggggacgggggatgtgaggcggcgggtgctgcagggccgctacgagctcggccgcgtcctgggccacggcaacttcgggcgcgtccacacggcccgtgacctgcgcaccgggcgcagcgtggcggtgaaggtgctgtccaaggacaaggttgtgcgcgcgggcatgatggagcagatcaagcgcgagatcgccgtcatgaagcgggtgtcccncccaaacatcgtcgagctccacgaggtgatggccacgcgctccaggatctacctcgcgctcgagctcgtccgcggcggggagctcttcgcccggatcgtgcgggccgggcgggtgagggaggacgttgcgcggcgaataacttacaaggacaagactacgtactaccgtccgttcgtactttcttgtcctacgtcgtagtacctaacgtacta

SEQ ID NO: 11763 - DNA, 363 bp, Setaria italica
  Peptide Sequence Number=SeqID_77737
ggtcgacgttaagaaggacggcggcgacacgctcgagtaccggtccttctgcagcgacgagctccggccggcgctcaaggacatcgtctgggccgctgccgacccggcgcctgccgccgccgccgtcgtgtgacgccgcaccgccgcgcgctcattgctctgtatcgtagtgccatgatgccattgtttagtcagtgtcagttccatttttcactcaagtgattgcttcgccgttcttgattcgataatgacgtgaggttgctgtttgtgggggcagtagcgagaggaatctgtatctcgatcgctgcctagagcggcgcctctgcataattgagttgtttttgtgattgtttatgactaaac

SEQ ID NO: 11764 - DNA, 383 bp, Setaria italica
  Peptide Sequence Number=SeqID_77738
cccacccaaacatcgtcgagctccacgaggtgatggccacgcgctccaggatctacctcgcgctcgagctcgtccgcggcggggagctcttcgcccggatcgtgcgggccgggcgggtgagggaggacgttgcgcggcgatacttcaggcagctcgtctccgccgtcgtgtgacgccgcaccgccgcgcgctcattgctctgtatcgtagtgccatgatgccattgtttagtcagtgtcagttccatttttcactcaagtgattgcttcgccgttcttgattcgataatgacgtgaggttgctgtttgtggggcagtagcgagaggaatctgtatctcgatcgctgcctagagcggcgcctctgcataattgagttgttttgt

SEQ ID NO: 11765 - DNA, 1585 bp, Setaria italica
  Peptide Sequence Number=SeqID_77739
atcccactatcccaggctcccaccctccctcctcgcaagagccaccgcgtcgcccttgtccctgcttctcgcgcctgccccgatctaccgccgtcgaggcgagcgcccccgcgccccagggaatgcggagcgatgaggcggcgctcaggcactgacgtcgccggccagcgcgagctgcgcggcggccgcacctgccaccgcaagcacgtcgaggacgggtagacccatcccaccctcccttccccggcgctagtcgtagggtacagtttgtttcgtttttctctctttggaattttggatcggaagaagaaattagtggatcgatcgattcgattcgatcgagcattcgaccctcatgggtgagggggacggggatgtgaaggcgggcggggtgctgcagggccgctacgagctcggccgcgtcctgggccacggcaacttcgggcgcgtccacacggcccgtgacctgcgcaccgggcgcagcgtggcggtgaaggtgctgtccaaggacaaggttgtgcgcgcgggcatgatggagcagatcaagcgcgagatcgccgtcatgaagcgggtgtcccacccaaacatcgtcgagctccacgaggtgatggccacgcgctccaggatctacctcgcgctcgagctcgtccgcggcggggagctcttcgcccggatcgtgcgggccgggcgggtgagggaggacgttgcgcggcgatacttcaggcagctcgtctccgccgtcgacttctgccacgcgcgcggcgtgttccaccgcgacctcaagccggagaacctcctcatcgacgaggcggggaacctcaaggttgtcgacttcggactcagcgcgctcgccgaccacacccgcagcgacggcctgctgcacacgctctgcggcacgccggggtacgtcgcgccggaggtgttcaggaacaaggggtacgacggcgccaaggcagacatctggtcgtgcggggtcatcctctacgtgctcctcgccggctcgctcccgttcccggaggacaacatcgcctccatgttcaagaagatgagccgcggcgactaccggtgcccgccgtggctgtccacggaggcgcgcaggctcatccccaggctgctcgaccccaaccccgacacccgcatcaccatcgcccagatggtcgagacgccgtggttcaaaaagtcgtcgtccgtcccgaggcccgtcaatgcggccgccgagccgccggccgagcctgcctgcgccgggaaggacggcggcgacaaggacgagccgccggagacgctgaacgcgttccacctgatctccctctccgcgggtttcgacctctcgcccctgttcgacgtcgagggtggctccgcaagggggcaccgggagggcggcatgcggttcgcgacgcgggagtcggcgagcggcgtcgtctcccggctcgaggaggtggccgcccgcggcggtgggcggatgcgggtgaccaagagcggcgcacgcggcgtctggttcgagggcgcggagcaacggtacggtacgtaactaaaggtaacgtaagtaccgtaccggttaagttaacgttactttagttaaacgtta

SEQ ID NO: 11766 - DNA, 258 bp, Setaria italica
  Peptide Sequence Number=SeqID_77740
aaatttgaccgactaaaagtgcttaatgcagtcaaccggtcagctttttctttgtttaagccttgcattcatattttccccacacttattttcatattttccccacacttgttgagtacaacatgtgctcacccttgctataaccaacgttgctcagaagaagctgctatgaagttcttgtgaagatgatgctgagttctagacgtactcaacctctagtcgattgtctgtaattgactgtgaagttggagcctttcg

SEQ ID NO: 11767 - DNA, 1373 bp, Setaria italica
  Peptide Sequence Number=SeqID_77741
attgctaacatcctggtatcagagatgcgatcctagattccctccctccctaccaccacttcactcgatttcagaagcgcgcgggtgctatggatcccaacaccaaaattctcctcgatgagatccaaaaatgcttctccaatgagctccacaagcgattcgcgaagagcgacctcaagtaggagcagcacttccagaaggcggaacgcctccacggcgaccgcatcgtgaagctggagtcgatggccaaggcgttcgaagactagcgtcctcaggtcgatgccgccgtggacgacgtcaagctcgagcttggcaagctgacgcaccactaggaccaatccgtgcgcgacctcgcgtccatggatccgagccttattcccaatcccaagtcggcgttcgagcgcccacctgctacggatccaagcgccgacggccctcatgggcaccgcgtcgaatcgattcaccgggatgaggggtttgggtcgatgtacacccatactccaatccccagtcaagggtgcgtgtcctttgcccaatcctactttccctagatcagcttctcgctcttatggggtcatcaggataattctctagttacatctaggcaaattacctaagcttcagtttcctattttcgaaggcgaaaatcctaagctctggttgtctagatgtgaggattactttgagatgtatagagtcgatccaactatttgggttaaggtgtctattatgtagtttgatgtgtctagtcctgctgctcgttgggctctatctgtggacagacagttaaagaggtcctcgtggtctgaatttagctctatgttgattgatagatttgggcgggatcagcaagaacttctaatccggtaatgtttcacatcaagcaattcagaactgtgtttgattatgttgccaagttcactgaattgatagatcaactcatagcttacggctatactactgatccactatactataccacacgtttcattgatggcatgcgtgatgacatttgttcaattgttctggttcagcgtccctctacactcgatattgcttgcactcttgcgttgttgcaggaagaagtggcggatccctccagatgcagggattggcgtcgtctggatgcaggctttccaccaagacctcctcctcggggaccattgccccttcccactccaccgtgtattgataaagctgtggcaccgtcaactgttgctgcagatgtctctccctcaaaggacttcaataagtctcaggtggacaaatttgcctctctttgtgcttacagacgagctcgtgggctgtgtgacaaatgcactaagaaatggcatcatggccacaagtgctctcctactgtccaactaaatgcc

SEQ ID NO: 11768 - DNA, 622 bp, Setaria italica
  Peptide Sequence Number=SeqID_77742
ggcggccggcgcaggcgtgggagtccgtgatccggggcgcgctcaggcgggcccagccgtcgaggcccaagtacaagtgctacagccacccgccctcgccatcgcggttcgacccgccgccggccgccgccgacgagctcctccccggcacggacacggagaccgacaccgacgacgacgcgccgttcggcttcccggcgcggccggagcagcacgtcgcggcgaccccaaggaagctgagcaggctcaaccacttcagcgtcgtggatgatgacccggcggagctcaacggcgacgagcctgacgagctcgatcaggagccgcagcagccggggcggatgctcctgaggtcgctgagcagggcggacagggtcgggctggtctggccggagcagccgctggacctgctgccggcgcgcgccatgaacgccgcgtcgtcggcgtcgttcaaggcgtcgaaatccttcagggcgtacaagtcgttcagggggtcgtctcgcgtcgccgacgcggcggcggcggacgagctgccgatgatcccggacctcgaccttgacctcgacggcgcgctgcgcaagaagaagagccggtcgccgttcgtgaggatcgtgagcaagcagat

SEQ ID NO: 11769 - DNA, 779 bp, Setaria italica
  Peptide Sequence Number=SeqID_77743
cgaggcgttcgggtccgcggagtactgctgcagcggcgaccacgggaaccccagcacgtgcaagccgtcggcgtactcgcagttcttcaagaacgcgtgcccgcgggcctacagctacgcgtacgacgacgccacctccaccttcacctgcgccggcggcgataccacctacgccatcaccttctgccccagcaccaccagcgtgaaggcggacggggctagtccgcaggcggcgggggacctgccgctgatgaacgacaccatggtgtacctcggcgcggaccagctcatcgctgctaccgccacggcacggccgccgtcgagtctcctgcatgccgtcctcgccgtcgccgccatcgtgctcgcaggcgctctgtgctgatcaaagggtcgcggggccacgccacgagacaatcgtgctcttcagctcttgcacgctgaaaaatgctgagcacaggcgaagtggacgtgtcacctgcctgccgggtgagggggtagacacggactacgcgggcctcaccaacagccagattcgcccgtgccgaaagagacgcggctgaaattgcacagcgaattggttgagacgttaagtagtgcgttttctttggtacttagcacgaaattacacacatattgatattgtagtggttgagttattttatatagaatagattcttttcggtaacttatcataggagggattctttttctcactttattttgtaagtggataaaggaacatctattgtgcccggagacagagcaggtccgaggtctaa

SEQ ID NO: 11770 - DNA, 747 bp, Setaria italica
  Peptide Sequence Number=SeqID_77744
cgccgcacggcgcggcggggggcgggaactgcgcgcccaccgggtgcatgctggacctgaaccgcgcgtgtcccgccgacctgcgcgtcgcgtcaacgtcctcccccggcggcggcggcgtggcgtgcaagagtgcgtgcgaggcgttcgggtccgcggagtactgctgcagcggcgaccacgggaaccccagcacgtgcaagccgtcggcgtactcgcagttcttcaagaacgcgtgcccgcgggcctacagctacgcgtacgacgacgccacctccaccttcacctgcgccggcggcgataccacctacgccatcaccttctgccccagcaccaccaggtacgaacacacgagttgcgtcacttgctacttaacccgaacttgtagctaccgcacgtttcttgttgcggactactgtgaccaaaatgaattgattgttttggggtgtgtgtgtaagcaagcataacgctaggtgccaaacccaacacctttccgttattccgtggctccagaagcaaaaaggatagcaccttttggtctggccactgttgccggtatgtggtctggtacgctcggctgagtgacgggcaccgtcgtcggcaccgatgagctccagccaggaccagccaccgtaaccgcgtccggatccacgagtcacgtcggcagcgaccatgacgcccgccggcccaccatggcatactggaatgcaatggcatggtacgccacgccaccgcaagctagcttag

SEQ ID NO: 11771 - DNA, 457 bp, Setaria italica
  Peptide Sequence Number=SeqID_77745
gggtgctcaaccaaatctcgacatactgctacaaccactcctctggtcagatggaggctaatcgttggttgctcaaacataagaggtaccccgttccgattctcagacgtccacaacaagttcaccgtcattggctgcaacaccctcgcctatatctacgacaacgccggcaccggttacctaagtgggtgtgtctcaacttgccagaatctgtcagacctagcggacggaacctgctcgggaattggctgctgccagacagccatacctaggaatatgggctactacgaggtcttgttcgatcgcggtttcaacacaagcaaagtttggaggttcaaccgttgcagctacgccgtgttgatggaggcggaggcgttcaatttcagcaccaagtacatcagcacgaccatgttcaatgacacaagaattgggcgagcaccagtggtgatggactggg

SEQ ID NO: 11772 - DNA, 894 bp, Setaria italica
  Peptide Sequence Number=SeqID_77746
tggcaagacccgacgcccttctccacaaatttcacgacctgccgctacgtgttcctggtggagacggcgtggttcagctacagcgacgccgccttcttcagccgcaccgacgacttcgccgtgcccgtcgtgctcgactgggccgtccggaacgtcggcaactgcaccgccgccaggcgcaacgccacggactacgcgtgccggagcgcccacagcgactgcgtcgactccatcggcaacggcgacggctaccgctgcaactgctccaaggggtacgagggaaacccctacctcgacggtggatgcagagacatcgacgagtgcaaccgcaaacacgaatactcatgctacggagactgcacaaacaagccgggaacctacatttgcgaatgccctccgggaaccactggggatcactccaggcagaacggttgccggcccaaggacaagttcacgctagctctcaaagtggttacaggagttagcgtcggagtgttcctgtcagtattcatgtgcttctggctctaccttgggctccagaagaggaagctcatcaggacgaagcagaggttcttcgagcagaacgggggtgtgatcctgcagcagcagatgcgctcctacagcagcgccggcgccggagcaggcgggttcaagatattctccgaggaggagctcgagaaggcgaccaacaacttcgccgatgaccgagttctcggccgcggcgggcacggcgtcgtctacaggggcgtgctcgaggacaagacggtggtggccatcaagaagtcgaagatgatggaggaggcgcagaccaaggagttcgcgagggagatgttcatcctctcccagatcaaccacaggaacgtcggtaactgcaccaccgccaggcgcaacacc

SEQ ID NO: 11773 - DNA, 290 bp, Setaria italica
  Peptide Sequence Number=SeqID_77747
ccgtctgcgatttctttgccaggatgccgttccgggacagcatctcgtggaacacagtgctttcgtggtgcgtcgccaatggtgagtacgatgaggcaatcgcggtgttccgggagatgctggcgagccaggagtgccagcctgacagggtgacattagtgagcgttgtctcggcaatcgcgtacttgggggcactcgctttggggctgtgggcgcatgcatatgtcatcaggaaaggggttgaagtcgaggagaaattgagctcggcattgataaacatgtactcaaaa

SEQ ID NO: 11774 - DNA, 308 bp, Setaria italica
  Peptide Sequence Number=SeqID_77748
gtggagagaaaagcctcctggggactcctgatggcaccttgcttgggagggtatatgacaatgctgtccacacaattaccataagtgggacaccgtagtcagctatgaagcttctaagccaccctactccataaagccatgaccttgctcgcctggttctcaatgcagtgaacagcaaaccaatggaaaatatgacaccaagtaggccattgacatacagccactggaattggtatattggcgagctgctatctgcatcttcaggcacactaaattcatttatgatcctgatgactggcatagctcca

SEQ ID NO: 11775 - DNA, 531 bp, Setaria italica
  Peptide Sequence Number=SeqID_77749
ttaaactcttaaaatcctgcttcacttgcaggcccagaggcacagaggtagtcaaattcccccgatcatataagtccgatatgtaaatttgtttttcctaagttactaacatttgtaatttggcacatgcgatatgatccctagtgtattttacagctctacgtacgtacggtacatttttggagcataaacatactgttgtgatccctacacgggtgaacgcatttgccatgaggctttagccagcgcgcttctcccagatccatcggcttggcctgaaaatctgccgcaggagcgccatcttgggaacgttccagttctcgacatgcctgcacactttccctgattcagcatcgaagtagtattccgtgtatccggttgctgacagaataggcctccacgggaacgacatgacgcagctgaaacgccagtgcccaattgatttatcttccaggtcctcccatttggtgagctccatgttggacttctccagcagagacccaaagttggttgctagtgttacttaagtta

SEQ ID NO: 11776 - DNA, 1159 bp, Setaria italica
  Peptide Sequence Number=SeqID_77750
caccatggcacatacacacattaatcaacatcgcttggaatctctcttctgagctacacggagctacaagatgtctacaactcggggtgaggggaggaaagatcgggtgacacaagccctagtggcagggccgaagccattggaaggagtcgcactcccctcgaattggggagagtggaggaagcagcagtggtccgccggtgttctaccctctgtacacgccggaggggtcggcattctggacaatccacgggtgctcaaggactttgtggagtgggagccggtgtgcggaattctttacgagcatctgagaaattaggtccttggcagcaggcgacacgaacggtttcaatgggaacttcaggtcgaccttcactatccttcgatatgtctctgaatgctctttcgcttcaaaaggtgggaccccataaagaaactcatagcacagtatacccaagctccagatgtcaacgtgataatcatgctctgtcttctcaaccatttcaggcggaaggtagtctagtgttccacacatcgtcctccttcggttgaaggtgtggacagaccagccgaagtctgcaatttttagctcgccctggactccaatcaaaaggttctctggtttaatgtccctatggatgacatgcttcccgtgtaggtagatcaaagctctcgcgagggacgcgatgtaagttgctgaccgtctctctgagaagtgtttgcacctcgtcaactccttgtacagctctcccttggcagcatattccaagatgagatacactctagtctgatcatagaagtatccatacaggcgaagaatatttgggtgacggagatgagactgtatctcaacctcacgccgcagctgatgttccacttgggactgtttgagttggctcttaaaaagaactttcaaagctacgatctggttgctcctcttttctctggccaggtagacatgtccgaacttgcccctcccaagtggtttgccaacctcaaaatcagacagaacccacctcttctcctcattagcgtgggctgaagccttgtcctcgctgccgcgcgactcggtggcgatcgccatggctggggtagcggagcgggctgaggccggaggggcaggggagcgccgaggcgagtttggaattttgggtgcgat

SEQ ID NO: 11777 - DNA, 283 bp, Setaria italica
  Peptide Sequence Number=SeqID_77751
gttctccaccccgcacccgccccaaactcccacaacatttcctcaagcgatttcttctagaaacctggatcaatccaatctttcagtcgcacattcaacgggatctctccgcagttcagttcgaatggaagagggaaccacggaatccggatcattctcccgctcctcctccttcggagggttcgaggagtgggtggcactggtgaggaagcgcaatgggaagacctcctcatgcgggcgtctggctatccggtcatccgccagttcagaagtactggaactt

SEQ ID NO: 11778 - DNA, 316 bp, Setaria italica
  Peptide Sequence Number=SeqID_77752
ctaggaatagacgatggtttttttggtaataagcagcctaggtaatggggaagaatggctgcttcctctcttcttctttggtttcttctacccttggtggagtagtagaagaggacaagaatgccaatagagcaaaacaaaaggcatctgtttcgtctttccctcttagttgtctccttataactcttgcttttgtccttcgtttggacctccaactgtggggtggttgaagaatgacatgctgttcttgatccttgaggtaactactttcctgcttcatctttgattcatttatttgatgaggatttgcatcaca

SEQ ID NO: 11779 - DNA, 1293 bp, Setaria italica
  Peptide Sequence Number=SeqID_77753
gtttggtactttgtaaactattagtattgttagtcttattatttattaagtattagagggtagcagttaaacatcataaaactagttattaagctagttattacgtctagattatttttccaaatatataggaccatcttcaataaaaaaaacaccaatacatatccaacaaaagctgcgcctggcccacgcctaaagggtcgatcaatgggcagcaacgaaagccaccactcgatccatcagcgcaacagcctcgtggctgccgtgatcggagacgaagaaggcgtgtcccttgcctttagactcgaaccactccaccttccccatccacccgctggtcctcacggcctcgcagtaagctcggccccttggcgccctcggatcctccgacgccgtggctacaaacaacctcttgccggccagcttcgccaggcccggcgctgcaccggcggccatcggattaatcctcggatcgtcggttccatccctggcgctggggaagatgacctcccacctcttcttattagcttgcaagaactcttctgcctcgtcttccagtttctgttcgccgcagaacgaagggtggagtaggatcacgcctccgatccgcgccgccaaagcaggtgtcgcggcgtgcaagacgctcgtgcccgttgcgacggccatgttgtgggcgatgttcgcgccggcgctgccaccggcaacgaagacgcggccgaggtcgccgtggtcggagagccacgggtccgcgccggacaccgcccagttgagcgcggcccaggagtcgtcgtaggcagcggggagcgggtgctcgggggccaggcggtagtcgacggagacggcgacgacgcgggagcgggcgaccagcgagttcacgtagcggtggaagtcggggccaccggatgagcccacgatgaagaagccgccatggaagatgacgaggacggggagcttcgtcgcggcgctgtcgtcgtcggactcggacggcaacaacggggccgccgtctggatggctggcaggtagagccgcgtggcgacgccggtgctggcgtcgatgacgacatctttggaggtgacgccggtggcggcgtcgaagccggcgggcacggtttccatgccgccggtacgctcgacgtgtccatcgctgtataggcggaagcaatcgcactcaaagacgacctcaacgctgccggaatccattgccataggagtctagcaagcgctcaatcgacgtggcaaactgcgcggcggcgtgcggcgtgcggcggactcgaagaactggttggccactta

SEQ ID NO: 11780 - DNA, 273 bp, Setaria italica
  Peptide Sequence Number=SeqID_77754
aaggggtctcgtcgccgagcaagaagaggaaattctcgcctataatttgggacagggatagcccaaagccgaccaacaattctgatgcatcaaggggcaagaaagtggtagaatctgtgcctgctgagctccctccgcctccgccgttgcctccaaaagaccatgtcccagtgagattagctgtggagaagtcacctatagatgtggagcctactgttggtacagagagtgctgagcagttgccggaacatgagaatagggtggcagaggagg

SEQ ID NO: 11781 - DNA, 276 bp, Setaria italica
  Peptide Sequence Number=SeqID_77755
taaggtactacgtacgccgagcaagaagaggaaattctcgcctataatttgggacagggatagcccaaagccgaaccaacaattctgatgcatcaaggggcaagaaagtggtagaatctgtgcctgctgagctccctccgcctccgccgttgcctccaaaagaccatgtcccagtgagattagctgtggagaagtcacctatagatgtggagcctactgttggtacagagagtgctgagcagttgccggaacatgagaatagggtggcagaggagg

SEQ ID NO: 11782 - DNA, 537 bp, Setaria italica
  misc_feature (516)..(516): n is a, c, g, or t
  Peptide Sequence Number=SeqID_77756
ctgaatcagcaagatcagatatcttctgaggcttggtgccggttaagtggatgaggtttctccttatggtccatcatagaaattttcttgcaggaattaacactccatccacattgatcctaaaagcaaatataatctgcctgcatcgtaaggtgtggcatgttggcttttattggttacaccagtttcacctttggaacttctgtatgtaaaatattccagattggtacgttgtaaagcacaaatggttctctgaagttcctcttcctaagtccaaggacttcatgcctacattccctgcgcttaatgaactggacaggcgtaccaaacggtacctgaagagccctgaccctctagaagagcaacgtttgaaagaactgcaagggaacataggcaaccgtgggctttttggctgaactaggaccacttgcttgggttcctatccgtactaactgttatgcttcaccctgaatcagcaagatcagatatcttctgaggcttggtgccggttaaggngaaacctcatccacttaaccg

SEQ ID NO: 11783 - DNA, 681 bp, Setaria italica
  Peptide Sequence Number=SeqID_77757
taagttaggtaattagtttaaaggtaaagttaagttaagtttaggtaaagttaagttacttaagatagtatctttatggttatggagtacatggaacatgatctaaaaggtgtcatggagacaatgaaacaaccgtatacccaaagtgaggtcaaatgtttgatgattcaactgttagagggtgtaaagtatctacatgacaattgggtacttcatagggatctgaagacctcaaatcttttagctgaataaccgcggtgagttgaaaatatgtgattttggactgtctcgtcaatatgggagcccactaaaaccttatactcaactggttgtgactttgtggtacagggccccagaactattgctaggaacaaaggagtattctactgctattgatatgtggtctgtgggctgtataatggcggagcttctggccaaagaaccattattcaatggaaaaacagagtttgaacagctagataagatatttagaacacttggcacacctaatgagaagatttggcctggctatgccaaattacctggtgtgaaagtcaattttgtcaaacaaccgtataacaggctaagggataagttcccagctgcatcttttctgggcgaccaatcctgtctgaagctggttttgtattcttgtcttcttaacttagtttctttgttctt

SEQ ID NO: 11784 - DNA, 1120 bp, Setaria italica
  misc_feature (1078)..(1120): n is a, c, g, or t
  Peptide Sequence Number=SeqID_77758
tgttctgctaacttatgaccctgacaagcgtatatcggcagatgatgctctgaagcacaaatggttctctgaagttcctcttcctcagtccaaggacttcatgcctacattccctgcgcttaatgaactggacaggcgtaccaaacggtacctgaagagccctgaccctctagaagagcaacgtttgaaagaactgcaagggaacataggcaaccgtgggctttttggctgaactaggaccacttgcttgggttcctatccgtactaactgttatgcttcaccctgaatcagcaagatcagatatcttctgaggtgagatgtgccatggacatgaagtatcacatcttcttggtgtctaccagcgactgatagtgttctttagcaggcttggtgccggttaagtggatgaggtttctccttatggtccatcatagaaattttcttgcaggaattaacactccatccacattgatcctaaaagcaaatataatctgcctgcatcgtaaggtgtggcatgttggcttttattggttacaccagtttcacctttggaacttctgtatgtaaaatattccagattggtacgttgtaaacaatgttcagtgtgttggattaaaataaaacatcatcattatcgttattctttatgctcctcgtgccttttcttttgatctttgcattttgtttgcaagagacgaaagaagcgcaggggaaggatgcattttgcttttcaccaggaaatcaatggacattaatacaacttggaagctaagctgtggctgcttcaagataggaagcttcatggccgtcagctttgttgtacctaagtgactaaatttgtggaggaccttcaaaaagtgttcatcttttactattgaaccatgttggtcagtgtactatccttccttgtacattagtaaccattcttctaacttatttggagattattcttctacaattttgtatggtaggtagcttatgttcacttgacagttctaacatagcttactgaaaaacgcaacgcgaagtggttcccagtgataaataacagcgaatcaggtgaaaatttgtaggacnnnnnnnnnnnnnnnnnnnnnnnnnnnnnnnnnnnnnnnnnnn

SEQ ID NO: 11785 - DNA, 848 bp, Setaria italica
  misc_feature (7)..(7): n is a, c, g, or t
  Peptide Sequence Number=SeqID_77759
cagaagngtttgatgagtttgagaggctcaacaaattaatgagggcacatatggtgttgtatatagagcaagggataagaagacaaatgagattgttgctctgaagaaggtaaagatggagaaagagcgagaaggtttcccgttaacctctctaagggaaataaatatcctcttgtctttccaccatccttcgatagtggatgttaaggaagtagtagttggaagtagtctagatagtatctttatggttatggagtacatggaacatgatctaaaaggtgtcatggagacaatgaaacaaccgtatacccaaagtgaggtcaaatgtttgatgattcaactgttagagggtgtaaagtatctacatgacaattgggtacttcatagggatctgaagacctcaaatcttttgctgaataaccgcggtgagttgaaaatatgtgattttggactgtctcgtcaatatgggagcccactaaaaccttatactcaactggttgtgactttgtggtacagggccccagaactattgctaggaacaaaggagtattctactgctattgatatgtggtctgtgggctgtataatggcggagcttctggccaaagaaccattattcaatggaaaaacagagtttgaacagctagataagatatttagaacacttggcacacctaatgagaagatttggcctggctatgccaaattacctggtgtgaaagtcaattttgtcaaacaaccgtataacaggctaagggataagttcccagctgcatctttttttgtgtaccaatcctgtctgaagctggttttgatctgctcaacagtctgctaacttaatgaccctg

SEQ ID NO: 11786 - DNA, 1438 bp, Setaria italica
  Peptide Sequence Number=SeqID_77760
tgcacatgcatctcgaggatccttgtatttagaaatcatgtcgacaactgtttgactggaaaggaactcaaatactccatcactagcaagaacaaaaattggatttttggaattgagatccagtccaaaaatctcgggatctgcaatgacaccaatggactcagcaacagaatctccaatgctacgtgtaaaagcagttcctgggtacatgccattttgcacccatagccttggaggatcaccatcatcactttcttcagtaccccaacactgcacatctgggttctttagcccctctatttgatccaaggtcagaactctagcaccacattccttgaccctttcaagctcatcaaaccggtaaggagtttgatctatggagagatcaacagcaacaatattgtcccctcgtttttcagcaataacagcacgtgaatcgccagtatttgcaacgtatatagttttacccctgaccaatatagtgattgctgtagtaccactcatggagtcatccaagttgtcatcatgaagctgcgagtttgttgccacaaaagcagaatgaagagctagcacagcatctgtacggaagcgattatctctgagcaggttctcacataatcttcgcttcacaaactgtgagcactgggctccatactctccatgaccatcaaacacaccaaagaagtggtcatcaggacttgctccaaatggggtatgtatgcagtagctatcttggtttggcttgtccagtgattctggatagtaacctctttgagacaagaaggagtatctcaggtcatagttacccaaagggacctgaactttgcgcgaaccatcaggaggaagaaactgtgatgagacccttgatagtcgactgatgccaacagttgattcccttgtgttcatttggttcaacgagtcgtcgtcttccccgagatcatcagaagagtcatctgaaccaccgattccctttcccctcccccggcttaactttccccttgattctcttggggagtcaggtgtctgcccaaggcacccacttgagcacaaagagcacttcagttgtgaacaacacttggaagctgaacagcccatgaatcagaggtaaaagcagctttggtcagaccagaatagcacgaacaacatgagcaacggaaaaaaaaatcctccactgtatcaatgaattgtctgagcgcatggaccaactcagaatttacagaatctgagaaacttaaacagccattgaccactctttaaacggcacttattttacatgtcagaaggctctccctttgatagtttattaacaatcaaaatggtgtgagttgagaggaatccgtccaatgctcactgcagcagagatcggcaaaggaggaggggagcaccggcagccgcatatccggctgcatcggcggcagccttttgtgaggagaagaac

SEQ ID NO: 11787 - DNA, 820 bp, Setaria italica
  Peptide Sequence Number=SeqID_77761
gggcgcgccgaggctcgcccccgccgccgtcgccatccgcggctacgtccagctcatgcccttcttcggcggcgtccagcgcacgcggtcggaggcggagtgccccgacgacgcgttcctgaacagacccctcaacgaccggtactggcgcctgtcgctgccggagggcgccacggcggaccaccccgtcgccaacccgttcgggcccggcgcgccgccgctggagggcgtggagctcgcgccgacgctggtcgtggtcgggggacgcgacatcctccacgaccgcgccgtggactacgcggcgaggctgagggcgatggggaagcccgtggaggtgcgggacttcgaggggcagcagcatggcttcttcaccatcgacccctggtccgacgcctccgccgagctcatgcgcgtcatcaagcggttcgtcgactccgacggccggttcgactgaagcggcgccggttcaggactccccggagcatcattgtgtcgtctatttcccggggtttaatttataataattttatttgtatttcgataataggcgagctgaatccttgagaatcatggtgaaaatccaggcaacaacaacatgttgatcggagtcgagctctagtgttaatccacataaaccaaaatgggtggctagcttgcattttgtgagtcgaaatcaatatggtttgggtaaaaaaaccatgactttgtgacaatgtttttatttctacacttctctcgtctttttcactttcactccctgcagtgattttgggcctcgctttccactactaaaatattaaaatcccacggacaaattctt

SEQ ID NO: 11788 - DNA, 1274 bp, Setaria italica
  Peptide Sequence Number=SeqID_77762
ttttttttttcgtttaacttagtaaagcaatgtggcgttaaaaaccattatagggttattaccaaattacagcaatacttttacaagagatgtacagaaccttttcatgacctcaaattgtcatgcaggtggacaattaccactcgttgggtaactggttacagtgaccccatctgtgtagtatcacctaaaatattatacaccctagcttaaaattgccaaggctcatacttgagcttttgctattgccgttcaattttcaatggacgacaaaaggaaaagtacaggggtatgagaacatatcaattttcctaaaacgagaagaatgggcaccatctatgtatcgtgcttgagtatcaaaaggccctattcaagctaagtttcttgtggttgaacaaaacggtggttgcactgtatatttttttatgtgctgactttctcctggtcctcagaaaactgcaagtgttgtatcctgtatggttacaaatcatggaagagacgcctaatttgttcaacagtggcaggcatcagcgtgacaggacaccttttatgctgagagacggacttgaatatgcaactgtagcaaaaaacaaaaccagaaacagagagaacagaggggttggcgcgcttctggcagcacagggggcacagtgtcttgtcagatggcaagggaatcccatctttggcaacctttggagttggtggcggagggggcggtggatatacagtcggagctgacattctttcttcagcagattggtaccaccactccatcatcttgaaaaagaagactgcagcaattaaacctgtttgtgcataatctagagttgtgtacatacaactaaggaacacccgttgcacagccttgagccatggtggaccacgaagtctctcaagttcacgatttctaatccttgatatcctagaagatgaatccatcagctcttgtccagtagcacgacaaacgtgaagccctagcacatgcagtgctggactataaaaagcagtggcatccaacagatacagcagctggtatgcaaacgagaaaccttcattagttgcatgaatccatggatagcaaacacctatgagtgaggcaaagttcttcttaaaacgtgtcaagtttgacacttcatcggttgtagggtcattctgtgcttgagaagtctgctcctgatctaatacaaagccagcttcatcaaacctcacatcatcctgaccccaaagagttgcctgctaacctggcttccctttctttattgtatatgttcttc

SEQ ID NO: 11789 - DNA, 2020 bp, Setaria italica
  Peptide Sequence Number=SeqID_77763
gagcctacctaagctgcagcagcagcagtcttcactttctaggacaagcaccttaaaacaatcagcagtaccatcacgggattcctttcttaagcttgctgaacttgagaaaaaagatgtgctttcgtattgccatcctcctgttggcaatgaaagatatttctggtttagtgtgggaatcgatgcttctgttgttcatacagatttgaacgtgcctgtctatgattggagaatttctttcaattcaattcttagacttgaaaataagcttccgtatcaagctgaatatgctatttgggaggtttccactaaaggtaatatggttgaaaggcagcatggtatggtcgcatcaggtggaagtgtatttatctattcagcagatatacggaaacctatttacctcacattatttctccaaaatggttggattttagaaaaggatgctgtattgataatggatttgttgtccttggaacacgtttcttctttctggatggttcagaaacaaagccaaaggagactacgtgttagtgttgagcatgacctaggagcaagtgatgctgcaccaaagacactgagattatttgttccttactggataaaaaaccattcttcaattccactatcatatcgcattgtggaaggggaaaccacagaaagctcagatgcagactcacttagaccagactcgctaagtagagtggctaagtcttcaaaattttccctccaaatacttcctcaaagtcccttgtcagacgaggcacaatgtccagaaatatgcaagtacttgaagttattgaagattgtagcacaaactatgtgatgctatcgcctcaagattacttgaaccggtcttctggtatgcgctctgagtcaagagataacaatttcagcccagctagagttgcaatatctgtggctgttggtagttgcactcagtacagtataggagtgtctctttttgagcttgagaacaaggagcatgttgatctcaaagcatttgcttccgatggatcatattactggttctcagctcaattgaagatgacttcggatagaactaaggtggtaaattttctgccacgagcactattaataaatagaattgggagaagtatttttctatctgagtatcatgacgagactgaggagctcttacagccatatgaacctccaaaaagtatttcaatggcggtcagaatttggaagtgaacttttaaagttgcggctggagggatacaaatggagtacaccttttagcatcaatgctaatggagttatgtgtgtgctgatgaacagtgttacaggaaatgatcaagcttttgtgagggtaaatgttagaagcggagcaaaaagctcacgctatgaagttatatttcagcttgattgctggtccagtccatacagggtggagaatcgttccatgttcttgcctatacggtttcggcaggttggtggtgacgattactcgtggcgtagtcttcctccaaattcatcagcttctttcttctgggaagatctcagcagaaggcgtctattggaagtattggttgatggaactgaccctataaactccatgacatatgacattgatgttgttatggatcatcagccactaacgaattcaagtgctcttaagaaggctttgcgtgtcactgttttgaaggaggggaaattgcatgttgctcaaattagtgattggctacccgataacagaaatcggggacagataactgaaaggatattatcaccaatctttcagccatccgaggtcgactatgggcagtcatctccagatctggatagtgaatttcatgttacattggaactaacagagctgggcatttctgtaattgaccatatgcctgaggaagttctttacctctcagtgcagcaactattacttgcatactcatctggaatgggctccggagtaaatcggctcaaaatgcggatgcattggattcaagtagacaatcaattgccatttgttccgatgcctgtccttttctgtcctcag

SEQ ID NO: 11790 - DNA, 582 bp, Setaria italica
  Peptide Sequence Number=SeqID_77764
ttttttaggaagacaataccaatacaagaacagttatattaactgaatgcatctactacagctgggcaactgatgacaatctcacatcctcgagctcgaggttcgccaccacaggctacaagcttagagatcaaactgattccgaatcgaacaaaggttactgaacattacaggatgcgaaagaaaatttccctcgcaccaaagaactgagtcaagtaacagcctgaaagctaatgttaaggtttacatggcagattagtgcatagtacatggaagattgttacagcagattggttcctaaatatttgcatggagggcgatgattgttctacacttctactctccttaaaccttctgcagttaaatgtcggatacagaatacgctagctagtagactggttcatggcccctcatcgtggatggcctaatggctcaacggcagttctgaagagaagaatataggccttgtccactgagaagtataagaaacctcccaatgagtgtgtcacataggaaccaaagcttgttccgacaatgcaatgccaagcaggaccatatgctgtgtcaaattccttcttgagc

SEQ ID NO: 11791 - DNA, 248 bp, Setaria italica
  Peptide Sequence Number=SeqID_77765
tgtcctgagcttatgtgagagaactgagaagtagctgtggtaggatctatcatgctctgatttgatagcttttgaaatactaacaacttgcaaggttactatctccttatcctagtttcttctgaagcattgttttgggttcttgtgttgctatacattttcagttgagctttggcaattgtcttaatattttgtatttatggttgtggtgacagaggatcaaagattttcccatcctttgtcaagtt

SEQ ID NO: 11792 - DNA, 1796 bp, Setaria italica
  Peptide Sequence Number=SeqID_77766
ttttttttttaagttattagagcagaactaccatgtccacgttttgagatggagattgtgcacagcaaagtctcactgatcatgactacttgaagcaaaacaatcaccaggactacattttccatggatgcaaggtaacaactgtatatgctaaaatggaacgaaccgacaacagaataaacaccataacatgtacactgatgctgacctactacggctgcaacaacggcagcacaacacacctgtacacagcactagcatcagtctactcagacaaccgaaataatgggggcggaggacgcctgacgactcctctgtttcctctactacataaatggtgcaccatgcaaatgatctagtattacaggcaaaatgttacacggaaacgatggtacaggcagacttaatttggaatcatggccttggatccctctgcgctccgggtggagctgtaggcattggaaagttgaacgagcaataggttccattgacctggggcgcctccacgtatgggctcgggatatgaggctgattaggagtgaactgtggctccctatttggtgatgaatcaggggagctgccattatcctcgtccatgttgtctatgttccttacttgcgatgcttccccctcgctagggttcagcttaacccgctggaaaatttttcctaaagtttttaagcctttagcacgaaggcgcaattcctccttcctggcactactgtcttgaagcaccatttggcagacacgggatagggtggcttctatgtcagcaacgttaagcttccacaatgaatcaaccatgactttcttgtggttctccatgtacatttcgagttcttcctctgtgtacaggccctcagcactcatatacttccttaagtcctcttgcagctgcataagagctattgcacctgtggcagctgttacttgagatttaataaaatgccctttgtctctaaaccattcagctacaaatggaacccccaaaaatatcgccttctttcctagttcttttgcagcttgccttgaatatacatacccaatagtgttcaacataacaactccatatgctgcattgctaagtttggacacctcagcttcagcaagctggatgaattcctccttatttccttgaacataaatgtgtagccggtttttcaggatctctgcaagtttttcttcccgttccttttgaacagtctgcattctctcttgcagctttctaggatcaatatgttcatcttcaccaaaattatcaagtgaagccattgatgccatggccagttgaccaatgtaatcctcaaaaagctcactaccaaatagcattgcaaaaatcgctgctggatcaattattccttccgttgagatgccggatttcccatgcaagtcataagcttggcgttgtgtggggtcactgagcacttggtatgcttctcctagtgcctggaagttcgccgcagcatccggatcgttcgggttcttatccgggtggacctgcctcgccttgatgtagtacgccttcttgatctcggactcggtggcggacgggtcgacgcccagcacgtcgtagtagtccgtgtccttcaccatttttggctccccctactcaagctccgatctcttcctccgctcgcccccgaatcgggctccaggtggcgggcggatccgtccgcgtatctggcaggtggagaggtgacggggtgcgccggccggtgggaggcggcggcggcggtggggcgccgggggtcgggggagaaggcggctttggggttccggccacgcacaagcgcgtc

SEQ ID NO: 11793 - DNA, 314 bp, Setaria italica
  Peptide Sequence Number=SeqID_77767
acgaggaggatgccgcgcggcctgatgttctcggtgacccaccggcagacggcggcgacgtccccgacctcggtggagcccgtgagcgaggcccgccccgtggaccgcccggccccgcgcatgtcgaaggtgacggcggtgtacccccgccgcgcgacgccctccgccatcccccgcagcaggccctgcacgccaccgaggatggtgtaggggtgcacgagacaaccaaccgccacgtcccccgccgcctccggctcctccccggacgccgggggcctgaagacccgcacgctgagcttcgcgccgtcccccgt

SEQ ID NO: 11794 - DNA, 403 bp, Setaria italica
  Peptide Sequence Number=SeqID_77768
cgccgcgccgcccccgcccccgccaccgcctcccccaccgtcggcggccgcggggccgccgggcgccgcgtccaacaccacctccttccgcatcctgtgccccgaatgcaaggcctacggcttcccgtccggcttcatcgccaaggtccgcgacgacagcggcgcgctcgtcaccgtgcacccgcccttcgcgggcgactacgtccggatcatcgagacggtcgacggcgtgcggcgcgaggccgacggccgcccgcccatgtactccccggcgcaggaggcgctcctcatggtgcaccgccggatccttgagacggaagccgaggatggcgacgaggacggcgagtacgggcccagggggaaggatccgcgggacagggggaagaccacaacgcgcctcatc

SEQ ID NO: 11795 - DNA, 1270 bp, Setaria italica
  Peptide Sequence Number=SeqID_77769
tcctcccttctctcctctctctcctccccccaccgccccacgctccccctccgcctccgccgccgtcgccggcaagctccggagccgcgtggcctcctcgccgatgttggagctcaggtagaagttaataatggacgtgatggaggccgaagaaggtccttttctggctaatgatgccaagttgcacgcaggaatttgtagagcatttcatccagcggtatctaagctttccaccattttccctttcatcgaagcatcaagacccagaagcaagtctggtatacaggcattgtgttcactacatgtagctctagataaagccaaagggcttcttcaacattgtgcagatagcagcaggctctacttggccatcacttcggaaactgtgcttttgaagtttgagaaatctagaagccagcttcaggaaagtctaaggcgcgttgaaagcatagtaacggaagatatcagctgtaagattacagagattgttagcgagttagagggaattgtcttttcattggatcggtcagagaaggaagctggtgatgatgtgatcaatttgctccagagaaataataaaacaaatggttccagtgacagtggggagctggatgtcttccatatggctgctctaaaattgggaattacatcttctagggcagcactcactgagagaagagccctcaagaagctaattgagaaggctcgttctgatgaagacaagcggaaagagcttgttgtgtcatacttgtacaatctcatgaggaaatactcaaaattcttcagaagtgaggctggtgacgatacagattctcaaggatcgtctccctgctcacctacagtattaggcatggatgacatgtacgggccctacggcaatggccgagcattcagtagacagcttttgagcgttcaatcgttcaattcaaggtttggatctttcaattctcggctcggatcattcaactgcagacgtggcggcggtccaaggtctgaaaatatgtcgatccctcctgaagaacttaggtgccctatttccttacagctcatgtatgacccagtcatcatttcatctgggcagacttatgagcgtgtttgcattgagaaatggttcaatgatggtcacagcacatgtccaaaaactcagcagcaacttgcccacctgtcattgactccaaactactgtgtcaaggccctgatcgccagctggtgtgagcagaatgattttccagttcctgatggtccgaccggggttcttttgatgttaaag

SEQ ID NO: 11796 - DNA, 609 bp, Setaria italica
  Peptide Sequence Number=SeqID_77770
cggtaagagcataccgttttatgtgcaagtgtagtaacatggattagataagaattactaaagaccatacagaagatgaaaaatactcataacaagtgaacatgttattcacagaagtaattttatcctcgcatacaaggaggcagtttcttggttatagtatgctggtaacagtttattaatgcgcaaaggacaggtgcatagaagttcttggtaataggttagagcatgaactcctttgttaatatcccatcaacatggaagcttctcaggtcaaacagatttcataaaactagtttcaagacagatctaagaaaaccttgcctgtatgctcctaatcaaagacgaggataatcagaaagcaactttctgtggactaaaattttaggttttatcaaaaccaagtaaaagtctccaacagaacaagttcaacaaagtaattctctttccataaatgaaaattactttcatcaatttggtcacaacaaaaatattgtgtctatggaaaaactattgcaagttatctcaacttagttaagttgaggttggcttaaccgaaatctagtttcatgaaagctaaatacttatccatgagattgaaacaatacc

SEQ ID NO: 11797 - DNA, 1503 bp, Setaria italica
  Peptide Sequence Number=SeqID_77771
ttttttttggaaatgccgactggtggccttgtttccacacatcatatttttcagttcaaacaaatttttttctaagaagattacagcatgcaattgcatgaacccctgctactaggacgaaaatcaaataataagtatcctccaacttcaaagctaccaatttaaactaaattctttatcagaaagaacagcatggtaccatccagaacgaaacagaaatacaacaaataacatcaccaattaatttaacatacaaacataaaagaattgaagggctaaaggagcaaccatggcatccaatttcatgactcatgacttgtatagctggctccatgcgattgccttcggaatattgaaacagacaagctccttggcatcaaagcacccatccgtgctttccatcttgaaggcctgccgctgctcccacttgagatgtccggtcctatccgatcatccaaatcctctggtggcacatcactcccagcattgtccagaacgccactctcgtcaatgctccgagcatcctgcaactcaccagcaccgcctggagtgtcaaaattgacagcaagtgccccattcctgctagcccggagacgctcagcacactcagatgtcacccggcggcatttcttcaccttaaccttgacgaggcgtgggcagccttcggcaagcttatccatccccacatcagacacaggacatgccttgatgcacagcttacgcaaggcagcacatttagccgcaacacatgatatctctgcatctccaaatgtgtcggaaccgcacagcgcaagccgctccagggtgggacagttggcagcaatcaattcaagactggaatatgtcaaattcacaccaataaggaccaattcctgcaagctggcgcatttctgtgccacggcagcgagtccacggtcaccaatcctgttcgccttccatccatcaacatgcagcttgcggagacgtggtgacttggcagcaagcgcggctaacccaacatccgtgacctcaggtgcctttgcaaggtagaggacctcaagcccatacaaggcggctacaccacggtcgctgacctgcagcttctcgaggtggagctcggataggatggaatcctttgggacgtcctggagcacgaggtcccagtcgccggagcatcggataatcttgagggttttgaggttgggcgactgggtgattaaacaggagaagcactggccattgtagagatccttgagcgacaaggactggaggcgtggaccggagacggcaataggctccgagtcagcgaggccacggaggcgcttgatggagagctcctcgagctgtaggcagcagcggagaacagcctcgattcccttggccccgaaggcgcaggagccgacggagagcttgcggaggttggcggccgcggcggcgagcgcggcgaccccatcgtctgtgaccgcgcgcagggagcggagcttgaggcgccgcaggcccgggccgaggcggtcggcgacgagc

SEQ ID NO: 11798 - DNA, 585 bp, Setaria italica
  Peptide Sequence Number=SeqID_77772
ccatcatacagaaaagtgggatttggacaacctattgtccgtcatattgacatacttgcgaaagcacaacgccaactttcaacagtattttaatttggctgcaattggcacatatcttaattttgttaccactaagaagacacaagagggcatgggtcagtaaggggaaatatgggtatgtacacaaaggctacaaaaacttttttccatccaaattgctctttaattgaatagattaattcagtggagtagtctcaatcagctgacagaaattgtctataatgcttcggaaggcactgttatgacagtaaattatagaaccaataaaaaaggcttgcccaatgatgagaggactcacatagcatagacattactgatagctagatattattcatataccacaaagagtttgttaaaaatggaaagcatcacctaaatatattctaaattaaatcaaggagcaaccagggaattgactgaaaagtgaagtgagcgactgctgaaataaagtccaaggaaaagaaaagaagcgaacaaaagcatgcaccaaaggtaacaattgtgccatgctcattgtggtgactg

SEQ ID NO: 11799 - DNA, 497 bp, Setaria italica
  Peptide Sequence Number=SeqID_77773
tgtccgttcctaacgtacccttacctacccctaaagttggttgtctatttgggccttccccactcagtaggaacaaccccactactggaagttcttgagaaataattcttagtttgctcactagaaagccagatgttttcattaaactgatatgaagtactttctccagatggtcctcctgtagaacaatcgttccccatcctcttggaagcttcaccattcgtgtctgaaatagcaataatgttatgggcaatttcattccccaagttatcatgcaactttaagttctgcaattcagactcaattagctgttcctcgccaggttcatccattggagtcttccccttcctcatggaatgatcagcatttgatgagcttgtttcactcccactaacttgtaactcaaacatggtaaccgtttctcctcattcggtacccacaattcatcagacgtaaggagagcatgcaaagtttgtgaagaaagctttggtagcaca

SEQ ID NO: 11800 - DNA, 498 bp, Setaria italica
  Peptide Sequence Number=SeqID_77774
acagtaaatcactcaccttcctcaaggggtctaaaactcagccttgcgtcggtggagaaaaagtcctgtattgccagttaaatttgtacaaggcatattattatacttggacagtcaggcaagaggtaagcttgtgaggacatggtaataaaaagaataccaagggtggttcgtccatgaggatcctcatcattgaatgcctgaacactcacctgcaaatgggtataccacttaactagatttaggccattagaaggatgtatagatttaagacaacaaagccaaccttccacagagagcctgcataaaacacttcagtcgaatgtttcacctgaccatcagcaagtctgtgcacatcctcgaactcaactctgtgaacagcaataagctggtcaagccatgccagaaacaaggaatcaatgtgcacatctaattgtaagcctttactgcctaaagatgataaaaggtaaatagcagaacatttgttggctagcctta

SEQ ID NO: 11801 - DNA, 417 bp, Setaria italica
  Peptide Sequence Number=SeqID_77775
gcatgataacttggggaatgaaattgcccataacattattgctatttcagacacgaatggtgaagcttccaagaggatggggaacgattgttctacaggaggaccatctggagaaagtacttcatatcagtttaatgaaaacatctggctttctagtgagcaaactaagaattatttctcaagaacttccagtagtggggttgttcctactgagtggggaaggcccaatgcaccactttggggtggtagggtcgttggacggcggcaagttagatgcattaggggaggctcttgtttatctagtgatgaatataatgcttttatgaatatatttgagaggggttctcttctctactgcaacatgtcatttgatgcgctgttaagcgttcgaaagcaacttgaagaattcggattccc

SEQ ID NO: 11802 - DNA, 2101 bp, Setaria italica
  Peptide Sequence Number=SeqID_77776
atatattgagtttttttaatcagaacaatatatagagatattccaggtattaactacatacactgctgtcatgctgtgatatcaccagcattgcaggttattcttttctgcaacttgttgttttagacaagctggactactgccgctattcgcagggcgccagcctggagaagatctgcaagctcatcaaacaatatagcagtgcgccagccccagccctttggggcttttggtagcagcgtcccagcctgcttcaggcttccaaatatcatgacctctctctttgatggacagatgagctgataccgagcagtaaccttttcccgagggtcaacatacatgtggaccttcctcaaggggtctaaaaactcagccttgcgtcggtggagaaaaagtccaagggtgcgtcgtccatgaggatcctcatcattgaatgcctgaacactcaccttccacagagagcctgcataaaacacttcagtcgaatgtttcacctgaccatcagcaagtctgtgcacatcctcgaactcaactccaaagcggaaaggaggaaaatggctaagcggtgttttcatgtctaatgatatagttgcatcctctgcagtttcccaatccgacccaagttcatgctcctttgactcctgcatctggacagaagaaccacctggagtagaaacagatgcaacactgcgatatctcgtctgcacgctggtctcaaatatgctttcagcctgctgatgaacaacattgctttcttggctaagattaaccaatgcagttaggccatccgctgaaatatctccattgcggtcaattctaggttctgattcatcattggcaaattgctgaccatttcttgaaccaagcccataagggacacgggagaagacataacgtgtaggagcccaagctgcaccaggcacatttgagttccctctcccaataccagcaagtccatcgactgctcctcttacattaacacggacaggcccaagcccaccattgccatcaccctgggcatctgcgagatagatattacctatggtaccagaagcactgctccggtcattttcctgcctgtagtgtgtatgcgagctcacatatgcttgcttgcaagcacaagaactactcgtaaggcaacagtttctgcaagtatcagcaactattgcttgcactctgtgacacagaagcatctgtagccaaagaccatcattgacagctttgcaagggaatccgaattcttcaagttgctttcgaacgcttaacagcgcatcaaatgacatgttgcagtagagaagagaacccctctcaaatatattcataaaagcattatattcatcactagataaacaagagcctcccctaatgcatctaacttgccgccgtccaacgaccctaccaccccaaagtggtgcattgggccttccccactcagtaggaacaaccccactactggaagttcttgagaaataattcttagtttgctcactagaaagccagatgttttcattaaactgatatgaagtactttctccagatggtcctcctgtagaacaatcgttccccatcctcttggaagcttcaccattcgtgtctgaaatagcaataatgttatgggcaatttcattccccaagttatcatgcaactttaagttctgcaattcagactcaattagctgttcctcgccaggttcatccattggagtcttccccttcctcatggaatgatcagcatttgatgagcttgtttcattcccactaacttgtaactcaaacatggtaacctttgcaagtagagtaaataatgctagttcaaaccgtttctcctcattcggtacccacaattcatcagacgtaaggagagcatgcaaagtttgtgaagaaagctttggtagcacctctcgtagttccagtgtggcactttgacaaagataaccccagcaagcatttctgacacgttctccatgactaccataatcttgactttcagcaaacaactgatattgtaaaaaatttgatgtccaaagctcagaaataataaaatctgtacatattgtacataagtcctgaagatccagaaatgatgcggctgcgagcaccg

SEQ ID NO: 11803 - DNA, 1076 bp, Setaria italica
  misc_feature (27)..(27): n is a, c, g, or t
  Peptide Sequence Number=SeqID_77777
cccatcacctcgccccacttgctcggntaagcgtgctcctccctccctcctccagtcctcctcggcgcacgccttggccgcccgccacccgcaacaccagctgcccgtgctctaatctgatgtagaggtgcttcagctcccggtggtgggttggcctccaatcggatccttcaggaaaaccttgctaatggtagttcatccaaacaatccactggatcacaaaagggtgaagctagcatggaggagaagctcacctgcattaagaatcatctcgtaaaaatcaacatggatgggatccccattggaaggaaagtaaaccttgcagcctatgacagctacgagaggctatcattggctgtcaaagagcttttccaaggttttcttgcagctcaaaagaatctatctagtgctgagaatgcacagctaggagcagatgaaaaaatattttctcaattattgaacggatctggtgaatatactctagtttatgaagacaatgaaggagacaagatgctggtgggagacgtgccgtggaatgtatttgtctcaactgctaaaaggctgagggttttgaggagctcagagctttcccatggtttgattggagtggctcctagaagagtgccaaattgctgaaagccaacaatgacaattctatcatttgaaactagaggaaattgaagccggcccattccgatttcgggatgacacctattttttttccttgtagagactaacctaatgagatgaactagcatatttcagatgcatggaaaggcgccagctactttgtaaattataggctaccacgtaatttattgttgtaggtaatgtcctaatgcaattctacatggttttggcattggacttttaagacagtttgcagatgaaaggcttacccatgtaaaactccttgttgtgtgacagatttgtaatcagttcttctgtaacccaacaagcaaatctaatgtccagaccacaatcattagatgtgctgtagagaacagcaacatgctatcagctatccacattgttgacatggcatctacagagtgcaatttcatgtggaatttgcc

SEQ ID NO: 11804 - DNA, 260 bp, Setaria italica
  Peptide Sequence Number=SeqID_77778
gttcacggctctaccaaccaagcaagcccagcctccaaagaggagacaagcggcgaccagcttcttccccacaacagaactgcgcacgggctcgtaaatcgcctgggagttacctgcgccacaaaggttttcaccccctcgtgaaaccgcacgcgcgccgtggcagcagccatcggagcagagtattcctctgtttctccagacgccatgacgtcgtgcgcgggaggcgccacggtggcgtgcagggacgaggcgcggcg

SEQ ID NO: 11805 - DNA, 552 bp, Setaria italica
  Peptide Sequence Number=SeqID_77779
tgtttggttgctatctgtggcctgcttgtctctggctgccaagatggaggaaatctcagtacctcccctcctggagcttcagattgagagcacaaggtgcatttttgaaccgcggacggttcaaaggatggagctcttcgtcctagtcaagctagattggaggctccggtcacttacgccttttgcgttcattgatctctttgcttgcaaggcagattcggtcaggaaggtgcacaagaaatttggtcttgagagcatgccaaattactctcgatgcaatccatgaagccgagttcctgaaccactgccctgcatcaatggcggcagccgccgtgctgagcgcagtaactgagataccaggcatgccatgcatcagcatcagccctgaaacagcagcttcatggtgcactggcctgactgaggaagagattagaagttgctaccagctactgcagcagctagtaccaatggccaccacgacaaggaggaaaatacctgcatcggagctgctgaggtcaacgccttcgtcgtttattcagacaaaaaaggaac

SEQ ID NO: 11806 - DNA, 431 bp, Setaria italica
  Peptide Sequence Number=SeqID_77780
gcgaggccgacgaggagtggttggcgcggctgctgacctgcggcgggcccctgctggagggcgtcctgtaatcagcctaggcctagcagcagcagcagcacagagcaagtagccgtaggcgtgcgtagcagggagccagggggctccgctggcctgtgtggattaccctttttggtacgcttgtacagtgggaaccgggccgggtggtcgttttggcgcggctcgctccgtcgctttcggcccagtcgtacttcctccctcggcgccgtgtggcgtcgacgcgtcaggtcaggtcaggtctcggtctctcgtgcggtcatgggttgcagagatcggtagcgatcggtggtaatgctagctggtagtggtagagatgatggcctgttcttgtctctggttggtttggttctccgtcgtttgcaaactttaaa

SEQ ID NO: 11807 - DNA, 1289 bp, Setaria italica
  Peptide Sequence Number=SeqID_77781
tttttttgagtcgatggggtctgatgcttttgattctagtaagtagtaacataggtacatagcagaccattgtgagcaacacgacagcagcgccaattttttcgacgcaatttttgtccttacaatcttgcacaatccatcaatcatttctcgatttgcatttgcaaatccttcatacttgcactgaaatgttatatattttgaaaacacgttgtatagatacatatatactattgtgtatgcggtaaatatgctgctgttctgaagagatgaactcattcatgctcctcctgtacaccctacagcagcctgaaccatggccagtgggttccccttcagcacacccttgaggatcttcagcttccccggcgtgtatggtgggtacctggccttcgcctcgccgaggaagcttcggtccaggacggccttcttgtgggcgaaggcgtcaaagctgaaggtgccatggtaggagcccacgccgctctccccaactcctccgaacggcaggtgctgatttgtgaggtggatgctggtgtcgttgaataccatccctcctgcagaaacgtttctctcaaactggtgcttgagcttgctgtccttgctgaagaggtaggctgccagtggcttgctcatggagttgatcagagcaaagctctcatggatcttgtcaaccgtgattatgggaagcaagggcccgaaaacttcctccttcatgatcgccgaatcaagtggaggatccagcaacaatgttggggcgatcttgagctgctgctcatcactctggccaccgaagacgatcttgtcgtagaccatctcctcgtccatgagcgccttcaatctattgaaatggttggagttcacgatgcgcgacagatccgctgaccgcagcgggtccttaccgtagaacttctccaagactttgctcaaggaatccagcagcttaggtgcaaatgactttgtggttatgatgtaatccggtgagatgcaagcttggccattgttgcaaccccacttgccggcagcgatcctcttagcagtaacatggagatcgatgttggaatcgacaactacagggcattttccaccgagctccaagaccaccggtgtcagatgcttcgccgcaaaggacatcacgatgcgccctaccttgctgttacctgtgtagaagatcttgtcccacttctgttccagcagcgcggtggtctctgcgacgccacctcgacgaccttgatgcatgagctgtccacgtactgtggcagcaggtcggccagcagcgaagaggtggccgg

SEQ ID NO: 11808 - DNA, 451 bp, Setaria italica
  Peptide Sequence Number=SeqID_77782
aaacttcaaagaacaatgttggttcttaccatcatcaatatttgaacctttaagcttttgggatcagggctgagaaattcaggaagccacagttcaattgcttatttagggggtcatcgaaaactagaagcctgagtttgatgatgttaatctggaacttggatatagacttataacatgaatccaaatctgaccaacacaccctttgagtttttggtattttgtgttccccacacaatgagccaagtcattgggtacattttagacataggattatgccactttgcttgccaattttttgaacaagttagagccttaagaggttgggacaatgatgttgagataaggaagtaactggctgctgcagatacttttttgtaagtgaattgctgggcatgctcacatcttcatgactgaagcctcaagggatgttcatatagcattgatattg

SEQ ID NO: 11809 - DNA, 584 bp, Setaria italica
  Peptide Sequence Number=SeqID_77783
gagaaaattaagttgcttggtgaacaatatgatgctttaagacggacacgtggagatggaaactgctttatcgaagctttatgttttcctacttggaacacatcctagagacacaagacaaagctgaggttgatcgcatcatgataaaaattgcggaatgcaagaagacgctcttgtctctcggatatatcgagttcacttttgaagatttcttctctatattcgttgatctgctggaaagtgttctacagggacatgaagctcctataggttgtcatgttctttaggtttgtcacttctggtgaaattcaaaggaggtctgagttcttcgaaccattcatatctggcttgacaaattcgactgtggctcagttctgcaaggcttctgtggagcctatgggtgaggaaagtgatcatgtgcacataattgccctatcagatgcattaggtgtaccgatccgtgttatgtacctagaccgaagctcttgttgtatacttggcaatctgagcgtgaatcaccatgacttcatcccttcgaccaatgctgagggccccgatgctgcaacgacatccactcctgccac

SEQ ID NO: 11810 - DNA, 1409 bp, Setaria italica
  misc_feature (1361)..(1361): n is a, c, g, or t
  misc_feature (1364)..(1364): n is a, c, g, or t
  misc_feature (1366)..(1409): n is a, c, g, or t
  Peptide Sequence Number=SeqID_77784
ggcgtcgtcgtagtcggcccgcaagcgcaaggctgcggacggcggtgaggccgcacccgaagccgccaccaccgacgccaacgccgcgcccccgatccccgcggaggaggaggaggacgcggccatgggcgacgtcccccaggcgccgcacgccgcggatggaggagcggagggggagggccccccggcggtgccggaccctaaccctagcccgagcctcggcgggtgctcggaccccgtctcggtggagctctcgatgggcggggactactaccgcgcctgctgcggagagcccgacctcgacatccccgaggggcccaagctgccgtgcgttggtgacaaggaacctctctcctctttagcagctgagtttcagtctggcagccccattttacaggagaaaattaagttgcttggtgaacaatatgatgctttaagacggacacgtggagatggaaactgcttttatcgaagctttatgttttcctacttggaacacatcctagagacacaagacaaagctgaggttgatcgcatcatgataaaaattgcggaatgcaagaagacgctcttgtctctcggatatatcgagttcacttttgaagatttcttctctatattcgttgatctgctggaaagtgttctacagggacatgaagctcctatagggcctgaagagcttctagaaagaaccagggattcacaagtttctgattatgttgtcatgttctttaggtttgtcacttctggtgaaattcaaaggaggtctgagttcttcgaaccattcatatctggcttgacaaattcgactgtggctcagttctgcaaggcttctgtggagcctatgggtgaggaaagtgatcatgtgcacataattgccctatcagatgcattaggtgtaccgatccgtgttatgtacctagaccgaagctcttgtgatactggcaatctgagcgtgaatcaccatgacttcatcccttcgaccaatgctgagggccccgatgctgcaacgacatccactcctgccactgagaaaccctacatcactttgctctatcggcctggtcactatgatattctctacccaaagtgaattttgctcatggttagtttcatgaacttggttgagaaagcactgtttagaactctgtagtcatgtttcgcctgggtgctgccaaaggtggccttaaacaagggtacttgagttcttgggaaagctactagacttgcttgtttgctagtgccctcgctcgatttagtcgttttctacctggtgtaagtcttactctggtacaatgatttaacattgtgttgactgcagagttctgtggaaatggctaactgaatcagtttttcaaaanaanannnnnnnnnnnnnnnnnnnnnnnnnnnnnnnnnnnnnnnnnnnn

SEQ ID NO: 11811 - DNA, 666 bp, Setaria italica
  Peptide Sequence Number=SeqID_77785
aaacagcaatgttagttcagatgggccaccagctgtcatcagtatcagcggtaacagccatcagctgccgcagttggctgcagaactggttacttgatgtacaagccatcctagttaagcaacgaatagaacaaatatcccaggtaccagctaaaacaatgctagagagcaaaatctctctaatgtgatggtgaatcatcatagccactcaagagtagaacaaacaaaaacaaaagatcgtacggcaccatgaacaataagaagtatcttctcctgtatataaacaccaggaaaagcgtgacaggtactagacgtgtgcaggaagtgagctgagaggagactggagggtggagcggggctccaatatgccttccggaatacaaatagcttacattagggtttggggtgctctgtttacttgtattcggatctgacccagatacaaggaaaaaatagcacagcaggaagggaagagaaggggcgagcatgcctggtggatgctcatcgccagcaaaggcatgcatgtaagtgaaattcacactcttagaaaagaatcaactcttagaaaaaggaaccattcttctcctaatttgatgccgctgcccaaaaagggcatccatgcaagttcatggaagagcagtccctaatgccgagttctgacttcat

SEQ ID NO: 11812 - DNA, 310 bp, Setaria italica
  misc_feature (290)..(290): n is a, c, g, or t
  Peptide Sequence Number=SeqID_77786
cattcataggtccgggtaatgtcagatatggtcatcctaagtaaaatttcacttgcactgggtactttgaccatgagtcaagacagaaaacccacctcttatcgcataagctcttttgcatctcatctcattccatctcatatcctgatcccagtcgcactgcccatccaaatgccacaaaggtcgagaggatgaggagcggaagggctaggaacattcagagcaaagcagagcagtcagcagatcacagattcacagcacagcacacagaggcaacagcaggcaaaagngatcaccgctgtggcggccg

SEQ ID NO: 11813 - DNA, 1019 bp, Setaria italica
  Peptide Sequence Number=SeqID_77787
aagaaatgtcacaacttgccaatgaacgcaattggcaaggtaactgcatggagttatacaaatacagcaaaaagaaagtaagttggtaaataggttagacataaaacacaaagcaacaacatattcaacaaaaaaccgatcacataaaatactgtgggtagcagtaaaacatttgagtgggctcagcttcgcctttgctccatcatataactgcattccccaccttctcttaccaccctataaacctgttctgaaagaggagctgtcctggttatcacccatgaagaatggcatgaccatccaaggacaaagccattagcgcatagttgataaggtttccaagagagggaagattccagtttgatgcccagagcagcctgcctcaaaggcgcttatatcagacatcattgctgatcattgcccctcattggaattttatcttattcattcttgcaggaagccaaagctcactcgtgagattgaactgactggacatattagtcccaataatattgacccaggtcccaggttcgaatccagcaggaagggaagtgaagaacgaccctagagatcagtggcagcaacgcaagacagaatcgcggattggtagagcatcaactgcaggacttgcaaaagagcataaagaaataagtagataagagctcaaaggagtaaaaacaaaaggtttgaagcaatcaaatcaaatagcaaattaggtgcaatatcagctgcaacacactttaagctctctctttccctctccttaaatgaaacagcaatgtcagttcagacgggccaccagctgtcatcagtatcagcggtaacagccatcagctgccgcagttggctgtagaactggttactgatgtacaagccatcctagttaagcaacaaatagaacaaaaatcccaggtaccagctaaaacaatgctacagatgaatcatcatagccactcaagagtagaacaaacaaaaacgaagatcatacagcagtggaagtagagtgaacattgattgag

SEQ ID NO: 11814 - DNA, 564 bp, Setaria italica
  Peptide Sequence Number=SeqID_77788
ctcgcccccgccgcctctcgctcctcccacgcgccgccatgggctctgtagctggcgacgccgcccgcctagcgtacccgccggcccgccgcgacgattccgtcgtcgacgagtaccacggggttaagattcccgatccctatcgctggctggaggacccggactccgaggagacgaaggagttcgtggcaaagcaggcagagctggctgagacggtgcttgccgggtgccccgacagggagaacctgcgccgcgaggtcacgcggctgttcgaccacccgcgccacgccgcgccgttccgccgcgggaacaagtacttccacttccacaactccggcctccaggctcagagcgtactctacatgcaggatgatttggatggaaaggcagaggttcttttggatccaaatactctaagcaatgatgggacggttgctctttcaacatattcgattagtgaggatggaaactacattgcttacggattaagtgaaagtggtagtgattgggtctctattcatgtgatgagtgtttctaacaagcagtctatgcctgacaagttgt

SEQ ID NO: 11815 - DNA, 1404 bp, Setaria italica
  Peptide Sequence Number=SeqID_77789
ggatccaaaagggctcagcctccttccgcgtcaggtcagaagactcgagacttcgagggcgagggcgctgagctggtgaatcatccgggcggcgacgagatcgtggcagggctcccgttcggctcttccgtcttgctaacttcgcacgagtgcgagcgccgcctgtctcaccgtcaacaacgcagcagtcgcaagggctcgaatctacggcctcctgcccctccgcgcatcctccgccatcaaactcagaacgggttcggcaacgagattgaggaaattgtaactacaaggaaaggattcaaccctgttgagttgattcgatatttgtaagatctggactggtctatggtactttcacgacctaattgaaagctcacttgtaggttctatactatactttttagtggttctggctttcttgacacaatggtgaagctgacaatgatagcacgtgttactgatggccttccactggcagaagggttggatgatggacgagatcagaaggatgctgatttctacaagcagcaagctaaactcattttcaagaacttgtcgaaagggcatcatgaagcttcccggatgtcaattgagacagggacatactatttccactacatcattgaaggccgagtatgttatttgattatgtgtgaccgctcttatccaaaaaaacttgcattccagtacctagaagatctgaaaaatgaatttgagagggtcaacggaaatcaaatagaaactgccgccaggccgtatgcttttatcaagtttgatacattcatccagaagactaagaaactgtatttggatacaagaactcaaaggaacattgcaaaattgaatgatgagctctatgaggtgcatcaaattatgacccgcaatgttcaagaggtgcttggtgttggtgaaaagctagaccaggtcagtgaaatgtcaagaagattgacatctgacacgatagtatacgcaaataaggcaaaggacctcaatcggcaggccttgattcggaagtatgctcctgttgcgattgtgattggggtggtcttcattctcttttggctcaaaaacaagatatggtgaatgtgatatacaaaggaagccgtggcccatttgactggagaacagatggaaatccggttggtcgattctggatcaagagatgctttggtgacttgtatcccgtatctgcccattcaagcgagtacttcagctctcttttgctcctccctacaagatattctagtggattcgttgtagcatagaccttatgaaaaactcgaattttgtgcatccgtggaattggtaaatacaagctctgtagagttgactttacggcatggggattgtaattttctcgtgaaacttaatgcaaggattcggatactcacgcgacaaaaaaaa

SEQ ID NO: 11816 - DNA, 484 bp, Setaria italica
  Peptide Sequence Number=SeqID_77790
attgcactttaaagatactattgactttacttacatctcaacactagtgcagttgaattagtaagtcctccccttttccagtttcctcattttcttgtttgggccgctgtttgatatggttggaaaaaggaaaacatccaaaggctatgcctacataaactgtcaactccctttttgactgctcttgtaaaatgaagtgcagaatgcaaactacctttctaatctccatcgatatgagaaatgaagttctgggtcagcattatgcagtaacgtgtttatgtgtataattacctgcaatttggaccagagtagaatgacctgagggccaataaaggacaggtatatgtgcatgatttgcggggcatatggagttccaattcagagaagctgcgcagctgcctccttgtgtcctttaggacctcttgggtttgttaacaataactttagactagaataacaaaattaagtaaacttaaggttaaaa

SEQ ID NO: 11817 - DNA, 1689 bp, Setaria italica
  Peptide Sequence Number=SeqID_77791
gaacctgcataatgctgacccagaacttcatttctcatatcgatggagattagaaaggtagtttgcattctgcacttcattttacaagagcagtcaaaaagggagttgacagtttatgtaggcatagcctttggatgttttcctttttccaaccatatcaaacagcggcccaaacaagaaaatgaggaaactggaaaaggggaggacttactaattcaactgcactagtgttgagatgtaagtaagtcaatagtatctttaagtgcatggatgaaaatatccacttcctcttttgtattgtaaaagtgaagacttgcacgagcacttgcatcgataccaagggtcctatgcaaaatctgtgcacaatggtgccccgatcgaattgctacgttatgctgaagatcaagaattccagcaatatctgtaggatgaacattctcaacattgaaagagcataaaggagcacggtgatctgtttgggaaggtgccggaccgtatatccggacatttggaacagaaagtaggctttcatagagatacatcgccaactctttctcatattcatggatctgatccatgccaatgcatgataaatagtcaattgctgctccaaatcctatagcttctccaattgcaggagttccagcctcgaatctagagggaggctcagcatatgtggatttctcatagaacacatctgcaatcatttcgccaccacctaagaaaggctccatagatgacaacatttcaaatgtgccgtgcataaatccaacgcctgtagggccacacatcttatgtgatgatgctacaagaaagtcagcgccaagtttctgaacatcaactggcatatggggaacactttgacaagcatccacgagaaccttagctccaactctttttgaccatgttacaatctcctcaataggaagcattgaaccgagtacatttgagacatgatggacaacaaccatctttgtcttgtttgacagaagcccttttaactgctcaatgtccggaacctcttctttagtcaacccaacatactttaaagtggcaccagtcttctgggaaacaatttgccatggaacaatagaactatgatgctccgcaactgtaagaagaatctcatctccttgttttatgttagataggccccatgaataggctaccaaattgatagcttctgtagcattacgtgtgaaaattatctctctgctatcagctgcattgacaaaatttgcaacttttcttcttgcaccttcatatgcatcagtagcttttgcgctgagagcatgaataccacgatgaacattcgagttgtatgatcggtagtactcatctaatgttttcattacactaaaaggtttctgtgatgttgcaccattgtcgaagtaaactaatttggcaccatcaaattcctggtggaggatggggaagtcgacgcgggtaaggtgccccagcgaagcggccggctccgcctccctcgacgacgacgccacggctgctgcgtgtcggccccgcctgcaggaagagggtctgacgaagctgctaccgatagcggagccggggaagcagcagcggagcgccgccgccgccgccgccgccgccgccatgcgcaccgtggctgggctttggagcggtggcgccggcgtgtgttcgtctgggggctggaggagttgggagggcggc

SEQ ID NO: 11818 - DNA, 1126 bp, Setaria italica
  Peptide Sequence Number=SeqID_77792
attttcatccatgcacttaaagatactattgacttacttacatctcaacactagtgcagttgaattagtaagtcctccccttttccagtttcctcattttcttgtttgggccgctgtttgatatggttggaaaaaggaaaacatccaaaggctatgcctacataaactgtcaactccctttttgactgctcttgtaaaatgaagtgcagaatgcaaactacctttctaatctccatcgatatgagaaatgaagttctgggtcagcattatgcaggttctatttgcttgttggatgtggatctgtctcaactagttctagctaatgaacactctttctgtgatggtgttgataaatgatatgtggttaattacttctgcagtaacgtgtttatgtgtataattacctgcaatttggaccagagtagaatgacctgagggccaataaaggacaggtatatgtgcatgatttgcggggcatatggagttccaattcagagaagctgcgcagctgcctccttgtgtcctttaggacctctgggttgacatactttgctgatacaatgactggtaaaagataaaatgggcaagaacagtagtttcttttgcttggatctgctgttgatacccattatcagcgggtactagattggttccaatgccattgctgagcaaagcatggcagattaatactggatctgaatgactgatctcgatgtttccagattgtattgtacatactgttgctgaattgccaaattggagaccgcagatagattgtttgaagtttattatagtcatgctacatagattcaggttttctttacttaaatttgcatcagaagacagttaagtatgcttattgttattgtaactcagactcgatacagcaggcattgaatatgacgcactgcagcagcatctttctttcgcctgtattgccttgccttggatagaagacattctggaccgaaaaaaaaaaaaaaaaaaacaaaaaaaaaaaaacaaaaaaaaaaaaaacaaaaaaaaaaaaaacaaaaaaaaaaaaacaaaaaaaaaaaaacaaaaaaaaaaaacaaaaaaaaaaacaaaaaaaaaacaaaaaaaaacaaaaaaacaaaacaaaaag

SEQ ID NO: 11819 - DNA, 499 bp, Setaria italica
  Peptide Sequence Number=SeqID_77793
ttacttgatcagagctttatatcaggaattggcaactggattgcagatgaagtgctttatcaggcaaggattcatcctatgcaaactgcatcgaagatatcaaaagacaagtgtgctacactccttctgtgcattaaagaggttattgataagtccttagaagttggtgctgatagcagtcagtttccagaaaactggatatttcattctagggagaagaaacctggcaaagcctttgtggatgggaagaaaattgacttcattacagtaggtggtaggacttcagcgtatgtgccagagttacagaagctagatggggcggatgcggcaacaagcagatctaagagaagcgaagacaaggacattgatgatgatcaaaagtcgagaaaaggtataaatggctccaaaaaccaggaccaaaagggggaagaagttgaaagggtgggcaaaaggtctggtcagggcaaagctgctaatgctagtgatgatggcgatgagg

SEQ ID NO: 11820 - DNA, 642 bp, Setaria italica
  Peptide Sequence Number=SeqID_77794
ttaccggcaggcagaacattcaccacttccatggaccggcaatcgcgtagccacaacggtagatccttgaggatttcagcaactttcgcaggctccatgcccacgaggccgcaagctcgcgcggcgacacccgcgcaaccatgcgagatggcaatgattccaatggaatccggaccaggcttcatcccaggcatctggatccactcgacggcggtcccggtggccttggacagaaactccgtcaaagtctcctccgctatagacatcaacccggcagggctcgcgtcgcgcggctgagcctgcggttgcgccgccgccgccgcgacgttctgctggccgccgctggtgacgaccgactcgcagctcgtgtccgtcgtcgccaagcccgcgctctgcgtctgctggcggtagtagccgttctcgtagacgagctgcgagacctgcttctgcaggcggtcgttctcctccatgagcagcttgttcatggccgtcagcttccggttcagcgcctgcagccgcgacgactccttccgctgcttctcccggcacctgcggttctggaaccagactttgatctgcttggggtcgacgttggcgagcacggggcagtcgcggacgagctgctggcggcgcagcgagctc

SEQ ID NO: 11821 - DNA, 1128 bp, Setaria italica
  Peptide Sequence Number=SeqID_77795
aacagaatccatcctttgttctgacataatcacccgtgcaaaataccgtacagcactattttaggattctccaaccattttacattcgttttcaaaaagaaaaaaaaacattttacatggacgagacgaaggaccagttgacgaacatgaagcagatgcagtgcgcgccgctgtcgtcgtcgagcaccttccacgccagcgccttgtcgtacgacaccggccggccgaggcccgacacgcacagcccgccggggatgcacgcgaacccctgctccatcacgccggggagctccgcgcacaggttcttcctcccctggtcgtcgaacaccttctccagggtgatgtcttgcagcgccaccagcgtcgtctccagcatgtcgagccccgactggttcgcgaacgtgaacaccggcatggcctttaacgagcagcagagtatagcactggcatgattccaaagggctttcagcccagcttcacagccaccggcgtcagcagatttgatcagctcagccccaaaatgaaatctgtaactctggcaaatccatctggagagcgtggccgcctccggactagccgtcgcggcggcggcaggggcgtggccgacgccgacgccgacctgggggacgaggcgcgaggacgagagcgccagcgcgatcctctgaaccgacgcgatgatgctgcgcatgtactgcctcgccatggtcgccacgctctcttgcaggtggctctcgaacgcgaactggaacgcgatcgtcatgacggccttggagccggcgcatgcagcgttcccggagccgccgacgggcatcctgctccggggcgtcccgacctcgagggtggaggcgaggtccagcgtgcagttggggctagatgtgtcaagaggagagtcgatggggatgatgcggaaaccggatggcagcagtggggagtcatcgctgaatgatgcgtctatgggtgcaaagatgagctctgaacatgtgcctacggtgttctcgtctacaccattgtacatctgcaacaggaacagatcgcgatgcatcagtgcatcctggtaggtactggcatttcctaatttgatgacttccaggaattcttcagggtcaaatgtgtgggctaaaggaagta

SEQ ID NO: 11822 - DNA, 1545 bp, Setaria italica
  Peptide Sequence Number=SeqID_77796
aaaacccctagactccccggccgccgctctcgttcccctccctccagctcgcgccgtcctcccaagccccctcgcatcctcccgcctgcgcgccgccgccgagcaccgataaacgagcagccatggcgaatccagcggcgccgggaggaatgaagtcgttcctgcaggctgtgtctaaggtcaccgaggaggcgccgacgccgctgcgcgtcgtccagatggaaggcctggccgtactgaagatcattaagcactgtgaagagtttgcacctgctctggtcacaggtcaactgcttggtttggatgttggcagtgttctggaagtgaccaactgtttccccttccctatcagagaggatgatgatgaagcagatgctgatggtgcaaattaccagcttgagatgatgaggtgcttgagggaagttaatgttgacaataatactattggatggtatcagtcttgcttgcttggatcttttcaaactgtggaactgattgaaacatttatgaactaccaggagagtatcaggagatgtgtgtgcattgtctatgacccatctaggtctagtcaaggagtgctagctctcaaagccctgaaacttacagactcatttatggatctttaccgtaacaatggtttaactggagagaagttaagagagaagaaattgtcatgggttgatatttttgaggagataccgattaaagtttccaactcagcacttgtcagtgccttcatgaaggagctggaacctgagtcgcctgttactcagtgtgacttcgacagacttaaattgtcaactgctccctttatggaaaggaacttggaatttctaattgggtgcatggatgacctttcatcagagcagaacaagttccaatattattaccgcaacgtctcaagacagcagtcacagcaggcggcatggcttcaaaagagaaggcaagagaacatggcgagaaaagctgctggtgaggagccattgcctgaagaagatccatccaatcctatcttcaagcccgttcctgagccatcacgattggagggctatcttgttaccaatcagatctctagctactgcaaccatatcaacggggttgctggtcagaatttcaacaggctatacctgatgaaggccctgcatgaggactagaagactgggctatgagtggaagctgttgttagatttaactcgtgctactgcttaaaatcacaattttgcgatgcatctgacatgagcttgcctgtcttctacttctgcatgtttctatgagcgccagatggttaagcttccattgagatgcacttccgcaatgtgtctcggtattagttctgaaatgagcagattaattactatttgtcaatgtagtttgcattgcagtttcatcatcatcccttaatgcttcagtttagtttctgtaagtccttctgcaacttgagattttgtaccatgtttacttgttacaggcttacagcctttcaggggagtatgtttacgccccgtgagtgctcgcagtctgagtggctattagcgtgtgtaggcg

SEQ ID NO: 11823 - DNA, 339 bp, Setaria italica
  Peptide Sequence Number=SeqID_77797
ttttttttttaacaaaaagcagtctgcttgcttgctcctacatatgcacaactgcaaagaaaccaagcttccctttccatggatcagccggtttatggttccctctgctacctcgcactccgtccgtcctgacctcgcctactactctaatacagtcttccttagtactgtcgctgatcctgaggtcattcatcatcagacgaggagcagcaggtcctgcagcctctcggagaccctggcggcgtcgagcccgatccgcgggctgagcgcctgcgagtggacggtgtagaagattttgccccgagacggagaagctggcgctgacgacctcggcgccct

SEQ ID NO: 11824 - DNA, 688 bp, Setaria italica
  Peptide Sequence Number=SeqID_77798
cgattggctagaattcaattctgcaaccatcctcagacttcttctcaggagcttttgagccagaagagcaggaatttagaacagtagaagatggtagcaagtcaggctcccagagcacaacattatcaattgatttctttttcaagaaagaacacaaaagcttgttttcattaatcatgtcctgcaagaattcctgtttgaccagcagttctctttcttcttttcttcgatctctcaacctagaagttcgaattccagacaacacgctcggagttctggttataaaagatactgctagcaagtacaggagctgttggtgagagagcatcgggagataattcattacagcccttcgaacagcagcgtcttttgcaaactttaaccattggggagttgcaaagttggcagcctctccacaattaaatccatggctaaacccaatgtggtaggccctggggaacgtcacgacaaactctccaggatactgtactaatctacagcacggcacaccacgggccacgagaacatctggggacatcaatgttgttttctccccaagcactgccagcgatgcaaggcggtcagggttgcctccatatccatgcacacggataacttcctctagctctgaggctcggtccccagggactgcataccacgtcttgggtgcaccggtgtggaggaagtt

SEQ ID NO: 11825 - DNA, 669 bp, Setaria italica
  misc_feature (421)..(421): n is a, c, g, or t
  Peptide Sequence Number=SeqID_77799
tctattttgggtattgatgggtgctgtacttgttgcagcctttgagtcaactggagcacactttgcaactgcacgtctagcaggtgctacaccacctccaggtcatgtccttagtcgaagtgttggcttgcagggtattgggatgttcctggaggggatctttggtgctccagcaggttcatccgtatcagtgtaagtaatcttaacttttatcccctacctgtgtttttttaattgtagatcagattctagaacctgcaatttccaccatggttcccaaaaatgcacgtacaagttatatgcttgaacccagaacatgctaccccagaaggctcaaataagattcaatggattgtttttaagtacgtgatattattaggaacactttgctggataaatttctaccacattcaagtgattntttttaaaagagatgcttaaacgttactgcttgtgctaaaaaaatgtaggggaaacattggtctccttgggctgacgaaagttggaagtaggagagtgatccagatatcaactggatttatgatatttttctccatatttggtaaccttttgttcttgcatttggtttcctagaattaaaatgttaattttttttgctaaaattgtgaactaccattcttacagggaagtttggggccttctttgcat

SEQ ID NO: 11826 - DNA, 779 bp, Setaria italica
  Peptide Sequence Number=SeqID_77800
taaaaaattagttaaggggtaaaactaatttagggttacttaccctttagggctgacgaaagttggaagtaggagagtgatccagatatcaactggatttatgatatttttctccatatttgggaagtttggggccttctttgcatcaattccactgccaatctttgcagcaatttactgcatcttgtttggcatcgtagctgctgtgggagtctcattcatgcagtttgccaacaagaactcgatgaggaacatctacatcattggactctcgttgttccttggcatctcagtccctcagtacttcaatgaatatacttcttctgctggccgtggacctgcccgaacaaatgctggatgggtatttgaagcatctccttttacacctgttacatttacaatttttgtatacttgcatcacccatctaccatctgcatgtgttgtttcattttctgcatgctacattattgcgctgtaactggatgcttcagttatgcaggttgggtcttggaattctctatgcctgaattttgacatctaaatatatctttatgcagttcaacgatattttaaacaccgtgtttgcttctggcccaacggtggcgctgattgttgcatctgttctggacaacacattggaggctaggggcttcgacggcgaccggggtctcccatggttcatgccattcctgcgccgacacaaaggttactcggacccaagaaacgaggagttctacagtttcccaatcagggttcacgacttaatcccgagtccctt

SEQ ID NO: 11827 - DNA, 2184 bp, Setaria italica
  misc_feature (2178)..(2184): n is a, c, g, or t
  Peptide Sequence Number=SeqID_77801
tgaaaggtggagaagaagcgaaggggagaaaaggggaatagaaaggcgaggccttttactgattgcttcccgcacagctttcctcccctcgctcaaaaatctccctggattctctggaaagttcttgcttttcgagaggcgggagcgagggaccagcggcccgagcttctgaattctctggaggaggagtgggcgttcccgtgacgttgctgattcaatgggggagacgaaccagccgccgccgccgccggtggccgcgccgccgcccatgatgccgatgcagcccatgatggcaccggccgtcggcaccggcgccatccacccgccccatgagcagttccaccatctcgcctactgcgtccactccaatccgtcttgggttcaggtggcagcacttgcattccttcactatcttgtgatgttgggctctaccgttatgctcgcatcaactattgttcctgcaatgggtggtaacgctggggataaggctcgagttattcaatcgttcctctttatgagtggcatcaatacgctgctgcaaacacttgttggaacgagacttccaacaattatgaatgcttcctttgcatttgttgtcccagtgctatcaatagccagagagatggatccaaatgactttacaaataatcacctgagatttgtccacacaatgagaacaacacaaggagctctgattgttgcttccatcctcaacatgattcttgggttcagcacagtatggggggcatatgccaagaaattcagtcctgtaataatgacccctgttgtttgtgtcgttggtcttggactatttgaacttggttttccccaggtgggtaaatgtgtggagattgggctgccaatgctaattcttgcggtgattgtgcagcagtatgtgccacattatttcagtcatatccatgagcggatcaccttcttgtttgagaggtattctttgcttctttgtattggcattgtgtgggcctttgcagctatccttactgctgcgggtgcctacaaccatgtttcacttaagacgcagctgcactgccgcactgataagtctttcctgatgtcatctgcaccatggattaaaattccataccctttccaatggggtacgccaatcttcaccgctggtcattcatttgggatgatgggtgctgtacttgttgcagcctttgagtcaactggagcacactttgcaactgcacgtctagcaggtgctacaccacctccaggtcatgtccttagtcgaagtgttggcttgcagggtattgggatgttcctggaggggatctttggtgctccagcaggttcatccgtatcagtgggaaacattggtctccttgggctgacgaaagttggaagtaggagagtgatccagatatcaactggatttatgatatttttctccatatttgggaagtttggggccttctttgcatcaattccactgccaatctttgcagcaatttactgcatcttgtttggcatcgtagctgctgtgggagtctcattcatgcagtttgccaacaagaactcgatgaggaacatctacatcattggactctcgttgttccttggcatctcagtccctcagtacttcaatgaatatacttcttctgctggccgtggacctgcccgaacaaatgctggatggttcaacgatattttaaacaccgtgtttgcttctggcccaacggtggcgctgattgttgcatctgttctggacaacacattggaggctaggggcttcgacggcgaccggggtctcccatggttcatgccattcctgcgccgacacaaaggttactcggacccaagaaacgaggagttctacagtttcccaatcagggttcacgacttaatcccgagccgattcctctgactttctcatgagcgctgctgcgcatgtaaatctctttgttcttggtagtcttactcctgtgacctgtagcgtgattggttctctacattctagtgggatatgggtacaagaatgtttaggacatttgctttatttacccccttctgggctaagaaatggttacatgacaatgtagagcggtatgccctggcgtatggttttgggaaggattacagaagaatagcaccttacttgttgatgacttccagtaaaatgcattggtttattttgactcaaaaaaaaaaaannnnnnn

SEQ ID NO: 11828 - DNA, 477 bp, Setaria italica
  Peptide Sequence Number=SeqID_77802
tttggtctagttcttcttagttttttttttttagacgtgagtagtaatttgtttaccacattgatctcaatcagtgcacaacaaagaatcatctccatgttatatctactattaacctaccaggtactcttgtatacaccccatacatctgtagcacgagcattgacatcttcccttcctaacagtccatttcttttgaaccttgcgacctgacatgcatctggcggacccacctgtcattcggtcacaattaattcgttgaggaggcctcttcttgctgactcagcacgtgcatgtacgcgcgcgcacggcgccacgccgccgccaccgtcgtccggcggccggttactagcacttgtcgacgtccctccacttgaggtactcgactccggcgaggtagtgcgcgtacgcgccggcgacgacgaagaggtggaacagctggtggctgtgcccgacgaggtcgaacctcccgggcgc

SEQ ID NO: 11829 - DNA, 831 bp, Setaria italica
  misc_feature (1)..(25): n is a, c, g, or t
  Peptide Sequence Number=SeqID_77803
nnnnnnnnnnnnnnnnnnnnnnnnnttaaacgttaaactttaagttaacggttaactttaactttgcggctcttgtctcagctcctcgcaccaaccgcatccgctccgctccgctccgagagaggttgatcgagaagtggtggtggacatgggccagatccagtactccgagaagtactttgacgacacctacgagtacaggcacgtcgtcctcccgcccgaggtcgccaagcttctccccaagaaccgcctcctctccgagaacgagtggcgtgcgatcggcgttcagcagagccgcgggtgggtgcactacgcgatccaccggccggagccgcacatcatgctgttccgccgcccgctcaactaccagcagcagcaggaggcggctgccgcagcggcggcgcagatgctgcccaagtgagccctccggtgagggaggcggcgaccgtgggtttggagtgtttaaaccataagccccttttcctctctaaaaggggcgtcgctatgcttccgattaatttctcctcctgttggttggaatcaagtgactggtcttggtggtgtccactttgtgttcgttgaaatgcctatgaaggaactggcatgtactaggctgtgttatgatgagtactcttaattacactaccatgtgttgcgattctggtttacattcctgttcctgatggtgttattctggtttgtagtactgggctaattaatctgttatgtgatgatctggttgtgcttatgtttgtctatgaacttcggtgcttgtctagcagctaagagattgcaagatgattccttgtgtgctaacaaaaaaaaaaaaaa

SEQ ID NO: 11830 - DNA, 627 bp, Setaria italica
  Peptide Sequence Number=SeqID_77804
cgccggcgagagcgcgaacgcgcggttccgtcccacggaacaagcgcgttccagccgaggtccgccacccgcaccagccgcaccgcgccgtccccgagccactcgaccctgtgcacctccaccgcgcgcgcgtccccggcatagctgataccctcgtcgtcgacggcgaggcccgccatgtcgtcgtccgagttgtagaccacgtcgtcgtgcaccgagacgaggagcagctggccgccgcagtccacgaggtgcgtctcgacgacgcgcctcccgcagggagggaggagcttctcgtcgtccgagccgtcgccgtcgtccgcgccgtcggcgcgctcgagcgggatgacggcggtcgcgtccccaccgacgacctcgcagacgcagatctgggaccggaacgcgacgtagaaccgcccgttgtagtgctcgacgccggcgtagccctgcgcgcggaagtcgagccgcgcccacgccccggtggtggagctgtagtaggcgaggcaggtcgtcgggaacccgaccgccaccgccgcccactctgcagcggcggccgggtcggcggacagcacgacggtggtcacgtcgagccacctcttgaagaacgcgatgggcgggaggcggacg

SEQ ID NO: 11831 - DNA, 389 bp, Setaria italica
  Peptide Sequence Number=SeqID_77805
attgctggttgcggtgttggtgcgacatccatcgggtcagctttggcctcggcagctacatccatcgggtcagctttggcctcggcagcagcagctacatccatcgggtcagctctggcctcggcagcttcatactctgacaggaggtccatgaactcgttgagcaaccgctggactttccggtttgatgccatcgaaggaagtatgtcttccctgagaagtttgtgcttcttcattccaagaacatcaggatcccacactggatttttgggatccgtagatgatgcagaaccgagcatgcccattggagggcctaggaagctctcacaaacctcacgtagacgagattcatctgcttctcttgccagaaaccgaatgtaggacaggag

SEQ ID NO: 11832 - DNA, 1684 bp, Setaria italica
  Peptide Sequence Number=SeqID_77806
tttttttgtttttagctaaaaaccatcaaaaccatcaaggccgatattgcgttgcaaccaaaaggacatgagtttatccgtccttttacagattactgtaacacaataatcaccaggcgacctcgtttccttttctactgttacactcagcgttacatctaatgtcagtgtttgcccaaggtcgccatgtaaacaatctaccagttacatgcacagctaattgattaataaaagcacttctctaaagagacgctgtatcccgcagcgaactatcctatcatacttaccaatcgagaggtcagtaaagtctccagcaaccggactggagcatgccaggggcagcaacaactacgaggtcatcacctcgtcattggcttgtgctgcaggctgcatcaccttgtcacgggcttgtgctgcaggctgcatcaccttgtcgctggcttctgctgccggctgcatcaccttgtcgctggcttctattgtgggctgtatcaccttgttgctagcttctgttgtgcaatgcggtgtcggtgtgacgtccatcgggtcagctttggtctcagcagcttcatactctgacaagaggtccatgaactcgttgagcagccgctggactttccggttcgatgccatggaaggaagtatatcttccctaagaagtttgtgcttcttcatcccaagaatatcaggatcccacaccagatttttgggatccctagatgacacagaaccaaccatgcccaccggaggacctaggaagctctcacaaacttcacgtagacgagattcatctgcttccctagctaaaaaccgtacataagacaggaggcattggcggtactcctgtgctgatttcaaagccaaagaagctgccagctgggtctccaaatgggcacgggtctgcaacccatcatctgtaaccctgctccaaataggcttcctagccatgaacttgcctatatcaatctgcaacttgcctagctccccaccctgagtggaaccaaatgagctagcaaaatttgatgctggaaaacaatcatcagcgatccttagccagcacttcaggcccatgtcataaagaaaagcatgacggctggcaaggacgactaagggggaaccacatcttgagaatttagcagatatgacctttactgcaccagaatgatttcctgatggctcatctggagatgcaaccaatgaagccaaagagtcctgcaaaatgcagttcctgttatagaggtcccatatgtacattagacctcttctcgtgacaagaagcaatttccagcagtcgtcacaatctataaaaacggctgcggatcccatcatcatcgcaggcatcgctcgtcttccacatttcgtgtaaacctgcaggcaaccatcttcacagccaacggcccagaaatttgcattgcctgccaagacagtaacctttccagagatacgatccgaccaaagagtttctgtccctcttgtacaccttatctcagtttcttttgttgaaaaagcaccaccaacaccaatcatatcagctgcagcgcgttctacaggctttgcttcaaggcagactggcaacaaatcctcattgtctttcttatttgatacatggatagaaagcacagagcaggtcaaggagcctggaacaacagatccagtgtgttctactctgagccttccatcattt

SEQ ID NO: 11833 - DNA, 2132 bp, Setaria italica
  Peptide Sequence Number=SeqID_77807
tggttgtctttgtaaatttgtcttggtactaactagtaagttcccttttctttgtcttaaccgtatttgtcttttgctatctcagctttttggacaccaccaacaccaatcatatcagctgcagcgcgttctacaggctttgcttcaaggcagactggcaacaaatcctcattgtctttcttatttgatacatggatagaaagcacagagcaggtcaaggagcctggaacaacagatccagtgtgttctactctgagccttccatcatttcctgcaccggttgaagctttttgaataacaagactctcggtaatgttcgccctggctgtgacaccagagcggtccttaactccacagctattacagttaccgctaccgccataagatggtcttattccattcattcgctgatctaaggacgaaaaatccacaacctgattctgagaactgctgggtatcttatcctgattggaaggaaacccaacagcctctgggattattcttttccggccatcaggacgcctgtattctctctgcttcactggactagataaccgagcaactttatttatatcaccagcagcaggtcctgatgttttcttcccatcttctggtgaagcttcaggagccttctgactttgcacaacgggagctgggttaggcacatctgcagaaacttttgagggtgcttgaaatggctgggcaacggaagacccctttttgccagctgattgctttgctgatgcttcttctagcagcaattgtgctgggctttcagccagatttgattgacgtcctctgacatcaccatatctactcctcttcaattcatccagttcagaatcacttaacctgtatccaagctcctttgcttcaaagtgaaagttggcaaccgatccatccaaggagcatgcaaaaagtgaataaccatcagggctccaagataaatcaaccacactttgagagaaaaaatgcttagcaacaaataacggccgggcactcactgtcgtccaaacagtaatagttctgtcttgacttccaatagcaataacattatatggttgctgctcttttgttgatgtctttgatgctccattggcccatccaactggtgcagcctttgtgtcttgaccatttgaaaaattcttacggaacgttgagttattaaacttaaccacaacaacaggcgcattatgccctagaaagtcaaaagttgcagaccattcgcctctttcaagcacaggtgctgaatgcctaggtttctggaacccatgagtcgtagttatgaagtggccacaaggtgaccaagcaagtcgtctaaagaatgttgaaccaagagattttgcccaatggccttctgtcttgtgagcaagactccaatcacttgtgcgccatattataacagtcttatcatctgactggcttgcaataaaagaaccaataggatcccaggtaacccctttgaccaagctggaatgccctcgcaagacggcagtgcacatgccgttggtcatgttccatatgtgaacagtattgtccaagctgccgctagccaatgttgaatcatcaggggaccaactaagatctaccacgtccgcagtatgccctcttaaggtcataacgaccttccaattttctacatctgcaggttctccactaccaaactcagctgttccagaaccagcttttctctcatgaattaggataacctgatcatctgaacctgaagccagatagcgtccatgcctggcccatctcacgcagttcactgatccaaaatggtcacgcattgtagctagcaaactttggctggaatcattgttggcattgttcttttccacagatttcatgctccatattcgaaccttctggtcgccacctccggttgcgaagcggaggccgccggcctggatgtcgatggagaagatctgcaggccctcgtggcgaatccagcttggcttctccgtaatcatctcctcgtacctcctaggcagataagattacactcctcatccgtcacagccccaaaccgcgaggccatgctcaaaaccctgaaatccgcggcgaaaaccctagccggggacgactggtacagggcgcgaggggcaaagtcgggcaggcgagatagtata

SEQ ID NO: 11834 - DNA, 2461 bp, Setaria italica
  misc_feature (2394)..(2461): n is a, c, g, or t
  Peptide Sequence Number=SeqID_77808
gacgcgggagagggcggggagccgtggtgacgacggcggcgcgggcgcacatgaaggacccggcgcaccgcaccaaggtggtgctccggcgcctgccgccggcgatcgcgcagcaggccgtcgtggaccaggtcgacgcgcgcttcgccggccggtacgactgggcgtgcttccgccccggcaatgccagccaaaagaatcataggtattctagactataccttaacttcaagcgcccagaggatgttgttgagtttgctgaggtcttcaatgggcatgtttttgtgaatgaaaagggcgttcaattcaaagctcttgtcgaatatgcaccatcgcaacaggttccaaggtcaaatatcaagaaggatggccgtgaaggaactattatgaaagatccggaatacttggagtttcttgagcttatttcaaagcctactgagcatctgccaagtgctgaaattcagcttgaaaggaaagaagctgaaagggcagctgctggaaaggaggcccctgttgtgacagctcttatgatgtttgttcgtcagcaacgggcagctaagagtatggctcagagacctggaagtagagttagcagaaaagttgctggtgttgtgactagcagttccagtccttctaaaaggtcttctgagaagcgcaggtcctccgcgtatgttgtacgtgacagtgctaaggagaaaccaacttatatcatggtgccgaagagagaggagcatacacagagggaaaaggctgttgctggaagttcagatgccacaagtgggggaacatctggatctggtcaggctgttgaggctaaaagggacaaaattgtcattttgaaaggcagaggaagggttgattctaatatacctgatggcacaacacagcagtcatcaacccctgtgaagaatgtgccaccatcgagttctagacaagaccagcgactcgagggcagtggcagaattattaagactatactctcaaacaaggaagcccgcagttcgaatccatctcaacatgaacaggaaggtcacatgcttaacactgagagggataagcggccaccgcgggttctcaacccacgtactatagtgaaagatcagatagctgaaaatgctgagagaagccattttgatgagaagcctaatcatctccatggctctgctccagttggtgagaagattgaaaggcatgctagaaacagagataggcccgatcgtggtgtatgggctcctcgccgctatgacaagtctacatctggtggtggttcaaatgccttgtcatcagagttcccacaaatgccttcaaattctggagacaatttctcacaaatagcagatggtcatggagacagaaagacagacacaaggagtcatggtggtagccgtggcggtcctgttgaaaatgggcataggcatgccaaccgtcgtggtcctccacgtggtccgaaggaaactgaaacatctgctagcacgcctgatggaaagaattcaaagaggggctctgctagctatggtgctcatgagagacaagtatgggttcagaagtcaagttcaggctcttgagtttgtgcattgacgatactctcaccaaaacaggtattgcaagttgtggagaagtcttggattctgcagctcattcttctttattagctgttgatcctgtgaagtatgttaacaaaatgcccatcaatcaaatgctgccatgaagtgcaatctcagatttgtcaattgaagtctcagctgtagctgaaaaagggagcttgctgatttgattcacagaaatagtgaagtaacataacccagcatgtaggtagctctcgatcactttgggtgagatttgatttgggcccaaggttgctatttgtggagcaatgcatggagattaggttggcatcagtacctcactacctcgtgatagtggtcacatatttccaagacccctggaggctacacacaccctcatcaattcgtcagagatggatgtaaatatctctagagaaagaagaggtctggttctgattgctgtttacaggttagaggtgccgtgtatctacaaagagatataagagttatcagactacccggtttgctaaataaaggtgaatttagctagtagattttgagatcctgtattgcaactactgcaatcgtggttcgcctcatcggaaagttacccaagagtgcaaaagtgacatctcattttggtttatgtttccgactaaatgggatgtgaggttgttttgacgtctggtgtgtcttttgctgtcatgttccaccagatgacccggggttctgtcatgttaagaatgatatacttgtgtacagcatccaaggtgcttgctgtttttaatcttaagatgatgttgcctggttgaccttggtcttgttaaannnnnnnnnnnnnnnnnnnnnnnnnnnnnnnnnnnnnnnnnnnnnnnnnnnnnnnnnnnnnnnnnnnn

SEQ ID NO: 11835 - DNA, 991 bp, Setaria italica
  Peptide Sequence Number=SeqID_77809
gggttgcgttccggcgcgtgttcggcgacgcgacgctcagggacaccgtggcgccgctgctcgtgccgtgctacgacctcgccacggccgcgcccttcgtcttctcgcgcgccgacgccgtcgagggcgacgccttcgacttccgcctccgcgacgtctgctccgccacctgcgccgcgggcggcgagccagtcgccgtgaggtcggtggatggtaccacggccatcgccgcggcgtccgcgggggtggcggccatgggcaacccggccgcggcggcaatcacgcacgtgctccacaacaagcaggagttccccctcgccgccggcgtcgaggacctcctcgtcctctccatcggctccggcgcctccgttcccacctccgacgggtcgagaacgccgatgccgacacggtcgccgtcgccgcgggaggtggcgcgcgtcaccgccgagggcgtcgcggacatggtggacgagtcggtggccatggcgttcgggcacgcgtgcgggagcaactacgtgcgcatcaaggccagcaaggcgccgatggcactccaagccgagacggcggcggcggccgccggagcgatgctggcgcagcggaacgtggagtcggtcctcttccgcgggcggaggctgtcggagcggaccaacgccgagaaggtggacgcgctggcggcggagctggtgaaggagcaggagcggcggaggtgcagcccgctcccgaacgtggccatcaagcaggttgccacgccgcggctgtcgtcggcgaccaccgcgtcgtcgggcaccgcgacggcgaggaccgcctcgacgatgccgtcgccggcttcatgggattctcgccggtaggcaacagggccgtggcacgatgaggatgaggatctttgtgtacatgcaggtcaccgattaggcacttacattgctataagagagtgatgggtgtgttcttttgttgttttctgataacgaggccctgacatatgggatgccag

SEQ ID NO: 11836 - DNA, 795 bp, Setaria italica
  Peptide Sequence Number=SeqID_77810
aggatgatgaactgaacagagcaaatggggaggtgcctgctgaggaaatgctttctgatgactattacgagcaggacggagaggagcagattgaatcgttgcatcgtggcgggatgaagcagtcaagctgctccacttctggtggagcaacaaagtctgcttcacggaaaaagaagaagactacaaagtacaatgcttatgctgacgatgatgatgacgatgagtataatgatgataatgctgatgacgatggcgcagatgaagatgatcctgatgatgtggattttgagccagacagtgaaacggacaaggctgctgataaggataagtttatggatagtgagaattctgatggtgaagatgatgatgagcttgagctctcagaggatgaagatgatgattttgctgagaatcggaggcaacctaaacgactcaaggttgtagcaactaaaacttccaagggaagaaagttgcccatgcaggctcaacgaaggcgggggatgtctcacactgatgaagaatattcctcaggaaaagaatcagatgttcccagcgatactgattttgatcacagatcaaaaaaacctgacagggtgcatcagaaacctgtggcccgcagtgaggttgctccgatcaattctcataatgagcttcgaacttctggaaggaggaggacagtgaaaaagatctcatatgctgaaagtgaagaaagtgacgatagtgaggagaagtcaactaaacaacaaaagcaggaaccagaagaagaagatggaaaaacacaattagaaagagttc

SEQ ID NO: 11837 - DNA, 274 bp, Setaria italica
  Peptide Sequence Number=SeqID_77811
tcgtctagtgctcactcttgaagctagcagcttctgtgtgtgtgttccggcgatcgatgacggcggcggcgaagccggtgcggcggtacgcgctgctgctggcgctgtgggactcggactacgccaagaaggtgtacggcgggtactacaacgtcttcgtcgccgcgttcggcggcgacggcggcggcgagaggtgggactgcttccgcgtgatcgccggcgagttcccggcggcggaggacctgggctcgtacgacgggttcgtggtcagcgg

SEQ ID NO: 11838 - DNA, 246 bp, Setaria italica
  Peptide Sequence Number=SeqID_77812
cgcggtgcgcggtcgcgaaaccatggccgccaccgtccactgtgccagggcatttgttctgatgagctttgaatgtggtgctagcagttcttcaagaaaaacaatatcttgtcacaagtgttgtgcattggtgaagccaactctatcacagaaagaacttcggaaatcaaggcaaataattcaatatcgggagttagtattgcccaaatcatccctgaaaggactagcttgcgaacaattggccaa

SEQ ID NO: 11839 - DNA, 268 bp, Setaria italica
  Peptide Sequence Number=SeqID_77813
ttttgataaactagtgttttcacgtttctgaataaaaccctgataagataattaaatacaacggggtactgaaatatacacaactcatatttgttatttagtagaattacataaaaatggaacgacaacattacacgacaatactcctagcaattgcaatggcaaggaagaaacaatttatccaaaaaatggccaaagtaaaagcgaaacgaaaagaccgacaagacctgcaaaacaaaaaaaaagtatacaaaaagatggcatggat

SEQ ID NO: 11840 - DNA, 989 bp, Setaria italica
  Peptide Sequence Number=SeqID_77814
agttctctttaggtttttttttttggaacttagtatttttatttgaaatatacacaactcatatttgttatttagtagaattacataaaaatggaacgacaacattacacgacaatactcctagcaattgcaatggcaaggaagaaacaattcatccaaaaaatggccaaagtaaaagcgaaacgaaaagaccgacaagacctgcaaacaaaaaaaagtatacaaaaagatggcatggatgacgtcatggagacctcacactctcgtcgccgtcagcccgtcactacagcccccaccacacgccggccagcgcaagaagagccgccgcgaggccacccctcgtcaccctcgccgcggcgagcgacgcggtcgcgtccggtgacgcctcggccgcctcgggcgagtccgcaaccgatgccggcgtcttgcccttcttcttggccggcgcgagcggcgcgggcgcgggggccacggccgggccgaagagcttcgccggcagcagcaccttgttgacctggtagacgacgaggttgtcgccggagtagaggtcgttgtcgaccgtggcgttgacgacccccgtggagatgttcgcctgctggttgccatcggaggtgatgttgagcgggtactcccccggcgaggcgctgccggcctgcgtccggagcgggttgctgacggtgtcgaactgggacttggggatggcggtggagacgacgtggtactggaccagcgcgttcttctcctggtcggagagggagttgagcgtgccggaggggagggaggtgaaggcgttgtccgtgggcgcgaacaccgtcagcccgttgccgttgttctggagctggttgtcgatctgcgacgccatgcccgtggacttgagcagccggatgaaggtgttgaactgcccgcccttggcaagaatgctggtgatgttggtcgtcccggccaccggcgccggcgccgctggggtcgccggcgtcggcgtggccggt

SEQ ID NO: 11841 - DNA, 1248 bp, Setaria italica
  misc_feature (1)..(27): n is a, c, g, or t
  Peptide Sequence Number=SeqID_77815
nnnnnnnnnnnnnnnnnnnnnnnnnnnttttttttttttttttttaaggccgtatatgacactccgatttttgccgtgtgaaaaggccgtatgattggtctttaaatgccctgtgaaccatagtatgattggtctttacaaagttctatgataatattctgttacaacttacaaggctgggtttattcgtatctcactccctgcaagttgccccgtatcattttgctgcaatccaaggggcttattttctttgaaaatataggtcaagaacactgccaaagtgccaatagactacgaaaagataaagaaatgctatgcacaaacttctgcaaggggctctggtggtgatccgatggacttctccctgaaaggctgaaactcaccccgtgttccatgaaattgccaaggtagaatttccgacaatcctgggattggaaacggtccattcttgctctttatttgtaactctgttctatttcccgaatgttccttgtcatcggatgctcacttgtaaattccgacgaggaaaaggtcatatagaattgtggagtttccaggaatgttacaatctcctgagaagcagcctgctggttcaggcccgtacgccagagttgcaggtatcataagcttgcgcttcccaccaacaagcatgggcggcacaccaccacctccactgattccctgctcaagcccacggaggatcttgcctgcgccgatgcgcattgtcagtggcctgccgcgcttgtaggtgctgtcgaacaccgtaccatcgggaaatcttgcagtgtagtgcacgttgatgagctcgccgcgcggtggctgggcgccggtgccgacctcgacgtcgcagtaggcgagccccgacttgacgaggttgaggtcgcagagcttgtccccgaccgtcgcgtagtactcgatgcgcgtggccccggcgtccccggcggggcacagcagcgcggccgaggccaggaaccccgcgcccagcgccagcatccccctccttcccgccgacgccacctgaggcgccgcggcgtggcacgggggagatgaggaggtggacggtgaggaggaggaggcggcggagttgcagggcgcgacggagagcgccctgacggtgctgggcttggggagctgcggcgacgggattgtgctggacgccatgggggacagggagagggaggagacgggaggcgccatggctgctgctgcgcgtgctggctggctgcttgggtttatcctcaaactgtg

SEQ ID NO: 11842 - DNA, 614 bp, Setaria italica
  Peptide Sequence Number=SeqID_77816
gattgactgcagttgggaccaagaagatatgaccatattcaacaggatattcatttgcaatcaggagtagtccatccttaggtggtgatgccgaaggagcaacctcaggtctatccttctctccttgtgcaatgcacaaaagcaatccctcgtaactcttcatactatttggcttcaagcatctgaaagactcaaagaacttgtcgtattccttgggcgaaaacgaattccatttactgttcagctgaccaacaaaatttcttccaccttcgatgaccttaagttggcaagctgtaacatcatagtccaagtggcccttccaagcaaaattatcccactggcacaaagaaaaatcacaggttacatatggtgttatgagaattcacaaaatgcgccaactcttggatttacaaaacctgagaaagaaggattgtatcaagcaaacttggaccacactgttcagagcatacaaagcttttaaggttatcatttccatgttctacactgaaacaatatagatgtgtcttcacacctgaagatgcaaagaggagtttaggaattaggactaacatcagtacaaatgaaaactgaatatgtgacgcaaaataccagtg

SEQ ID NO: 11843 - DNA, 895 bp, Setaria italica
  Peptide Sequence Number=SeqID_77817
atgatgtggccagaacactgctactctgcaacatactggtaattcacatctggggtaggtagtgaggtggggaagatcatgcaaaaaggtgctttaactatcactacatgttaaaaaagcaacacaatgttgcatactacaaactgatgtgaacaaacagacaccatttaaggagttccctgagctcttaacaatggaagaaatgaataaagcttttatttggatgaccttaagttggcaagctgtaacatcatagtccaagtggcccttccaagcaaaattatcccactgagaaagaaggattgtatcaagcaaacttggaccacactgttcagagcatacaaagcttttaaggttatcatttccatgttctacactgaaacaatatagatgtgtcttcacaccttcaggttgatccagaggagagttcttgcgcagaagcgaatattcaccttctaccttggaggctgacaccatacttatgatgctttatatatgtataaatgtaacactagctgaatatctagttatctacaatcctaattcaggcttcagcagaaccaccaccagcaagatatgtcaaatcagaaggatgccctccagcagaggggagggcaccacgaccaccgtgaaaagaaggggatgcaagcagaaacttaggaaaacactgggcacattgtcttccccttcttggtgtagtccgggatcctatccttggagccgtggttgatcctctaaagccagccctattggaccagctatccacctttgcaagtccaacttggttcgtcttaaggagcttccaaaaggtgcttggatcgtaaaatgcagcaccgagaagcaaggccgtcggctgggcgcgtcccgtccaagagaggaggagatggtggggaag

SEQ ID NO: 11844 - DNA, 1207 bp, Setaria italica
  Peptide Sequence Number=SeqID_77818
agcaaactttattgatcaatcctgatgttcagacatagttccacaatgatcatatagacaaactgctaaacacaggtggttcagacacattgtttatcactgtagttacattttgcatgagctcacttaataagatcatcagcgatagcacaacagagatgcttcagatcttcaaaagcaccatcttggagtgatgctgaggccattctgttcgaaatttcagtctcagaagcattgtcaaattcagacctggtgtggtatacgaagtagccaccacactcccaggcaggcagagagcagccagcaaccagatttttaacctgtggaaacaagaaaacctttgtgccattgttggaaatcagcaggctgtatgcagcagtgttgtcatgcagagaaaaacatatctcactgacaacattgacaagtgcttttaggttgttgctggtgaacacaagagcttttagggggtagtcaaccgtttcagacacaataatgtccgatctggcttttccatcatgtactgcaacagtggaggcagactccactggtaaagggtttgcaaagtaacaggcctgaaaaaacatgcgatctgacattacagatgttccactatcaaagaaaaccctgaaggcagcattgtttacttcagaggcaatttttgtagccagtccaaacatccttttgtcccaatagcaagaaagttgattgactgcagttgggaccaagaagatatgaccatattcaacaggatattcatttgcaatcaggagtagtccatccttaggtggtgatgccgaaggagcaacctcaggtctatccttctctccttgtgcaatgcacaaaagcaatccctcgtaactcttcatactatttggcttcaagcatctgaaagactcaaagaacttgtcgtattccttgggcgaaaacgaattccatttactgttcagctgaccaacaaaatttcttccaccttcgatgaccttaagttggcaagctgtaacatcatagtccaagtggcccttccaagcaaaattatcccactgagaaagaaggattgtatcaagcaaacttggaccacactgttcagagcatacaaagcttttaaggttatcatttccatgttctacactgaaacaatatagatgtgtcttcacacctgcaggtgaatagtcgatttggggaattaggactaacaagatgttgtatt

SEQ ID NO: 11845 - DNA, 351 bp, Setaria italica
  misc_feature (337)..(337): n is a, c, g, or t
  Peptide Sequence Number=SeqID_77819
cgctgttaattgctgagcggtccgagctagtctaaaggctgaccacaatgatctaacatctctcttccagtgtagataacaatcttttctgatgatagcatactgcttggtgatggccattgattgttcatccataagtcaattctgagtgtatcttctttagttcctctgtcatgcgggtttatggtttcagctgaactgtgggtttatggttttggagcattgcgttgattcatcgcctgggagtatgttgtttgagttaagttacgggatttgtgtgtgatgtacaatgctgacttcctgtaagctcgtcttgtgtgttgccgaatagttcccnccgtgttgtgtgtg

SEQ ID NO: 11846 - DNA, 345 bp, Setaria italica
  Peptide Sequence Number=SeqID_77820
ttttttaggtttttaacttttttacgttttaaccccctttttagggtttacctttacgttccttaccgtttccggtacggagaacttcgagcggttcaaggagtccgaggtctaccactgccgctgggccatgctcgccgtgcccgggatcttggtgcctgaggcgctgggccttggcaactgggtgaaggcgcaggagtgggcggccgtccccggcgggcaggccacatacctgggcaacccggtgccgtggggcacgctgcccaccatccttgtgatgaatacgaaattacgtaggccatcgccttcgccgagcaccagcgcaccatggagaaggaccccgag

SEQ ID NO: 11847 - DNA, 1854 bp, Setaria italica
  Peptide Sequence Number=SeqID_77821
aacagccaaacaggtgacattcgcttctcccaaaagctgctacttggggaagcaagtggagattttccaggaatcgcttttggaaaagcaaaagctccccaaacagggcctaagcgtcccgctgtttgggaagtaataagatgaagggaacaaatgatttgctatcttaaaacctcatcacaaaatcaacaatgaatttatgctaaaaatacctttgtgacagaactcgtagggaaaaaataccggagcaaactgtaggtttcttttaggggagcaaactgtagttctttatcggttctgtaaaaacaaagaagagtatagaacaatataaatttacctcagtgctaactcagcttcttgctgaactttacgcaggcttacattcatatacagtccatttgttgtatggattgtagctccagtggtcatgttaatcttttgatctggcacaagctgaatatccatcttctgcaacacaatagcaagtgccactattgcttctaggagagcaaattgatctccaacacatttccgaggacctccactgaatgggataaacctgaaatcagtgtttgactcatttggaacaggtccctctaaatcaaatctctctggaatgaactcatctgctctatcccatacctcaggggacctgtgtatattgtacacagaaatcataatatcttgaccagccttaaccttgtagtttccaggaagcacatcatcaactattgcacgccgcaacagcacaggagggtgtggatatagccgcatagactcatttatacagcgcatcaagtacttcagctcctttacatcctcatatctggggagtctaccctgtagaacacgatcaacctcatcttgagctctccttagtgcagtcagatccttacttagaagatagattgtccatgtcagtacggagcctgttgtttcatgaccagcaactaacatcgataagagatcgtcacgtaactgcacactgcttacctcatctcggctagcaagtaggaagcgtagaatgctagggtccccctcgtttacatattcctcgccctcaatctgttcattttcagcctcgactatttctttacatttcataatcagctcttcaacagtgttccttatggtcttaactgcattctctgcttttatctgtcttggaattattttgcacagaaaatcaatcttccagtatggcaaaagatctgtagaacgaagctctgcttctttgagcgcagtataaacagcatcgatgacaggactatctgttgtgagggaatcaaaattgtagttgaacaatgacaaaccaatcacatccaatgtcaactgagaaaacctcgcttccatattgacaggttccccactcaaagcatatggctcaagtttctgtattaatctctcggtacatttgcaaaataccttttccaccatgatggacaaaaatcttttgtgcagggatggcacaacagctctgcgtctcacggtccatagcgcgccctccgcggtggcgaacccggacccaaagaggaattcggagacctcggcgacgagccccttctcgtagcgcgacccgtacccgcgaagcacgtgcttggcgacggcggggtcgctgacgatgacgaagtctcgcggccccgcggcgaggcggtacacgggcccttcctcgcggaaccatttgaagagcggcaggaagagcgcgccgccgaggaggtcctgcacgtcgtcgagcttagcggacgcgacggggatccccgagtcgtcggcgccggcgcggccaaccgcgcgcgagagcgacgtgagccagtccgggctcacccacggggtagccgtcgtgggctcgtccgcccc

SEQ ID NO: 11848 - DNA, 546 bp, Setaria italica
  misc_feature (521)..(521): n is a, c, g, or t
  Peptide Sequence Number=SeqID_77822
cgaacctgggaagatgaggccactaatggagatacagatacgcaccaaagagatgcatagatttgctgttggtggagacgcttctcactctctctacaaaggtggtcttactgatcctggagaggctaaacgactcaaggctattatgttggctgcagcagagttagcagctctgcgcctacgtgatctaccagatagtgatcgaggagttggcaattgcaagaacccggctttccgtcaacttgacaaaaatggggatgggagaatcagcatcgaggagctcactgaggtgatggaggatctaggtgctgggggtgaagatgcaacggagctcatgcatctccttgatgcaaacagtgatggctccttgagctctgatgaattcgagtcgttccagagacagattgaactgatgagaagcttggaggacgaggatgaccactacaggaagatactgaaggagaagctgcacactattgatagcgctggtctcatccatgtctaccgcaaggagctgggtnacaaattgcttgtgagctgatctgg

SEQ ID NO: 11849 - DNA, 858 bp, Setaria italica
  Peptide Sequence Number=SeqID_77823
gaccggacggctcggtcgtgtacgtctcgttcggtacactggcgcgtgtcacggcggcggagctgcgggaggcggcgcgcggcctgcagcaatccggaaggaatttttttggcatgagtgaatcggacacggagggatcacaatggattcccgaaggcttcgccgaactcatagataccgaagagcgcggcatcatcttccggggttgggctccacagatgctcatcctcaaccactccgcggtcggtgggttcgtgacacactgcgggtggaactcggtgctcgaggccgtgagcgcaggcgtgccgctggtgacgtggcctcgacacgctgaccagttctacaacgagatgctcatcttggatgtgctcaggataggagttggtgtcggtgcagggtgctacgcgtcgaagctggacgtccgtggtgaggtaatcagtggcgagaagatcgcggaaagcattaacaaagtgatgggtgatgacgaggaggccaggatgataaggaagaaggctatagagctatgtgggaaggccaggagcgcaacagagaagggcggctcttcgtacaacgatgtcgaacagttgattaaggagttgatggctcgtcggagctctgtaaatgtttgagaactaatctggtgctcagttggcttgttttgagttgatgcaggcgcgggaagtttgacgttttacgtatgacctcataggaacttttttcacgtttttcgataatctataattgtttgtaatatggaatgtttgtaattgtgggagcctattgtagatggaatgatattctttgaccgttaaaaaaaaaaaccgttaaaaaagagactagccaaggcacacaggggat

SEQ ID NO: 11850 - DNA, 240 bp, Setaria italica
  Peptide Sequence Number=SeqID_77824
ccacaatggagaatgcacgtgcgtgaagaaatggatactcatgcacccctgttaccataatgtcagttagcatttgctcaagtaaatcccgcacattgtattttgcgaaaccagaatcctaaacagcagaaagcacgtaataaataagagaagcaagccgttagtttagtcatttcaaaaggagcataaattgcaatcgaggactctctacatcacctgctagagcaataagccgcttca

SEQ ID NO: 11851 - DNA, 625 bp, Setaria italica
  Peptide Sequence Number=SeqID_77825
gtgttgagcccaaacatctagtatgataggggaaatgatgggctcaattaaagttgattgttctccaccagatttgatggctgattggagggtttctagaacaagatgcagtgtttcatcagatgcctgccgcagaagatcaacaagagatgagagtatgcccataacattgggctgaatcaaatcctgattagattccggtaaaagttgggccagtgccctgcaagcgccaactttaactgggggtggcacatctgaggcaatcgcacgagcagcatagcatagatattgttcactgacttccttacttatcacagaagaaaacttagccacaatggagaatgcacgtgcgtgaagaaatggatactcatgcacccctgttaccataatgtcagttagcatttgctcaagtaaatcccgcacattgtattttgcgaaaccagaatcctgtgcttcacacaactgttctgacagtgaacctagagcaaaaagtgatgcttcatgtagcctccaccagtcagcagaacccgcttgtttcaattcttgagattcatgaaaacgcattttgaagcttccaaaaattgagttgattccataatcttcaaaagcagttactatctcttcc

SEQ ID NO: 11852 - DNA, 440 bp, Setaria italica
  Peptide Sequence Number=SeqID_77826
gaccgcgtcatccgcaaccccaaggccgccggccgcgccgtcgtcggcatgcgcaagaccctcgtcttctaccgcggccgcgcccccaacggcatcaagaccagctgggtcatgcacgagttccgcatggagaatccccacaccccacccaaggaggattgggttctgtgcagagttttctacaagaagaaggccgacgcgatggattacgccatggacaacgagcgagacgtcgccatgcctcacggcgctgatcatccgggctactcgcctccgttccccgccctcggcagcggccactaccatctgccaccgccgtcttcagaccaccacggcgggggcggcgggggcgccggggccggctccctcaacgacttccccgccatggccctgctgcatcatcagcacagcagcatattcgacttgcacggccagcccca

SEQ ID NO: 11853 - DNA, 1392 bp, Setaria italica
  Peptide Sequence Number=SeqID_77827
gtattctatgcccttgaaacagaaaccaattggaattattgcactgctggatgaagcttgcatgtttccaaaatctactcatgagacctttgcaacaaagatgttcagaagcttctcttcccatcctaggcttgataagacaaaattctcagaaacagattttaccatctcacactatgctgggaaggttacgtatcaaacagattcttttctggaaaagaatcgagattatattgttgcagagcactgcaatcttctatcatcttcaaggtgccaatttgtttctggactttttacttcgttgccggaagaatctataagatcctcgtacaagttttcgtcagttgcttccagatttaagctacaactgcaggccctcatggaaaccctaaactcgacggaacctcactatgtacgctgtgtgaagcctaactctgccaatcgacctcagctttttgaaaatcaaagcgttttgcatcaactgcgttgtggaggtgtcttagaagctgtccgtattagtcttgctggctatcctaccagaaggacttatgccgaatttgttgatcggtttgctgtcctagttccagaattgatgattggaagttacgatgaaagaacgctgacaaagggaattctcgaaaagatgaagcttgataattttcaacttggtagaacaaaggtattccttagggctggtcaaattgccatattagatatgcgtcgtgctgaggttttggacaacgctgcgcggcacattcaaggccgcttcagaacgtttatcacacgcaaagaatttgtgaaaacaagggaggcttcaatttctgtacaagcatattgcagaggctgtttggcaaggaagatgtatgcgatcagacgagaaacagcggcagctgtaattgttcagaagtatgtccgaagatggctgctacgtcgagctcacctgcaatcatgtttggcagctctgcttattcagtcttatgttcgagggtttatcgctcgccgctatttctcagccattagggagcataaggctgctacagtgatacagtctacatggagaaggcggaaggttgtaatgcttttccagcattacaggcaagccactgtggcaattcagtgtgcttggagacagaagcttgcaagaagggagctaaggagacttaaaatggctgcaaatgaagctggtgcattgcgtgaggcaaagaataagcttgagaaaaagatggacgatcttgctttaagacttacccttgaaaggagactgcgggctgccagtgaagagtcaaagtcatctgaaatattgaagcgtgacaaaataattgaatcattaagcgcagaatgtgctgctgcaaagtcagatgctcaaaaaagaacatggcaaaaaatttgttg

SEQ ID NO: 11854 - DNA, 275 bp, Setaria italica
  Peptide Sequence Number=SeqID_77828
gggggtcggcattccccgcccttcccccgcccgcccacgccgccgccatccgcgccgtggaaggagaacggggcctgcccgttcccgttcccgtcgatcttcacgacgacctcctccagcgcccctgaccccggccgcgacgaggacttgccggacccttgcgaccgcaggctgctcttgcgccgccccgcctggtccatcgccgcgccgccggacacaccgaacactctcccaagatagacgggcaccaccgcaccacagctactccacgctcg

SEQ ID NO: 11855 - DNA, 367 bp, Setaria italica
  Peptide Sequence Number=SeqID_77829
gtgtacttcaggaggctggggaggcaccgctagtgcttgcaactggagagcagttgcttcaggaccgtccacctaagcgtttcaagcaggatgtggtcctagcaatggcattggcttatgtggacctatcaagggacgcaatggctgcaagccctccagatgtaatccactgctgtgaggtgctcgagagggcactcaagctcctgcaggaggatggtgcaagcaatctcgcacctgatctgctttcacaaattgatgaaactttggaagagattacacctcgctgtgtgctggagctacttgctcttcctattgatgaaaaacataaaaataacgccaagaaggtctgcaaggtgcaaagaaacta

SEQ ID NO: 11856 - DNA, 925 bp, Setaria italica
  Peptide Sequence Number=SeqID_77830
ccaaatgggtacccattggatggaccaggatcgctgaactggtccagagggttcaatcagactccagctgggagaatgagttgacggagatcagtgatagtgaggacgattacaccgtggctgatcttgcagctccatactggcagcgtcctgtggggcctacgtggtggtgccatgtcactgcaggtcatccctttatcgatgcatggttgaatagtgctcactggatgcatcctgccatcagaactgcgctaagagatgagagcaaactgataagtgaccggatgaagtacctcctctacgaggttccagtaagagttgcaggaggactgttatttgagcttcttggtcagtcggtcggagatccaaatcatgaggaggaagatataccaattgtgcttcggtcttggcaagcacaaaattttcttgtaacagcaatgcatgtcaaaggtccttcatccaatataaatgtgttaggagtgactgaagtgcaggagttgcttcttgctggtggaagccaaacacctagatcagtgcacgaagtaattgcacatttggtcagccgtctttcacgttgggatgacagattattccggaaatatatctttggggaggcagatgaaattgaattgaaatttgtgaataggagaaatcgtgaagacctgaatcttctcagcataatactggatcaggaaatcagaaggttagcaacacaggtaatcagggtgaaatggtcacttcatgcaagggaagagatcttacatgagcttgtcagacatttgaggggtaataccacaagagttatcttggatagcgttagaaagtgtacaaggaacatgttggaagaacaggaagctgtgcgtggacgcttgttcactattcaggatgttatgcaaagcactgtccgtgcatggttacaggatag

SEQ ID NO: 11857 - DNA, 1368 bp, Setaria italica
  Peptide Sequence Number=SeqID_77831
ttttttttttttttaaccttaaggagacaggttctcaggatagcgaattagtaaatgttctcaacgaaaccaacagagtataaccacctaaggtacgcttcagacattcattacatgcagaggagcctgctacaaaaaattacatgccatctttaccgaatagcatctctcccatgcgcttcactgcctttttatgctcttcattctgaaaatcgttgaaccgctgagtgtcagccatcaatagctcggtgtacttctcatagagtgttgtttcttttttgtccttcgcttcctgctgctttagtcttgctaactcaagctttcttttgagagacggagttgtacctctgacatcttctcacgatccttctgaagcatgttctgcagatccattgcacgtttaatgtcttcctgcacctctgaggaaggaattgatgcgttccctttacgtttcctcttggactttgccatcttggaaccttgttgacgtgtttctttttcaggagcactatttctcacagtgcttgcattgcaaccttgtggatgtctttccttttcaggcatattgtccctaactgcattctccttgtgaaattcattgaatcttgaagtgtcgggcatcagtttctcctttccatgctgaaactcatgtatccttgaagtgtctgccatcaaaggattcttctcaaacatgttttgaggatccactgagcttcgaatatcttgttgcaactctaatggaggagaggcaaccttgcattcaccttcccatttcttttttgcaggcatgctttcttgttcatccatttctttttcagatgtatcactggcatcctcagaggatgatgtgccgtccccagattcagacaatttggtacccttggagtataatgaagagatataatttttccacttgggttggtcccagacagctttccaaagatggctcaaagtgaaacgatgttttgcttcctcaaggtacattgcccttgcttcctcatcatactttgaccatgttttgtccatctgtttcaatttgccagactgcagactggaatatttctcctcaactcggcaccaacagtcatagaagtgggaagttttcttgttaatcttatgccagtggagtttcaattgattccgtgcccttctccgatcttttggagtgctgctattgtacagcttagcaacatttccccaatgtgcatcattcttcttggaaccatttggcttgcaagtattcaaccaagcatgaatcagtcttaagtcctccacttctgaccagttcagtctcctagcagttctttcaggttcagcattctcatcattgtctacactaacagtgtcttgaacatctggaacagttac

SEQ ID NO: 11858 - DNA, 530 bp, Setaria italica
  Peptide Sequence Number=SeqID_77832
tttttttaagaaaatgaaatcaggagtgacctgctagttccacatcctgcttaatttgcgttcttccatttcttacaagtgattcttctaaatcatcagattaaagaaaaaacactagagcaaagaaaaccttcatacattgcaagaactacagcccatatgatcgccagtaaaaattattcttacaaggagcatgcataagtacactgggaaacacccgtgggaacgctggcacgatcgggtcggctccgtcgtcgccctacttaccggagaagaagctcgccgtcgagttgtaatgcagatcacgagaaggcagcccacacgcccgccagcgcggcaagcgcaccgactaccgcgagtgggacggcgcggctcggcgcggcggacggcatgaacccggggtcctgcgggtacagcgggcccttgcccggcggcgtgctcccgatctggatgtacgcgccgggcggcggcgggcagtacgaccccgggtaggtcgccggcggcggggggctgtagtagtagtacggcgg

SEQ ID NO: 11859 - DNA, 470 bp, Setaria italica
  Peptide Sequence Number=SeqID_77833
ggttgctgtctatgtggaagtctctgaatgaaactaatccggcactcttacctagagtatctgatatcaatgatcctaatttgagtactttgggggatccaaaagttcatgtcatttattactcttccaatgaggttccacaagattctatactttcagaacccaataagataataaatagcgcaaggtcaatgtcccctgcgctacagttccatgatgatggagggccaccttacatgcttcaaatggtaacaaatcaacgtctgactaaggagggttctgacagagatgttcgccactttgaattggaagatccatcttctgccatcagttataaaactggcgatgcgctagaaatcctaccaagtcaaaatccatcagctgttgatgccttcattgaacgctgtaatttggatccagattgttacataacgattcaagcaaaaagtggggataaaatttcctaaggg

SEQ ID NO: 11860 - DNA, 266 bp, Setaria italica
  Peptide Sequence Number=SeqID_77834
cgccgacacgctcgcactcgccgcgcgagattcatatatccgacgaaagggcccttcatcccgctcccgactggccggagggacggcaacaggtcggtggccgcggacgtggccctcaactcgccgccccctggcgctaccatcgccgacatcatcgccctctttgccaacaagttcaacctcaccgcaaaggacgtcgccgtcctctctggtacgctatatagcttcttcttcttcttcttccagcagtatcggacccaaagttt

SEQ ID NO: 11861 - DNA, 1391 bp, Setaria italica
  Peptide Sequence Number=SeqID_77835
tatcgtcagtcgtcttgccaagccatccaacaggaagagagggtgtgtgtgtgtgtgtgtatacagtacacgatggccgccgccgccgccgccgcgagatcaccgctgctcttcctgatggtgatgctgatagcagcgatgatgcccccgccggcggcggaggcccacgtgcagatcggcgcgtacaacaagacgtgcccgcaggcggaggaggtggtgctcaaggagatgacggccatcgtcgccaagtcgcccgagctcgccggcgccgtgctccgcctcttctccgtggactgcttcgtcggcggctgcgaggcgtccatcctgctggactccaccgccaacaacaccgccgagaaggacgcgccgctcaacaggggcgtccgcggctacgaggtcgtggacgccatcaaggccaagctcgacgcggcatgccccggcgtcgtctcctgcgccgacacgctcgcactcgccgcgcgagactccataaggctgacgaaagggcccttcatcccgctcccgactggccggagggacggcaacaggtcggtggccgcggacgtggccctcaactcgccgccccctggcgctaccatcgccgacatcatcgccctctttgccaacaagttcaacctcaccgcaaaggacgtcgccgtcctctctggcgcgcacacgatcggcaaggcgcggtgctcgacggtgtcgccgcggctgtacaacttcggcgggcagaacggctcctccgaccccaccctcgacgccaactacacggacatccttcgcggccagtgcaagcccggcgacatcgccaccctcgtcgacctcgaccccaccacgcccgccgtcttcgacgccgactactacaccctcgtcgccggcaagaggggcctcctctccaccgacgccgcgctgctcctcgaccccaccaccagcgcctacgtcgccggccaggccaacgccacgtcctccgaccagttcttcgccgacttcgccacgtccttcgtcgccatgagcaagctcggcgcgctcacgcatcacaagggcgagatcagacaggtctgctccaaggtgaacccgccctcatcgcccagctccaacgccgccgccaggagctaccacctgaccgccaccgccggtttggcaatcgctactctggccgtggctctcgtgctctgactctgacacgctactccgccattcatgccaaaagccagcagattggttgctgttcatatgatttgttgtctcgatttggatgttttcctttgatttgcgcttgcatgatttggtttccatgatcttgcatggaatttgtttgcgacgtacgtttctcatttgaattgtattgtgaatcctgagaataaatgaacaatcatcgatctaaaaaaaaa

SEQ ID NO: 11862 - DNA, 406 bp, Setaria italica
  Peptide Sequence Number=SeqID_77836
ctgcggcggtggcgacctccgcgccctcatggcctcctaggccagcgcccggcggtacagcttctcctcggcgtccttgaggaactggaacttgggcggcggcgacactaccgccggggccgggcccgggctcgtcgccggggactcgaacagcgggttgtaggagttgtccagcaccggcgacggcgaggcccgcggcgtgaggaacggcggcgtctcggagcaatgcagcagctcgccgaggctgcggctccggctgtagccgtcgtcggactcgaggtcctcccgggtctcctccttgatggtgaagagcagcctcgtggggcccacgacgctgccgagccgcatcagctgcgcctccaccgtctcgtcgtcgtcgccgtcctccccgtcgccgccgacggtc

SEQ ID NO: 11863 - DNA, 864 bp, Setaria italica
  Peptide Sequence Number=SeqID_77837
atcagttaaatccaggaattccctgcctaaactttactaaatgaaaaagggaacaaattgttcctgaactgcttgtttactcttacaacaacaaccttgaccctctgattgttacacaataaatatatcctcaagatgttatacgcccgcaacaaaggaagatgcctaaggagggggttactcggtgagtttaactctagctgaagtgcacagcagacaggagatgcaacatgctgtctgatgggcccataagaaaccacattcgaagatgttgccaagctgatcttctccgggtttcaaaattttctggaacaaactcttcaatttggatagctcaatccacgaaactcaccaaacatgtgagatcacgaatgcctacatcaaataatgtgtgtgccggtaatatctgttgatgtactttgactttacattgtcaacatctggtgtgtccgggtttttcacaggataaaatttgtaaaatttgatattttcaaacgcctctttctccttaggatccatatcatcaatagctttcttcctggcttctttagcctgtttcagttctctcttcctttctctaaccttctcctttaaaaattccttaaatttttctttctcatcctccggcaggacctcatctttaactttctgatcagcaaagtcctcgtattcatccatttcccagtcaaagtcatctactattggtggttcttgaggatacaagaaattgataaccgtgtcatcttcatcttcaacaggttgcagtggcatataatatggcatgcagtagtcaaacttcttgactctctcagttttgagatgcttaagcgcagaccttcgctgggtgcaaccgagagtgaatat

SEQ ID NO: 11864 - DNA, 109 bp, Setaria italica
  Peptide Sequence Number=SeqID_77838
tttaacgtttgttgattgctatgcgtgttgattcccgagcttcgcaaagatgcagagcaaacgtccatgttttgaaataccttttttgtggttgttccaaataatgaag

SEQ ID NO: 11865 - DNA, 649 bp, Setaria italica
  Peptide Sequence Number=SeqID_77839
gcgctctgccgccggctctgcagcgagctccgcgccgtcgtcgtgtccgtcaactaccgcctcgcaccggagcagcggttccccgccgcctacgacgacggcgtcgccgcgctccagtacctcgacgccaacgccctgccggccgacgtggtcaccgtgcccgtcgacctctccagctgcttcctcgccggggacagcgcgggtggcaacatcacgcaccacgtggcgcagcgctgggcgtccatgtccgcagcgtcgccgccggcgcgactctgcgtcgctggcgccgtaatgatccagccgttcttcggcggggaggagcggacggacgccgaggtggagcttgacagggtgtccgcgctgggggtggcggggacggaccactactggagggagttcctgccggagggcgcgacgcgggaccacccggcagcgcgcgtgtgcggcgacggcgtcgagctcgccgaggcgttcccgccggcgatggtggtggtcggcgggttcgacctgctcaaggactggcaagcgaggtacgtggacgcgctgcgccggaaggggaaggcggtgcgggtggtcgagtacccggacgccgtccacggcttccacgtgttcccggagctcgccgactccggcaagctcgtggaggaga

SEQ ID NO: 11866 - DNA, 519 bp, Setaria italica
  Peptide Sequence Number=SeqID_77840
ttgttcttgtacttaagtcgtcttcgcgatctgatcgttactcttccaggtacagccgccgccgcctcgtcgtcgccggccatgattcaggcggtgatggtgatcagcacccaggccaagccccgcctcctcaagttctacaatttccagccaccggagaagcatcaggacctcgtccgcggtgtcttccaattactctcagcaaggcctgacagtgtgagcaatttcgtcgaggtcgatgcaatctttggcccgggaacaaaaatggtgtacaagcatttggctacactgtactttgttttgtctttgatagctctgagaatgaactcgccatgctcgatcttgtacaagtttttgttgaaacgttggacagatgcttcaagaatgtatgcgagcttgacattgtatttaacttcaacaaggtgccataaatcctgttgatttgattcctttattctagatagttcgcctataaggatgcatggttgtattcctgctgaaggttccatttaccatcga

SEQ ID NO: 11867 - DNA, 597 bp, Setaria italica
  Peptide Sequence Number=SeqID_77841
ctctgtccatcaattctgtctagctgctagaaagttcatcttgtatctcagtgtcacatggtagctatacttagggggggggggtgctgcaacaccccttcagcccatgaaaaatcatgcaaatttagcctagtagtcttaaagttagtacaagtttaacagcttttaaaatgtaaagttagtccaattataagagaaccagcgctccctttgggctaaccattgctttgccctgctgtcatgaaagatttcttttgtctaacttcaacaaggagtattaattactctacatgacctttggttttgtgcacagtttttgttgaaacgttggacagatgcttcaagaatgtatgcgagcttgacattgtatttaacttcaacaagctgcacacaattttggatgagatgattcttgggggacaggtaatcgaaacaagttctgagcaaataatgaagtctgtggaagagattgcaaggttctaccctttgcctcaccgctccatatatacgtgcactcttaattagtctaattatgacagcattgtccattacttgacgcaggctggagaaacaatcaagcacaaccagcctcatacc

SEQ ID NO: 11868 - DNA, 622 bp, Setaria italica
  Peptide Sequence Number=SeqID_77842
tcttgtactacttacacccgttcttctttggctcatactaatatctgatgatgcagctgcacacaattttggatgagatgattcttgggggacaggtaatcgaaacaagttctgagcaaataatgaagtctgtggaagagattgcaaggctggagaaacaatcaagcacaaccagcctcatacccaagtcgatttcagaacgtttcagccgttaagctttcactcgcttccaggtctgaacatttactgtgtgagcagaactgcaaaagacattcgattggcactcaagattaccttcagtttgctgcagttttctaaagacctgattgtctggacatttgtactgtcatcgagtcattgtagacgggccgagctgtatgcctgtagcctgaatggcatgttcagtctaatactatcttcttacactgattgtctgaatgtgctttctgagcttcagacatcatgcctgtagcaatatagagagttagctggtttctcacttgcctcatgatttcagctgtatgagctcaggtcgatgtgaaatttttggacgagatgttggccactcatagatggtaaatctgccttgtgcttcattttatttcttgtttaaaaaaaaaaa

SEQ ID NO: 11869 - DNA, 976 bp, Setaria italica
  Peptide Sequence Number=SeqID_77843
taccaataaagaagcttattaggggcagtgacatcaaggttacatttgagttgttgtatttcacacctttgttggagatgtcttccaagttcacaacgatggtgatttctaatcaggactcctctgctgaccagcactcgcgatctgatcattaaccttccagctgccgccgccgcctcgtcgtcgccggccatgattcaggcggtgatggtgatcagcacccaggccaagccccgcctcctcaagttctacaatttccagccaccggagaagcatcaggacctcgtccgcggtgtcttccaattactctcagcaaggcctgacagtgtgagcaatttcgtcgaggtcgatgcaatctttggcccgggaacaaaaatggtgtacaagcatttggctacactgtactttgttttgtctttgatagctctgagaatgaactcgccatgctcgatcttgtacaagtttttgttgaaacgttggacagatgcttcaagaatgtatgcgagcttgacattgtatttaacttcaacaagctgcacacaattttggatgagatgattcttgggggacaggtaatcgaaacaagttctgagcaaataatgaagtctgtggaagagattgcaaggctggagaaacaatcaagcacaaccagcctcatacccaagtcgatttcagaacgtttcagccgttaagctttcactcgcttccaggtctgaacatttactgtgtgagcagaactgcaaaagacattcgattggcactcaagattaccttcagtttgctgcagttttctaaagacctgattgtctggacatttgtactgtcatcgagtcagtgtaagacagatagtattagactgaacatgccattcaggctacaggcatacagctcggcccgtctacaatgattgtctgaatgtgcttcctgagctcatacagctgaaatcatgaggcaagtgagaaaccagctaactctc

SEQ ID NO: 11870 - DNA, 364 bp, Setaria italica
  Peptide Sequence Number=SeqID_77844
acagaagtcttaagaacttttccctgcttatctcactttctgtactgtatgcaccactggtaattctcaagtacatagacctggtgtcaaagataaggagttcacctgactctgaagaagttcccataaacaagcggttcgcatacagagttgatatatttttgtcacttcaaccgtatgctaaaccgttggttctacttgttgctacactgttactgattgctcttggtgggttggctctgtttggtgtgactgatgatagcttatctgattgtctttggctgtcctggaccttcgttgctgactcagggaaccatgctaacgctgtgggttttggacccaagctggtttcagtttcaattag

SEQ ID NO: 11871 - DNA, 308 bp, Setaria italica
  Peptide Sequence Number=SeqID_77845
aacacgccctcgcctccataagatgatatcagcagctttcccgccgccggcgatctggtggacggagagcctgtgcccggcggcggcgcctgagctgcaggggtcggcggagccctcgatcccgccgttggcggcggcctccgcgccggcggcgtcgtccatgcgggaacccaggattcgcaggcgggatcggagagcgaggagacgacggcgagagcggtggagggaatactccggagaggcccggaaggggggtggggaagggaagcggttcgattcttctcctcccacgacgcggcggcgggtaa

SEQ ID NO: 11872 - DNA, 994 bp, Setaria italica
  Peptide Sequence Number=SeqID_77846
ccgagggcggcggcggcggcggcggttgggcatccgtggaagctgctcgggagtctgctcccaaaggcttccactgctgcccttttcctattgacgacacttattactggcaccctgcactcaaccatccctcattctgcatatgcatcgatgcaaccagtagccaaaactggtggagggctcctcacgacagaaatactaagcagcggttgggctggttttttagctgggtgcttacacaccttgtctggacctgaccatctagttgccttggcaccactttctattgggagatcaagccttgaaagtggactggttggggccctttggggctgtggtcatgacgcaggacaagttattttggtctgctcttcttgttactcaaggatcgattgcacattgaggttttccgtgcatggggaacacgagttgtaggcctgacccttctgatcataggagccatgggtatccgggaagcttcagaggttcaagagtccacacagctagttctggagggcgtcgacgccagcatgagcagtagtgatcctttgcaggccccgtcagctcccagaaagaagaaagtcggttttgcaacattcgccaccggaatcgtccatggtctccaaccggatgcgttgctgatggtcttgcctgccttggctcttccatcgcgctttgctggtgcggcattcctcggcatgtttttggtcggcactgtgttttcgatgggtagttacacggcttttgtaggttcttgtagcgaggccctgaaagagaaggttcctaggataacggagaaactgacctgggctgcttcactagtagctataggcatgggattagctcttctggtggggcagttctttggattcagcttgtactgatgttagccacgtgtgtttactcggcgagatattgtttcatgtaagagcattgttggcaattagtttgataatagatggttattgtttgtgagactcttacttaaaaaaaa

SEQ ID NO: 11873 - DNA, 367 bp, Setaria italica
  Peptide Sequence Number=SeqID_77847
ggcaatgcactctatttcaaaggagctgcgagtgcagggttgtggaaggaattacaccaagacagcgagttccaccttcttgatgggagttcagtccaagcgcctttcatgtccagcacagacgaccaatatattgcggcttatgacacctttaaggtgctcaagcttccgtaccagcaaggtggggacacgaggcagttctccatgtacataattcttccagaattacaagatggaatctggagcttagctgacaagttgagctctgaacctgagttcttggagaagcatatcccaatgagaacaattccagttggtcagttcaaagttcccaagttcaagatatcctttggatttgaagcatccg

SEQ ID NO: 11874 - DNA, 998 bp, Setaria italica
  misc_feature (1)..(47): n is a, c, g, or t
  Peptide Sequence Number=SeqID_77848
nnnnnnnnnnnnnnnnnnnnnnnnnnnnnnnnnnnnnnnnnnnnnnngtcaacaaagttacccttttgtaaggatgtcgtcagaacaaacacaacacatacagaggggacaagacgattcaactagattacactatgtatagatcaaattgatttaagtgaaaattggagcagttagatggcctcgagtttaatgcttgataggttattgctcaatgattcaatcacttcatcaggagattcctcattcgaatgagccactggttcttgaacttgaatatgagggatctcatcctgcaattctgcttcaagcttcctgaactcttcctcaatatcgccttcatcatctatcgactggagtggtgctgattccagggcagcatcaacttctctttgtgcagcaacaagctcatcaacctccttcagatggacattaacctcctctatgctgacattgttctccttcattgcctggataccaatttgtattgcctcatagaccttcttagttgattcagcactagcaatcaggctgatgacttcttcaaccctttctaacaactgcatgcatctgctccggctttgtgagaatactttagactgcctcgcataacgataagcagcctgtttgtccctggacttgaagaatgccaatgcccttctccttgaaatctcccatctgcgatcaagcacatcaagctgctgctgcaacctctcttctgtccaaagtaagtgcaaggtgtcatgatcaagcttggatacagcaggaacttgagcagagttgagtgcaaacttgacaccctcaatatggtcctgcttcctggctacaaggtaccgagctttcccagattgcgtcaagaaacataatgcggcatgagcatcctcctgatcgctgaagaagctattgaatctgctgatcgttacaacacatgtcgatgtccaatgagagtcacttaactgcctagcaatatctgcagccctttcctcgaccaacgattt

SEQ ID NO: 11875 - DNA, 626 bp, Setaria italica
  Peptide Sequence Number=SeqID_77849
tcagtacagacttgtattgcatcctaaattcttcatcttccagaacatattgtgcttctcctacaaactgcccttgtctgaagctttcttttagccagtttggggaaactatccaagcaccagaggacaaagcaatacagaagttcatagtcctgcgaacttttccagtaacaatatgtgtgcatgcatgtccttcgcaagtaacaaacccaccaagcgtttcaactacctttgtaaggcgtgccttcttttgttcatctgcaatattcatgagcatgattgtagggttaccataagaatggacaacagccttctcctcgccagacattttgttctcaaaatgaactcccaggctaggagcacgattctcttttggaattagaggcactgaatttccaggggaactgcagaagtaattgtcatgggcatcactttgattcatgtcttggccattgccaccatcattgaccttaattattcttttagactttagtgatgatgaagacatttcatatatacgtttctttggctcttgctcagataatgaaaatttcaccacaatcaatgtgagctccagttcttgctacatttgcagtctttctgactttacggcgtttaaatgttct

SEQ ID NO: 11876 - DNA, 379 bp, Setaria italica
  misc_feature (28)..(28): n is a, c, g, or t
  Peptide Sequence Number=SeqID_77850
cgacggacaggatcggcggccgcgccancttcggctgcaccgccgccgccctcctcctcctctccctccgcccctgcagcagcgacgcccacccgaacgcctcccgaatccgcaaggcctccccttctaatcctccactgtgacctcacctaatcaggtttggtttgaccagtgagcagcgaggcgattgcttgtcggatttttgctctctgatgaaattgttttattattgctagtacagcggagcagcgggtctgccacgcacctgtgggagggaagggaggagggggagcggggcgcggggcccaccacccccacgaggagcacgcgggagggggaggagcggtggcggtaggcggcgggtggggcgcggcgacgg

SEQ ID NO: 11877 - DNA, 551 bp, Setaria italica
  Peptide Sequence Number=SeqID_77851
aaaaatcatccagtgaggtgggcaatatgtactccagattccacagaacagtgttccttagcctagcctacatgtagcagtagcgtccacaaaaccatagcttgcctcccaaatccatccaccattcatgccggccatatgcacacgaggccacaacaatatgccaacacacgtaggcatagacataggcgaagaagtcctgaacccatcaggtgactgaggggagcaagcagcaaggcgaccaacatgtggatgagggaggcagggaaggtgccggacctggacggtgtgggactggatgctgagcacgcggccggtgtcggacggcagcgcgacggacaggatcggcggccgcgccatcttcggctgcaccgccgccgccctcctcctcctctccctccgcccctgcagcagcgacgcccacccgaacgcctccctaaaccatatcacagctaaccagtcagaagcgaggcgattgcttgtcggatttttgctctctgatgaaattgttttattattgctagtacagcggagcagcgggtctgccacgc

SEQ ID NO: 11878 - DNA, 349 bp, Setaria italica
  Peptide Sequence Number=SeqID_77852
aatttactttagtagtaggaacttttaactacaacaaaaaatagaaataatgtaactagacctgtgctttttaatttatacttgtgagttgtgggttactacattctattaatgtgacttactgtactactctgcatttagcattcgtgtggtggattgcagaactgagggtgttaatgcagccacagttctctcgcaggacccagggatccccacaactctgtgggtttgtctgttgttcatcatcatattattcatcctgtcaaaatcgcatcttgatcgcgatggagcgtgcgaatcttggagaaaaccacactccttccaacaggcaacagtcagaggagtttag

SEQ ID NO: 11879 - DNA, 1560 bp, Setaria italica
  misc_feature (1524)..(1524): n is a, c, g, or t
  misc_feature (1546)..(1546): n is a, c, g, or t
  Peptide Sequence Number=SeqID_77853
cttgttgctgttgatcgtgccaacaatctagcacggaagcctcgtccttcatactatttattcaccaaggttgttacaactgggaaaataacaagacaggacagagcgtgtgcttggagggaactgcaacaagctgcatttcaaaagaaaacacgcccgttttttagggcagtagataagtatggtcggatgtatgcagggggtctagatcggcctattcaaagacctttcatattacgggattggcgatttggtcattatgaaatggaaggcttgcaggatcctttgagttgctttataagatccattttttcaccaatttcacacaagaagaagattcattacattgaggatgaggatgtttcttattctatctcctgataatgcatgtcactatagttggtaagtaggataatttgtcctctaggtaaataaaatctgggaatcagaagtctctttttggatggattaccatgtgtactatttataatagcattctctcgcaggacccagggatccccacaactctgtgggtttgtctgttgttcatcatcatattattcatcctgtcaaaatcgcatcttgatcgcgatggagcgtgcgaatcttggagaaaaccacactccttccaacaggcaacagtcagaggagtttagcactgggcacatctgaagccggtgataggtatcatgatactgctagagcacagctaacatattaattcctcggcttggattacagctatctgtggcgacgcaagattattgttagcttggcatatatgattaatgcaagcgattggagagcagtcaggcagcatggaaggatcaggacgccatcagccccatgatgtatacttattcgtttgggagatgtccaatcaccatggcatgtttgcaagggacagtcctgttgcaaatctcagtccaatcaatggctatccatgtgtataagatgaatgaaagccatggacttggatgtcgttatgtggagatgatgtttgtgcagctgcaaacttaactgaagccatctcctaagttggtgccatgtcattttctattgtctgggcatagaactgcattggctgtcgttgcctcatgtattgcgaggaaaaagacctgataatcctgtatttttgcgcgtaatacagtgtgtactttgatgcatcaggatgattgaagtgtgactgtgtaagtagcaactatacagaaacaatgctgtgtcagaaagggggaggcatactgtcagtagaagaaataaagagattttaagttgctggcttgattgtctctgtgagtatctagtcctatgttggggatctgtcatcagtgacaaactgacagtgtacagttgtggctcagagagggggcatcactacatctggcatcaaacagtttggctgggcgggctcatatactgggccgctaccatcacacaccgcatgggccgtttcttctcggcctcttgatatgcgcgggccaaagcaaggtattttttatttttattttaatattttgtaaaatntatggccaaaacaaaaaaattntaaatctataccta

SEQ ID NO: 11880 - DNA, 263 bp, Setaria italica
  Peptide Sequence Number=SeqID_77854
ttttttttaaggtttttctaggcggcaattaagttatttttaaattcttcttaacaaaatttatgcagatatctgcaagcagtacagcacctatcgacctccatccgacatggttttctaaatcagttaaaatattctgaagtacatatgtacaccggcaaggtggcaacagaactgaggtgtttggccaaagcaaagcagagattctactggttttcgatgagcactctaggctgaaactagggggaaagtagcaagcaaga

SEQ ID NO: 11881 - DNA, 981 bp, Setaria italica
  Peptide Sequence Number=SeqID_77855
cgccgtcgacggccgcgccagctgctagcaggaggcggcggtcggcgaacaagcgggtggtgaccctgccgctggccgacgttagcggcccgcggcccaagggcgttggcgagggcaacacgccgacggactcgtgggcgtggcggaagtacggccaaaagcccatcaagggctcgcctttcccgagggcttactacaggtgcagcagcaacaaggggtgcccggcgaggaagcaggtggagcgagaccgggccaagccggacacagtgatcgtcacctactccttcgagcacaaccactccgacgcggtgccgagggcccagcagaaccgccagcaggccccgaagcccaagccgcagccggccccgccggagccgtcggagtctccgtcatccggcagccacgacgtcgcagcaacggcctgcgccggcgcgcttgtgacgaccgagggcggcgcggcggccgtcgaggtgcacgacgacttccggtggctctacgacggcgtgtccgtgacctcgtcgacgtcgccctccgacgtcgacgtggcggaagagatgctgtacgggacgatgttcttcggcgccacggtcggcgcgccgctccccgacgagttcggcgacgtcggcgggttgttcgacggagaaggaggaggcgaggaggacgcgatgttcgcggggctcggcgagttgcccgagtgcgccatggtgttccggcggcacgctggcgacgggctgcccatggcgggcggggagaaggtcgagcagccggcggagagcacagccatgtcgtgatgcgcggcccggcctgacacgcggggccggccggactccaactccaataaaaaaacagataaacttcgtgtagagctcctcctcttgatccatctactctttggcttctttctctcttcccttttgtcacttagtttctcttgcatccttctttgattggttctcgtacacatacacaatagcagcacat

SEQ ID NO: 11882 - DNA, 685 bp, Setaria italica
  Peptide Sequence Number=SeqID_77856
aattacccaaatagtacaaagtagacactaaagttttgttgatggtaccagtcccgcacaacagtgaagctattccattactgccaatccttctgcaccctctcaagcacaaagaagatatcaggcacctcccattcccaagtgctgataaaccagcatcagtgatgtcagctccagaaaggtccagtagagttagcctggaaagctgtgagatggaaaccaagccagagtctgcaatgctcttgcaaccagatagatcaagaacctttaagttagtgcagggtgcgagagatatggctgtatcactagttaggagagcacaattaagcaatctcacttctgtaatattcggagctgccttatcaagatcaaggcatgccaagtctgacaagcaggagccattactgacctcaaatttcttcaggtccttgccagaatggagaagggctgcataccctgcatcgcttactttagaaaagccaccaaatctaatggttctgagttgcttgcatccatcagcaagcatcagtatcccaaagtcatttacacgtctgaaatcacagtaacgacgtgtcagcgataaatgtctcaagttgtggcacaagccaagagcttgaaggccgatattggtcaaatcttcaggcaaatttggttgggtaacaggtccatcttccaggcagagcta

SEQ ID NO: 11883 - DNA, 262 bp, Setaria italica
  Peptide Sequence Number=SeqID_77857
taaaaggtttgaaaggtttgaaaacttgcttttcttaagcaaagtcagaatcatgaatgaagtagaacaggtaccttgccctgtcagtagcacctattagccgtagaatttcatccgtattgttgcaatcatatactaccacatcgaattctggttgtgagctactccttccagctgaaaagaagttaaggagcttctgaagagctaagactgaacagatcgaatccattccaggtaaaactccaagctcctctcctacaat

SEQ ID NO: 11884 - DNA, 651 bp, Setaria italica
  Peptide Sequence Number=SeqID_77858
acaagaacagaaacgagaaagacaatggcaagaactttcgagcaacttcttggtgcatttcagaagggtcttcagtataaccaaatgccccacatatttggccgccagcttgagtggtacaaccccagtatcttaatgcagaggatacagatattgatctcctaggatccatgataaggaagcaagcaaggtttgaaggatcggcaaaccaaaccaagactctctcaagaagctgttcgatttcattccatatctctgtactcagtctcccctcactagttttaccatttggctttgcagcatcatatattagttttagtaatgaaggagaagccagtcttcccatgtcagtcttctcagctaggtccctcacatacctcaagtaagaccttgccctgtcagtagcacctattagccgtagaatttcatccgtattgttgcaatcatatactaccacatcgaattctggttgtgagctactccttccagctgaaaagaagttaaggagcttctgaagagctaagactgaacagatcgaatccattccaggtaaaactccaagctcctctcctacaatcccttcaaggactccttgaagttaaaattgacctgggcatctaccttcttcaattcgggtttaggggttcaagc

SEQ ID NO: 11885 - DNA, 772 bp, Setaria italica
  Peptide Sequence Number=SeqID_77859
ggaagtattagtgaaaatagcgaagtgagtgctcacagccatagggtttcaggccctcccgacgctgaaaagttgaatagaaggggacatatcagtagtgatgagatgctgagtgcaagcagtagagcagatgatagcagcagccaggatggtaggtccctttttaatggtgaggatggctacaaatctcgaagcgtggtatcaattcccagcaaccaagtccaggctgagtggattgagcagtatgagccaggtgtatacataacactgacaactcttcgtgatgggacccgagatctaaagcgcgtacgtttcagtcgaaggcggtttggggagcatcaagcagagagctggtggaatgagaaccgcgacaaggtgtacgagaagtacaacgtaaggagctccgagcgagtctcgtcggcatcctcaatccggtcagctcgatgacctgctacttcctggcagttgccggagggggagggtacgaagcgccaaagcccgtcgtggcaaggccttgagaaattctttttggccgtgtaatgtcgataattcttgttactacttattgttttgagatttgagtcatataattatccgtccaagggctggttagctagccctgttccgatgtaatgtacatagagctgtggtgcagactagcagagggaggaacagcccattggtctttgttgtagccaatgcaggtgtaaagaagttgcaactcttttttctatcttaatccatgtgtttagttgtttacaaaaaaaaaaaa

SEQ ID NO: 11886 - DNA, 486 bp, Setaria italica
  Peptide Sequence Number=SeqID_77860
gtgatgaagaacatcaatgggagtattgatgaccaatgtagatagtatcatatggaacgcaatatagtcggtgctccatcctgcatatctttctgtgtgatggatacgacccagcatcttcagcaagcaatgatcagcaaattcaagattccatttagtagcaaaatgaagaacaatgtgataagcttgctgaatggtggtgacatgaatctccaagttccataatagataggattctgatctctgaccagttttttgtagacaacggcacagcatttccatggcgacatcagtaatatatagacacatcaaagcagcaggaacaaaagcaggtgaacaactggagctgcaatccgccaatttgtgaacatccaatttgcaaggtccaggagtttgacaggagaaacgaattttgacagtgcacgaaccatgtagaaatttggcaaaagcagtccaaagttacttgcccatgcagagctcaaactt

SEQ ID NO: 11887 - DNA, 485 bp, Setaria italica
  Peptide Sequence Number=SeqID_77861
cgactgtgtgatgctgcgcgtgcggcggcggcgcgtccatgggcaccggccctgatggtgtgaacctgacttgctttttcttcttcttcttcttaggcttgcgggccccgccttggggaggggcgccagtggaggggaacggcgtgccgggcagggtcgtcgcgtctgctcgtggtggctccggctggatggcgtgggcgtgggcggggtgatggttgctgggggccaaggtgacgttgcgcgcagttgggcgcacgtagcaagtctgcgccggagcgtacgccatggcgtagtccatcttctcgtcgtacctgacgcgcccttggcgcccgttgcatttcgtgatcactctcgatatcatcctgcccaaaggggggagcaagagcagcccatctgcctctcggccgccaactccatctccctcgcccgcacatcggcatgatacaccatctgcggatacatgccagcacctgtatatgcaccca

SEQ ID NO: 11888 - DNA, 353 bp, Setaria italica
  misc_feature (263)..(263): n is a, c, g, or t
  Peptide Sequence Number=SeqID_77862
tgcgtgttcatgaggcgcggcgacggagcgacgtcgagcttggcctcctcccgccggcgaagatctcgtcgatgaacgggacgcagtcgtgcgggttgagccgacggagcgggtgcccgggggcggcgggcgggtacgcgccgcgcgccgcggcggcgaaggccagcgccttgagccacgtggtgccgcacttggggtagctggcgaggaccacatcgtcggggcgcggggagaagcggcgctggaacacgacggtgcccggnacccagtgctccggcagccagaagccctggtacaggcgcagctccaggatggactgctgccggcgcggcagcgcggccacgaggtcgccg

SEQ ID NO: 11889 - DNA, 1997 bp, Setaria italica
  Peptide Sequence Number=SeqID_77863
tttttttaacctttactcttgccttggcatttatcgaaaatcaatcaatttacagtgtttttgtgtgtgtaaattaaccttagaaaacacctctcgtctacgacacgaccttgctttgtttcctctcctcctttgccaaaagaaaaaaaacaatgaaagaaatgaatctttgccacaagagggagaagaagaagaagagagaacaagtaaaacaaaaaaaaaccaagaaagagtttcaagacatggtgtgagcctatctaccacttgcatactcgcagtcgccggctgcagcagctcccaacccaatctgaaggttgaagaaggaggcacatccatcaggtcaggggtcatggcgttggcaagagctctcgcgcctgctccagcgtcttgacgaacctggtgaggttgagcctgacgttctgcttgtcgaggtagaccgtcttgatggcgtcccaccccttcttgtgcacgtcgtatgggtgcttcaggtagaaatggtcctccgggtacaggtccctcagcgagctctcctccagcgacacgttgtactccatgtagttcacgtccatgtccctggccgggtccttgaaggtcaccctggtgagccactccaggcccccgaacggcaccacctggatgagcacggcgcggctcggcaggaacaccatgttggttagcccggcgccgtgcacccccatcatcacgtccgccgagttcaccagcctcgcgaagttgggcatgtccgtgtggttgtccggctcggcgatgcgcacgtcgaacctcgccgccgccgccgcgtgcgccatggcgcgctcgttcaggaaccgccgcgagctcttgcgggagatgatgaggagccgcggtcgggtcctccgcggcgcccccgaccgcgacgccacagcgcgctccagccggaacgcgcggcggaggaggcgcttgaagtcagcgacggtgacgccccccggggagcgcgaggggtcgatgcccatggcgcggtggaacgtggcgccgatgacgatccgcgggaagcagtggacctccctgtcgttgtcgacgtcgatgacctcgtacttggagagctgccggaacagcggcgtgaacttgtcgttccaccagtccttcatcccgctgagcaggaactggacctcgccgccgaagtggttcgtgctggtgaacagagggaccagcacgtcggtgtagtcgtggtagaggttccccgcgaacccgccgttggagaagaggaacgccggggcggtgtggttccgggtgcagagcggcggcacggcggtgtcgttggcgccgccgaaggggaccagcgtgtactcgcggacgtcgtccatggcgacggggtcgtgcaggcgcgcgtacggcttggtccgccactcccggtccagcgggctgatgtagatcttggagtggttgccgtcgacgcggatgtcgcccaccgccgcgcaccgctccgaccgcttgctcgtgttgtagcacgtcgggcgggacgggtcgaagtcctcttccccgatcgggccggacaacttgtaccgcgtgctgtcgtagtcctcgtccacctccaccacctccagctcctccgccgccttggggaaggggttggagcagtatcgggccttgatgtaggtgaggacgcagagggagacgagcatggtgacgaccatggcggcgttgcccatccggcgcggctcctgccggccccgaggctgcttcatcatcgccaccccgccgccgtgtcctctggatctggagcgagcttgcaggcgaggcggggcacgcgagctagcagctagcgggcgcggcagcagtagccgagggtattaaaggcgggcgggggcgtcgatggcgaccccgcggcgggcaaagcaaccacagaggaagaagttggtggtggtggcctcgcgtggtggtgggtgggtggcgctcgatcccgatcgctcgctcgacggctcgaggcgatgggtcccggtcggggcaggcgaggcaaccac

SEQ ID NO: 11890 - DNA, 1073 bp, Setaria italica
  Peptide Sequence Number=SeqID_77864
ttttttttttttgacattttgtttccaatttgttcatgcacacattggtaccatccattcatccaaacttacaatcaaatatattctttccatgtacaatcactgtgtgccattttaatggagtaaaccacacacgcacagcacatatcacaattaggttaaaggctatgccactgacctcgccagcaacatggcagtgcatgaaaccaattcgtgggagataagttaactaaactttggtcttactgttctgccacgggccaggaaacaaagcactcaacattaagggtcaggtgcaaatgtctacggtttccccactagactgctagtgtgcatctatttacagtgatcagctcaaccactcaagggcagagtacagcaccgcaaacaaactatgacagcacccatagattccttcatgccaatgattagacttgtgtagtcattagatcatcagatgaaagacgattatcgtttcctagaacgctgcttgacgtcatcaaactggtagtcatcatcgcggtcatcaatgtcatcctcaatttcatcaagaattgattggttaatcttctttctagacaccctcctgtgcttcttgagttcaagacgaggctctgcttgcttcactcccatgacacctgttttgtacctgacatcaccttctctttttgttccaaatgtccgtagctggatttcttctctaattttgatctcatcaagcatctggagatagtatggatacctttcccagtcacctttcacaacacatccacgctcaccaaggtgaacacaatcattaaataagcatttcgagggctcattctctttcagcatctttcttatctcaggaaatgtttccgcaaggcttctttttggtcactttcatcaggctaggctggttaaatccaggtgtatcagcaaggaagccttgaccaggtatagggagcaatgagacatggcgtgttgtgtgttttcctttaccgcttttcttggacacagttccaacacgttgttcaccaaaccatttactattctgctcaaaggagtttatgtattggatcttcttctgatat

SEQ ID NO: 11891 - DNA, 695 bp, Setaria italica
  Peptide Sequence Number=SeqID_77865
tccgtcctcacggcgtgggccggttattcactccgccatgtgcagcaatcaaggattgacaggaggcttgaggcaattgaatcttctttgaaggataatcacaaagttgaacatgaagttataaaagtagattgtcacttccagcaatattagcacgccagcctgtgtagccacagcgatgaccacaatggtggttgggtatgcgctagggtggcgtggtggagcttggtatgctcgaagggccttccgaagagagcaacaaaagctgatgatgggtcacatgaagtcacaaggtagatggcactggcggcccttcaatagacttaaaaacaggctcagaagagcgtccaagaacaagagtgaggacgcccatcgatcgttggctcaaagcactgacgccccctcaagcagcggggcatctgcgaacattagcaatactgctcagccagcagcgggcaacgcatgaagtacatagatggactatgatgtgtagtagcgagtgcataatagtccatatgctttgcaacagaccgtatgactagtaggaggtagtgccaacccaatggtggttcatttttgtagctttaaggtcataatgcacgcagtttgcggattcagctgtgacacggagaaaactaattgatggattagagacagggaacctgtctactgctgctggtgttcagcttgcccgt

SEQ ID NO: 11892 - DNA, 372 bp, Setaria italica
  Peptide Sequence Number=SeqID_77866
gggggagggcgactcgggcggctcggaggtctcggagacgggcgtgagcggctggacgtggggcggggaccagccgaagagcccccgcgacaccatggacctgaggtagctagggttgctagctggagaggtcagtgagttgcggcggcggcgagagatttgaatggcatgcgactgggcttggtgtggggtgggtcaaacaaggcgagctgactccctccggcaggcgacgaagagacggcggcaatccgattcggggtcgctgggaatggaggaggcagcggcggatcaagcaggtccagagcgcggccgtcgggggctcggctctgcgctgtgtgctctgctcatctgctcagcatgtgctgtcatcgg

SEQ ID NO: 11893 - DNA, 387 bp, Setaria italica
  Peptide Sequence Number=SeqID_77867
ttcttgtgtaccggtgcctgctcagcgctgagtggcatacagcaagcactgtccggtgctccggccagcatctttatcgcgcggccccctcgctcagctctggagtctggacacgcagatctcttgttcatgagctcacattcaatgggctgagttttattcaactgctcctctgaaatttcggtttgatggagcacaacaacccccggcgagcaagctaaagacagagctgtgagcttgtgagcggcagcggtagatagcatgtcaggagagcaagctgaacatatgcggtgggcgacggaatttcagttgatcaagctacacactagctgcgaatctatgacggctgcggccgtgcatggcgatgtcaagcggagcggaaaaata

SEQ ID NO: 11894 - DNA, 2085 bp, Setaria italica
  Peptide Sequence Number=SeqID_77868
actacttaactttagtacgaatagtgttcagtaaacttacagataggtaaatatttaaagtgtgtttttctactagggaaaattactgaagtatataccaaaccatcttacagtcatgatcaaatcttgaatatgctagctttgctgttgcattggcccagtttgcaaatagtatcagtattattgaagaaacacaggtgaagaaaaagacatacaaaagcatgtggtgctacagtgtccaagtgaccacctattttgcacgagctaataaacacaataactaacaatagatcccatatagaaactcctctgtttgcttgtggatttgaatgtaacagagacgtctaatctgaattgttgtgccccttttgggtgcgaaaattttctctccgtagcttgagctatttgacattagctatcttcataccagaagaaagcatatgactatatgagcctataactttgctagaaagattcagatttagagtgtatatcttggatcttggccccttttaattggttgttcaatcattatagccatcatcgccactatttcgggtggtaaagcaaagggggccatgggtgtgttggtctggtggatctgttctctctggcactgggggccaaccggttgttgccgatggcccgaatcaataaatgcatgtccagaaccagaaaccatatcgcccccatcgttctgtttgggcttggctgcataaggcctgtagatgcagatctggtccctttgggcccttctgaccactcgtacaactgtgaacgggcccactatttctgtaagttgtccactacttgtctgggtctctggcgtccaatttgatatgttggagctagccagctggaaactacttcagcctgaatgccactatctgcagcatggggctgtggttttttttccctactataataaacattgaatttaacaagcaaatgcatgaatgagctattcatttcatcctgacatataccagatgatgcacgacgacaagatctgccaacttacatttttattaaagactaaagctacatttctattataaatgtctttgatagctggatcagtgtggtgttcttctgcccttgtaggtagtgagatgtagggcagcactggaaatggataggtattgtagaggaataaactgttgctgtagtgttgagtccaggccatcctaagtgatcaatttatttatctttgcaaagatgtgtgctatatagaatcgtagatcctacagcatgccatccaagttaaaccagctgcaataagctagcttcattagaacacagctacagctttagctgcatgaatgaaataaatcgaagagaaggcgtaccagccccagcgatctgccgttccgatctgggcaaccgatctgcggccttggatccaagcagagcgctttgaggagagacaggggctattggagaatctgttttttgcccagaaataattgacagcttcttgtgtaccggtgcctgctcagcgctgagtggcatacagcaatcactgtccggtgctccggccagcatctttatcgcgcggccccctcgctcagctctggagtctggacacgcagatctcttgttcatgagctcacattcaatgggctgagttttattcaactgctcctctgaaatttcggtttgatggtttggaccagtttcccacttattaccatctgtctagagatcggaagttttcgaattcttgcactgactttgatatccattttcatgggttttctgcaggagcacaacaacccccggcgagcaagctaaagacagagctgtgagcttgtgagcggcagcggtagatagcatgtcaggagagcaagctgaacatatgcggtgggcgacggaatttcagttgatcaagctacacactagctgcgaatctatgacggctgcggccgtgcatggcgatgtcaagcggagcggaatcaacattttgagattggatgtacatatagagatagagatactgttgctactgagctaaaaaacgaggatgggatcttggatgagagaggataccccgctttcctgctgctatcgttgtagagatgggcg

SEQ ID NO: 11895 - DNA, 1110 bp, Setaria italica
  Peptide Sequence Number=SeqID_77869
ccggcaagcgcaaggccgaccaacccgccgaccgcgcctccaaggggaagtcagcgaagaaggggaagacggcggaggagaagcccgcgggcggcgacggcgaggacgagaagccggcgtacgtgcacgtgcgggccaggcggggccaggccacggatagccacagcctcgccgagcgggcgagacgcgagaagatcaatgcgaggatggagctgctcaaggagctggtccccggctgcagcaaggtatcaggaacagcgctggtgctggatgagatcattaatcatgttcagtctctccaaaggcaagttgagtacttgtcaatgaggctcgcagctgtaaacccaagggtcgactttggtgggctagacagctttctgaccacagagtgtggaagaatagcaggcttgaactgcaagaatggaatcgacttggagcaggtcacctggccagaaatgggtgttcatggagcaaggcatctgatgcaacttcaacagcagttctggcatggtgatttagcgcatccacaccaagcgccatcacagtgggaaaagcgaggggatggacatcctcccgtctttagcagctccagcccttctctcttcggctacgatctaacaagctctggagcacaacaacccccggcgagcaagctaaagacagagctgtgagcttgtgagcggcagcggtagatagcatgtcaggagagcaagctgaacatatgcggtgggcgacggaatttcagttgatcaagctacacactagctgcgaatctatgacggctgcggccgtgcatggcgatgtcaagcggagcggaatcaacattttgagattggatgtacatatagagatagagatactgttgctactgagctaaaaaacgaggatgggatcttggatgagcgaggataccccgctttcctgctgctatcgttgtagagatgggcgagcgatataccctggtctgttgctgaatgccgatgcattcttggtgtatttgtcttaaggttatatgagcagcattatttgatgaacgacaaacattatgggccctataccctttcaaccaatgcaaaagtttgtcaaccctttttttcgtctattaaaaaa

SEQ ID NO: 11896 - DNA, 445 bp, Setaria italica
  Peptide Sequence Number=SeqID_77870
ctgtctctcctagtctattctccgccacgtatgcttgcatagcatcgtgtagatgggacatgtgtttgcctttgttcatgtcagtcgtgtcacctgtcacgtatgaaaactgttgcgctggtagatagtacagtacagtggatcgagaaggattcgaggacattacccatcttttttaccttcagagtttgtactttacctgcaaagtattgcatgaaaaactgtgagcagtcacagacaattttgtttttacctcttcatggctgcaggtgaagaagatgatcgtctacgccgttgagcgtgctttgcagattctggaggagccttgcccatccccggagcgcaagcccgaggccgactgacattgtctttttcctcgcctggccaaagggtttcttcagatcggagtcaaggaggcccagtcgaattccagatgccaatccca

SEQ ID NO: 11897 - DNA, 472 bp, Setaria italica
  Peptide Sequence Number=SeqID_77871
gacttggagaggcggtttttatacctgccgggtgtcctcatcaagtacggaatctcaagtcttgcaccaagattgctctggactttgtatctccagagaacattcagcaatgtcttagcttaactgaggatttccgcaggcttccaaagaaccacagggcgaaagaagataaactagaggtatgaatttttcaatgccacgcgggtcttgattcttggaccttttttctttaaaaaaaagtcctgatgaacttttagtaagctcgatagctgtgacgatagaccataggacatacacgttaataaggccctgtttattcccttgcccgattatataatccagcttattggtgccagattattactggtcctagattatataatctctgtagggttgtttgtttgcccagattattggaggtgtagatggttggtctagaaataaactgaaataagcttctcttgagcagcaa

SEQ ID NO: 11898 - DNA, 1896 bp, Setaria italica
  Peptide Sequence Number=SeqID_77872
ggtgatcctgatccaccacctgattccagttaatcaataacgagaaacaggtttgcctagtcaccaatctgagtcttgttcaagtgggaagctgatcctgacggaaccaatcattgcctccatctgaacttggtgggtgtggcaaccatgttcttgagttgagacaattttttgaaaaagataggttaagtaagcttgaaatggcggctttgcaaatgagcaagcagttacaacctgatatcatcagtacagatacatgtgaatgctcatgttcagctaatcatgaaagttcaaggaaagctgccaccagagaaaagtcagcagataactgcatatactgtccaatatcagatggcgggaagccagatgatctcaagcacttccagaaacattgggtgaaaggagaacctgtaattgtgcaaggggtactcaagaaaatgtctcattttagctgggagccaccagctatgtggtctgaaatacatggcaccaattctagttctgagatgaaaaaagtgaaagccactgactgtctatcttgctgtgaggtcgagatatgcaccaaggactttttcgaagggtattatgaaggtcggatgtatcgcaatctttggcctgaaatgcttaaattaaaggactggccaacttcaaaccactttgaaaatattttgccttcccatggaaggaaatacatcaattccttgccatttcaaccatacacaaatttgaaatctggcttgctaaatatctctgcattgcttcctggtgacatcttaaagcttgacatgggcccaaaatcatatatagcttatggctgtgcacaggaactcagcagaggagattctgttacaaagcttcattgtgacttgtctgatgcggtcaatgttttgatgcatacttttaaggttgagccctctgaagaacagaaacgggagataagaaacttgaaaataaggcatacagaacaggataaaaaggagaaggtagcaacagatggaaatgatacaagcatggagcatgcagatacatccccaatttactgtgcagatgatgggggaggtgcattatgggatattttcaggagggaggatgttggaaaactaaaagaatacctcacgaaacattccaaagaatttcgccatatgtactgttctccagttgaaaagacttttaaccctgtgcatgatgaaacattttatctaacaaacaaacacaagaggaagctcaaagaggagtatggaatcgaaccatggacgtttgtacaaagacttggagaggcggtttttatacctgccgggtgtcctcatcaagtacggaatctcaagtcttgcaccaagattgctctggactttgtatctccagagaacattcagcaatgtcttagcttaactgaggatttccgcaggcttccaaagaaccacagggcgaaagaagataaactagaggtgaagaagatgatcgtctacgccgttgagcgtgctttgcagattctggaggagccttgcccatccccggagcgcaagcccgaggccgactgacattgtctttttcctcgcctggccaaagggtttctgcgagacagcaaggaaatgatgaatcgtgcgcatagtctggaggagatacagtcgtgctaggatgtccgtaggcacaaataatctgagaaacgggcagattttgcagatgtttcctagagaactgggtgtagcgaaaattttaaacggttttctttatgctacactgttggtaaaatgcagtaatgattgtggtagcatagttaaaatatgtgtgtaaaaaaattacgtatatgatacgaaggaacaaatctagcctgtgttacatgtttcgacacttaggacacatcctaagtgctggggaataggtcacagacatgaaaaa

SEQ ID NO: 11899 - DNA, 1246 bp, Setaria italica
  Peptide Sequence Number=SeqID_77873
tgtaagtttagaagggggaagggagaattcagtatgctgatgtatcattttcatatccatcgagacctacggtgccaattttgggaagattgaatctgacgcttaatccaaatgaagtagttgcaattgttggtcttagcgggagtgggaagagcactatagtcaatttactacttcgactctatgagcctacaaatgggcaaatattagttgatggtgtcccactcactgagcttgatatcagatggttcagagaaagaattggttttgttggacaggaaccacgcttattccgaatggatattagttctaatattaaatatggttgcccaagagaagtcagtcatgaagaagttgtgtgggctgcaaagcaggcctatgctcatgatttcataatgtctctacctgatggttataacaccattgttgatgatgctcttcttagtggtggtcagaaacaacgtgttgctattgctagggcccttctgagggatccatctatcttactacttgatgaagccactagtgcacttgatgctgagagtgaacattatgtgaagagtgtcatcacaaaagttagccgtgactcgaaggctaaaagaactgtggtcatcatagcgcacaggctatctacaatccaaacagctgacagaattattgtgatggaaaacggtaatattgtggaggatggtaaacacagtgaacttgttgagaagaatggtttatattcaagattagccaggcgacaaaatgatgatttcgagtagcctgaaatcacagaaggtggtttactccacgcccgttttttttttcagtggaatgacaggtagtaagactcgtctgttgttggtatattctttacaaggactgacatggaccggggagctcgaataaacttgtattctttcccccacggaccaaaagcgttctacaactaatcaagctaaacctgatgggtttccccacgaagaggagcaagatagtaaacatctacagcacggcagtaaggagagcaggcttctaagaatccactagttcgtgaaggaatctgcacgctacattttcatcgtatacagcatgtaactagagtgtataggcattttgatctttgttccaaactttttacaagtggagaaaatgctccaattttgtttcgagcacgatgtacctcatttatttcatgtaattatagcgtgacgtatatttttttcgcgtcctgataatttataaacgtaaaaaaaaaaaa

SEQ ID NO: 11900 - DNA, 620 bp, Setaria italica
  Peptide Sequence Number=SeqID_77874
ctcccttccacccgacggatccgtccagcgcaggcccgcagctcccctccgacccgacggcgcaggaccctgccgtggtccgattaggtggttcttcttctctccagctcccgagatcaaggttcccaagctgcggctgcatttgatttcccaacaattcggtggttcctccggcccccatgccccacgtcaaggccgtccctgctaccctgggtgcgggcggaatgcccggtgggtcttcgggcgctgatggtgaggtggatgcggggtttgccaagctccagggcgaagatttcgagtactacatgcagacgtactccatcatgctgggccgcaacagcaagaaatcgacggtggatgtggatctctcgagcctcggcgggggtatgaacatctcccgccaccacgcccggatattctacgatttccagcgacgccggttcgccctcgatgttatcggcaagaacggatgccttgttgagggtgttctgcacctccctggaaacccgcctgttaagcttgattcgcaggatctgctgcagattggggacaagaagttttacttcctgctcccgacgcggtccatctttgcgtcggctgctgctgctcggcatgcacca

SEQ ID NO: 11901 - DNA, 1070 bp, Setaria italica
  Peptide Sequence Number=SeqID_77875
tcgtcccccgtcgtctacacctacccaaaagaaccgcgcggcgggctctcgactctctcagtgccacctcgtcggacatcgaccggcagctacgagctcccacccccagcacggcggcggcggcgatggcaatggaggcggctttggtcgtgaagagcggcggcggcgccggagcggccggggtggccgcgcaggcggggagtggcggcgagaggcggtcccggttccagcgaatctgcgtgtactgcggcagcgccaagggccggaagcccagctaccaggacgccgccgtcgagctcggcaaggagctggtggagaggggcatagacctggtctacgggggaggatccatcggcctcatggggctggtgtctcatgcagttcatgatggagggcgccatgtgattggggtcatcccaagatccttgatgcccagagaggtaactggtgagcctgttggggaagtaagggcagtctccggaatgcatgaaaggaaagctgagatggctcggtttgctgatgctttcatagcattacctggcggctacgggactctggaggagttgcttgaggtcatcacctgggcgcaactaggaatccataagaagccggttggccttctaaacgtggacgggttctacgatccgctgctatccttcatcgacatggctgtcaacgaagggttcataaaggaggacgcgcggcgcatcatcatctccgcacctacagcgaaggagctcgttctcaagcttgaggagtacgttcccgagtacgaggttggtttggtgtgggaggatcagatgccatcggcggcgcacagcttcgcccccgagctggagcccgggattgcttcctcctgatccggacgccgggtcgcctactacacctaacccagattctgaccgacagccggccggccccaacaagaccccagtagtagcatctaacaaagaagaacgggacgttattctagctccagcgcttgtcaagattgttcttttgggacagagatagcggtgttgttaatcctttattagcatctcgtagcttgcagtgccctctccctgtca

SEQ ID NO: 11902 - DNA, 941 bp, Setaria italica
  Peptide Sequence Number=SeqID_77876
acttgcactgcctcccctcacaggggatggcaacggtggcttgtggaaaatttttgaacgctcctttatcttccgtgctgcatcccttgaaagcaggtgtgccttcacatcgcgagcaggaggcggtgggatcttgaaatgcactgtctcactacccccagaaccacctggcgtctcatcaggatccaacctcagtggtgttccatcaatctcaccccatgtcatgaatggcgactcatccacaccaggtgctggtgatggtgtcctcacaaaagtatacccgttgttggcctttttgtctgactcaaggtagaacgggtttggcgtcttcctcagatcctccaaatcatacttcttcgctttgtcgggatcatggtatgccatccctcctggagtggtgcctgcaaccggtgcatacagtatggcagcctcttcctccttgggccttgcatcatcagccatggctctcccatgtaacctggtgtttgacttgtcaatctccttggtcatccccttgatccgctctgcgcgctcctcttctgtgagaggcgcctctcctcggtcagcagggtagtacatgagcaggttcttcgctgtgaacttggcgccctccaatgtactcggtggctgccccgatgaaccatacccatctgttatcctgtcgcgcttggcgtcctccaacaagggtttatttgctgcctcggcaggctccaggaggtgggcgtaacgctcgtggcggcggtggttgaccttctcgaggatgcgcgagaaggactcgttgtcctcgctggtgaagcggttgaagaagccgtcgagggagagcgcggccgcgacatcatcgtcctcctcctcctcaggggcgcccgcgccgccggcaacggagccggcgggcgtggtgaggaaggagggggagcggagcgcggttggtaggttggtccggt

SEQ ID NO: 11903 - DNA, 587 bp, Setaria italica
  Peptide Sequence Number=SeqID_77877
tgcataagtacaaatgcacgcctaatattgttatttacagctctctcatcaatggtctctctgaacaagaccgtgtggaagacgctctcgacttactaagaagcatgccatgtgagccagacactatttgctacagcgctgcactgaagggtttgtgtagagcaaagcgatgggatgatgccagggagcttatagctgagatgtttagaaagcaatgcccaccagatgaagcaacattcagtatgctcattggttcattgtgccagaatgggctggttgacttggcaactgaagtttttgagcaaatgtcagagtatggatgtagtcctaatagcacgatacgcagttcccttgttaacagctattctgagcaaggacgagtggacgaagccctcaagctatcaagcagtatgccttgacagcagccagtctctgttgtactgcttgaagagctctgagttgtgagaatgctaaggagctaaaacgattaggccgaagatcatacctgatgataagatgaattgaatttggttctttttggattttatttggatctcaaatatgagtgtgtttaaattttgtatact

SEQ ID NO: 11904 - DNA, 824 bp, Setaria italica
  Peptide Sequence Number=SeqID_77878
gctcagaagccaaaattatttggcacacttgcttcgaaatccagatgaaacgaggcaattcttcacacatttttgtgcgtctgactgcacacaaactaaccagtataggttcacaccagtgtccacattacaagcgacaacatcacatcaatcaatatattcctaaactcgcaacatgagaatttgtacaccttctaactgaattttcttctcaaaccgcaatgtgcgttcgctacatccttaataattgtcagttctatcaacacctgaagaaggtcatcaccagccattaaatcggcactccaaatgttacgttaatatttcttcaaatattgatcattgctatctcccggcaaggccaactggaattgatattggagattgctgatgctccgcaaaagatggaacaccattgttaatgaccttggttagctgatccgaagatcgattgaggctattctgctgcagtaactgaacaagtgataaaaatatatccatcctggtcacgttcttgtttgcctcaacaagaaatcgagccattatcttgccatcacgaagttccattagtcccttcaagattgtcagtccaaatccacgtatggtgtctgctatctctaggaaaaatccacgttcctcacatagcatctcgacaagcatctgaccaggcggtgcaagatcctcaacaattattgggcaaaccatagtctgccctgcaacctcataggcccatgtggcacctccattgattccagcacttgggtcgtctttcaggacaacaccacttgagttatcgttcaagacagcgctactatccttgcttatca

SEQ ID NO: 11905 - DNA, 993 bp, Setaria italica
  Peptide Sequence Number=SeqID_77879
ttttactttcaattttatttgttagttttcccttactttaagttatttgttctaggtccaaatccacgtatggtgtctgctatctctaggaaaaatccacgttcctcacatagcatctcgacaagcatctgaccaggcggtgcaagatcctcaacaattattgggcaaaccatagtctgccctgcaacctcataggcccatgtggcacctccattgattccagcacttgggtcgtctttcaggacaacaccacttgagttatcgttcaagacagcgctactatccttgcttatcatctttggttcatcagcttgcttaatcttttctgcatactttgttacactttgtagaaagagcatatgcttgattgttcggtccaacaaagcatcaatgctacactttgcactatttgggactatctcacgtaactccttgacgcgctcttgtatctgctgacggtcctttggtcttggccgcgtgctttcacctggcctagctctttttttaacaaccttcactccttcaggattatttacctggctgaccttggaatttgcagtgttcaaactgacacaatcatccgtagacaaattctgcagtgacactggggttgcctttgatgctccaattggaacattttcagatgtacagctaatggaagggagtttcaatgctggttcttgtgcattgcacactgaaaatgaatcttgaaggttgtaccttggcaatcgacagcctgagacagagccagctaatggatcagtgctagccataactgggctaatattgctgtcaaatccaagcagctcctcaaagatagtttctgaaaacaaccccctctcttcaactgatgatggaccactacttgcctgttctgcaatagagttcatgccagtagcaccgaaatgtgaagtgtttcctgctagtagggcagtgtcatcccacccataatgcatgacaggactcaactgttgtgccttcaagcaagccatt

SEQ ID NO: 11906 - DNA, 1235 bp, Setaria italica
  Peptide Sequence Number=SeqID_77880
ttgagtcgcactagatttggattctgctcttctaaaaggaacgtccgctctcacaattccctcttcatctaccaaaactaccggaaatgtttcaaaaaaagtaaggcatacgacgtacaaaaagctcgcgtccttctttatctctaaagacgggatgtcctaaccatccaacagctattccatccccattgtccattgagcctgctctgaataatcccccctttgccggattattaccaatataatcataaaaggctaatttttcgggaattttagaccaagcttctgacaaactaagattttcggctaacccatcgctaactcttcgatatatttcttgctgaaagtatccctgatcccactgataacgagtaggcccaaataattcgattggggtagttgccgatccataccacatagttccggcaactacgaaagcagcaaaaaaaacagcagcgatactactggaaagtacagtttcaatattgcccatacgtaatcctttgtatagacgttgcggcggacggacactaagatggaataggcccgctaatatgcccaatgtacccgcagcaatatgatgcgaagctattcctcccggaacgaaaggatcaaaaccttctgcaccccacgcaggatttacagcttgtacttttccagttagtccgtaaggatcggacacccatatcccagggccatataaacccgttacatgaaatgcaccaaagccaaaacaagccacccctgcaagaaataaatgaattccaaagatcttgggcaaaatccaaagaaggttttcccgtccgctcatcacagaatatttctaggtcccaatatacccaatgccagatagctgccaagaaacacaagccagaaaacacaatatgcgcacctgctacaccttcataactccaaatacccggattcgttacagttcctcctgaaatactccaaccaccccacgaattggttattcctaaacgagtcatgaaggggatgacgaacataccttgtctccacattggatccagaacaggatcagagggatcaaaaaccgctaattcgtataaagccatcgagccagcccaaccagaaactagagctgtgtgcattatatgcaccgaaagcaatcgacccggatcattcaatacgacagtatgaacacgataccaaggcaaccccatggaaatacccctttagcaaagaaaatagacacgtattgttcgctttatttt

SEQ ID NO: 11907 - DNA, 709 bp, Setaria italica
  Peptide Sequence Number=SeqID_77881
cgtcgggagccacctcgtcgacaagctcctcgccctggggacagcgtcatcgtcgtcgacaacttcttcacgggccgcaaggacaacgtcgcgcaccacctcggaaacccgcgattcgagctcatccgccacgacgtcgtcgagccaatcctcctcgaggtggaccagatctaccacctcgcctgccccgcatcccccgtgcactacaaattcaaccccatcaagaccatcaagacaaatgtcatggggaccttgaacatgcttggactggctaagagggttggggcccggttcttgctgactagtaccagtgaggtgtatggtgatccacttgagcatccacagaaggagagctactggggccatgtaaatcccataggtgttaggagctgttatgacgaggggaagagaacagcagaaactcttaccatggattatcatcgtggtgctggtgtggaggtgaggattgctcgcatattcaacacatatggccctcgtatgtgtttagatgatggtcgagttgttagcaactttgttgcacaggctctgcggaaacaaccaatgacagtatatggtgatggaatacagactcggagctttcaatatgtttcagatttggttgatgggttggtaactctgatggaaagtgaccatattggacctttcaacttgggaaatcctggagaatttaaccaacctagtagaacaa

SEQ ID NO: 11908 - DNA, 534 bp, Setaria italica
  Peptide Sequence Number=SeqID_77882
taccttttttactactacacccaactattagaggttactataaggagtatgtaaaggtgatattaacccgaagaaattcttacagtggaatcaaatactgtgatgaacctgctatatttgcttgggaactcatgaatgagcctaggtgtgtgtccaattcatcaggtcctcatattcaggcttggatagaagaaatggcagcatatgttaagagtttagacacaaagcatcttgttacagttggtattgaaggatttatggccctgggagatctgagaggctgggtgtcaatcctggagactgggcagcttcactttgctcggatttcatacagaactcagctgttaaagacattgattttgcatcagttcatgcctatcctgatagctggttgccgaaggcaagcatggaagaaaaagtcaagtacctttctaactgggttgattcgcactttagagatagtgaatactacgtgaataaacaaataacttaagaaagaaaaaacctaagtaaactaagttttaacaaagaaaa

SEQ ID NO: 11909 - DNA, 354 bp, Setaria italica
  Peptide Sequence Number=SeqID_77883
cccggacgatcctgatgtggatgcttcttgtggagctcctccgcaagaaggtggaggcgatcctggtgagcgtgggtgcgcagtcctactcgagcaccatcgaccgcgcttcccgcatcgcttggctgggctacctcgtcttctacaacctgagcagcaccggcaagaaggcaatctatggcaccttatgggtcctcgctgctgcgaagctgctgcagagggtcgccatcaacgagctgctcaagcgttccttcgcctacggcaagaacgccgagcagctcagctggtacatggcccagattgagaagcaagaccatcagctgcaagaagttggagacgatggagcagagctta

SEQ ID NO: 11910 - DNA, 473 bp, Setaria italica
  Peptide Sequence Number=SeqID_77884
acctgtatgtgagatgttctgtaggataagtgaattaatttcaactaataaaaccaagttaagattgtccgcatccatctccacgtcctatgcatgattggataatatttattaccttatcagtgtcatggataataagtccctgagattgatcactgatgcatcggtaagttctccaatttcaagggagaagtctcaaggtttggaccccagtatgagagaaaaagttatatactcgtctccaaattttgatcccaaggttttccttcgtgggtccacaaagacacaagtgctgctgacttagagtctggtgctcttaccttgaaaactgatctcaaagggagaacacagcagaaaaaacagttagtcaaggagaactttgattgttttgtctcgtgcaaaactacgatagatgacattgagtcgaaattgagacagatagaggaagatcctgaaggtgcaggtactgctca

SEQ ID NO: 11911 - DNA, 259 bp, Setaria italica
  Peptide Sequence Number=SeqID_77885
tactgcgtctagacacagttagatttggagatattgaaatagatgacctttcagcatggtattttgtgcatcgcggatcgacgctttatgttatcccatcgagtccagagtgcaatcactatgttgtcgacgtcgaaaggaagtcctacaggctctgtaagagcaaacgatccaagctctttttttcagcagttttccgagctggtcagtatgtcgtggctctatgtgatactttgcagtatgtctatatccttcggga

SEQ ID NO: 11912 - DNA, 351 bp, Setaria italica
  Peptide Sequence Number=SeqID_77886
aagaagggggcaagcggcggcggtggttgcgtatgccggggactgcgaggcagctgtggcgccgcaggaggcggcgaagcatcaccagcagcagcagccgcaggggctgcagcctgagctgttcttcaagatgtcccatgacatctacaactacggcgaagggctgatagggaaagtggcggcagaccacagccacaagtgggtgttcaaggagccccaggagaacgagatcaacctcatctcctcctggagcaaccctgcggactctcatccgaggacgtgggaggcgcagttccagtccggaatccagaaccatcgccctgatcgctgtcagggaggcgtcgtgcagct

SEQ ID NO: 11913 - DNA, 569 bp, Setaria italica
  Peptide Sequence Number=SeqID_77887
ctaatgatggctggctgggccttgctcctcctgtcttggtgcggttcactgctgcaggctggataggaagtggcggcagaccacagccacaagtgggtgttcaaggagccccaggagaacgagatcaacctcatctcctcctggagcaaccctgcggactctcatccgaggacgtgggaggcgcagttccagtccggaatccaggtgcacactttcaggccttgcaaatcgcaatccagtccctctcgatcggaatcagaggcggcagccggcagctagctagctctgccggcctacctctgctgctcgccaagtcatggccagctagctgatgctgccatgccatgtccctttggcctgcgtgcgcttttctttctttcttttttccctatcgctcattcttgacttgctctgcagaccatcgccctgatcgctgtcagggagggcgtcgtgcagctcggctccatgaaaaaggtggcggaggacctgagcaacgtcgtgatgctgcgccgcaagttcgggtacctggagagcatcccgggggtgctgctgccgcacccgtcgtccgc

SEQ ID NO: 11914 - DNA, 386 bp, Setaria italica
  Peptide Sequence Number=SeqID_77888
cagattgtcctatatgtcggtccagtcctagcatccttttatagctcttccatgtcaacacaggtactgctattattgcctacacacacgatgttcggctacgagttcttacagatgtccacgttgtaacgaggttgttgttgcaattcaaagacaaggatcagtttagtttacttagtcgggttcaacaattcttgcccatgtacacagactagctctttgatcttgatacttataagtttggatgcccccattgaggattcgcatcatgacagtgtacatgtaatggccccaagcatgggcaattttaatgccatgaattgctggttgtatattgaatattacgtcctcaaatccttggaaatccaagccatgagtatgaagca

SEQ ID NO: 11915 - DNA, 644 bp, Setaria italica
  Peptide Sequence Number=SeqID_77889
ctagggtgaaccagtttgaatagactagacaagggactaagaatagtacgaagatgtccgcgatgttgaaagagcagctagtcaaagtgttctctttgatgaagccaggactcttattccaatatgagcctgaactcgatgctttcctcgaattcctcatctggaggttctcgatttgggttgacaagccaaccccaggcaatgcactgatgaacctaagatatagagatgagcggttagtgcccatcactggaaaagagtaagaacaggtttggaaggacctgggctttctgtttctcaaaagatcttttattgtattagctttgttggtggccaatatatatggtcgcgattgcagtccttttctgctttccgtcgatggggtgatttggaacagagaccactagcacgccgtgcctggggcttagtgcagaatgctgaaggattgtaccaagctgcttcattcttcaacctattattgttcctttatggtggaaggtatcttcttgtgcatgcttaattatgggaatgtctttatgcattctttaacctattattgttcctttatggtggaaggtaacttcttgtgcctgtttaattatgggaatgtcttcatgcatcattaggattgcagaaattattca

SEQ ID NO: 11916 - DNA, 528 bp, Setaria italica
  Peptide Sequence Number=SeqID_77890
agcgcgcgaggcgaatccacctgatgtgcgggtgcagctttacttcccacgaatctggggtttgactgaacccctatgtccctcgttgagtccgcctctgcttcggatgggccgccgccacaggacgcatggcacgcggagtttcagcgcctcctcccgctctggcagtcgctgcgcgattcatccaaggtcattatcccaatttcaatatctaggggtgaaccagtttgatgctgcagggctagatgtcgagatgtccgcgatgttgaaagagcagctagtcaaagtgttctctttgatgaaggtgcttcgtttactaactccggtgatttgggtgctccttgcagcttgcatagaacctaaatgcactgctagttgttgctttcagttttcatgctttttcttcatatcagccaggactcttattccaatatgagcctgaactcgatgctttcctcgaattcctcatctggaggttctcgatttgggttgacaagccaaccccaggcaatgcactgatgaacctaa

SEQ ID NO: 11917 - DNA, 818 bp, Setaria italica
  Peptide Sequence Number=SeqID_77891
tgtgtagggcggggcgtcaccacaatttcgcgttgctgctcacttcacgaccgaatgatcaacatcccgccatcccccctgaattgaagaaaaatccagcgaaaaaattcaaaccctagcacatccatcccgtcgagcggcggagccgacgccagcgcaatcctttccctccgctggcaccggactggccctggagcagagatatttggatcgacttcgacatttgctgtcaggctcttcttcctcagcgcgcgaggcgaatccacctgatgtgcgggtgcagctttacttcccacgaatctgggggtttgactgaacccctatgtccctcgttgagtccacctctgcttcggaggggccaccgccacaggacgcatggcacgcggagtttcagcgcctcctcccgctctgggagtcgctgcgcgattcatccaaggtcattatcccaatttcaatatctagggtgaaccagtttgatgctgcaaggctagatgtcgagatgtctgccatgttgaaagagcagctagtcaaagtgttctctttgatgaagccaggactcttattccaatatgagcctgaactcgatgctttcctcgaattcctcatctggaggttctcgatttgggttgacaagccaaccccaggcaatgcattgatgaacctaagatatagagatgagcgggtagtgcccatcattggaaaagaaggtatttttctgtaagtttatgtcaactgctgccattttttttgtatggtatgcacttcatggcttctttattttactaatcatgtctggttacagctaatcaagtgtagat

SEQ ID NO: 11918 - DNA, 2568 bp, Setaria italica
  Peptide Sequence Number=SeqID_77892
ttacactagaccaattaagacccgacaatccaatgatatccaacttgtttcattgataacaaattggatatcatggatgcgggctaatggcagacattgctacgaggcataacatgcatattgttgcataattgggacattcgtgtatatcataatctgttagtttgttgagacttatgattagttgcatatctttaatattttcttgtttatagataagttccttagtggtcttctaacatctagaaaatggataggactatgatcctttatgtttaaacaatgagagtgacttaccatcggcctttgccttgtctaaagccttcatctatgctcatcctctccttttctagtgtatcgtcccctcaggagtcaatatgcgctcttctggcccattctgcatggttttaaccattcaggaactcagtcaatcatatttacatgaacacatcaaaattacaccttggttggagcttcttcttttttacactgtgcatgctattaatgatctcattttctctacatgaaccaaagttgaagttaagctctgcaaacaaactgaaccgtaccaaggttatctgaaatagcaaatctaatgactattcagagcctcgatatgaaagtgaatacgctcagtttcttgcatatcttgttcaatcctgaacatgtctttgtcttagccaagtttagctcattggtaacagtcctagcagtctgtttttccaaactgatttgttttgtttgaggagctggtagtgatatgtagatgaatgtttctgagcaacatctgatggattctttgtgcttttcagtaagaacaggtttggaaggacctgggctttctgtttctcaaaagatcttttattgtattagctttgttggtggccaatatatatggtcgcgattgcagtccttttctgctttccgtcgatggggtgatttggaacagagaccactagcacgccgtgcctggggcttagtgcagaatgctgaaggattgtaccaagctgcttcattcttcaacctattattgttcctttatggtggaaggtacaaaactatcgtagaaagaattctgaaagcaagacttgtttatgggagccccaacatgaatagagctgttagctttgagtacatgaatcggcagctggtttggaatgagttttcggaaatgttgcttttgcttcttccgctcttaaactcatcctctgtaaagaagttccttcttcccttctccaaagataagtcggcaggttcttttggtgatgaagcagattgtcctatatgtcggtccagtcctagcattccttttatagctcttccatgtcaacacaggtatgctgcatgctgcttcttactgctttacgttggtcatattcctttgtggtatactcacgtcagtgggttccatcctaacattttgcacaacaacgaagcacgttagaaaaggcacattctgatagctattatgatattagtattgctgggatggtgtttgtttttctagctcaaagtagtagatataagatcattcaaagagatagagatatataaggaaaagcaggtgcatatatcttgttattgtgatcaagtctctctagtggtggtgtgtgtgtgtgtgtgtttgtgtgtgttcaggtctacgtatgactcctattaatgcaatgatacgcagctctcctgcgtgttcgagaaaaaaaatcttgttattgtggaatggtaagatccttaccaggatttcttgacaactgttataatcatatttcagtctaatatctatgtttcttctaagaaatcaaagcgccgaaaagccaaattaaatagttttgtatgagttgtacacatcctaggtgaatatgcaatatctgacttgtatgtttgtttcagacaaatctgatttctggaatgacttatgtcttccttacctattatgctattggtattgtatctaaattcctgtgttgatatttgccttagacaggttctttgtttgtttccaggtactgctattattgcctacacacacgatgttcggctacgagttcttacagatgtccacgttgtaacgaggttgttgttgcaattcaaagacaaggatcagtttagtttacttagtcgggttcaacaattcttgcccatgtacacagactagctctttgatcttgatacttataagtttggatgcccccattgaggattcgcatcatgacagtgtacatgtaatggccccaagcatgggcaattttaatgccatgaattgctggttgtatattgaatattacgtcctcaaatccttggaaatccaagccatgagtatgaagcaagactgcaagagatctcttatgtcctcaaatccttggaaatgtgctgcaaaaaagaacttaatcaccacgagatttgtcccttagatttgtttgtgaaggaagtcaggagtcgggtagagatgattgaggaacaaggtccatatatattcaaagattgaggaacaatgctcattcacaaaatcgttctccatatcatgcctcaaagaggattcgaagctccactgtctttagcacaataaaaaaa

SEQ ID NO: 11919 - DNA, 993 bp, Setaria italica
  Peptide Sequence Number=SeqID_77893
ctttttttaagtaagattattgtcctgttcatctgtcaattgttatgaagttcatatgacacacctattattgttcctttatggtggcaggtacaaaactatcgtagaaagaattctgaaagcaagacttgtttatgggagccccaacatgaatagagctgttagctttgagtacatgaatcggcagctggtttggaatgagttttcggaaatgttgcttttgcttcttccgctcttaaactcatcctctgtaaagaagttccttcttcccttctccaaagataagtcggcaggttcttttggtgatgaagcaaattgtcctatatgtcggtccagtcctagcattccttttatagctcttccatgtcaacacaggtactgctattattgcctacgcacgcggtgttcggctacgagttcttacagatgtccacgttgtaacgaggtggttgttgcaattcaaagacaaggatcagtttagtttacttagtcgggttcaacaatgatgaggacatcaacccctacacaggacctactactccaacggaaccagcaccaacgtcacttcccactacaccaagtccagaaacgtttcaaggtccaataacgcgagcccgtgcacgtgacctaaattatgtgatccttttaaggaatgaagaagaagattctgtccaggaatgacaacctgaacgccatctatggaagctaataaagggtgctgcgccacctatcttttggaaagattgtttccatgtaatacgtagctattttagaaaggttaggtggggatttcagccaaagattcatgctggacgaaattccctccccacctttctcctatttagtcctgctcacgccccttggtttggcgggttttctttgataagtttagccattgtgcaaacgtcctgtactgcagttgtgctcagcagccacctgtggacagccattgtgaaccccaattcgtgagtgattgatattcagttgtgcctt

SEQ ID NO: 11920 - DNA, 1940 bp, Setaria italica
  Peptide Sequence Number=SeqID_77894
aggacttctacgctgggccttgagtttgggcgtagctgtctccagtgtgcccgatctcaagtgtttgggtcgagtctgttcccctcgcacactcagtccctattgttctacacagcctctagtcctggccatataactattttggtacaattgaaatcctgtattgtttatgtagataaagttttactcaaatatgcatcagaatgcttggacagcagtgagttctctaatttgcaaggtcatagttgcctaacagaatgtaagtatataaacatgggctggtggctccattgcaataaacttgatgatatattattataggaactgaaatgcaacaaaatgggtaaagggggcttgactgcactagatcacattgttaatggtttctattgtgacatgttctatatatagacttgtgtttttcgagctatttaggttcatgaaagcaaagtatcactagtaactttactgctgttcgttacattcacctcattgcaatatgaaaaagaataaaaaaaaaaatcaatagaatttatctctactcttcaagcagaagtgttatcgagtctgaaatttggacacgtatgcgaaaaactagacaagtgtggtacgatgaagcaacctcaagcatgttcttacgagcattgctgaatgctgatatttgtactctggggaacttttattgtcacatcagagtgtattttacctgtgtttaattggtatttttgccagcgtcttgatattcagcgagactttatattgatgtactgtagacattacaaagtagaatcctgaactttgagcgctgcatgacagtatgacactgcttaattctgcaggcaccgccacaggacgcatggcacgcggagtttcagcgcctcctcccgctctgggagtcgctgcgcgattcatccaaggtcattatcccaatttcaatatctagggtgaaccagtttgatgctgcagggctagatgtcgagatgtccgcgatgttgaaagagcagctagtcaaagtgttctctttgatgaagccaggactcttattccaatatgagcctgaactcgatgctttcctcgaattcctcatctggaggttctcgatttgggttgacaagccaaccccaggcaatgcactgatgaacctaagatatagagatgagcggttagtgcccatcactggaaaagaagtaagaacaggtttggaaggacctgggctttctgtttctcaaaagatcttttattgtattagctttgttggtggccaatatatatggtcgcgattgcagtccttttctgctttccgtcgatggggtgatttggaacagagaccactagcacgccgtgcctggggcttagtgcagaatgctgaaggattgtaccaagctgcttcattcttcaacctattattgttcctttatggtggaaggtacaaaactatcgtagaaagaattctgaaagcaagacttgtttatgggagccccaacatgaatagagctgttagctttgagtacatgaatcggcagctggtttggaatgagttttcggaaatgttgcttttgcttcttccgctcttaaactcatcctctgtaaagaagttccttctccccttctccaaagataagtcggcaggttcttttggtgatgaagcaaattgtcctatatgtcggtccagtcctagcattccttttatagctcttccatgtcaacacaggttctttgtttgtttccaggtactgctattattgcctaatatttttctgtaagtttatgtcaactgctgccatttttttgtatggtatgcacttcatggctctttattttactaatcatgctggttacagctaatcaagtgtagatggttgtgcaactataatcaagtgtagatggttgtgcaactatatgcaaaacaacatgcatgctatgcctcctggagtaagatg

SEQ ID NO: 11921 - DNA, 304 bp, Setaria italica
  Peptide Sequence Number=SeqID_77895
cagcttccttgcgaacgcaaccaccgcttcggattcgccggccgccgccgctccgcctcctcgccgctcacggcaaccgaccgcggagagaggcgtcgaggcgtgatgcttcccgccgcccggtagcgcgttgcggatgctgtggcctgtgaggctctctgccgccgcttggggatctgggctgctgctccggccgcggtggtggtgaacggcggcgacaggcgccggcgatggcgatgtcggcgaaggagaggaagctgagcaggctcgggagttgcaagggtagtccggcggcgggaggcag

SEQ ID NO: 11922 - DNA, 1419 bp, Setaria italica
  Peptide Sequence Number=SeqID_77896
catgtgctacagtcgtatacatcatttcctgcgattctgctaaagaaggctttgttgcatcctaagaatacctccatgaaagtttacgtaggtggatgtttctttatgggtttgtcgtccattatactgcttctagagaaatcaccgcttctttaccatgcttacgtatttatgacaatattcctttggacaagaattgtacaaaacttcgaatttctgaaggctgtgtggagagaattttctaatatgcccttcaagtatacattgaatctcctgatcagttcgggcattgcactgtttgtattggagtttctggttatgagcttctttgataggaaaatttatacatggtgcttcttggtccttgggatacttggttcaacttatgtagccttttttattcaagctagccctgcacttgcgatatacatatggcttgcttgctggttcctgtctgtattcacattgatgccagctgaaataccagaaaacaacaacttggtaattcttagcggagctctcataatactgatcgcagtggcttcaagatgggccaactcaaactgtaccagcttttggctctatctgactcgagcaaataaacgggattctcaatcctcaaagctatattttgttcaggttattttagttgcaatatcttcaataatggtgtggttatctacctcacatcgatcccagaacagagaattgcactcattacaccagttgatcaactggtctgtagctggtgttgctatggtgctacctcttttctcaccacctagtgttctgtctcgtcttacatctatcttcttggttttgctcctccttttctgctgctttctattggctatgaagcagttttctacagcgctttctcaatggtactgattggatggatatttgtggaatctgccaacctgtactgctcagaagaaagcggttctgcacgccgtagaaaccttgtggatggctcagtgtttggttatgaagaaagacacctacaactatctgatttaagaattcctctgttatttgtgatcttatttaatgtggccttctttggtactggtaattttgcaagtattgcaagttttgagatctcatccgtgtacagattcattacagtatttagtccatttcttatggcaggacttcttatctttaaattgttcattcctttcatgcttgtcatatgtacatttagtgcgataaccaagattgtccggatcccacgattgggctgctattttcttgtaatactgctttcagatgtgatgaccattcatttctttttcctggtacgtaataccggcagttggatggagattggcaacagcattagccattttggaatagtgagcgcccaagtagtcttcgtttgctgcttttgctctgacaaatatatacaccagagac

SEQ ID NO: 11923 - DNA, 331 bp, Setaria italica
  Peptide Sequence Number=SeqID_77897
ctgctaaccgaccccaacaagtgctcgtgtgcaaaatccctactgaccatttaagcaccctgcaaagtccattagaggtatctagagtccactgctcccagccagcatggggtacttctgaggagtgactggtgactaccaagccaccacagagtgtcagcggcgacaggccgaccgggtgcaagagtagtggccgcgtagctcgtcggcgagggcggcgccaccatctcggtgcctactgccttggaatcacgcatccacaccatttggcctcaacctggctggcttgccgagtcacgtcagggcgtgtgagtgtgggccgtcccgtgag

SEQ ID NO: 11924 - DNA, 900 bp, Setaria italica
  Peptide Sequence Number=SeqID_77898
cgcgcgccgtggtgcgtccggagggtgcgcaccagctcgtacttggcgtcggcgcggcgggaggggacgtcggtcaccagcgccgccgcggtgccgacgcggaagatgcagttggtcaccagcatgtgcttgttctcgccgaagtaccagttgaggctggtgttctccgtcaccaccaccagcgcgtacccgggccggcgctggcaacggagcgaccgcgccgccgtgtcgatgcccaccgtgccggcgctgcaccccatcccggccacgctgtaggccttcacgtcgggccgcatcttgaaccggtgcgcgatcatggacgccagcgacggcatcggggagaacatggagcaggccacgacgaggacgctgatgtcggcgggggtcacgtcggctttcgccaggagctgcccgaccacggcgaacaggccctcctcggcctcctgcaccgcaaacgccagcgtcttctcgaacttgcccgagaagatgaagggcggcgcgaaggtctcctgcccgaggccggacttgctgtagatgaggcgcatgaagtcggcgatgtcgtcggagtagcgccggcacttgaggccgaagtactcgcacacctccaggttcacctgccggtccacgtcggggaggtggcagctgtagttgagcaggtacaccggccgctgccgacgcaggacgcgccgactagtgcgactcaggaaggcgagacccgatacgacgagagcaacgagcagcgggagagggagggtgcagagcgacgccatggccgctgccgccgcggcggccgtgctcgacgtcgacgacgacatgaccaccgagctagctcgctagctctgagctactgtagagctagagtgcactgtggactgttaagtggactgtggagtgttaagt

SEQ ID NO: 11925 - DNA, 1025 bp, Setaria italica
  Peptide Sequence Number=SeqID_77899
taaagaagaagatcagaaaataaccgcaaaggaaatgaactaaacatacaagccaactgaagaaaaagatcaagaacatctgaattagtctgcattgcatgggggactatgggacaggtgatccatgttttttagagtgtgctcactgctactgaggttgacctccaagaaccttcctaatgttgtgccgctgctctgacgataacctcttagggaaatcaacatcgaatttgatcctcaggttgcctcttctcccattctccttgacaataggcatcccctccttcgcaatcacaagctcatacccaggtgtcaccacatctgtgagcttaatcaccaggtcacggccatcgagggtcttcagattgactgtagttcctgccaatgcatccaccaaagaaatcttccggtggactaggaggtcgttgccttctcttgtgtacagatcatggggcttctcgtcgataacaaaaacgagatcagcagggagctggtttggatgctcattgcccttgtctgggaatgtgatcttggtccccttcttccaaccaggctttatatcaattgtcaaaatttcggattccgtccctatttgcccgttcggcttcacaacattcctggatatcttcatcttgcgcgttgaacctgcatacagctcttcaagtgtgcagggcagtttggtttccacaggcggtggcttccgagcctgatttgaactcgttccgactgaatccttgtgtgatctgaacttgttctcattcccaccaaacccaccgaaggtgccagcgccttctgtctggaacctcattgactttgctcgccccatgttctcgaaaggcttgctgctaccaaagaactcagcaaagacatcttcagcgttgcgaggattgaaacgttggttggcagacccattcatggatgaggaaccaccaccatctgcagaggccttcagaccctcctcaccatattggtcataatatcgctctcttctggggatcactcaaaacctcgtaacgcctcggaga

SEQ ID NO: 11926 - DNA, 393 bp, Setaria italica
  Peptide Sequence Number=SeqID_77900
agtagaatttgtacacacgaggcccttcaaaacattgattgtccagtaacagttgtctggtgatattccagcatctctcacaacttgcagcagtttgtattaccatattattgcccaataacaaatttacaggtagatttccacctggcatatggttgctgccgaagctcaccatcgtcaaggttcatgataatgctttcactggctcgctgccgagtggattaggtccaagtgttgcaacaattgatatcagcaacaatagattctctggcagattaccagcaactggtaccaatctatcttactttaaacactaactaaactaattttgtattcttcttggttgtaaattccctaactaaaccttctatttgtattcatgcaccactgtca

SEQ ID NO: 11927 - DNA, 498 bp, Setaria italica
  Peptide Sequence Number=SeqID_77901
agcaatgttattgccaataaacgaaaacaatggaagctacactagccaagtgccacggccgattgatcactcgtgacgtaacacatgcatgtttcttatcaggctcagctgcaagaccaagagtccaagacgatactatagtactcgtagttagcatagcaaaagctttttaggtggccagcgtggtggggaagcagctgtcgtgcacgcagctgaggacgtcccggtagtccctgtcgatggtgaaggagtcgtagaccttgccgtcgctgctcttcttgtactcgaacagcagcgacgagtggttgaacgccgtgagcttcacgaacccgaagtcccggtcgcggaagatgctccacttggggaccgccgtcgtgtagtccgacaggtggctgccgccaccgccggccaccacgaagatggtgccgttcatcgtccccgagtaatggctcttctcgccggtcatgcactggctctggtagataggacaagtccgct

SEQ ID NO: 11928 - DNA, 373 bp, Setaria italica
  Peptide Sequence Number=SeqID_77902
ttggggagcgcatcaaatggaacttcaccaagtttttagctgataaagatgggcatgtggtggccagatatgcgccaaccagctccccgttgagcattgagaatgacatccagaagcttttggaggcctagagctccgcttttcttcgctactggttaatcatcataccgtcccgatttctgagtgcccccatcctatttgtatgctaccatatgctacggtgttcgctgcatttgtttgacggcggtataaacaattatcacagcctctacatccaacatgcattcgcctttggcgtagggaggagaaaaatgtaatagcagactgcatgaccgggattggaacatcacacaaatacatggaagaaggggga

SEQ ID NO: 11929 - DNA, 1010 bp, Setaria italica
  Peptide Sequence Number=SeqID_77903
cggcggcggcgtcgatgaagaagagctacagcatggactgcctgcagctcgcggctcctggctgctccatcgtctcgccgtcgtcgtcgtcctcgtcgtcgctgctgctgtccattgaagagggcttggagagggcggcggccaccaacggctacctgtccgatggaaatgccagagttgtggcggagaggaagaaaggcgtcccatggagcgaggaggagcacaggcagttcctcgccggcctggagaagctgggcaagggcgattggcgaggcatctccaggaactacgtcacgacgaggaccccgacgcaggtcgccagccatgcccagaagttcttcctcaggcagagcagcatggggaagaagaagcgccgctccagcctctttgacatggttcccatttgcgagaacagttcgagcatttccgatccgccaagcagcgagggcgcctccacttccctgtcgctgaacgtgtcgcgccatgaacagagctccgagaggacgacggccttcgacctgaattctacggaggaagacgacggcagggccgacgtatcgtcggcgtcaggtgcagggaccagaccgttcccggcagcagcagcagctccgccaccgacggagctgcagcctcctcatggccacgggcacgggcacgggcacggccaccaccactgctccccgttggagctggagctgggcatgtccctgtccaccccattcatcggaacatgacgcgccgctgtcaccgtcgtcctagtcatcgtcatggactcgcgcaggccgcgccaagtttcatcagcgcatgttgctgccatggccgggcgcgcctgccgcgtcagatatctctaccaaatggagatgatgaggcgctaggtaaatgctattcgtgaaagcattgtgcaagaactaactgtggatactgtaccgtgtaatcagcatcggttctgctcctgtaccatgacacgttccttgttcataattcccatgcgcgcaaggcatgaaatttcg

SEQ ID NO: 11930 - DNA, 473 bp, Setaria italica
  Peptide Sequence Number=SeqID_77904
tctttcttcttaattggtttctattgttctaattgcatcaactctggcctttctgttgattccacttctccagacattaacccagtccacaatcattccaggtccccatcgacatcccgcattcgtgcgaagatgctgtacgccacctccaaggaccgcatgaagcatgagcttgatgggttccactacgagatccaggcaaccgacccaaccgagatggacatcgaggtcctccgggagcgggctcactgaagctggtttacctatgaagggacctgtggagggccttgaaccttcagccagattcaaattctatcatcaatgatgctcctgccgtggtattgttaataagttcctgtaagcatatcatttagtcgtgatgcatgactctagctggtgaaacgctatcgaagctcaatccagtatcattaccacaatatatgagtttgcacatgttgcttcgttacaggctc

SEQ ID NO: 11931 - DNA, 442 bp, Setaria italica
  Peptide Sequence Number=SeqID_77905
aggaaaagcaaaagcaggtggttgtggagaagacgggcgctactactgaaagctatgatgattttttggcctctctcccagaaaatgactgcagatatgctctgtatgatttcgactttgtcactggggagaatgtgcagaaaagcaagatctttttcattgcctggtgagcttcataattgcagtctttcttcggtttcatgtttagcagttacattaacctatggtagttctgccaatgaatgactagatctagttaaaaaaagtagttaaacaagtaaaacttataaggagctagtcatgtgctaggattctatatacaaatacttagatgtatctaatgcaccaaacagggcagcacaggaaaccgcaacatgctagctatttagtagttccttttgtttttgtgttgtgagtagttcctttctccttccaaacatga

SEQ ID NO: 11932 - DNA, 527 bp, Setaria italica
  Peptide Sequence Number=SeqID_77906
gagcttgatgcggtccttggaggtggcgtacagcatcttcgcacgaatgcgggatgtcgatggggaccaggcaatgaaaaagatcttgcgaagatgctgtacgccacctccaaggaccgcatgaagcatgagcttgatgggttccactacgagatccaggcaaccgacccaaccgagatggacatcgaggtcctccgggagcgggctcactgaagctggtttacctatgaagggacctgtggagggccttgaaccttcagccagattcaaattctatcatcaatgatgctcctgccgtggtattgttaataagttcctgtaagcatatcatttagtcgtgatgcatgactctagctggtgaaacgctatcgaagctctatccgtatgagatcttgagcctgtaacgaagcaacatgtgcaaactcatatattgtggtaatgatactggattgatggttgtggattgttcggagaagtggaatcaacagaaaggccagagttgatgcattgaacatgaaccattagag

SEQ ID NO: 11933 - DNA, 904 bp, Setaria italica
  Peptide Sequence Number=SeqID_77907
aaaagcaaaagcaggtggttgtggagaagacgggcgctactactgaaagctatgatgatttttttggcctctctcccagaaaatgactgcagatatgctctgtatgatttcgactttgtcactggggagaatgtgcagaaaagcaagatctttttcattgcctggtgagcttcgtgaggttcataattgcagtctttcttctgtttcatgtttagcagttacaatagcctatggtagttctgccaacttcaagacccacttttaaaaaaatagttaaacaagtaaaacttataaggagctagtcatgtgctaggattttatatacaaatacttagatgtatctaatgcaccaaacagggcagcacaggaagccgcaacatgctagctatttggtagttccttttgtttttgtgttgtgagtagttcctttctccttccaaacatgatgaagtgagtattaaattataaatatggatttgatcttttgatgggatctactttatactactatttgctggtagccatgcttagcaatttagtagccctgacaaagaggaataacaaggcatgtggtgcaacagttaagaatattctcggcaataattgttaatttttatgtgagttctgacattaactttttgatgttactatgtgtaccatgtgatgtcttctctaatggtttatgttcaatgcatcaactctggcctttctgttgattccacttctccagactccaatggatattgctcacataagcaggaaacgtggatattgctcacatagcaaatgaatgtttatatactgtattaactaatgcactaaaacctcaaggacatgtggacatgcctaatttgatcaagcggttatcaagacaccaatttcatgaaaaattttacaatagaaa

SEQ ID NO: 11934 - DNA, 976 bp, Setaria italica
  misc_feature (941)..(976): n is a, c, g, or t
  Peptide Sequence Number=SeqID_77908
cagcgagccaactcgcataaaaaagaaaagagaaggaaaggaaaacccccgcagcaacagaagaagaataatcccttctccttgcttgcgcctcccgtctgcgtgcgcgcgtgcgatcgacgcagagaggcgcgggcgctcaccgccgcccaccccccggctccgatccgatggccttcatgcgctcccactcaaatgcatcttccggcatgggagttgctcctaacatcagggagacatttgttgagcttcagatgaagaaggcattccgatatgttatcttcaaaattgaggaaaagcaaaagcaggtggttgtggagaagacgggcgctactactgaaagctatgatgattttttggcctctctcccagaaaatgactgcagatatgctctgtatgatttcgactttgtcactggggagaatgtgcagaaaagcaagatctttttcattgcctggtccccatcgacatcccgcattcgtgcgaagatgctgtacgccacctccaaggaccgcatgaagcatgagcttgatgggttccactacgagatccaggcaaccgacccaaccgagatggacatcgaggtcctccgggagcgggctcactgaagctggtttacctatgaagggacctgtggagggccttgaaccttcagccagattcaaattctatcatcaatgatgctcctgccgtggtattgttaataagttcctgtaagcatatcatttagtcgtgatgcatgactctagctggtgaaacgctatcgaagctctatccgtatgagatcttgagcctgtaacgaagcaacatgtgcaaactcatatattgtggtaatgatactggattgatggttgtggattgttcggaaatgccattgttggtctgaacttgttacctaaaaaaaaaaactaaaagagaactgccaaggacgacacaggagnnnnnnnnnnnnnnnnnnnnnnnnnnnnnnnnnnnn

SEQ ID NO: 11935 - DNA, 544 bp, Setaria italica
  Peptide Sequence Number=SeqID_77909
gtgaactcaggcccaaagtcacaaaagacactaccaaagagaccacagacttctgttttgataaaggaaattgggggctggtggctgcgacaataatcatcgaattgaaatgccttgtccagactaatgtcagtgaaaacagccacctgaaaatcagaaagtgtaagtatgataactgtatgatgacttcacagagttacgttgacgatttatgatacaagacttgaacactgcagcaatacattcagtgatgctaccaaacatgtcactatcattaaataaattgtattggagggaaactttatcaatttaatctgaacatataggcttaagtcatatgatgttactaatcggaggttgcaattgtggtgtcacttaaagatttccaaatttattgactgtggaaagctatcaagatactatcaggctcacacagcgagatactaatatacaaggttggttaaggggttctgcagtagaataaccaaaccaaacttactttacaacaaaagtaaggttaggaaaaagttaaggtacaatagga

SEQ ID NO: 11936 - DNA, 552 bp, Setaria italica
  Peptide Sequence Number=SeqID_77910
gtgaactcaggcccaaagtcacaaaagaacactaccaaagagaccacagacttctgttttgataaaggaaattgggggctggtggctggcgacaataatcatcgaattgaaatgccttgtccagactaatgtcagtgaaaacagccaccgatctcctgcgcgagcaaggttcgctcgcctgcttgcgtgctcgcacaggccgcctgaggcaccgtcgaacggcgtcacggtgccacagggagctccgccgccgcgattcgagctccgccgccgccgattcgagctcctccgccgccatcgattcgagcttcgacgccgccggatcgagctgcggggctaggcaagatgagcagcggcaaaggaagcaaacgtccccttgggagctacccttgcttagcctagcgaggcgagcggcagcaagggttccaagcacgccctgcagcagcggcggcgaggcagggtagcggtggggagcaatgacaggactagcgagggagggtgcggcgagctcgaaacgggtcaaagctgtgcggtggctccagagcggcgagg

SEQ ID NO: 11937 - DNA, 382 bp, Setaria italica
  Peptide Sequence Number=SeqID_77911
aagaagaaaggtttcagacagagcaaccatgaagctgcaatctacaggcgtggttctggaaattctctgttgcttgtcggtgtgtatgtggatgatttgatcatcacaggggccaaggagcaggatgttgaaggcttcaaggctgaaatgaaagcaacatttgagatgagtgatcttggccttctaagcttctatctgggtattgaagtacagcagagcgccaatggcatcactcttcgacagacccactatgctaagagaattctggagctgggaggaatggtggactgcaatcctgcagccactcctatggaggaaaggctaagattgagcaagaaaagtacagccaaggaagttgatccaacacagtacaggcagctgg

SEQ ID NO: 11938 - DNA, 894 bp, Setaria italica
  Peptide Sequence Number=SeqID_77912
tatcaggctcacacagcgagatactaatatacaaggttgggttaaggggttctgcagtagaataaccaaccaacttctttcacaaagtaggttggaaaagttaggtcatggatgcatctgatagcatggaagcacatctatggtataagcaaaccctacacagacttgcaattggcaaagagataaaatacagatttgcactgattcaatttaactccaggtttcagtaattttcatttcaagcaaataaattcacctaggccccacaaaaggaaatcatttggtactatgagcacgatgacacttggatacaaaagaaaaaattactcataatcataggatcagatactgaaatcaaatagagaatatgagcagaaacactaaagatcatatcaaaggccaggatggattagcctgttactatcaacaccaggaattaacctgaatacgtctataatgtcatacacttcaaaatgggatctcaaataaaatagtttctcaacaatgattgtgctacctatcactggataggaatgaagacaacacaacaagaagtaacaaattttaacacagtgtagaactagcagacctggaactttgaaaggtgctcggtggtcaattacttactagttgcaggacaagaaacaacattgttaagttcttgaagctttgcaacacaagcaacagccctgtgttggaggtacagagtgttttctcagccagggataacacacccaggcgacacagccctttcatatatagagataagtagcacacattgattacattaatggctcattagagctttaactaaacagctaactgcctgggtacttgcacagttacttgtgctgcccaagaccttaatagcagagacataattaggcacagata

SEQ ID NO: 11939 - DNA, 713 bp, Setaria italica
  Peptide Sequence Number=SeqID_77913
tttttttaatttatttgtgtttctagataggttaactctcggggttgtgttcttagtatttgtgataattttgcacatggccatacttaaagacctgaaaggtattaatcagcatttatcaatatgtagaacgacttaagttttgctcatgttatcggttatcggtcttaagtcgtaactagatagtagataattgttggaggtacagagtgttttctcagccagggataacacacccaggcgacacagccctttcatatatagagataagtagcacacattgattacattaatggctcattagagctttaactaaacagctaactgcctgggtacttgcacagttacttgtgctgcccaagaccttaatagcagagacataattaggcacagatacctaagagataactgggagcagggcttaacttctacagttctccccctaagacctgcttccccatccttgatcttcatgatcccaatcttgcttctcatgtcttcaaacttggccttgcctaaggccttagtcagaatgtctgccagttgatcatttgtggcgacgaactcagtcttgatgctgccttcttcaacacaatctctgatgaagtgttgtttgatcctgatatgcttgcttctgtcatgaaagacagggttctttgcaagtgctattgctgatttgttatccactcgcagctctactacttccaacttta

SEQ ID NO: 11940 - DNA, 825 bp, Setaria italica
  Peptide Sequence Number=SeqID_77914
acttacttacctacctaccaagcacctcttctcccttctctgcaactatctctgcgcgcagctgctgcgccgtcctggccgccgcctctgcggctgctgcagcctgctgagccgcctggacagcctgcgccacagcctcctctgctgccttcaggcgcgcagccttctcgcccagctcggcttccttggccttcctggcccggcgctcagcagaggtcgacgccatggtagagagaaacagaggaggagttcgagttggggaagatgagaaggtgagtgtctaacctaagctctggtaccaattgttggaggtacagagtgttttctcagccagggataacacacccaggcgacacagccctttcatatatagagataagtagcacacattgattacattaatggctcattagagctttaactaaacagctaactgcctgggtacttgcacagttacttgtgctgcccaagaccttaatagcagagacataattaggcacagatacctaagagataactgggagcagggcttaacttctacagaaggtgccctcagacctggtaaggaatccttgatcttcatgagcagagggcgacggcgaggtgggggatcgagcaagagccgagcaacgggaaaaggagggcaggaggcggcggagagaggagaaaaataagggaagaaaagagaaaaacgaaaaataaaataaaaaggataagagagcactatagacatttcattgtttttatccatgttacacagctaggagaagccgttttgccaaacgtttttccatctagacaagccgagccaaaaacagctgcttc

SEQ ID NO: 11941 - DNA, 567 bp, Setaria italica
  misc_feature (564)..(564): n is a, c, g, or t
  Peptide Sequence Number=SeqID_77915
tttttgttttttaattttttctttttttggtttttagttttcttttgggttaggttaattggttggtactgcaatcctgcagccactcctatggaggaaaggctaagattgagcaagaaaagtacagccaaggaagttgatccaacacagtacaggcagctggttggaagcctgcgatatttggttcatactcgacctgacttggcatttgcagtcgggtttaagagtagatttctggagaggcccaccatagagcatcagcaggcagtgaagcgtatccttcggtatgtggcaggcagtctggagtatggcctgcacttcaccaaggcatccagtgaagccagattcattggctactgtgactcagacttggctggagatattgactcaagcaagagcactacaggttgtctattcttcctaggcaacaatctggtcagttggcagtccattaaacaaagagtggttgccttatctagctgtgaagcagagtatgttgccatgactactgctgcaacacaggctctgtggctgtccaggttacttgctgaattgttgggaaanaag

SEQ ID NO: 11942 - DNA, 2425 bp, Setaria italica
  misc_feature (1)..(25): n is a, c, g, or t
  Peptide Sequence Number=SeqID_77916
nnnnnnnnnnnnnnnnnnnnnnnnncctttaaccaaaacctgctttgtggactagcagcagcaatgggaaatccatccaccaaattatccaaaagatcgcattgcacacctgcaaatagttggcgtgcaacagcggggcccaagcccccgtacagagctgtaaggagatgcaccgccagcaagcaactccagcagtgatcactccgctaccgatccctaaagagcgcgacactatataaacagagtttacgaacgcactcaaaatcgcttttcacatggacctttttcacaagcatcatctatttccacgcagcaacctatctatcggaagtaaatggagataagaggaatgtcgatgtccttccctttgtcatcctcacaagcaacgacgacatccagatgcttcctgtattctgggacgtcaacctttgccacctccttggcaacatccgcaatcttcctgctcaatcgatccttgtgccttgggaacattgtgttgtacagcaacgatgtgccgcaggagacactgtaagcgctcaggcccttgtcacttaaccacttcagtagctctgcaactgtgatgtcacccttgatagaccatcgatcccatacggtccacctcatacctttatgcttgatcacagtgggtggaagaggttcagatttggtgagcatcggtagcgccaggttagaaaatgtattgtggtagtcttcgactgggtgcccaccggccagaaccttgtaaagctcaaggcacacaagtcctgtggccatggctgttgaagttgcaatagccgggatgatccttccagcaataaacttcgccttcagcctgtcgacctcttggatgccgtagttccttgcgcgcatatttgcgaggccagcaatcaagtccatgtggaaatttgtatcatcatccttctcaaaatgaataggtttcaatcggaatcctggaggtagtttcttggcagatgcttccaacttggctaaaaggtcttcaataacagcggcatcatcaactgaggcactggagatgttattggccttttcatccgtctcaatcttaaccccactctttggcttaaattcaggtacgtaaactttactgattgcatcgatcagattagtagtgctctttgcccagtcaggtacagtgattccaaaagacactgctctcaatatggaagcggccattataaactgaacgtgtgataaatccgtagttgaaaattccagcgggcgagggaaacgctttggagcagaccagaaaggggctcccgtgctagtggcggcatcttcaggaaatgtgaatgttagctgcttcacacgattagagaagtaatcttcaaatttcagtcttgcccaggttatgcaatcttcaaatctttcacagcgctccttctcaaggcattcacgtacacgctcaagcaattctctggcctgagcatcaccagcctttttcatggcagcagcatattgcgtaggattagacagaaaagagttgacttcatttggagttttatctagcagaccctcaaattctgagcgagcccatgtcacacaatggtcaatattgtgcggaaatgaatggactgtgcacatgggtgcctgcttctcaggagggtcttgtgaagccccataattttcagtaaggtgaggaattaccatttgtgtattacatttagtacccaacgttccagattccaagagtggtttctggaagtataagcatctcatgtccatgtacatcctagcattaacattatcaagtgcattgatgacaacatcaaggccctcccagaatgcatcatggaacacatgctcggtctctggacaagcacgattctggagagcatcaatgtgaaggcaggaattgatagcactagctgctgtagctgcaactgtagatttagcctgtccaatattccaatcacgaaacagaaattggctgctcaagttacttttctcaatgacatcatcatctgttatagttagtttccctttacggctgcaagatactcccattaaagccaggttcttcaagaattcgcatccaagagcaccagatcccacaacaaagacattggcatctcgcagctttttttgaagcctagagccaaaaacagaaatctgagcatcatagcggctattcaatggcttcaagtctttagggtccaattgatgggttggcagagattccaccgaatccaagtagaagaactggtacagtggctgaaattttccagaacatgccttcacaacttcttgaccaacaattccaccaaaaatagcagccattgggttcaggacagctctagaaccacttgcaaaaagccgcagcaacttctcatcaagcttaccttcaatcttgtaatcaattgtggcttcattgaaagaagcagtgaactccacaatcctttggcca

SEQ ID NO: 11943 - DNA, 1641 bp, Setaria italica
  Peptide Sequence Number=SeqID_77917
accggggccaccatcgcatccaacccaaccctggcgccgccgttgcctccaactccaccccggcgtcgccgccgtctccagcacgcagaccccagcgtcgccgtcgtctccagcacccaccccggcgccgccgtcgtctccggcacctacctcgtcatccatgccgtcatcaatgccgtcgctgtgtgagggtgccatcttgatccattctgctggtatagtggctgaaattttccagaacatgccttcacaacttcttgatcaacaattccaccaaaaatagcagccattgggttcaggacagctctagaaccacttgcaaaacgccgccgcagcttttcatcaagcttaccttcaatcttgtaatcaattgtggattcattgaaagaagcagtgaactccacaatcctttggccatcctgggcacaaccaacagcagggaaacgtccaaactctttcctaaatttatccaaagctagaaatgcaaaatgaagcagaggtggcggtcaaacttcaaacaagcactcagagggaacttgccaggttctctaatagaatctctcaaactcttaaattccacaaccatttgttctttcacctgcgtaacacttccatcttatgtataaatgccaaagttacttgtatcctcctcgatgcaaaacgaatatggtcttgaacgtattatcttccttggcttgccatcattcagttcattcattccctggacctctgagaaaacaacaagatcaccttcctggaaatcaaggcgctcaccatcaatacagtataccgttgcaggattgtcattgctgatgaatgcaattatgccagtatgtggatcttcaccatcaagatcatgaacagcgaactcaggcccaaagtcacaaaagacactaccaaaaagaccacggacttctgttttgataaaggaaattggcggctggtggctgcgacaataatcatcgaattgaaacgccttgtccagactaatgtcagtgaaaacagccacctggaactttgaaaggtgctcggtggtcaattcttctgttaaagcagatatatcgacagcattgttaagttcttgaagctttgcagcacaagcaacagccctgttcttcccaatgtcatcctcagatagaaagaaattgcccgataggtcccacatttccacatttcccgcatcatgtagggtgacagacttaacaccagccagagcaagattctttgcgatctcagctccaagcccgttcagaccggagatgagcacgttggacgcgaacagccgccgcatcgtctccctcccgtacacggcaagctgcctgctgtgcaggtcctcatcgatctccgccaccccgctcatattgccgctccccccgccgccgcccgcctcctccccggccaccatcgcccctgccccaacagccgattcccctgcccagccttcttcacgaccccgtcgctgctgtcctcaactccctccgctctcttcgtcggaagcatatagtgaaaactcggctttaccgggtgggggcgatcggagcggcggctagggttcgcgcggcggtcgcggcctcgaggctcgagggcggcgggtcgcctcttccttcggcttggaggctaagctgatgagatggaggtact

SEQ ID NO: 11944 - DNA, 1013 bp, Setaria italica
  Peptide Sequence Number=SeqID_77918
cagacaggcacctcatctcacgggaggcaggagggagacgacgaacccgtgggatctcgctccgcaccaaatcccctctccccaaaatttttgctagggctttggggggaagagaaattcaggcgcccagacccaccaatccgtggagtccgttcggcggaggcgccatgagctcggcgcaagatccattctacatcgtccgggaggagatccaggactcgattgataaactgcaaagtaccttccaccgttgggagcaaaccgcttcaaacacaggagaatatgttcatctgacgaaggatcttctgaccagctgtgaaagcattgaatggcaggtagatgagctggaaaagactatctcagttgcatcaagggatccagcatactatggacttgatgaggtcgagctttctagacgaagaaactggactggttctgcccgtaatcaggttggtacagtcaggagagctatcgaaaaggggaagagcaattcagcaacttcaagataccaggacacaagcaggaccaacctctattctgcccaagacaatgatgactttatttcctcagaatcagatagacagcagctacttatgaggcagcaggatgaagaacttgatgagctcagtgcgagtgtccaaaggattggcggtgtagggttaaccatacatgaagagctgtctggacaggaaaggatcttaaacgacctaagcttggagatggagactacttccaaccgacttgatttcgtgcagaaaagagtggccatggtgatgaagaaggctggcatcaaggggcagatcatgttgatcgcgttcctggttgttctattcattattctcttcgtcttggtgttcttgacatagccaggtgcaccagaggcatcatctgtttgcccccatttgccgtatctgctgctttctgtcatgtgttgtgaaacataaatatacgagttacccatcatttacaaatcttgatttttctagaacaaaaaaaaaaaaaaaaaaaaaaaa

SEQ ID NO: 11945 - DNA, 864 bp, Setaria italica
  Peptide Sequence Number=SeqID_77919
taaccaataggaagaacaacttaatcatttgattgtcaagaactgcaatcattttacggctgatgcctgccagcgtctgactgggaagccagtgcctggatgggtcaatcgactcgccagattaggtcacatttcttccacaacaaaccgactcataatctctctcatccttgatgatgctgattgtcaactgcttcgtttggaactgcaggttccttcttcaattgcgtattgcccgagagcatcaaggtttcagcagtcacaaatgcaaatgggcatcctgatttttctggtactctgcctacaccccggtttatcatttctcacattcacatggttggaattggaccttacaacacatatgccacttggtcaaagattgttatagcaatgtcttagctgctcctgcgaactgcattgcataagttgctgcatgaacaagttatcttccttttttccatctttggtggaagataatgaaccgagttaccaacatataatcttcaacacgttgaaatgaaatactgaaggcgtgcataaaagtcggtctagtctctatatgcttcatccatcttccggttctcaacatgagctttcgatgctcattactcggctactctgaatcacatacatgaccccctgaaatccagcactgctcctgaaattggatgggtctttgtttgttgctattgctgcagatgatggcttggggtctaacgcgtcgatcgttgagggaagcgatgaagatgacttagaccaacttctaagaacaccaaacagcgacgttgtatcttcaagagacaagacattaactcctggcagggatagcttctaattgacttcctctattctctgttttgttta

SEQ ID NO: 11946 - DNA, 1288 bp, Setaria italica
  misc_feature (1271)..(1288): n is a, c, g, or t
  Peptide Sequence Number=SeqID_77920
ggccggccggcggcggcggctgattctgctcgagatcgagcaggaggagctgctcctgaatttgctgctgctggtggtggtggtgccagatctgccttcctctcccgcggcagcgccatcttctgcgggcgggagccatgcgggtgctgccggcgtcctggtcctcctcatccgccaaggccaccaccaccagcagcaacaccaccgagggcgaggagcctcctcgtcctcctacggtgggggcggccgcggtgtacctcaacatctacgacatctcccctctcaaccactacctctactggttcgggctcggcatcttccactcggggatcgaagtgcatggcatggagtatggctttggagctcacgaatacccaaccagcggagtcttccaagtagaacccaaaagctgtcctggctttatcttcagacgctcagtgtgcgtcggcacaactgatttgtcccgttcgcaagtccgcacctgcatagaggatctcgcagaggattaccatggagacacttatcatttgattgtcaagaactgcaatcattttacggctgatgcctgccagcgtctgactgggaagccagtgcctggatgggtcaatcgactcgccagattaggttccttcttcaattgcgtattgcccgagagcatcaaggtttcagcagtcacaaatgcaaatgggcatcctgatttttctgatgatggcttggggtctaacgcgtcgatcgttgagggaagcgatgaagatgacttagaccaacttctaagaacaccaaacagcgacgttgtatcttcaagagacaagacattaactcctggcagggatagcttctaattgacttcctctattctctgttgatagcaagcattgccttctgggttgtctgctgaggatcagaggcaggtgctttggtggtgatcgcctgctgtcaaagcttcagaccttattgattgattggttgatgttgctgttatcagttcatgtagtagatatagtagggtataatgtgatgatattgtgtttgtgatatcttgtggcgaaggccaagttaaccagcatatcatgtgttgtgcgcgtgtggggtatatgctgtagtaacttagtgagaatggtgtggcatactgtcttgagtagtgaggtcatcccttttctttgactttgtacggtgatggtgtgtgtgagtgatttcttgtgtacaaaaattagttgatggaggttgaaatggttttccagatatatttatatacacttaaaaaaaaaaannnnnnnnnnnnnnnnnn

SEQ ID NO: 11947 - DNA, 509 bp, Setaria italica
  Peptide Sequence Number=SeqID_77921
cttcaggcagcatcctcaagtttgagattttttattaatttttacgctgcagatcattgcaacagttaccggagtagaagcatttgtgaatgcagaaggaacacttgcatgtcaaacgagggttaccatgtccaaatggtcaaaagtccatctgtggaaagcattaaccttttggtctaacagataatgatgattataactcaaatatgctatgccctcactaatgctttttacaatgaaccagcaatgacatgcccaaatggaacaacagatgtagaagctactagtaagcttactaacataaaagtaagatatagtataccttccagacatgtgtatcgacaggaatagcatgattttgatcaagggagaacagagcaatgcacgcagcaacctttggaccaacacctggcagagtgcaaagagcttcaatcacctctggaagttccttctcacgcaatgaagcaagccatttttcacctccaccaggtttggcctgcagttctttt

SEQ ID NO: 11948 - DNA, 615 bp, Setaria italica
  Peptide Sequence Number=SeqID_77922
cgagttgcccatctagatatctggatttccattttcagcgggattttgagaaacccaatatgccaatgaagcagctgctcagtacctccatgttcagcagaagatcgtttgtcgtgaccaaataacatcgtagttactggctactgaacgagaacaacacagaagaaatggcaaaccttgctatcactggtttccatgctctcccatggttacatgttctcaattttcctggtttcggttccccgcacgcttccttttggttagattttgtggtgccaccgtcagtggtaactttggctatcacaactttttgagcaggtagctggccgatgaagagcacattctgtgcccagccagcatagcttccaaatctagttacaaatgcatcggcgacgacaatgctaagtttcggggtcaggctcttcccagctagctccggcaacagatactgtgtagcaaccttccagacatgtgtatcgacaggaatagcatgattttgatcaagggagaacagagcaatgcacgcagcaacctttggaccaacacctggcagagtgcaaagagcttcaatcacctctggaagttccttctcacgcaatgaagctaagcctattt

SEQ ID NO: 11949 - DNA, 470 bp, Setaria italica
  Peptide Sequence Number=SeqID_77923
tgccctctgagcaagattgacatcacttattgaatcagcaaatgtctctttggagattgtttctgataaataatcttgtgagcctgctcggtggaaaagtaaagcagttgcaaaattgaaccaaacagggaaatttataatcatgtaccaagcagaattatattttaccaatcccttcaatggttgcagttgtgagttttttggtgaagagcatctggttcttgtgttgtccaaatgaaccaaggaatcgatacaagaaactaggtccaaaaaggctttacatgataagggtccagttagtattgcaagcaagtcactatgctggatgaggcagatagcatgtggaaaggggaacttctgtcccaattctatggatattccccatgacattggcttgagaagaatgtctaatgctgaagatactaatgcactgtgaagttctagaacagaacccaaacccgttgctagaa

SEQ ID NO: 11950 - DNA, 4130 bp, Setaria italica
  Peptide Sequence Number=SeqID_77924
aagttctctgctaaaaccagttgatgcaaaatctggtccgatgcaccccttttttttcttttgttttttcacttctcgatgctgtagctgttacattcacgatcatgtgtgttcttgtgttttgcatgcggcatagtacaggctacattacctcatgaattagcaaggctattgtacaggtgatttcagcctagcaacgcagtacactgctaaagtttagtactccctccgttcttttttatttgacgttgcttagctcaaatttgagctaaccagcgtcatgtaaatcagaacagagggagtagtttactcgaggttttatctacaaacccatttttctgggcctcagatatgtcgcgcccttcttcagaccaggcatagcaacctgctgctgctgcttagctctcttctcccgctccttctccttctcgattcgcgccgcctcggcttgctcctgcctcagcttctccatctcttcctccattgccgtcttctcttccttctgcctcttcttgtggtccagaagggaagtgtctgtctccttcactgagaaaaacatgggacccatctccgctagccattgcgggtcaaccgcggtaacgcactgcatgtactccttggtggtcaggacaagctcgtggtagacgacgtagtctggagtgtagccgaggccgtagagtgcactgctggggtgcagatggcaaggcatcccgttccggcagttgacatactccccgacacccttcaatcgggcagagttgtggaagtaagcagagcagatagctttcctcaccacgtcccattccatatggcatgatgtaagggggatcttcagggttttcagtatgtccagcagctgagatctcacttcccgagccttacggagacccttgacatggaggaagtgatcattgcaccagtctcctcggtattggttagacttccactgaagatacacgttcaggagtgtcaggtggtcggactcagggacaaagaacttctcccgtgctgcatcactctcctctgctcgatctttgggccggaaaaaaaccgagggtaccgatagcatggaaacaatggtcagcacctcatcaaggcaccctagctgctctcccatgagaagcatctttgctagagtcgggtccaatgggaactccaccatcttccagccaatttctgtaaggccaccaacattgttcaaggctcctaatacccagagttgatacatggagttgaggatattctcctggggaggagggtccatgaaatcaaaatcaagcaagttttcaactctcagagatttcagtaaaagcaccacattccccaggttggtcctttggatctctggcacagggttagggagcatctcattctggtaggctgattctgtgaacagcctatagcaggtgccagggccagttcttcctgctcgacccgcacgctggtcagcagctgcccgactgacagggaaaacctggagggcatccatacccatccgtgggttgtacaccttcatcttcccatatccagtatcgatgacgtagaagataccatccactgtcaatgaggtctcagcaatattggtagcaactatacatttgcgagcaccctcttcagccttctgaaagatcttggcttgcaagtcagctggcaactgcgagtagatcggcagaatctccagcttaggcacagtcttggtggacgatgatatcagctgctccatgcgttcagcaagagcatagcaggtagcctcgatttcctcctgcccagtcatgaaaatgagaatatcaccagggccactggtgatgtggatagtcattgcctgcttcactgccccttccacatagtcctcgcatggcgttttgctgaacataatgttaactgggaatgtccggcctgggatatggaataccggcacgcctccaaagaacttggagaacttgtctgcatttagggttgcagatgtgacgattagtttaaaatcccgtctgcgtgcaacaaccttcttcaatataccaaataaaacatcagtgttgagtgacctctcatgtgcttcatccatgacgataacacgatacttgtcaaggtcagcatctttcaaggtttcacggagcagcactccatctgtcatatactttattatagtgtttggaccagtgacatcctcaaatcgtatggcgtatccaactttatctcccagctcagtctccatttcctcactgactcgcttagcaacactcatggcagccacacgccttggttgggtacaaccaacaactcctgtggtagtatatccatcctcatgcagatactgagttagttgagtagtcttcccagaaccagtttcaccaacaaccacaactacttgattttcacgcacaacctgtagcagatcatcccggacagtaaatatgggaagatactgtctttgttgagcaagagattttgatttggcaaaatcactgacagcttctactttttccttcatatgttgagaaaactttgcttcttctttaaaattaatctctccttggtcaccaacaacagcagtatctgcatcaacctgttcagccgttttctcaacacccaagatgttcccaagcttagatccagcaagctcccaaaatcgttgccttgatttattcatgctctgcttttcgacggatttccctaaccagagtagaacctttgcgtgaaataatagccatatcggatagtaggatccttcagcggcattacgggttctgcttgttttgtaaatacaactcgtccatccaggaacggaggctttgtgtcatgcacaagaagtattactttccgctcgtcctcatcatcaaattcagtctggacttctgttcctttaacagctccagatctcaacaattgtctatcctcccactgagcattatcagcagtcatctgtgacatctttttgctttgagcaagggtcatcagactaccatctctgcgagtcagcttcttcggcatctctgcttccttctttttgtatgaactgtcatcatgatacatagcattatcaccatcaaacatggtggtgtgttcttcacagtcataccatgcacgatcagcattataatccatctcttgcatcatttcctcggttagctcatggttcctatcaggatttgaggggcttctatcagcatcgatgacattagaaccagttgttgatgaaaaggtgagctggtgcgatcttccaccggaacctgaataagaagacccttttgaggaaccagaagcacgtatcggggcaggtgaaggggatacattatcccacggggatgctgccgaacgtggtgtattccctcctaaccaaggagacaccaagcgtgcatctggggatgcagcagcaagcataggagatcgtgttggatgctgccttcgggagccaggtcgatcgtcacggtaatctcgacgaggtgtatcttcccattcccagcgtccatcatcccaatcagatcttgcaggtgttcttgaacttctcgagccatgcccatgtcgacttctcttgttagcgtaatcaatggacgtagatctctcacgctcatcacgcctagtatgagattccctatcatcatggtatcttcgccttccactgctgctatagccaatggatgcagatctctcacggtcaccacgattatcacgggatcctctatcatcatagtagtcataactacgaggagtgtcatgagcacgtgaaccttgagagcttctagagatgtgggcctcttgacggcgggcctcatcccgacggctgggtgttgggatcctttcatcctcatcagcaacattcgaagatgttttatcatcagaaccacttcctcgatagcgtcgtgatgaattactgcgacctgctgtggacaggctcgtcgtatcattctcgccaggtgctggcttctcatcttcatcaacggaatcagccgcaacagctaccttgggagggggtggcttaaacacattgctgccttccgatccccgcttcctgcgggcgaggtcgtcaagacctaggacggacttccctgtctgcggccggtacatgaccttactcggcagaatcagcccctgcgccgtgttgtcctctgggcccagggtggtcatcgtcgcgt

SEQ ID NO: 11951 - DNA, 1247 bp, Setaria italica
  Peptide Sequence Number=SeqID_77925
atattggtcctactacatgtcataaatacaccggaagaatgctggaacttttgaagaaagagtttcgcatctacagtgtgcttcagaacaccaaagccacagcacataatcgaaacggaaaaaaaaaaataatgtaataataaatggggagctacagaggcctgcgcattgaccaaagcgccgggagcaatcgagagaatggcagataaataagggtcaatggcagcctcatgtcctcagccctctgttccttgtactgtgatcggtgtggatcaatggcagcctctggttctcaggcctgcacaattgaccacaccaaggagctgcctcttccccccttctgtcctgataaaatggagggaatggcagataaataaggatcaaagtcattctcagggctggctctcagccctttgttcttagtattgtgatgctgcctttccccccgtctgtcctgatccttgtcttgccgatcaccggcttgccagagaacgcggaagttcccaggatttcaggaggtttctttggaggagcacggattctctggttaatatcctgcagagtaacatcggtttcctcccaagatggtttgatgagggtaaaagggtatgctacagttgtagttatgttttgcttcgccttgactagcgatgagcttcctcctttagagactttaagtgtagaaagcttcctagtttcctgcattatgagattttctgtcactggagcaatctcacttgatcctgaaataccagcttgatcatcgacatacactacactctcctgggtacaaggcatttgatcaggctcgacatatactggaggagttccataagagcaacgttccaactggttatcttcttgccaatagggtgctccatttgacaaggaatttatagtatctaaattatttgagctgtactgcatatcacaatttaaactccgtggttcatcagtgcaaagcaatgaaacctctgttgcctcagatgcgacaaaaggagaaccagtttcatgagttccaacttctgactggctagactccgaagggtactccaacgtacgtcttcgctttgattcccgagactcctctgggtccagggtctccttgcaggagatatctggtatatcagcgaagaaatcacggcagtccctcagcggagtttggttcccaagcaatcctagtagctcatcgtcatcttgattgaggcaatcccacacgaatttagtggcatccgcattgactcgca

SEQ ID NO: 11952 - DNA, 291 bp, Setaria italica
  Peptide Sequence Number=SeqID_77926
gctcggccacgcggctgggggatggacggcgggcggaaatggacggggctggagccgagcgtgggcgaggaggccgacggcgacgagggaaagagcgacgaggaggatgcgtcggcggcggcggcgggaggcacggtgctggggtcggaggcggagctacgggaggcgaactcgccggagggcgggccgacacgcgggagcggcggcagggggcggagctccggcgagccaggtcggagactggaactcgtccccggggcctgcggtgccggcggcggggtggctagggtg

SEQ ID NO: 11953 - DNA, 406 bp, Setaria italica
  Peptide Sequence Number=SeqID_77927
ccgacccaagttggtcatctttgcaacagcctggtaaccaccagggaagttatggagaaagtggcaacttgcaccaaaggggacagccagcagtgctgaaaaatttggtgcacggcttggatttgcttcctacacccatttgagttgtctcgccttctctcgcgcgcttggggccgcccgcgccgttggcgccctccggcgcggcccgcttgcggccggcggcgtccatggcgagctcggggtaagagcgcgcagtactggtcgacggcagcggcggtggcggcgggtagaaccctagctagggtttcgccctcggcgggggcggcgggcggaggggagagagataggtggggaggccgcagcgggaggcccgaacgaaccagagacgcgcgggcgcaaacctgat

SEQ ID NO: 11954 - DNA, 446 bp, Setaria italica
  Peptide Sequence Number=SeqID_77928
ctctctccatgagcaaagtggcatttgctcccccatttacatccttctgcagtgttgtacttgttacacatgcgagtcttcacagcaggtgaaggtggaccatcaggagcaccatgtcccataggcattctcgctggaggagccggaacaggcggtccacccaagttggtcatctttgcaacagcctggtaaccaccagggaagttatggagaaagtggcaacttgcaccaaaggggcagccagcagtgctgcataatgaaaacaccatataagcaactgaatatgcaaatatatttgatacctaagaactacaatatgaattgatgatccacaaatgcagccaatgctgatgaaagagattatgtcacatgctgagtaatgcaaatatactagatgattcctaacattgatatccaatgaatgaaaagataagtagatgttactt

SEQ ID NO: 11955 - DNA, 787 bp, Setaria italica
  Peptide Sequence Number=SeqID_77929
ccatctcattccgaaccttcaatgggtacactgcatgcgcttcagcagaataagttgatgcggaagtcgtatttgatggcagatctgccctatagacaagtttcgtcagagctttggattcgaaattgcttggtgaatccattgcaaggaatatcatggggactgcaaaactgtgatgaatatctaaggttcctatagctttaacaagatacgagaagtcaccgatatgccgttgaggtatgtaaaatatctcactgctgcaatgaattatcttatgttcacctacacttcttctgtaattggtttgataatgaggtgggaaattgctgactgcctttttaaccatatctccttggttcacaaaccgctcaattttgttaccttgtagaggcacatctgaccatgattccttcacctggttggttatccagagctttgccttattagcattcaagaggttccagtaattgaggaccacatgatcctgaaggaacagaaaaccttgagcacctgcaaaccgatcaaacaccttcggcaggtacttgtaggcttgtgccaagttgctgaattctacagcaagatcagaattgctttgctctgaaagaataacaactgcccgaaatatccgaccataaagcagcctccactctagtgcagttcggtccaccggttcagtgcaatgcactatgagcacaatgtcaccaaaatgcttcctccattttataagattgccaatctcagtgcttacttctccaatctcctccaccccaagatgcactgaaggcag

SEQ ID NO: 11956 - DNA, 484 bp, Setaria italica
  Peptide Sequence Number=SeqID_77930
aagacaagacaagaagcagcagatggcggtcaagccaaacaataaggtcgcggacgatggcagcgatgaggagggggacgaggaagaggagagggggatgggcgggatgatgttctgcggaccttgcgtcttacctttcccgagaaagatacacacgagcccctcagacgagaacctgcaggtcttcgctggcatcttctctggcgggctcaggcattgccgaacggagccctcatttccaaagtaagctccattctttcagttgattccttgtgaagatagtctgtttcctgttgttgtgggcaattagcttattgacgatgaagatgtagtgctgggttgtatcatagcatctcttgttatcactgagtatgttacatcatattgtgcggataatggaagtatagagtattagagccgtagggaccaatcttgaaattctctggtagtctttgtctgtcatgttggaagtgttaatactagg

SEQ ID NO: 11957 - DNA, 378 bp, Setaria italica
  Peptide Sequence Number=SeqID_77931
aatttgatggtcataatggagctgaggctagtgagatggcttctaagcttttcctggagtacttcttgctccatgtttattttcttctcgatggtatatactccatgatgttcagaaaatctaccgggaaactgacatataaggaagttgctattcttaacaacatattcaatctgtacaaggatgaccaatccaaccacagagaggggtcttgctggatatcgccagctattttagaccgatcatttcacatggaaatactgaaggaatcattgacgagggcagttcatgatattgatttaacattctccaaggaaggtctaatgtttcagctacataattcaaattttgtaacacagcttcatacatctgaaaagg

SEQ ID NO: 11958 - DNA, 718 bp, Setaria italica
  Peptide Sequence Number=SeqID_77932
taaagtaaacttaagaactaaggaataatacgaccaagactaattttagaccgatcatttcacatggaaatactgaaggaatcattgacgagggcagttcatgatattgatttaacattctccaaggaagcttcgcagaaacattttgagtctggttcaacagcgactgtggtcttgatagctgatggacaaattatagctgccaatgtaggagattcaaaagcttttctgtgctcagaaggacatgatctacaccgtcgaaataggaaacggagaagaaagagaaactcaattgatcatgaagaatttgctttggcaaattatgatggaccattgtatcatgcaagggagctgaccaaggaccatcatcctgatagagaagacgagagaagccgcgtggaggctgctggtggttatgttattgagtggtctggtgtataccgtgttaatggtgagctagcgctctcaagagctattggtgaccttcctttcaaaaggtatggggtaatatcgacacctgaattgacagggtggcagtttctgtcagataatgacacttttcttgttgcctcatctgatgggatctttgagaaaatgactatgcaagatgtttgtgacctgatgctacatgcaaaatttcacgttaatcaggtattttggatcatcagctatcacacaacattaatttggcagtattatgttagttcgtgtagtcttt

SEQ ID NO: 11959 - DNA, 397 bp, Setaria italica
  Peptide Sequence Number=SeqID_77933
cgtgccggccgcgatccggcgcgacgccgacgggggagaggggcggtggcgcgcgttcccgccgaccctcgtgtgcgtcggcgggtgggacgtgcaccaggacaggcagagggcgtacgcggaggcgctccacgccgcgggcgcggttgaggtcaccgtggcggagtacccggacgccatccacgcgttctacatgttcgaggagctcgcggacagcaagaagttggtggccgatgtcgcggagttcgtgaaccagcgcacagagcagctgaagaaacgcgagctagatcgtgcaaaacactagtgctagtatctactatcctttttgcggattgttgcaatgcatgaattcatataaaaatcgcacgaaacagcttacttcgtggttggaatttag

SEQ ID NO: 11960 - DNA, 695 bp, Setaria italica
  Peptide Sequence Number=SeqID_77934
agaagaaggaatgcggcaacctctgttgcgccgctcctccctctcgtccctccgatcccctcgctgctccgtgcctcacgaagaaggcgacgacaccggtggctccaggcgctggtaggccgtggggcgggagcgggaggccgccccaagctcaccgcggatctgccgcgggaggccgcgcttcgtcctcggccgcctcctccgctccctccaacgtcgtcggccgagcctccccttccaccgtccgctcgcgccgttctggtgctaatctcgccggggagcgggttcacgggcgaccggagccaggtcctttggatcggctgtcactgcgtggacgaggcaggggccagcggacggcgcttttattccttgaggccgggtctcaagcaggacctgccctgctatgtatgaggtcgaccttaaggacctaggacccttcacactctccggatgccctgagaatgtgtaagtttttttattaatctacggagagcaagcggcttctgtgtttgcacaggaatggcgggcgaggaggctgcggagggcagccggagcaggaggcgcatggatctaaacttgtaccttggcctccctccattgccgcggcctccgggccggctcgacgctacgcttgattgcccgttgctgattcccaactcgaccgttcctacaccggatgccccaagaactggcga

SEQ ID NO: 11961 - DNA, 606 bp, Setaria italica
  Peptide Sequence Number=SeqID_77935
gactgcatcaagcacagcccatgcgacaaagaaaccgtcaagctctgggcctgcaactgccgcagcaagccatggattgacggacgccgagaatggcatgagcttggcaaccacaaagagcctgaaaagttgggcctggtcgtgcacatcggcaaagaaccagaggcagagcatctggactacggcatcccgtgtcgcccaccggaggaacgcgaacccagtgagccgcctagcacccctggcaacgccggcaaggaggaaacctcgccgccgcccgtgcacgtgccgccttgcgacggacgcaaacactgcgcccagcgcggcggagtgcacggcgatgtacccgaggatcgcgagaacgtgtgcggaggagagcagcgcaaggaggtggatgatggccgccgcgtcgcgccgggtcaagtctagcaagcggagctcgttgccccgcagcgaggcgggcttcggcggcgccgtctcgttgtggacggcgaggaagaagggggagcggaagcgggatcgggttgggagcggcaccggggtagggtttgggcgcggaggagtatgatgtgaatagaacatggtggaaggaagcgttgtggcgtcgag

SEQ ID NO: 11962 - DNA, 409 bp, Setaria italica
  Peptide Sequence Number=SeqID_77936
cgagtcataggagggaaggaaaaaaaaggacagctagagacacaatcctccgtagatttgcttggctgagctgagacctgagagcgagctcaagaaagtctcgctcgagagcatcctctagaatggtcatgggaaagcaaggagcggcattgcttgcgttgatcttggcatctgcgcttgttggcctcgcagccggcggcaacttctacgaggagtgcgacgcgacttgggagccccagaactgctgggcctacgatgatggcaacaggctctccctcgccctcgtcagcgaactcgtcaggctcgatgatccggtcgaagaagcagttcgtctacggcaccgtgtccaccatgatccagcttgtccccggcgactccgccggcaccgtcacaacctactacatgtcgt

SEQ ID NO: 11963 - DNA, 816 bp, Setaria italica
  Peptide Sequence Number=SeqID_77937
cgcagcaccaagcaggaattcaagaagaatgcctggcagtatccaaatatcagccactcaaccaccggccatcaccccgctgttcttgcaagttgctgtgggcaaaagagaatatagtggaaacatagaacaagatggtttatctatccctgttacatcgcttcgggagagtatggtaataatgctgtacaatgcggacagagaattgatatcaaaatcagagctgaagacaaaaacgatcgtggagtcaggaactatgaatgcagtatttactcttgctagtggaggagaaataattcttcaggtgcagttcttactcaacgatgatgaccgcaagcggatccaagaaatgagaaactctgcaatgaaaaggaaacagcaggaactacttggggatggttatgaactcaattttccagacagccccttgtctaaacagctcatagagaagatccccaacattcgaagtaaaggagatgaacgacctaagcttcggaaaagtgtgtcactggatgatttgcaagagaggaaagtgttctctggaataagtgtggatccgcggatgaaggcctcaagagacttgttgctgcaaaggggtgttagaaatacttggtttgaagatcccagtggctcccagaaaggaaacggtaaagtagagagcaaatcaagtagttcagtgaagaagatgataagtgccttcgaaggcacctctccacagggtgtggcttcagagattgatgcatcactgaccgattcaggcaatagtagtacgcagacaggcaaagcaatcgtcccttttggagataataaaggtta

SEQ ID NO: 11964 - DNA, 279 bp, Setaria italica
  Peptide Sequence Number=SeqID_77938
caaaccccaggctcgtctttcctctccctgctcgacgcgcgcgatgcctcccagatcggaccacgccgccggcagcgccgccgccgccgcggcggccgcggccgcccagacccacggatccgacttcgactccatcgaccccctgttccacctcctccgagtgctgcccttctccttcctcaggccgccgcgcacccgcctcaggctgccgtccaacctggcgctcccctcccccatgaccgtcttctccctcatcctcctcacctacttcgccgtcgt

SEQ ID NO: 11965 - DNA, 422 bp, Setaria italica
  Peptide Sequence Number=SeqID_77939
accccatccaatcctctgcccatctttgctttgcccctccttcacttcacttgcaccatccatcgccatcatcatcgcctcaccgaacgccatcacaagaaccaaatctggcagctgccatatagccctagctgcagggtgcaagtagctggattggcaggccttgggggagagacgagcagcaagaagctagcggcagcgaggaggaggcgtccgtccatgtcgagccccatgcacgtccgcaaggcgatccacttcgccgccctgcgcgccaggttcgcgcaggggaagggcggcctcgcgctgcgcctcctcctcgccgcggcgctggccggcttcctcctcgtcttcgccgcgcgctccctctcctcgccttccccgtcgacgtcccggcggcaggaggcggcggaatgcggcggtga

SEQ ID NO: 11966 - DNA, 449 bp, Setaria italica
  Peptide Sequence Number=SeqID_77940
cagattctcgtcgtgtgcgcctcttcccggcgcgctggtccggcgggcgacggggccgagtgctgggagccgggaggctgcagcggccaggggctctcaaaaaggcgggggagcgtggggaggcaggctgcccctgcctgctgcggcctacgtcgagcacaggaccacccacgccgaagttcttgaatcttccgggctagggtcccgaaccccgatgattccaggaatcaccccgaagccggcggcgcctcagcctcggcacatgttcgtgttcggagcgggcttcgtcggccgctacgtttcggagcgcctcctcgcgcagggctggcaggtctccgggacgtgcacaagtccagccaagaagagggagctcgagatgctgggcatgaatgcttctgtcttcgatgccattgagagcaatttcagcctggaaaatgtccacagtttga

SEQ ID NO: 11967 - DNA, 330 bp, Setaria italica
  Peptide Sequence Number=SeqID_77941
aaccccttacccgaacctacctacctacaacacccttctccccttcccctcccaccgccgccgccgcggaagacaccggccatagcaagcatacaagcgcgagagaggctgccgtagccacagatggcgaacaagcggcagcgagaggcgcggaagcgcttccgggaggcgaatccggacctcttccctccgcagcctgccccttctgccgacggctccaaaaagaagagcaagaagaataagaagaagagcatgttcaaaaaggtcaagaaaggcggcacggggaggtcgaagcacccgatgcgggttcccgggatgcggcccggggag

SEQ ID NO: 11968 - DNA, 1113 bp, Setaria italica
  Peptide Sequence Number=SeqID_77942
ctacaattttcttttcccattgcattggtgatactgacagctctttttgcttcacatctgtcatgtgcagtttattgtgatgatagtaatccatctttgtgttcagtatctattagtattttctttttgttttgattcagttagcagtcggcagtcagttagcttagtcagtactgatctgatctttcggtttctaggttcattcggctggactgtgcttctgatttatagtttctgtaacccaaaccatgactgaatgaaaactcatttggttcctatattcagttagcagtcggcagtcagttagcttagttgaagtgacctcacctgtgggtggtcacttgcttgggaccggaccctccttgggtagctatgttcattttgcatatgctccaacattgtctttctgagagacatatttggattcggcgttgattgaagcacaagttcatcttccttatagtagagtgttgtaatttttacagtcgatgagaatgttagttagacaggtgctacagctgtactatggaacatgacatctgtcctagtcaatcttacttcaggctatcagcttcttgtttgtttgattcctttatctgtttgaggggaaaagtatgtgtgctagttaatcatctattagttcctgttctagaaattccagattttgtatcatatatgttgtcatgtttcctttgatctttacctttcctttttatggtaactgattttagatttccatgcatcatgcatttaccatgacatgatgatgacctagcaggtaaagtcgctatctacttacctcatgaattcactgtctacttacctcataaattcgctgtctacttatactattgtttggtctgcctaagggcatgtggtgtgggcttattggtactgtttgatcaaaaggcaactggattgatgcaacttatttgcaactacacctagtgtgtgtgcctgaagcctgaaactaacaataaacgcatcaacttattatgcaatcagaactatggagcttctgtcatttctttatgtgtcaagaccatagtgattgaatgtgttagtttagcactgagcagcggtatacacttttgtaagtcttaattgggttgt

SEQ ID NO: 11969 - DNA, 592 bp, Setaria italica
  Peptide Sequence Number=SeqID_77943
ccggtcgacgcgcaatgtttgcattaaccttcccatcacgcaacacaagttccaccaaaagaaatggttccagcatcagttcgtatagctggtcctagcaggcaccagcaatcacacaaaagcaccaaagaagcacaggcggcattgttcgtcaggcgccgccttccttcgacggcgccgggtacttgacggcgttcttgacgatcttcctggtggcggcgtcgccgaggtcgacgccgcatatgtcggagaggcggacgaggtagagcagcacgtcggagagctcctcgccgaggtgctccttctccgcctcgtcccagtccgccaggcccttgcgcacctcccctttccacatgaacagctccgacagctccccaacttcagcaatcatggcgagcagcaggttcctggggctgtggtactgctcccagtccctctccttggcgaagtcgttgagcttcttggacagctccttcaggctcacgtcaccatcagccgccaccttcttccccgccacctcctcctccgccatggcagccgccttcttctcgatctcactctccatctcagcccgtccaaccctttaaaacaa

SEQ ID NO: 11970 - DNA, 1862 bp, Setaria italica
  Peptide Sequence Number=SeqID_77944
taatacgtatcaacataaaaggcttcagtttgactccacagctcggaatcgattgtggcaattacaatagtagataatctgcttttttttccccgcgacatggtttggatggattatgaaaaggaatatacaacccactgatccttctcatgtaggcatgagccgaaaggctataaaagctcctgaataagtaatagtgtcctagttcacatcagaatgggtgtcggtcacagttgcaacaagtcagctagcgaacaaaatcttgttacactacaaacctttggtcagttcagcacaactggctgaattaatagaggacggaaaaatgtcagccacaaacaattactatattagcattcaatccgaaccgaaccactctgcgtcgagatgaacttgggcttcctaatcacctgctccaagcactgtatgatatccccaacctggaaatcatcacaatcctgaatcaccagtccacagtcgttacccttttctattgtttctgcatcctgcttctccctcttcagagacgcgcagggaccctcaaagacaacatctccgctcctcaacagtctcatggttccagatttgctaaagtggccgtcagttatacggcagccagcaattctgatgtccggtccttttgacttgctgcgccctttcagctcgaatatgttcagaatctcagcctcccccgaaacctgggtttcagctgtccctggtgccttctctacaatggtccttcccatttcctcgaggagatgatagataactttgtgcagcaaaacctttatgttggctcttgctgctgcttgagtgatagcaataggtggactgcgaatgttgaaaccaactatatacgctccgcatgcttgtgccagatcaatgtcatgctgactaattgggccaacaccgacatgaacaacattcacaaaaacctgtgcgctattaagactccttaaggcatctgtaacagcttgaacactgccttgtacatcagctttgacaatgatgggcatttctactctttcaggagtctcttctttaatttctagctcatctgccatgccttcatcaatctttcgaagtctatctttctcctgcttcttcttccgcccttgactaagcattcttgccctttcctctgagtcaacaaccacgacatcatccccagccattggaaggccccttagcccctcaatctcaacaggcatcgcaggttttgcagactctgtaattttccctgctgtgtctctaagagatctaattcttccccactctgctcccacaacaatgtgttgcccactaactaatgtgccagacttgactatagctgttgccagcggacccctacccctgtccaccttagcctccaccacaaaagcctgagcagggccatctattctggctttcaggtccatcatctcagcttgaaggagcaaagcctcttccaatttatccaaacctgattttgctactgcagagatttcgacaacctgcacatccccacccatatcctccaaaagcaagccttctgaaccaagttgaattctgaccctctcgggatcagctccagatttatcacatttgtttatggcaactacaacagggacatttgctgattttgcatgcgacatagcttcaagtgtctgaggcataacaccatcatctgctgccaccacaaggactacaatatctgtaacagcagcacctctagcccgcatcgcactaaaggcagcatgtcctggagtatcaagaaatgtgatagatgctcctgatggcatctcaacaacaaaggcacctatatgctgagtgataccaccagcttccttggctgcaacagatgtttgccggagagcatccaa

SEQ ID NO: 11971 - DNA, 469 bp, Setaria italica
  Peptide Sequence Number=SeqID_77945
ggacggagaccttgatgatgccctcgacggacatgatggcggcggcgcagacgtcgtccgccgccgcggcgatggcgcccgtgtgccagtttccctccgcgtcctgcgcccccacgagcggagcggacgatcctgtcagtaatctatacaaggcagcaagaagggaagggagggagacaggagcgcacggtgaggtgcgccggcacgcggagcgagcagaccgcgcggccccgctcagcgagggacacgcgcactccggcgagtggcagcgcgttgaaggcccggtcctggcccccctccaccttggcgccggcgtcctccagccacctgcgggcggcggccgccatccacgccggggggccttccgtcggggcgcccatgcatgcggggtggggatcggtggcggtcagcggtgggctctgatgggagtgggacgacgacgctactgttactagtagttggtttgttt

SEQ ID NO: 11972 - DNA, 704 bp, Setaria italica
  Peptide Sequence Number=SeqID_77946
tattcagctacagttttggaccattttatttttagagatcctggaccatttgattttcagtttccattaatgtttctgaaataaagtctccacttgatagcactgagatgtgaagatggaatttcattcagtggttctatggagaatgtctgaattccctccttgatagctctgtcccatgtgttatacatgcaatggttaaatcagctaatgaaattgacttcatccatgcaaatgacaaatacgtgttgagggtttcattccagtcatagttaaaagtgtaaaagaaaaaatcctattcagatatggtcagttttatgcaatgtttgtgaagagaggaactgatgatttcagggaaattggatagacactgctgaatgtagcattaacaataaatgcttcaattcaatttcagaatctgaatgctttagagaaatcatcgagattgcatctatattgcataattacctctttgtttgttgtacacatagacttgagtcaaagttgtatccaccacacgtcgagagcctgttgtatctcacacacactactccactgctacaatattgcttggtttctgcaattcatttttcagcaagcatagtagcacaaatcttcaatggagtttagtggaaccagattcggtgctatcattatgttttgtggctaaatagtaaaatgcaggaggagctgaagtatcatgt

SEQ ID NO: 11973 - DNA, 799 bp, Setaria italica
  Peptide Sequence Number=SeqID_77947
caccacagcgccggtacacgcagttgttggctcacctcctctgaccaaatctccaatccaaacagcacccattcccaagcatcattcccctttttccctgcaaagaggaattcgattcagctcagctcaccccagccagctccgtccaccaacaagaacaagatctgaaatagccaggcaggagtcaacgcggcagtcaagcaagccctcttgctcgcaagcagcaatcagtcaagcccgtcagcagccatgagtaccatgaagttttgccgtgaatgcaacaacatcctgtacccaaaggaggaccgggagcagaaggtgctcctctacgcctgccggaactgcgaccatcaggaggttgcggacaacaactgcgtgtaccggaacgtggtgcaccacagcgccggcgagttcacccaggtgctccaggacgtcgccggcgaccccactctgccccgcaccaaggacgtgcgctgcgccgtctgcggccacggcgaggccgtcttcttccaggccaccgtgaggggtgaggaggggatgacgctcttcttcgtctgctgcaacctcagctgcggcaaccgctggagagagtgaggagctgatcagcagagcaaagggatccctctgatgcaatagcctgagggacatgatttttgaatttttcacccatgctaccatgaactgattgtatgtttcaagaacattagtaacttcaggagggacataatcaggtgcactggggtaaatttccccgtggttcgttgcatcaaagaaggatgacatgaggagctgaggacaa

SEQ ID NO: 11974 - DNA, 1166 bp, Setaria italica
  misc_feature (1)..(32): n is a, c, g, or t
  Peptide Sequence Number=SeqID_77948
nnnnnnnnnnnnnnnnnnnnnnnnnnnnnnnnacttacgaagcaggaacctggactcaggaaacttattagattatcacgaagaccacaaacatatatcatggaagtgattattaggactcgcgacactcacacacgcaatggccaccaccttatcttattacaagactacaaacatatatgaataatgttttactcatcttcctccgagattgcagttagctcagaaaaagaatggcatgaatctgcagcagcaatgtggtcatcagcctcgtcgtcaccacagaagaacggcctcgtagagggcaattgtagtccatcggcaccagattcgagcatctctttgacctcactcatggttggacgatcttgtgggttcaattgaatgcactgtagcccaataatacacagcttcctctccaactcatgcatgtgaacattagaagcagaagatatctcatcctcttcatgtttagctagctggccatacacccatgatgggtagtatgcctgacttggggatgctgcattttggtaaaaattccttcgccctcctgccatctccagcaacagcataccaaagctgtagacatcggatttgcttgatatggcaccaaagccccgacaatacatttcaggggctatgtacccaatagttccccgtgaggcgctcattgacacaaagctcttgtcccttgggtacaacttggcaaggccaaagtcagcaactttcgggacaaagttgatatcgagaaggatgttgtgtggcttgatgtcaaagtgaaggatctgcatatcacaacccctatgcaagtagtcgatgcctcgtgcgatgcccaaagcgatctcattgagcttatcccatgagaaacttctctcagatgagaatatgtacttatccaaagaaccatggggcatgtactcatataccagtgccctcctcatgtcctctgcacaaaagcccaccagacgaaccacattgatgtgatggatcctaccaattgttgaaacttcactgatgaactcgtccccattgcaattggagttgctcaatatcttcacagcaagatcctgggaggagcacacccttgtacacggatccataccctccctggccaagcttgtctctaaaatggctcgtgattgctgtgatgcctgtataggcaa

SEQ ID NO: 11975 - DNA, 412 bp, Setaria italica
  Peptide Sequence Number=SeqID_77949
acgataattggttcttactattttctaagctgctggtggttgtaatttgattaccgacttgatcatgatgcaagcagaaaattgctccaacaattatgaaattattttgcagacagaccaaagactacatgatacaggatggtgacttgcagcaattcgaagcatattgtccattcaaatcaagaagagggaaaggagttggaagacatgttacccttttttggcagactttctaagagagattccactttccgtgggattacataagtgattacctgtgtaaatctatgtcaagtatggccccattgatttaaacatgcatcaatactactaattcctccataccaagcaaattgtgcagagaacacctattggcgttggcagtatggacaggtcggttttacctgaaaaa

SEQ ID NO: 11976 - DNA, 1241 bp, Setaria italica
  Peptide Sequence Number=SeqID_77950
cgcggactgactattccactccatgctccggcccgagcactgcctccggttgctaccggcggccacaccggcctttgtcggggcctccgctcccttctcctgccccctccccggcggcggcgcgatacggctccgccacccccgcgcacgcactccccggctcaggggcgaaccgtcaagcgtcatgcgcgcgtcggcggggccggacgcggtggcttctgcgccagagatgccgcagcgggaggtggtccgggcgctcgcggagcaggcggtggcacggctgggcccgcggctgctgccgtccgccgtgcccgacgacgtcgccgagttccgcaacggcgccgggaacgccgtcggctcgctcgacgtgcgccggggcgcgcctggctcgtcgattgatttcatgctgcagtcctcgcttcactgcaaagtcccaaatggtgccattgacattacatcgattctcattttcctaaactgcatgacagatgcaccacatttcctattggagctgatacagggcagcccaacttcgattgtggtggttcttgacctactcccacggaaagacctcgcatttcaccctgattacttgcagaagtactatgaaaactctcggatggatgagcagcgtgcaaagattgatgaactaccacaagttcgtccataccgatcaccatcactcttcgtgcgttgtgcctgttcgccaacagcagtaatggtcagcatagactgtggacaaggaggagagggcaccttggaagagattgtgcgtggacaattggcgatggttgctaaggaggttcttcaattttggcttgattgctgtgctgattccaccacaaaaatggataatacagagagggacttccttctcaagagggaccaaattgtaagatccaagtcgatagaggtcgatctgactgcaaatctaccgatgatgtttgatcctgatgtgtctagccgtgtcatatctgaaatcaggaaggcctttggggtacaagaggcgtagcatgcagaaacacaagcaggtacttggtaagttgtagagaaacaatattcttggtccttagttgcacttgtttgaacaaatgaatcgagttgttaaccactgtaatcgccagctgcatgtagttttatcgtcatccgcgttggtgtgcgtgataagatattacgatgtgtatatattagtgccctcaattcttaatgctggacctgtcccgtgttccactgaaattata

SEQ ID NO: 11977 - DNA, 1585 bp, Setaria italica
  misc_feature (18)..(18): n is a, c, g, or t
  Peptide Sequence Number=SeqID_77951
atgactgaagatgaagcncttttttcatgcaagacagagcacctatctttacaggcttggagttcagacattacccaagagcctccactgcctttcaatgagattgactgttgactacttcaatgcctcagctgacatggagcattcagatgcaaaaaagtttggaaatccagcattccagcactatatcattttctccaccaaccttcttgcgtcatccatgactatcaactcaagcgtgacaaattctgaggaatcagcaaatatggttttccatctgatgactgatgcacaaaacttttatgcatttaagaactggttcatcagaaattcttacaagggagctaccataagagtccttaattttgaagatttccaagtcaagaattcgggtaatgggacagttgaagaattatcaccatctgaggagttccgaatcacctccaatggcaatgctctaacgttaaacacacttacgaggactgaatatatctcaatgttcgggcactcccttttcttgcttcctgaattatttagcaatcttaaaagggtcattgtcttggaagacgacactatagtccagaaagatttgtcgctcctgtggaaccttgacttaaaggaaagtgattggtgctgtccagttttgtcgagttaaattccgtcagctcagagcatacttgcctgacttaccctatgattctggttcatgcatctgggtgtctggagtgagcattattgatctcgatgaatggagggaacatgatgtcactggaattcatcgccgaatactacagaagctgcgacatgacacagaagctacctggagatctgcagcactacctgcaggcctgcttgcttttcaagatctgatccatcctattgaaggccagtgggtccaattcgggcttggccatgactatggactcactcatggtgctataaagaaagctgccatattgcactacaacggtaacatgaaaccctggctagagcttggaatacgtcggtacagaaaatactggaagcggtacctgccaagagatgatgtatttatgatgggttgtaatgtgaacccatgatgtggcaaacttttgtgatttgagattcataagctctggtttgcaagggacgacattttctgcaaaaatgtcaagagcatgcgttggtatgcaaggaaagattccattatttatcttagggtagctccactgcagaaatcctgattgctcaagatgttgctgagatgcggtgcaaacttgcagcgattatttgcagataggttgcctatcattcgctgattgatgtacagttagattggacaaagttgttgaattgcatagcaacatcacaatttggttgaggatgtgttgtagttaggtgaggcattttgggtggtagaatgtagattcagtagattaggttcttggattattaatcataattttccagaatatggcttgtgcctgccctattgtaatatattgccgcgttagttttgtttatgacaattggtgcatgtgcattgatgcaattgacatatgaactcttcagccgttttccctaggcttatctggttatcttattt

SEQ ID NO: 11978 - DNA, 348 bp, Setaria italica
  Peptide Sequence Number=SeqID_77952
gtcgccgacgagctccaccagtggcccgagatggcctcccgcaagcgcacctgggtgagtttaaatttcaagaccacgaaacaaacacccatttaaaccaatgcaagaacatgtcatctgaccgtgcgcgctccatcgatttgatctgaacaggcgacggtgaaccaggtgatggacgggtgcccgcactggtggatgcgggaggcgctcgagaagctcgtcgcccggcacgccaagctgcagtccgctctctgattgggtacctaaccaatcggagacgaggaacctcgcggccggcggcgactccggcaagaaaggatcggcagcacgagcgaaccgacgctagcg

SEQ ID NO: 11979 - DNA, 1062 bp, Setaria italica
  Peptide Sequence Number=SeqID_77953
agctgctgcagcatccatccctcaatcctgctctcgagctccaagcagcctccaacgcgacgaccgacctcgcctgcatccatggccgtgttggtggcgaggcaggggcgcgagctgcagcgctacagccagcgcaccggcgggcgcatcgtggtgggctgcatcccctaccgcgtgcggcgcgacgacggcgagctggaggtgctggtgatcacgtcgcagaaggggcacggcatgatgttccccaagggcgggtgggaggaggacgagtccatggacgaggccgcccggcgcgaggccctggaggaggccggcgtcctcggcgacaccgagccgatgctcggcttctggcactaccagagccgccgctacgccgaccagacctacgagggcttcatgttcccgctccgcgtcgccgacgagctccaccagtggcccgagatggcctcccgcaagcgcacctgggcgacggtgaaccaggtgatggacgggtgcccgcactggtggatgcgggaggcgctcgagaagctcgtcgcccggcacgccaagctgcagtccgctctctgattgggtacctaaccaatcggagacgaggaacctcgcggccggcggcgactccggcaagaaaggatcggcagcacgagcgaaccgacgctagcgtgcgcgcacgaagtcatcacagctctctcggtgcagcggcaggccggccggctcggatttggtcgccctcaccggagaagagagagacgacggggcgcaccgcgcggatggatgccggcgatgctttcctgactcccgagacgcggagtcgccgttgaggcggcaggttcaaaataatttatttagcgagcaaatgattggacagaatgtacacagaaacccaacaggacgcgtcgtagagaacagaacagcagagcagaacaattcacgattctttggagtaacagaacagagtgtaaattagcgctagtaacttcgtttcttggtgccatcggaattgaaacagctgttcaaagaaaaaaattagcgcgcgcgcacaatttctcgtaaaaaaaaaaaaaa

SEQ ID NO: 11980 - DNA, 337 bp, Setaria italica
  Peptide Sequence Number=SeqID_77954
gttgtcgcccagcaggtagaagagcaccgcgagccacagcgcgagcacggtgcacgccgccgccggcgcgccggcgaagccgcagtagaagaggcggaggtagtcgacgtaccccgcgggggagcagggggagtgcgcgcggaggtacgcgcaccgggcctccccgcccgcgatggactgcagctccgcgcagtcgctcccctgcgcccccttaccggcgaagagggatgaggaggagctgccgtcgcggctggggggatgggggagaggagggaggaggaggtgaggaggaggagcaggagcaggaggaagcaggcgctggggacggcggcggggg

SEQ ID NO: 11981 - DNA, 395 bp, Setaria italica
  Peptide Sequence Number=SeqID_77955
gccttatccttctcctctccattgctgcacagctgcgggcgtgcgggcatactggcgaagtggagagattgggcaggcgcagagaaggtgcgttgaccagggggaggaggtgcggtgtgttggtgagatgcagcggagggacacgggccctgcggtgaccggcgatgggagctcagcggcgtaagacctgctctctcgtagcgagcctgagcggcatcgggcgagcaccagatgaagtgctcggccggcgtggtcaagctttagcaagctggtgcgagtagcggatggggatccttctgcagctagtctgaggagcaaggagattgggcgtgggaggcgggaggcgggaggcagtcgcaaagccgcgatccttcgaaagcttcgaggccgacgag

SEQ ID NO: 11982 - DNA, 547 bp, Setaria italica
  Peptide Sequence Number=SeqID_77956
atgggcttcaaggtctcgctgatgtagccaacttcaggaggaattagagccctcctcttgcctggataccgagtcatcgagaaaaaagttataatttttagttgcgtttttgaactgtcaagattcacagcacaatttgtatgctgtctggaactaagctgatatctgatgtacctccagccttcatcccgattaggacatctttaaggcctcgaatcatctgaataccacattagctagatcgcacatcaaacaaattcacagaacaagaaactgaggcggagtgaacctagaggagatctgaacttttctgaaggatgtgaaaaattttcagcattgaagtttataacctcttctccgcctagtggaagcgtcaccggattgctctcaccgctgaactggtccaccgtgctatgcacgaaataaccatttgcgcggcggcagacatagttgaactgcaccagatcgtcttcccgtgcttcaggtccctccccttcgacgacatcttcagttcaagaagcacaattcttccatgagtagtcagaaa

SEQ ID NO: 11983 - DNA, 793 bp, Setaria italica
  Peptide Sequence Number=SeqID_77957
ttttttttttttttatcaggaaaaaactggtcattgaattccacagcgcaacactgcaaccatgatgacttgcagttagcgaatgtgtttgcttttttttgtgaggaagttcagaaaaattttaatacgcttctccagttacagtgcataactatccagagggtctgatgttttgacaaaagctgggatggctgctatttgactctttcattaattcaacttgctggtttcgttttccatggtagaaaattcaagttcagaatgaactctgtgattcccttggaactgtgtctgcattgaccaagaatgatgatgatatcatgatacgatggcagaaatgcagaatcacaggaccttcagcaactgaacctcaaacactagtggctccttggcatgagacagcagactccgccgtggtccaaactcttctggtatgggcttcaaggtctcgctgatgtagccaacttcaggaggaattagagccctcctcttgcctccagccttcatcccgattaggacatctttaaggcctcgaatcatctcttctccgcctagtggaagcgtcaccggattgctctcaccgctgaactggtccaccgtgctatgcacgaaataaccatttgcgcggcggcagacatagttgaactgcaccagatcgtcttcccgtgcttcaggtccctccccttcgacgacatcttcgagtatgactccactgtccagcttccggtacctgaaaactgataatgtcaggctcctgaatcgctgcctgcgcaggcgatgcgacggcaagggg

SEQ ID NO: 11984 - DNA, 587 bp, Setaria italica
  Peptide Sequence Number=SeqID_77958
tagaataaagactacgaatgagctgtatgaaaggttaagccaaagggtgtgacaatgactgtgctactggcgaaggccgcggccatggcgcttgctcagcaccctgctgtcaatgctagttgcagggatggaaagagcttcacttacaacagtaacatcaacatcgcagtggccgtggcaattgatggtggccttattacacccgtcctgcaggatgctgacaaggtatatactatatttgtgttatcaatttgatttcatctacgagtagtagcaagcaagttaaccattcagcttatgagttggttcactgcagctggatatctatttgctctcacaaaattggaaggatctagtcaaaaaggcacgcgcaaaacagctccaaccaaatgagtacagctccgggacatttacactgtccaacctgggtatgtttggtgtagatagatttgatgcaattcttccacctggccagggagctattatggcagttggagcctcgaaacctacagttgtggctgataaagatggtttctttagtgtcaagagcaaaagtctgcaggaatgctgccaaatcagcaccatat

SEQ ID NO: 11985 - DNA, 237 bp, Setaria italica
  Peptide Sequence Number=SeqID_77959
ggcgggggaggccggagatgaggaggacgacggcgagcaagagtgggcggtggcggagaggcgccgccatcgtgcgatgagccgcttagactggagctgagcttgaggatcctgagagcttaacgttgtaagatctcttgaagattatgatgttactcctatctatgtgcccatcagtagtctgattgcagttgaggagttctctccagtttttgtatcttcgagccttcagtggga

SEQ ID NO: 11986 - DNA, 1272 bp, Setaria italica
  misc_feature (1249)..(1249): n is a, c, g, or t
  Peptide Sequence Number=SeqID_77960
ccgacgccggcggctgccccgcgccagtggccgccgggacgaagggcattgccagcccgcaggctaagaagctcgcgaagcagcacagggtggaccttgccaaggtgaccggcaccgggccgtacggtagaattacgcctggggatgttgaggcggccgccggaatccagccgaagccaaagcctgctgctgttgctgctgcatcaccacctgtggctgcaccttcagctgctgcagtgcctcaagcagcagtgctaccaccggtgcctggcgcgactgttgttccattcactaccatgcaggccgcggtgagcaagaacatggtggagagcctggcggtgcccgcattccgtgtcgggtacccaattgtaactgataagctcgatgagctgtatgaaaaggttaagccaaagggtgtgacaatgactgtgctactggcgaaggccgcggccatggcgcttgctcagcaccctgctgtcaatgctagttgcagggatggaaagagcttcacttacaacagtaacatcaacatcgcagtggccgtggcaattgatggtggccttattacacccgtcctgcaggatgctgacaagctggatatctatttgctctcacaaaattggaaggatctagtcaaaaaggcacgcgcaaaacagctccaaccaaatgagtacagctccgggacatttacactgtccaacctgggtatgtttggtgtagatagatttgatgcaattcttccacctggccagggagctattatggcagttggagcctcgaaacctacagttgtggctgataaagatggtttctttagtgtcaagagcaaaatgctggtcaatgtcactgctgatcacaggattgtatatggtgctgatttggcagcattcctgcagacttttgcaaagattattgaggatcctgagagcttaacgttgtaagatctcttgaagattatgatgttactcctatctatgtgcccatcagtagtctgattgcagttgaggagttctctccagtttttgtatcttcgagccttcagtgggatgtcgtctgatctgtttgtacttgtttttatttctcaatatttggatcttgttggagagattatactgatgatactatggaaattttggagagcaataagttatactgtagaatagtttggtaactgtaattttgccttagttctgcattattttttgcttacataatgctttatatccctgttttaaacaaaaaaaaaaanaaaaaaactaaaaaaaaacgtag

SEQ ID NO: 11987 - DNA, 338 bp, Setaria italica
  misc_feature (309)..(309): n is a, c, g, or t
  Peptide Sequence Number=SeqID_77961
atgacggcaacgccagcccacgctcgatgaagtgcgcgaagattactgtctcatccgagtagctctcgaaaggccacgtatttctggctgcttctctccaatctatgaattccttctcctggagtagattggcaagcactagtacctggatcttcacgtacttgggcgcaggcagctggacctccttctctttcttggcggccttgcgcttcttcgattctgtcgccttgctcgaggatgccttcttgggcaccattgctctaatggtcttctggcgcatcagctagatggctatacagtggggggtancagcgctcaaggacggcaagcggtggcac

SEQ ID NO: 11988 - DNA, 475 bp, Setaria italica
  Peptide Sequence Number=SeqID_77962
gccgcgatgggcggagaggtgagggaagacggcggcgaggtccccgacggccaaatcgacgagccgctggccccgcgagctcccctcgcgaccgaatcgacgagcatcggccgcgccgaagttgagccggcggagctccgccggcaccttagctccaccttgccttcgttctcgccgccgattcgaggtcagtagagcatgggacgagtggtgaagaggctgcgggaagggtctccatggtggcgccggtggtcggaggtgggaaggacgccagcggcgtgagggcggaagtgatggaggcggcgatgaagcttcagtgcgggacggtcggctctcccaccagcaggaggaggaggatttagcaatccaactggtatatttgaatataggttataactaaaaaatttaggaataacactgttgaagttggttttattttttacttgtttttttattccttattagtttttaaggt

SEQ ID NO: 11989 - DNA, 277 bp, Setaria italica
  Peptide Sequence Number=SeqID_77963
agggggccgcggaatggcgtggcgagccacgtgtccgcgatggcggcggcggcgtcgggcggcgtggccatccccgagagcgcgaggacgttgcaggcgttgatggagcgggtgttgacggcgtcggcgggggaggcgcagtgggtggcgtagacgcgcgggtacttgttggcgaagatacagacgccggcgccggtgccgcagacgacgacgccgcggacctcgggggcgtcgggcgccgaatcggaggagggggaggagacttggcgagcgacgg

SEQ ID NO: 11990 - DNA, 725 bp, Setaria italica
  Peptide Sequence Number=SeqID_77964
acaacgacaaggaataaaggaacgggaaacaacaaccgctccacctcgccgtggctgcgggcgcgcccggcgtcgtggaggagctgctacgcaagggcaaggtgcgggccgatgttttgaacaacgatgggcacacggcctttgatctcgccgtgggatcaaccaatttcttcaccctggtaagcctggtggtgacgctggtcgcttacggggcaacactcggaccgcagaggcaggaccacctcaatcggtggagcggcagcgacacggcgcggcaggggatagaaaagacctccgacagcctcgccgtcgtagccgtgctcattgccacctccgccctcgccgctgggttcaacctgcccggagggtacagcgattccacgggcaaggcaatcctgtcgcgcaaggtcaccttcaagtgcttcctcttcttggacgcactggctgtggccacgtccgtggtcgtggtggtcctgcttgtctacgggaaggcgtctcgctccgcgggctcgtggaagagcttcgtggtggcgctccactgcatgtgggtgtcgctcgtcagccttctcttggccttctacgcggcgctggcagccgtgttgagcagtaaggcgggctacttctacctgcagttggccatctactttgtcatcagtttcctgagtcagttcatcgtcaagtggatcgggcctgacactacgctgcgcacagtctggaggtttcta

SEQ ID NO: 11991 - DNA, 923 bp, Setaria italica
  Peptide Sequence Number=SeqID_77965
gtgtgagtagttgcagctttttagtatcttaaaggtgacaggtatctacttaagcaagcaaattcaaattttgtacgaccacgtgctactcccttctgtcagatttacatgtcgtttcagacaagtttggcttgcatgtatctttaatttgttgtctgaaacatcatataaaaagtgactggaggtagtattttttaaaagaaagaatttcatttaccatgaaaactactgtcatctttcagatttcaagagattattccactagaagtcgggtatatgattggcactgaagatactcgtccagttgcagcatgggagcatatcatccatgaaactttgaataagaagtgtccagatgaatcgaagtttaaatgccatagtgactatccttcgtcagcaaggtttaaactgtcagattatgttcttggaatggagaatggactgcttagtgaatccagcaatgatagtgatggggaacttcatctgtgggacagtgcaaaatcatctatttcagctcgctatcttcagccattggatttagcctgtgatgtcagcattgataatagagttaaaagtaaaagaccacagtatgtacggctaataagcaagcaaatggtaggggtatttctctcagtatgggttcggagaagcctgcagaagtacattcaaaatgtaagagtatcaattgtaggtgtaggtacaagaggttttattggtaacaagggatcaatatcagtaagcatgtctatacatgaaactcatttttgctttgtatgttgccacttggccgctggtgaaaaaaatggtgatgaactaaagagaaatggaaatgttgaggaaatccaaagaagaacagtgtttgataacccagttcacatagtaggtgtgccccagagaatacatggccatgaaaggattatatg

SEQ ID NO: 11992 - DNA, 389 bp, Setaria italica
  Peptide Sequence Number=SeqID_77966
gttgaagcggtccggggaaggcgcggaggcgaggagcgggaggtccggggagtcggactggaagtcgaggcggaagatctcgatgttggcggacgcggagaagctgatgtcgacggcgccgctcatggtgccggcggcgaggtacggcgcgtccggcgccagcgccgtcagcgccgcccgctgcgcgctcttgatgcacgccatcgcaggcgagaccgcgcagatctgggcgcgcgcgcgctctcgagctcgcccagggcaggggcgttgcgttgcacggatcggaggaattgcgggggcgatctggaggcgagaccgcgagagggagaagaagagaggtggtggtgttgcgggagagggttggggacttgggtcgaatcggtgcggat

SEQ ID NO: 11993 - DNA, 292 bp, Setaria italica
  Peptide Sequence Number=SeqID_77967
attcaataagcacggtaaaaattgacggatcagaatagtttcaatgactctgcatttgcatatccttgtacatcaccactgccgtaacaaaaaatcttcaaaaaaaaaatctgaacatttgtccatcgtcccaaacaaccagtgccatccatcatcctgacttcctgaatcctccagacctccactgaatctattttgcagtttggccgccggagaagcacccgaaacagctggcaaggaagcctgattctttgcccggctgatctgcagcggaactctgctcgccgcggtg

SEQ ID NO: 11994 - DNA, 1631 bp, Setaria italica
  Peptide Sequence Number=SeqID_77968
aggtttagcggaccacaggataattcccttgcattccgcctgtttcgatttttttttggtcaatgtaagatgtacacgggcccaaaaaaatgcatcacggaaatgccaaaccaggtagttacaaccacaggactgactaactctacagcacaccatccactagccaatgacattcccgacaccgggaaccaggagctaaccacgtcttttaggaagcactgagtagcatgtctctctcaacatgaacctttcgagccgaaggagaggggacgccggccgagccgattgggctctcaagacttggtgttcttctgccgcttctcctcgagctgcgaagcctcgttcagcatgtccatggcgtcgctctgcatgttcagcttcgagagggccacggcttgcatgtagaacgcggtgggccagtcagggtacacgcactgcgcctgcatcgcatcgcggagggcggcgtcaggttggtcacacatgaggtggcacaggctcctccttgcgtacactgttggtgataccatcgtccccacatcaacaaactgtgtatagcaatctatggctgccttgaaatctttatcacggaaagcaaagtccccacgcttcctagcttccaacatgtccctcatctgctgtgtccattcctggaatgatagctcattagtcccttcatcatccctgtaatgtgtattcactagaatctggtggatagccgtcaaatccatcctagaacaggcttcacccatgggagaaagagggtgctgtggctgcggagcaggagttggaggcacttcttcttcatactttggaatgccaagcatctcataggatggtacctctgattttatttgcaagggctcgagaacagaaaccagcttcttagtgttggggcgatccctaggttcatactgtaagcactgagaagcaagatcgaccaatgtggtcgcttcttccgttgagtagtttccctccaaatgtgaatccatcagtacttggatattgttgccttttatcatatcaagagcacgggaaggaggtatacgctttccactgaggaggtccagaagtatagtgccaaaactgtatatgacactttctgatgtaactcttccattccttaaatattctggaggagtgtatgcaagattcgtactatagcttttcccgtccctgctgtttttcatcaggccaaaacatgaaagacgaggatcaccattctcatcaaagagaaccctgtatgcatttaggtcatgatacaaaggccttccctcagtgctgcaatactccagtgcttcagcgatgtagtttgcaactcttagacgcatagcccattcaattgtctggttttcccagtggaagaggtgcttggcgagcgtgtcgttgggcatgaactcggcgacgagcaggcgctcgtccccgtcgcagcagtagccgatcaggttggccatccggcagtggcgcagcttgccggcccccttggcctcctccgcgaactgcttggcatcgggccaggccgccttggtgaacttcttgacggcgatcgcgcggcggctgtgctcgaggcggcccttgtacacgaaattcggcgccttctcgccgctctcggagacgatgttctccgccacgaa

SEQ ID NO: 11995 - DNA, 235 bp, Setaria italica
  Peptide Sequence Number=SeqID_77969
tcttggcctcccgtctcagtgcttgcaaagtaattgagtactattgagccatggcttccaagctgactcgcctccacagtcttcgcgaacgacttggtgccaccttctcctctcatcccaatgagctgattgcgctcttttccaggtatgttaaccagggcaagggaatgcttcagcgccatcaactgcttgctgagtttgatgcgctgtttgatagtgacaaggagaagtatcg

SEQ ID NO: 11996 - DNA, 212 bp, Setaria italica
  Peptide Sequence Number=SeqID_77970
tggagaaaaccaaatatccaaactcagacatatacttggacaaattcgacagtcagtatcacttctcatgccagttcacagctgaccttattgctatgaatcacaccgatttcatcatcaccagtacattccaagaaattgcgggaaggtaatttttgtgtattttaataacagtaggccatcactaggtagcagtaactaaatgagcatct

SEQ ID NO: 11997 - DNA, 635 bp, Setaria italica
  misc_feature (231)..(231): n is a, c, g, or t
  Peptide Sequence Number=SeqID_77971
ttcccccctcgggttgcacttgctatcaggccaaggcctggtggtctgggactacatccgggtgaatgtaagtgagttagctgtggaggagctgagtgttttcttgtagtacttggcattcaaggaacagctggtggatggacagtaagttctaagatgaattcttagtaattttaggctaatttctacatttctagttgtagaaacttgacatatactaattcagtaccncctttttcattacaccagaaacaccagcaactttgtgcttgagcttgattttgagcccttcaatgcctcgtttcctcgtccttccatgtcaaagtccattggaaatggagtacagttccttaacagacacctgtcttccaagttgtttcaggacaaggagagcctgtaccccctgctgaactttcttcaaagcccacaactacaagggcacgacaatgatgttgaatgacagaattcagagtcttcgcgggctccaatcatccctcagaaaggcagaggagtacctactgagcattcctcaagacactccctactcagagttcaaccacaggttccaagagcttggcttggaggaagggttggggtgacactgcaaagctccattatttccttggctgcagctg

SEQ ID NO: 11998 - DNA, 280 bp, Setaria italica
  Peptide Sequence Number=SeqID_77972
tgcaactacagtgatggcaacctagttgccactctgcttgcgcacaagctgggagttactcagtgtaccattgcccatgccttggagaaaaccaaatatccaaactcagacatatacttggacaaattcgacagtcagtatcacttctcatgccagttcacagctgaccttattgctatgaatcacaccgatttcatcatcaccagtacattccaagaaattgcgggaagcaaggacactgttgggcaatatggtcagctgtgaacagtcagtatcactt

SEQ ID NO: 11999 - DNA, 615 bp, Setaria italica
  Peptide Sequence Number=SeqID_77973
caggttgtgtacattggattgggcaaagtagccatgtggagacaggataacaacattaaacatcatcggtatagttccaaggaacttctccacttgcttcttgaccttcttgaggcccctgatcctgccattcaactacaagggcacgacaatgatgttgaatgacagaattcagagtcttcgcgggctccaatcatccctcagaaaggcagaggagtacctactgagcattcctcaagacactccctactcagagttcaaccacaggttccaagagcttggcttggagaaggttggggtgacactgcaaagcgtgtacttgacacactccacttgcttcttgaccttcttgaggcccctgatcctgccaacttggagaagttccttggaactataccgattgatgtttaatgttggtatagttccttggaactataccgatgatgtttaatgttgttatcctgtctccacatggctactttgcccaatccaatgtgcttggataccctgatactggtggtcaggttgtgtacattttggaccaagtccgtgctttggaagatgagatgcttctcaggatcaagcagcaaggccttgacatctacccttaagatt

SEQ ID NO: 12000 - DNA, 948 bp, Setaria italica
  Peptide Sequence Number=SeqID_77974
aggactacgtacttagaaccgtagtagaagaacatgacaggcttggttgagatgtatggtaagaatgcacgcctgagggaattggcaaaccttgtgattgttgctggtgaccatggcaaggagtctaaggacagggaggagcaggcagagttcaagaggatgtacagtctcattgatcagtacaacttgaagggccatatccggtggatctcagctcagatgaaccgtgtccgcaatgcggagttgtaccgctacatttgtgacacgaagggagcattgttcagcctgcattctatgaagcgtttggcttgactgttattgagtccatgacatgtggtttgccaacaattgctacctgccatggtggccctgctgaaatcattgtggacgggtgtctggtttgcacattgatccttaccacagtgacaaggctgcagatatcttggtcaacttctttgacaagtgcaaggcggatccaagctactgggacaagatttcacagggaggcctgcagagaatttacgagaagtacacctggaagctgtactctgagaggctgatgaccctgactggtgtgtacggattctggaagtatgtgagcaacctggagaggcgcgagactcgccgctaaccttagaaaatagttactaacgactctgaaataccgtagcctggcaagcgctgttccattgtccttcgattagtgcatcaagcgggagaaccatcggctgcattacaattacaattgtttaccgcaattcgcattgtcagtagtgtgtttgagttatgtgtacttgatttccaatcacttggttacattttcgcgaggttttgggcggtcgcaggctggttcctgctctaggatactagctgcacctttgcttcaaataaacgcctgctcgtgtcacctgtctctcagaaatcaatgcaatgttttgttgcccaaaa

SEQ ID NO: 12001 - DNA, 455 bp, Setaria italica
  Peptide Sequence Number=SeqID_77975
tacacaccagtcagggtcatcagcctctcagagtacacctggaagctgtactctgagaggctgatgaccctgactggtgtgtacggattctggaagtatgtgagcaacctggagaggcgcgagactcgccgctaccttgaaatgttctacgctctgaaataccgtagcctggcaagcgctgttccattgtccttcgattagtgcatcaagcgggagaaccatcggctgcattacaattacaattgtttaccgcaattcgcattgtcagtagtgtgtttgagttatgtgtacttgatttccaatcacttggttacattttcgcgaggttttgggcggcgcaggctggttcctgctctaggatactagctgcaccttttgcttcaaataaacgcctgctcgtgtcacctgtctctcagaaatcaatgcaatgttttgttgcccaaaaaaaaaaaaaa

SEQ ID NO: 12002 - DNA, 2932 bp, Setaria italica
  Peptide Sequence Number=SeqID_77976
aggatcttaggggtgatgtcaaggccttgctgcttgatcctgagaagcatctcatcttccaaagcacggacttggtccaaaatgtacacaacctgagaagcaatgccattgcaaatcagaaacaagaaaaccaacaagaaatccgagttaaaaggaaaataatcgtttagcttctgcacctgaccaccagtatcagggtatccaagcacattggactgctcccctgttgaccattggtaattgagtactattgagccatggcttccaagctgactcgcctccacagtcttcgcgaacgacttggtgccaccttctcctctcatcccaatgagctgattgcgctcttttccaggtatgttaaccagggcaagggaatgcttcagcgccatcaactgcttgctgagtttgatgcgctgtttgatagtgacaaggagaagtatgcaccctttgaagacattcttcgtgctgctcaggaagcgattgtgcttcccccctgggttgcacttgctatcaggccaaggcctggtgtctgggactacatccgggtgaatgtaagtgagttagctgtggaggagctgagtgtttctgagtacttggcattcaaggaacagctggtggatggacaaaacaccagcaactttgtgcttgagcttgattttgagcccttcaatgcctcgtttcctcgtccttccatgtcaaagtccattggaaatggagtacagttccttaacagacacctgtcttccaagttgtttcaggacaaggagagcctgtaccccctgctgaactttctcaaagcccacaactacaagggcacgacaatgatgttgaatgacagaattcagagtcttcgcgggctccaatcatccctcagaaaggcagaggagtacctactgagcattcctcaagacactccctactcagagttcaaccacaggttccaagagcttggcttggagaagggttggggtgacactgcaaagcgtgtacttgacacactccacttgcttcttgaccttcttgaggcccctgatcctgccaacttggagaagttccttggaactataccgatgatgtttaatgttgttatcctgtctccacatggctactttgcccaatccaatgtgcttggataccctgatactggtggtcaggttgtgtacattttggaccaagtccgtgctttggaagatgagatgcttctcaggatcaagcagcaaggccttgacatcacccctaagatcctcattgttaccaggctgttgcctgatgctgttggtactacttgtggccagcggctagagaaggtcattggaactgagcacacagacattattcgtgttccattcagaaatgagaatggtattctccgcaagtggatctctcgttttgatgtctggccatacctggagacatacactgaggatgttgccagtgaaatcatgaaagaaatgcaggccaagcctgaccttattattggcaactacagtgatggcaacctagttgccactctgcttgcgcacaagctgggagttactcagtgtaccattgcccatgccttggagaaaaccaaatatccaaactcagacatatacttggacaaattcgacagtcagtatcacttctcatgccagttcacagctgaccttattgctatgaatcacaccgatttcatcatcaccagtacattccaagaaattggcgggaagcaaggacactgttgggcaatatgagtcccacattgcatttaccctccctgggctctaccgtgttgtccatggcattgatgtttttgatcccaagttcaacatcgtctctccaggagcagacatgagtgtttactacccatacactgaaactgacaagagactcactgccttccaccctgagattgaggagctcatttacagcgatgttgagaactctgagcacaagtttgtcttgaaggacaagaacaagccgatcattttctcaatggctcgtcttgaccgtgtgaagaacatgacaggcttggttgagatgtatggtaagaatgcacgcctgagggaattggcaaaccttgtgattgttgctggtgaccatggcaaggagtctaaggacagggaggagcaggcagagttcaagaggatgtacagtctcattgatcagtacaacttgaagggccatatccggtggatctcagctcagatgaaccgtgtccgcaatgcggagttgtaccgctacatttgtgacacgaagggagcatttgttcagcctgcattctatgaagcgtttggcttgactgttattgagtccatgacatgtggtttgccaacaattgctacctgccatggtggccctgctgaaatcattgtggacggggtgtctggtttgcacattgatccttaccacagtgacaaggctgcagatatcttggtcaacttctttgacaagtgcaaggcggatccaagctactgggacaagatttcacagggaggcctgcagagaatttacgagaagtacacctggaagctgtactctgagaggctgatgaccctgactggtgtgtacggattctggaagtatgtgagcaacctggagaggcgcgagactcgccgctaccttgaaatgttctacgctctgaaataccgtagcctggcaagcgctgttccattgtccttcgattagtgcatcaagcgggagaaccatcggctgcattacaattacaattgtttaccgcaattcgcattgtcagtagtgtgtttgagttatgtgtacttgatttcctaatcacttggttttacttattttcgtcgaggttttgggtcggtcggcaggctggttcctgctctaggatactagctgcaccttttgtcttcaaataaaacgacctgctcgtgtcacctgtctctcagaaatcaatgcaatgttttgttgacccaaaaaaaaaaaa

SEQ ID NO: 12003 - DNA, 823 bp, Setaria italica
  Peptide Sequence Number=SeqID_77977
aatgtatatgtggcacagatgttgcttctgcgaaggacttaagcttagcggctgaatggaacttgcaaagctccctctgcccatgtacagagcctgaaaatccggtgcctgcggtcctggcaagctgggaagactattatcagtggagatcccttcccctgcattcacctgtttcagttttacttcattggccacttactctatatcattgccttcaactctctcgcctccaaacctccagatatgacggccaggacaccctgtgcattcactatttagggcctgagaaggagctactacagcttgcagcatttggggaactacgtgcattatttccaggtgtccagattcacattgaacttgtgggaccagaagttccagaatctagggatggtgaggttgtaaacatttccagatatgcatgttgttctgatgagagctgctgttgtaaatcttctattggttctgaagacttgagtggcactgcagtgagactcaaactgtggaaagggttctatcatgagagatgcggtgatataatgaaggactcaaaccctcatctcattgttgccccaaatgctggtgtggccgcatatcccagttggatgccaactattgaaataataaggcagacggggattcctgcaatttttacggacttctgtgaagaagctgcacacctagcgtcctgctgcataagctccatgactggtcaacccctcaaaattccaatccaggtaaatcctttcaggcagccagttccagcagacaacagtgcactatacctaccatgttattcaaattgctttgttttggatgtaaa

SEQ ID NO: 12004 - DNA, 407 bp, Setaria italica
  misc_feature (384)..(384): n is a, c, g, or t
  misc_feature (395)..(395): n is a, c, g, or t
  Peptide Sequence Number=SeqID_77978
tagacaattaggtaggaaaagttctttactgtccacgtttggagttgataatgctaccaagtagagtggcagccattctcgaacttcattttgtcagttggcctgcagagttagtatctgtatctccttccatgaactctgggggcttcactatatcaattgaaataggtcagtaatgtctgtagctctgatacgagaagtcatacggcttgaaagctccccagcaagatgtggccatcttgagatgctttgagtttagcacagagttgatcaatggtaacaaaattgtatgtttctccagtatatggcttcaatatttgattcttttttaggacaagaactatagaataaagaattcttagtttctgttggtaaaaaaaaaanaaaaaaaaaanaaaaaacgtagg

SEQ ID NO: 12005 - DNA, 586 bp, Setaria italica
  Peptide Sequence Number=SeqID_77979
catgcgcaaaagcagatgatctgatggagatggagagggtcttcatgcacatgaagcataagcagtgtgatccggatgccatgacatattctatcttggtggaagcttatcgtaaggaaggaatgactgacaagatttatgctttgcatcaggagaacccaactttggttccaactgattttgtcaatggtgtaactgactcgctgactgaataatggttcagacatatttaggcatggctgcattggtggaaaagttctttactgtccacgtttggagttgataatgctaccaagtagagtggcagccattctcgaacttcattttgtcagttggcctgcagagttagtatctgtatctccttccatgaactctgggggcttcactatatcaattgaaataggtcagtaatgtctgtagctctgatacgagaagtcatacggcttgaaagctccccagcaagatgtggccatcttgagatgctttgagtttagcacagagttgatcaatggtaacaaaattctcttggagtggcctctatgggtaagggagaaatagccggtatgtgaagtgcctgaaaaccttt

SEQ ID NO: 12006 - DNA, 1438 bp, Setaria italica
  Peptide Sequence Number=SeqID_77980
gagttcccggtgccctccgccggcggcagggacggcggccgccccgccccgcggcaggagaagcgacactggaaggtgggggaattcccggggacctccgccggcggccccgattcgaaggcggcgaggactcccatcaagaacgtcaagaagcggctggacgcccgcgcggacgccaaggcgtgggcgtgcaccgtcaccgaggccctcgccgaccgcatcaactccaagaattggaaagaggcgctccaggtctttgagatgctcaaggagcagcctttctaccatccaaaataaggcacctacatgaagctcattgtgctgcttggtagatctggccaggctgcccaagcgcaccaactcttcaacgagatgctgcaacaaggatgccaacccacccctgagctctacactgccttgattggagcctactgccgtagcggcctaatggatgatgcgctccagctcctcactgacatgaaggcctctcctctgtgccagcctgatgtctacacctacagcaccatcatcaaggcctgtgttgatgccaccaggtttgatctcattgatgctatgtacaaagacatggctgagcgcttgatatcacccaacacggtcacgcagaacattgtcctcagtggctacggaaaggctggacggttggatgacatggagagagtgctctctgacatgcttgacagcacaacctgcaaaccagatgtctggacaatgaacattatcttaagcctgtttggaaacatggggcagattgaatcaatggagaaatggtatgagaaattccgaagctatgggattgaaccagaaactcgcacgcttaacattctcattggtgcctatgggaaaaagcgaatgtatgataagatgtctgcagttatggagtacatgcgcaagctagcgtttccatggactactgccacgtacaacaatgtgattgaggcatttgctgaggcgggtgatgccaaaaatatggaacacacatttaaccagatgcgctctgaggggatgaagccagatacaaagaccttctgttgtctaataaatgggtttagcaaagcaggccttttccataaggtggtgggcatggtcaagcttgctgagagacttgatgtgcctgcaaatacatctttccacaatgctattcttgaggcatgcgcaaaagcagatgatctgatggagatggagagggtcttcatgcacatgaagcataagcagtgtgatccggatgccatgacatattctatcttggtggaagcttatcgtaaggaaggaatgactgacaagatttatgctttgcatcaggagaacccaactttggttccaactgattttgagaataggtagtaaactagaactacgaactaagaaactaagaaaataaaaataaggttaacaaagaaacaaataaattaaggaacaa

SEQ ID NO: 12007 - DNA, 2981 bp, Setaria italica
  Peptide Sequence Number=SeqID_77981
cacgaaatgggcttgtcagaggaagccctgcttacaaaggaactagtagccatggatgaaccagtcacgaagaggtttcctgatggatgcttgaatgatgaaatgccttctagaacacggagtgggcttgttagaaaaagccctactgtcaaggctgtaagaaaggatggacccgtcattaatgtgtttcctgatggatgtcatggagaagacatgcctgatggaacacgaagtgggcttgtcacaggaagccctgccatcaagattcaaagcaaggatcaaccagtcattaaggggttggctgatgggtggctgaaagaaggcacgcctcttggaactcgaagtggccttgtcagaggaagccttgctgctaaggctccagttagggctaaactagtcacaaaggggcagcccaatggatggacgacaaacgagaagcctactgggacacaaagtggtcttgtcagaggaacacctgctgccaagactgaaagcaagaatgaaagagtcatcgaggggctgcctgatggatggctcaaagaatacaggccaagaaagactggatcgtttcaggatccgttctacattgatccagtcagtggatatgaatttcgctctctgaaggatgtgcaccgttatcttgaaacgggagatattaaccaatgcattatgagaccaaagaagagcaccgccatctgtgatgttcatataacagaaagccaacctcatacaattacatcatcgcaacacacaaggccaagtactgcggataagggtattcagtgtgaaatattaacttcagaaggtatcatggtgctgtgggaggaactagttacaccttatagtggaaatgatactgaacatactgtgttaccagaatctgagaacttgaaagcaatgcaagggaatgtcgataagcttgaaactttggaacacacgaatgttcaaccagtctctgcacaacgtggtccaaggcaaaccaaatcgcttaaaaggaaagaacaaaatgtagaggtgaaatccaagaagcataaaaccagtcctgcggtgacacctattcgagtgtcgccccgtttagctgctctgaatgttcagcaggaattaagcatcgagcctgaagatgaaccgattaatgtaaatcctgtaaatctggtacggactatggaagagaactctaacgatcagtcacagatgagtcaatcaggcaccttgaatcaaatacatggtaatctggaaagcacttcgaatcagttacagttgagtcaagcagacactgctaaaggaacagaggctattcaggaaaacactaccaatcattcacagccgagccaagcattaactgtggatcatacagagacaaatcaggaaaaaactgccaatcaggtggagtcgatcctagcagatattcctgttctgcatgacagatccattacagaccatgcagatattccaatacagacaatgcaggaatgcactacagatccattgacccaagcagacattttgaatcatatacagacggatcaggaatacactgctagtcgattacagtcgagccaagcaggcaccgtcattccggcacggccttttcaggaatacaatattgactattcacaaccgggcaaagctgacactataaatcaaatacaggccaatcaggaaaccacttgcgatgagtttcacttaagccaagtagacactgtgactgaaatgcagataattcaggagaacatgacaaggcaatcacaaatgagccaagcagacgctgtgggtcagatacacattgatctggaaagcacaataggttactcacagccgagcaaagctgacactataaatcaactacaagccaatcaggaaaacactgctgatcagttacattttagccaggttgactgtgtcactcaaattgagataatacagggaaacatgtgcaagaatccacaactgagccaagaagactctgtggatcagatacacatcaatctggaagacactaccaatcacttgcaaccaaactatgctgaaaattctatgctccaggctggtttctcttgggctcctgaacaaaatggtggagcctctattacagatttctggaaaaatgttgaaaatcaggactcatcggttcccatgccagtagatggatcaactgttgcaagctttccagcaaatgttagattccaaaatgcagcaggagcagaagaacctgctttgccagcgcagtcagctgcgcctgaaacatgttctgatcagtccgggttggcctttcaatctctttttggaaatgcctggtcagatccttgcatcgagtttgctttcaagaccctcacaggcgacattcctgttctggatgacacgatagccgtcacagactacttcccagagcaacaagacttgaataaagatccatcaccaaattgttctgcttctgttttggataataccagaaaccacacacaagtagatgtcaacctcccagcacctatgccatcggataagctctacaatggcagttggttccctccccagtgaattacttgagggaaccaaaacaaagaaaaaaaggcaataacattttgtaccattgaaaggtaaatcagagggaaggctagtcgcaaaaccgaacccaaagcatagtctcttacacttgttagcgctctgatctgaatttgtaatcccagtgggggggatacatgatgtaaaaagactagtttgtcctaacccaattagacagtatgttaatacatccaaagtatccgcgcagaagagactgtgaagtagctggtctggatttatcatgttttcctgttctcttgcttctgtgcagttgcctgataaactcattcgttgtaaactagctcgttctaacttttgaacacctgcgcaaggcgcgcgagggtctaattatttgtgaacatgatctccttttgtttctgtgcagttgcctgataaactcattcgttgtaaactagctcgtt

SEQ ID NO: 12008 - DNA, 492 bp, Setaria italica
  Peptide Sequence Number=SeqID_77982
ctctgaaggagacggtgaggtacggcctgttcctggggaccttcgccggcagctacgtctccgtcgacgagtacatcgccgccgtctggggacgtaagagaacagcaaggtggaggtcactcttagctgggttgattgctggtccttctatgctcctgacaggaccaggaactcaacatactagtttggctatatacattctcatgcgtgcagcagtacttgcatctcgttgtggaataaagagcaaaagatttggaaagatctgtaaacctttgacttggtcaaatggtgatatcttccttatgtgccttgcatctgcacaaattttgtaagttccctttcagtattcagtgatgtgtttaggctgcagtgattgtttagaagttagaaactattgctaattatacttaaaggtatgccatgaatgtaattgtttggggctgctgagctcatcattgtgtaagcaaagcttggaaccagtataccgtgcat

SEQ ID NO: 12009 - DNA, 330 bp, Setaria italica
  Peptide Sequence Number=SeqID_77983
caagatttatgcgtttttagaaggttataatgcttctgcatgattttggtagaatttgcgggtgtcagattataaccaaatgctggcttatttttgagttttcatgccaaaagatgatatttggtacaggtgacgactctgtgttggtatatactcatcaaccaaaactgtcaatactttccggaacattttgtgccaacagcaacaccaatatatgcgtgagttcttttccacatgccagatcagacccttttgcattgatcaaacagcagagatgtgtgtaactcaccaagccaatcaaaagcaacggcatgatatttgtccgattag

SEQ ID NO: 12010 - DNA, 303 bp, Setaria italica
  Peptide Sequence Number=SeqID_77984
cagagttccgccggccgcccgcggggcctggctgcgccactgccgaggccgcccgcctccaccgccgaaccagcccgcctccaccgccgaaccagcccgccgccgctgagaccgcccgcctccacctgttcgggctcatggacgaggacgccaagagggtggcaccgggaaacttcgagcgccactgggggcttcttcaccttcgacggccggcccaagttccccctcgacctccacggtggtggccgcccggcgatgcccgtcccagcaaggggcgtcgagtacctgccccacggccagggg

SEQ ID NO: 12011 - DNA, 391 bp, Setaria italica
  Peptide Sequence Number=SeqID_77985
taaacctaggaacgtagaatacgaataaggactacaatacgaatgatgcagaggctcagcacaggaatttccagcaccctgatccctacattgttccatgggcacctggcggcactaaattcacaagaaaccctcctccacctcaagggattgagatcatctacaattatggcaaggaggactagtaaacaaagtcctgcaagtgggggcagaacttggtgcatccagagttctaaatcacttactgtttaatcaagttgttgtacgagaaataagaatgaaattactggacttcatctgtgtttctcattttttgtgtcacggcaaatatcacttgaccatgcgctagatgaagagcacagggttattagaacaagcatccatgaaaaat

SEQ ID NO: 12012 - DNA, 845 bp, Setaria italica
  misc_feature (825)..(845): n is a, c, g, or t
  Peptide Sequence Number=SeqID_77986
accccgtccgaatcagttcccaatccccgaacccaaccaccgaagcgacaggagagagaaggaaaggagcagcggcggcggcggcgaggtctatggcgtcgacggcggggtacctggcgcggcgggcggggcagaaggagcgggtgcgcctgctctaccgccgcgcgctcaaggacacactcaactgggccgtccaccgccacctcttctaccaggacgcgtcggatctccgggacaagttcgaggccaaccggcatgtggataacctggacgtgatcgataggctcatcgatgatgcagaggctcagcacaggaatttccagcaccctgatccctacattgttccatgggcacctggcggcactaaattcacaagaaaccctcctccacctcaagggattgagatcatctacaattatggcaaggaggactagtaaacaaagtcctgcaagtgggggcagaacttggtgcatccagagttctaaatcacttactgtttaatcaagttgttgtacgagaaataagaatgaaattactggacttcatctgtgtttctcatttttcatggatgcttgttctaataaccctgtgctcttcatctagcgcatggtcaagtgatatttgccgtgacacaatggaactttgccttctttgtcatgctgtcatgcgcaaactgatgagccgcatgtacctgtgccctatcggcggtctggctggttatgcctttatttttctttctatttttccttggtattttcagtagtttatatttcttgaatctgaaatctggacggtgagcttgcaagtctctgaattgagctagtnnnnnnnnnnnnnnnnnnnnn

SEQ ID NO: 12013 - DNA, 2575 bp, Setaria italica
  Peptide Sequence Number=SeqID_77987
ttttttttttatattccaacaagatgttataagaattattgatgacttctgaagcaagtccaaagttagaatctcatgtcactcgctgcctcactggcgctacaagatcaatggatttcttcagacccatagaaatccagtgatcttgtggcaccagtgaggcagcaaagcattggtccagccttcttagcggtttaccaggtaacccctaactgaacaaaaatcactactaacataggaccttggctcatgagataagtgctatcttgcagcaggctgtcagaagagcattagttgctcatgtgcctaaccactacagattacaatcctacaaggcagtatctaaggccaaaaaaagtcccaggcattgttaccgatatctcaacatcatcagcctagcacatcaccgcatagataagttacaaaagatgttatgatcaaataatgtgttagccatgacgtcggaagtcaacagctgttatctctggaatgagttgctattgcaatctcttcttcttgccttgcatcgggtcctcattgaacataacaatgtcatcatcgtcatcttcaacgatttgtgcactactagaaccaacatctgacttattctggacatcaaaattttcctgtgactctagtatttcattcagcttgcgcttcattccaggtttcactgatgcatcctcggcggcactgtcaacatcatctgcactggatgaagacggaaccaatcttttgtcaccattactggtaatttgcttatccactggaccagtccagccagcgagaaccattccatcaggctctttctccttatcaaactcatccctttgtttgatgttgatgctgcattttagctcctgctggaaatcctcgaccgtaagctttgtatcatttacaactggagctggaagttccgccaaaaccttgtcaagatttaaagcataattttcagcctcatccggctccaaaccttcaccatcctcaaaaacaagtgtggcaccaaccattactaaagggaggttcattccaagtttgctttttataactttgtcaatgacttcccggagctttgtagtcttagtattaacctccagaacaagtggggtctcagagcagacatagcatgatttattaggttcaaaaggctctacaggcatcaagagcatcttccttgctgttgctggatgttcaagacaatatgacattctatagttctgataatcaccctttagcactttaatcgcttcgatgacaattagaccagctattatagcattggtagttgccacagcatggactatgtttccagcaacacctttagcttcaaaaaggctatgcagtggtattccaaaagaggaagctctgatattagctgcagcagtaacaaactcaacagccaattggtcatccttgtcgaaaataaggttccctatttccttctcccttttctcaaaaaataatttgaaagcctccaagaagactcttgaattgtcagcaagactccatatctcttgcggatttctaaggcctagggacaccatagcagatggttcctgctcctcatttttgtggtcctgagagcaaccgttttgctgaacagcatcttcaggcaaggcatctctgacatatattggatttggcctcctccgatttttccaagtttcctcgttagctaaggcagtttcgatgttgtagccaaatacatgatcatatatcctctgggcataatgcgaaagatcttcatctacattcctctcaaaaacatcagtttttgaactgctatcgtcttttgagtgcacattaagatcattatcctgatttctgtcaccaaacagctttgcaaaaagcaagtctttcgcccaaacaatgcagtgaacaaactttgatggtgtgcttgtaattgtgcatactggatatgatttcgggacaggctttggctgacattcatagcactctgttttacccttgacatgaacagtaacctgtcccaaaaaaccagtagtaccactttcaaccaaaggaacttccgcagcaaggcaaaggcgattaacatgccgtctagcatccaagttatcaagaccattcagaaccacactaaattgcttgaagaattcaacattgaatgtagaatccttcacgtttgcatggtatggtgttatatttatatttggcctaaatttcaaaacagcatctcgagcaactttggcttttgactgcccaacatgactctgccgaaacaaaaattgtctattcagattgctaacttcaatcgtgtccaagtcaatgatgtgtacgtcgctgaatccagagagcgcgagcgtcttgagcagctcgcagccgatgcctcccgccccgaccatcagcaccttcgccgccttgacggcctcctccgaggacgcggcggcggccatgggggcgcgcgggaggggagcggcggcgggggcgagggttttgagtgaggtggggtttgggggcggatgggaatttggggggagaggggagagggcggtttggggcgagggagacgagggaggggggcggcggggctggcggaaagggagcgaagcgtcgt

SEQ ID NO: 12014 - DNA, 397 bp, Setaria italica
  Peptide Sequence Number=SeqID_77988
aaagacggtttgggatagagtttagtgggtagaatatctggtttcaaaggtgagaggggttaagtagtcaaccttaaacaggtgaaggggtggagtatacttattccatctctcatttggtagaccaagacaacagattaggttaggaaaaagaagagtttaggaaaagatcaaactttaccccagtgcaggatatggactagttttgccatcctatggagagtaagcttttaagtcgattgttggatatcctctgcaaagcctttttcgcaccaggcacctcagcatcagccagcttctgtaaatgctggcaagaaccagcatccataagccgtcgtcgagtcccgttcccaccacccatggcaagagctagaaagattgagactggatacttctt

SEQ ID NO: 12015 - DNA, 806 bp, Setaria italica
  Peptide Sequence Number=SeqID_77989
ctccgaatataaacttgggtgtcttttgtaattagctctccacttctgggctgctcttcaacccagtgcaggatatggactagttttgccatcctatggagagtaagcttttaagtcgattgttggatatcctctgcaaagcctttttcgcaccaggcacctcagcatcagccagcttctgtaaatgctggcaagaaccagcatccataagccgtcgtcgagtcccgttcccaccacccatggcaagagctagaaagattgagactggatacttcttatcaatctcctcattccggggatcaagcatctgcacaagcctcattacgttcttctcatctctgacaaacacctttcgattggacttcaaggtgagcaaagcaagcagtgcacggccagctgattcctgtactgttgccggctttgccacctccatcatcttaaccagtgtaccgatgcatggcgccatgcaccgttttgtgtcttcactcacagtaggtgtaaggtcagcaaccatatcagcagccatttgttgcaacaggatgctactacagcggcatatgaggtctgtaagttgtgcaaagaacagtggtgacgaacagagggttctggcagcagcagggaccgatgtaagtgcatggatagcacgcagtactgaatcctggagatcctggtcagaggcgacatggagagtttgcaagagtggcgacaatgcacctgcttgaacaatctggctctgcgtctcgtcgtctcccatggaagcaagcgaccagaggcagagagcagcactcttctgtgttcccacagtg

SEQ ID NO: 12016 - DNA, 584 bp, Setaria italica
  Peptide Sequence Number=SeqID_77990
acaacaacaacaatagcaacagttgggacagcaatggcatccccagaaaaaagcagcatgggagatcttaaattccttagatgtcaaatatgtgcttgtcgtctttggagggcttattggctacccaagtgatgatattaataagttcctctggatggttcgaataggaggtggtgtattccctcacataaaggaagcagattaccttagggatggcaactaccgtgttgatgctcatggcaccccaacgatgctgaattcccttatgtacaagctttgctattacagatttgctgacactgatggtaagggctttgatagagtgagaagatatgaaataggaaagaagcactttaagctgacccatttcgaggaggttttcacaacccaccattggatggttcggatttacaaactgaaacctcaaaagaacagagtcagagggaaactgaaactaaaatctagttcaaaaacaagttctatgcgcaaaaccggtggaaagaagagcccatggcaatagagatcacaaaggtggggtcctgggcagctggagtcaacagatacagtcacggcttgctcaaggt

SEQ ID NO: 12017 - DNA, 888 bp, Setaria italica
  Peptide Sequence Number=SeqID_77991
aaccgttattgtagacaataatacatggaataacacacacatagcaacagttgggacagcaatggcatccccagaaaaagcagcatgggagatcttaaattccttagatgtcaaatatgtgcttgtcgtctttggaggttgattcatttttgtcttctagaaacaaacaattgccttaaataagttctgccgtactccctaacacctgatgattcttttcagggcttattggctacccaagtgatgatattaataagttcctctggatggttcgaataggaggtggtgtattccctcacataattgtcatattaccatagaagagtgaatggcacaaactaccttgttgatgctcatggcaccccaacgatgctgaattcccttatgtacaagctttgctattacagatttgctgacactgatggtaagggctttgatagagtgagaagatatgaaataggaaagaagcactttaagctgacccatttcgaggaggttttcacaacccaccattggatggttcggatttacaaactgaaacctcaaaagaacagagtcagagggaaactgaaactaaaatctagttcaaaaacaagttctatgcgcaaaaccggtggaaagaagagcccatggcaatagagatcacaaaggtggggtcctgggcagctggagtcaacagatacagtcacggcttgctcaaggtgcccaaacccgagaaaaaactaccaactcacgaaaaaggaattagactagaaatatcagcattggtttgttcttgattattgccatggagcatagtatagggataccctgtgattcatagtttttgccattccacccttccgatacatttctccaggcaggggagatctgatgaaatttttgata

SEQ ID NO: 12018 - DNA, 427 bp, Setaria italica
  Peptide Sequence Number=SeqID_77992
acaccatgagcaatctgacagtgtttcaaacctcgaatacttttaaagtgtgcctgcatatatagctaataatgatattgtgaacattttttctaaggaagaaagacaaatgttatgactaaacatcttcttgcatctgttctaaaaaagaaggaaaatgcaagttatcttgcattgctgggtactgtaggtcggtgattcttttaaccattgtaacatcaatggttcgtgaacaaattcgtgcaggttatggtacttttcttgtgagaatatttcattggccagtgatgccgttctgatattggccagcactcctaaatgaggttaaggttgtcaccttcacctgcaagagtgaggagatagcaatggcgcacgcggaagccggaggatctctaccagtgaccaaaacgtagacaaggacaactta

SEQ ID NO: 12019 - DNA, 360 bp, Setaria italica
  Peptide Sequence Number=SeqID_77993
ccaaaggctgacagctccgaccacggagttgttgttcaagctcaattaattactctgatcgatcgaccgagctttcaggaaccgaagcaagaattgatcggagaggtagcagcagcaagcagtagtctacgctagagccatggatcgggagatccaccgggtgacgagcctgcgtcgggacagctcgctatggcggcgcggcgacgacgtgttctcgcggcagtcgtcgcggttccacgacgaggaggacgacgaggaggccctgcggtgggcggcgctggagcggctgccgacgtacgaccgggtgcggcggggcatcctggcgctggacgaggacggcgagaaggtggaggtggacgg

SEQ ID NO: 12020 - DNA, 1254 bp, Setaria italica
  misc_feature (1252)..(1252): n is a, c, g, or t
  Peptide Sequence Number=SeqID_77994
tccgactcagtcgcactagtggaggaagagtgtcattgcttaataaaagatgcatcataaatacagatttatgtttatgtttttcctgcgagaataaatataacatatctatccagactcttgaagtagtcactgaaaattttgaataaattgttttagtagatgttagtaattgtacactttagctgcatttatatttagctggaagtatcctccagcaattagcaaaagataagggcactgaactgcaatcagaacaggcagctcgacatgccccagattgtggtcgcttatctctactctacagctgcttagttcttctgtacatcaaacagttatctcgaatggtagggtggcctaaatgtttgattaggtcgaccggattgatgatctcttgatctggttttagcaacatcaacaactatcatccagccatttattatctgtccattcattgctttcagggcagcacctccagcttcctcagtagtgtattctatgaaggcgtacccttttgatctttttgatatcttgtccattattatctttacttctaccagctcaccaaaaggctcaaaggctgcccgtaaggttttttcggatgtatagaatgaaagccctgtaacaaagagccttttagttttgatatcggccgcgccagttccttcagatgatttgaagccatttttacctttgtaatctttgttgtctgatccaaagtttgtatctggtcgaacagataacactccaggaacatcagctaactcctttgcacactcttcatcaatatgacagcagaaaccataatccctttcccatgaaatgtgatatatgctaacttgagcatcctgttcattgcccaatactttcataaggatttgggtatagtggtccaccatctgtgcctttgtcacgacttcaactccgggcttctccattcgaataagccaaaactcattttttccacttgatgatttagaagcaccatcgccgatgcttacaaggttagctgtcgagaggctcaaactgtcgttatccatctgtgatctttgacccatatctggctgaacagataatactccaggcatctttgcaagctcctttgacgctccctcgtcgatctcgcagcggaactcgtagctgccatcccacgaagcctcgtatatgcgcatctgcgcctctttctcactccccacaaccccggccagtgtggaggcgtaataatccacagcctccgcgcgggagaccccgntg

SEQ ID NO: 12021 - DNA, 445 bp, Setaria italica
  Peptide Sequence Number=SeqID_77995
atcgaccaaaggaattcgagatggggcggctgctgttggtgagcctgccggcgacgggcgccgccatctaccgctgcaagcactgcgacacgcacctcgcctacgccaccgacatcatctccaggatgttccgttgcaagcacggcaaggcctacctgttcgccaagatggtgaacgtgaccgttggggagaaagaggagcgcgcgatgacgacggggtggcacaccgtctgcgacatcttctgcgtcgcctgcggatgcaacctcggctggaagtacctcgccgccgtcgacaagacgcagcggtacaaggaaggcaagttcatcctcgacaggcgcgaggtgctcgccaccacctcaaccgttgctgtcgccaccaccaattcaagcggcggcggcggcggcgacgaggacgacgacgatcaccagagcgaagaagattccga

SEQ ID NO: 12022 - DNA, 556 bp, Setaria italica
  misc_feature (530)..(556): n is a, c, g, or t
  Peptide Sequence Number=SeqID_77996
tcgaagacctcctcctccgaccgaatccgagggcacgcgaggggttcaggcgaccgacggcgagcatggcggcggacgacggccgggcgacggcggcgctggacgagaccctcaagcccttccaggaaagagcttccgaggctgagttacgcatagcaaagctggaagccttgctgtacaaccaagctggtccgaacagtggatctgaggcaagttcttctgcaatgaaacatcttcagtcaaaactagacgcggttagtgcagagtgcctgactgaaaaagagaagaacaagaagctaatcattgagaacgagaagctccagtaccgcatcacccatcttatccgtgcaataaaagaggcagaatctagatagaagaagcccgaaggctgatttaaaagcctgatattgaactattgaaatatcctatcttgttgagctcaaaatattgttgtgatcttgatatagatcttggtgaaaaccgtatggaactattgatcagaacgctatgtacacgatagtctagttttnnnnnnnnnnnnnnnnnnnnnnnnnnn

SEQ ID NO: 12023 - DNA, 1854 bp, Setaria italica
  misc_feature (1828)..(1854): n is a, c, g, or t
  Peptide Sequence Number=SeqID_77997
ttccattcgggtcgcgtccagaggcaaccagctggcccgcgcgggtgccgacgcccaccggatccagcgccgcggggatccacacggcgaacgatcaaatggcctcttccccggcggcggcggcggaggaggaggtggcgcctgcgccggccccgcccgaggcggcggaggccaaggggaaggggaagcggggcggggtgctggggcggatgtggcgggcgctcttcggcggccgggaggacttcgagaagcgcctgcagtacctgtccaaggaggaggccgccgtgcacgcgcggatgcgccgccggacgcagttctcgcgccgcgccgtccgcaacctcatcgtcctctccgtcctcgccgaggtgttggctgttgtatatgctatcatgatgacaagagatgaggatctaacatggcaaatgagggcaattcgggtgctgccaatgtttgttcttcctgctgtatcctctctgatatattcaacagttgtaaacttcacaaggatgcttgagcggaaagaccagaagacccttgaaaagttgagggctgagaggaaagccaagattgatgagcttaaagagagaacgaattattatcttacccaacagcttattcagaaatatgatcttgatccagctgcaaaggcagcagcagcttcagttttggcatcaaagcttggggaggagactggtttaaaagttcatgttggagaagaaccaaagttggatgctgcagtggctagaagcaacgatgttgagatattacgctcagatggtttgagaaacaggaagcaacccaatgcaagtggaagcaggaccgggagcccctcaggtgctcataccccagcacatggaactgaatccagtccaactgctagtgctggcctggaaactgcaccagctccaatggtggtagaacaccatcaaggcacaggggcgagtgatggtggatggattgcaaaaattgctgccttgcttgtgggggaggacccatcacagtcgtatgctttgatctgtggcaactgccatatgcataatggcttggcacggaaggaagattacccacacgtaacgtactactgcccacattgtcatgctttgaacacatcaaagcaatccatgggccaatactcaggctccaactcaggccggtcaactccagctgttcctgctgatggaatgtccacttccagttcagtacaggagggtgaattgagtaacctgaccacattgcaggagctgccaaaggaagggaatgcagagaagcaagaaacagaggcaagttaatggttcgtaaaactactattgtcaatgtgtgtggaattggttaatctttttagacgcatgtcgtcatgtttcaactggtcagagccacagatttagcactgttgtaaattggaaatagtgactgatatgatccacagaaacttagcacccaaaaaaggagaaatgagccatggtctgtacatccagcatccttgagtggatgaattttgttgtcaatagagtgtcggtgaagattatctgctgcgtgacaagatgaggctgaaaagtactggaggcaagcaagcagtatgtgatggaggcaagcaagcaggtgagttgcgtagcgttcagacaagatgcttcattttctatttctaccatatttatctgcacgcccttattcagaggccaggaacatggagaaaaattttgcgtttgtctggaccttcgtctttccggtgacgattgtaaccttacaccttgcagcatttaatcggcagggattggattcttatcatatcacatcctccaacttccctgctttcttatgatagttaagnnnnnnnnnnnnnnnnnnnnnnnnnnn

SEQ ID NO: 12024 - DNA, 1132 bp, Setaria italica
  misc_feature (1)..(16): n is a, c, g, or t
  misc_feature (25)..(25): n is a, c, g, or t
  Peptide Sequence Number=SeqID_77998
nnnnnnnnnnnnnnnnttttttttntttccttggcaagttaaagcaaacaaccttttactacaaagaaagggttgttttctttctacaaccactctacaataaaccaatcagacgtacatgttacaccaatcccatatacaccaccataaaatgatcttcaaatgccatcgattagcagagccaacgcaaagtaaaatcaaacaaatctgtctgtctctgtgcatctacgtacctgtacttgcataatactgcacattttctaatggtgatgcagctcctctgcatctgctaacacgcatcgacagctgcaatgcaatgcgatcctgatcaggagttcaggacaagacggcgggaggagagtagaggggaaggatgatgccctgatcagaatccgtgctccgtttcttctccgggctggacgacgccgtgtgctcgccggcgctcttgtagtggctgccgccggagcaggcggagttgaggtcaggctcgagctcctcgtcctccgcttccgaggccgcccgcttcctgaacgaggcgatgccgctccggcagagcgggcacgggatgctgccggcgatccccggcacgtcgtaggacttgatcaccgagcacaggtccagcgcgcacttcacgcacagctcgtgcccacacacttcggctgcaacgttgcagggtcgttctaggcagacagcgcaggcgtcgctttcgtcgacgccgccgtctgagaactctgacgacgtgttcagaaccaggccacaatcccttgcgagggttagaacgctggggagcggcgaggagaggtagccggacggcgggaacttggggatcggcaggtgcgacttcggcgacagcacgtgctccaaccagtggcagccccatgtcctcgccacatcaaccgggagccacccgttgcagttgacggccgttctgtcggcgcctcgcgacacaagaatctggcagcacttgacctcgccgcccgcggcggcgtagtgcagcggggtgctcccggcgccgatggaccccatcggcgccgcgacgcaggggagcgtctgcgcggcgaggtcggcgtgctcgtcgatgagcaggtgcacgcagtccacgtgcccgtgcagcgccgctaggtgcagcgcc

SEQ ID NO: 12025 - DNA, 455 bp, Setaria italica
  misc_feature (1)..(1): n is a, c, g, or t
  Peptide Sequence Number=SeqID_77999
ntttttttttttttttttttccccccacaaacacatcttcagtatcaatttatttttccccatggggtctccatcatctcaatacaagcagattccttttgctttgtgttcttcatggatctgcctttcatcttcaaagcagtacagtatttctcagcaaaaattgaaaagaaaaaaaagcgatccggccgctgccatcaggcctcctggaccctgaccttgctcccgcagcaaccgcccgtcttcgccgccggcaccggagccggagccgcggcgccggagtggcggtccaagaactcgcggttctccttccagacctcgccgtcgtcgtacacctccttcttccagatgggcacggacgccttgagctggtcgatgacgtagcggcacgcctccatggcgtcggcgcggtgcgtggccgacgccgccacgaacacgctcgcctcgccggccgg

SEQ ID NO: 12026 - DNA, 707 bp, Setaria italica
  Peptide Sequence Number=SeqID_78000
atgaatctcaaggctcgtgaattgctcgtggttgactcatataagctcgactcgagatcggctcgatcataacgagccaagcttgagcctagctctaagctcggatggttttgagactcagctcgagctcggcttgatgctctaacaagctcaagcttgaggcgttgagctcgctcgagctcggctcgtttacagtcctagtgggggtgcgacccggccgctgctgcgtcatgggcgactcacgcgagaatgcgagatcatgttgagtgtgacgaatctgtgcgtgcgcgcgcgaccaaacgtacaccaagatctttccgcccaaaagatcaccgtctcctggagttgttcttcgagtgccgcctcggcctcgtgagcagcttcagcatgctgtccgtcaggtccagcggcgaggagtcgtcgccctcgtcctgcggcttcacgccggaggtctgcgtcagccacgcgagcgcctcgatggccgcgtcccgctccgccagctgcttgttccgcttcggcttccccacgaactgcatccccttgaactccaccatggcccggaactcgttcgtcttgaggtgcttcgtcttgtacttgggcggggtgtgccccgcgcgcatcagcagcgtctgcagcaggctcttggggttcatcccatccttgatcaggctgctcttgccctcctcctcggggctctggagcttggc

SEQ ID NO: 12027 - DNA, 1121 bp, Setaria italica
  Peptide Sequence Number=SeqID_78001
cgagggctcccagagccccggcgtcgccaacgctgccgcgggggacttcctcgccgagggatcccacaacgtctccctcggaggcgatttcagcatccaggttttgcagaaggccctggaggtttgggacctccaagttattccccttgattccccagctgcagggtcatccctatttgaccctgagcaggaggttgctttcatttgccaccttcaggaccactggttctgcatcaggaaggtgaatggggagtggtacaactttaacagtctttacccagctcctgagcacctgtcaaagttctacctctcagctttcattgacaccctgaaggggtcaggctggagtatctttgcagttagaggcaatttccccaaggagtgccctatggcaactgaaggttctaatgggttcggtcagtggcttacccctgatgatgcccagaagataacagcctcctgcaaccaggtgcagacaccacctactcaccaggtgcaatcccctttacttggccagcaatctggagggatgagtgaaatggacatgattgcagcgcagcaggaagaggctgatctgaatgctgcaatagccgctagcttgatggatgctgggggtccatttcccagctatgatgcagctcaagaatacagcaagcagcaggatgctcctgttattgaagcatcttcgagcaaagataataaccaggaagaagttgataagtctgaaccaagtgctcctccctgtgaggacacccaggagccagcttcaggaagtgacacaaaaggggaggtttcttctatagaggttaaagaatcaccaaaagaagaatagaatgagttagactagagaggacgcctccctatgaagatttttcagttagtctgtaactgagttagagcatacaaacagaaagcaagagagagggaggcgtctaaactgccctccattccagtggagaagtttttctgatttctgaatgttgtatacaaattgcatagtctgaactgcatgggtttaaaaacttaactggtgcaacggttatgtggaatctgcatagagacctaagtggcggttttgaacctgttttttccgtcatttatcatgtgaacttatgctaagg

SEQ ID NO: 12028 - DNA, 363 bp, Setaria italica
  Peptide Sequence Number=SeqID_78002
gaccagctgatctgtgatctggcacgggccaccaagagactaccacttcgtgttcgtgttactggtgtgtgcgtgtgcgtgtgcgtgcgtgagccggggagtccttgtggtcggtgaaggcatggagggctcgttgctaagcgggctcaactccggcgtggtgctgagcctgatcgccgtgctgtggacggtggtgtggcagaacctgcagcacctccagctgcagcagttcttcgggcgccacctgagccgccacgcgcggcggctggcggcgatggtggatccctacctgtcggtcaccatcgccgagtacgagggcggccggatgaagcgcagcgacgccttcgaggaggtcaaggccta

SEQ ID NO: 12029 - DNA, 276 bp, Setaria italica
  Peptide Sequence Number=SeqID_78003
cgggtatttttcgttgagacgttgaccaaaaaatacttcacaatcacaaaacacataattttgattacgataggtaaaaaagaacaaatttaaaagtgtggcgatcgacgagtcactccaaatctgtgtatagtaatggctaagctatagtaactagtagtgtgggttgacgacgaagcacttctccctgatctccccctcgtcgccggtgagcacctcgatcttgcccatcttgatcatggaggcggcgaacttgagctgccacgccttctcgac

SEQ ID NO: 12030 - DNA, 387 bp, Setaria italica
  Peptide Sequence Number=SeqID_78004
cgcttggtgtttttcccccctgcgttgcgtgtaaactgtgaaaaagggtagagggaaaaaggagagggagcgtccccgttcttcgccggaaatggccgtcgactccggcgagccgccggtgtacgggcagtagtacgctgagcggtggttttttaaggccggtggtgtgttggtgcggttggttacgggttggttgcttgggagagatgatgtggttgtagtggctgcgcttcatgcgatcgatgccgttccagttgaagagcggtcaccaccaccaccaccacggtgccgtcatggaagggaagccgccgccgccgccgccgcagcagcagcagcagcctgcgacgccgagggtgtcgatgttccggaggctgctggtgagggtcg

SEQ ID NO: 12031 - DNA, 718 bp, Setaria italica
  Peptide Sequence Number=SeqID_78005
tatcatcttcctggttccaagttttttaagaaccaaagtgtttcttcttcacccaggctttctacttctacacctagatcatctgtggatgctaactacaagccaccaccaatttcacacttgaaacatgagaagaagtggatgcatgatctaccatctaagggctcaaacgtgtgcactaaagagggagctgaatttccgaaggatcatgttcgcagcagatttaggaagcctgagactgtgagctcagagagtaacttgggaagatatgttccaagctcagcgagaagtcaagcatcaatggttaaaggggctttgccagtttcatttaccagttcctgtgagcaacctgaaatgcaaaatgcattatgtgcatctaaccagtctggtgaatttcaaggtactggcgaaatcgagcctgcatacatggaggccctaaactgtggtgattatgatgatctgattgacctaatggatagaactggaccagttcttgagaagttgtcgtgtgagacagcaaatgaacttctaagggttataacttgccaatttcttaataaaaagttttttgacttagccctgccttggcttcaacaattagcagatttaagcacgatctataagccaggccaactttttgcatctgtgagagcacaaaaggagtttctttctgcattggaggaagttgcaacaagtggatctacagaaccagccatta

SEQ ID NO: 12032 - DNA, 454 bp, Setaria italica
  Peptide Sequence Number=SeqID_78006
ccacgtaagggtgaactctccaggcatcagaaacaacttcgtggagacttgttagatcatttggcattgactgacttcttgagggatcgaagtacactccacatggcagaagatacaaagaacagaactactccagtgataatcgcatatttcagaccgagattcatgagcaagttcaccagcaggcctgctaggatgactcccataaaattagctgagaaacctgaccagaacggcatgcctaagacagatgcaatgatcgcccctgtccatgcccctgttccaggaaacggaacggcaacaaacaacatcaatccaagccattggaattcctcaacaggcgcagccttccgccgtgcccgctcgaagagaaggtccataaatcgggttgcagaggcgcttctctgggagagaaaagtcgcaagtttttcaggtagaggatgataatggcacg

SEQ ID NO: 12033 - DNA, 235 bp, Setaria italica
  Peptide Sequence Number=SeqID_78007
aagaccaacaaggcaacagcaacagagtacgagcatcagagcatgcatggatcgttcagtaatcgcgtgctaatgatctcaccgctacgacggagtcgcgggcggcaacggtgaggatgtcggcgcaggagacggtctgcgggcacaaggcctcgatctgcgccttgatgttgtcgatgacctcgaagcccctcagcgatctaaagttcggcgcctgggtctgctccccgcttcg

SEQ ID NO: 12034 - DNA, 240 bp, Setaria italica
  Peptide Sequence Number=SeqID_78008
tggttgatgttggtgtcgttgtagatgtggtcttggtagctcgggcagtgcgcctggccgatcgtgtgcgcacctgagagagcaaccaagtcggttgggttgaggcccaagttcccgtacccttgaatcagttgagtgaggctagatgtaggcgggatgaggttctgcaacaccatgctcgtcttggacagttccgctggggagaccacagcgagcaggtagcagcatctatgggaaagg

SEQ ID NO: 12035 - DNA, 168 bp, Setaria italica
  Peptide Sequence Number=SeqID_78009
gtggtgtcgttgtagatgtggtcttgtagctcgggcagtgcgcctggccgatcgtgtgcgcacctgcaacaatccactcattggaaacatgttaaaatcatcacagaggacttgcgataagaacaggagagcacgggtgtgcgtacctgagagagcaaccagtcggtt

SEQ ID NO: 12036 - DNA, 378 bp, Setaria italica
  Peptide Sequence Number=SeqID_78010
aggattcgttactatatacttagatgcaggtatgcatgcatcctacttgcatggttggtactcgagcttaattagcttattcgacacgtacacatcttgatggatcaggagttcaccttggagcaggtgagcctcgatctggccctgactcccgtcttggggcttgattgtttccccttattcttcaccatcgccgccgcgaaggcgctgctgaacgccgacgcgctggacgcgaagctccggaccgtgccgtcggcgctgccgccgttgaagagctcctggtcggagtgcaggagccccttccgcgacagcaggttgctgaagtagtcgttgttgaagctggtgggcgacgccgtgtccagcggcgccagggagctg

SEQ ID NO: 12037 - DNA, 245 bp, Setaria italica
  Peptide Sequence Number=SeqID_78011
tgtccagcggtgccatgacgttggagccgcctgtcgcggggcagttggccttgagcgacgccgcgaacgcctggttgatgttggtgtcgttgtagatgtggtcttggtagctcgggcagtgcgcctgagagagcaaccaagtcggttgggttgaggcccaagttcccgtacccttgaatcagttgagtgaggctagatgtaggcgggatgaggttctgcaacaccatgctcgtgcttgcagcttt

SEQ ID NO: 12038 - DNA, 189 bp, Setaria italica
  Peptide Sequence Number=SeqID_78012
ggaggctagattgaggagctgggaggtcggtatttgcctggttcgggaatgaactggtagagtcccttcttcccagtagaacagtccacgaaggcccgccgagctgcatacaagttagttacaagccaacagcaacagagtagaagcatcagggtaacaatcaacacacagaaagacatcgcgtgctaa

SEQ ID NO: 12039 - DNA, 1087 bp, Setaria italica
  Peptide Sequence Number=SeqID_78013
gccttaccttattagcatgtactacaatgcttgtgtatatatggtgattattaattcttagttcactttggagcaggtgagcctgatctgtccctgtgagccggtgagcgggctgaggttggccatcttcaccatggccgcggcgaaggcgctgctgaaggcggccttgttggaggcgaagttcctgacggtgttgtccgtgctgccaccgttgaagagctcctggtcggagtgcaggagccccttctggctcaataggttgctgtagtaggcgttgtcgaacgtgtagggcgtcgatgtgtcgagcggcgccaggttgccgtcgccgttgccggtcggccgggggcagttggccttgagcgagctcgcgaagcccgcgttgatgttggtgtcgttgtagatgtggtccctgaagttgaggcactgcgcctgcccgatcgtgtgcgccccagagagtgcaaccatttcagttgcgctgaaacccttgttggagaaggagccgatgaggtcgctgaggttgaagaagggaggcggcaggtcgctgtttgccagggccgcgctcccgcttgtggagtccctccgccccaagggaaccgtccatgagggccctcccaacgctacaacggagtcgcgggcggcgacggcgaggatgtcggcgcaggagacggtctgcttgcagatggcctccacctgcgccttgatgttggcgatgacgttgaagcccctcagcgaccccgcgttgggtatcgccccctgctcgcctccgctgtccagcagcacggacgcgtcgcacccctggacaaagcagtcatggaagtgcagcctgagcaaggaggcacccatccggttctcctttttcacggcggccgtcacggcgctcttgatggtggacagcgcgttggggcacgacgtgtcgtagaacgtcggcgacagctgcgccgacgccaccgcggccatgcagagcagcagcaagactgaaaccgaagacgccatggcgagcagagcacgtactacaagcagaagcagcagtgcaattgcagcttctacacagagcagaggagcaaggcactcagctgctgagatgctt

SEQ ID NO: 12040 - DNA, 1203 bp, Setaria italica
  Peptide Sequence Number=SeqID_78014
ctctcaatgccttcgcatgagaactcgtttacatatgtagatgcaagtacggtaagtgtgcactctccgttccatacactttgtagaacaagaaagagagctgttgcacaccactcgatcgacacacattgacacatactagtacagatccttgttggtagtggcgtagtgcttgcgcgaccttattcgcttacgcggttacgcacgcgcttgtcgtagcacattggcgtacgcgggcgctgcctatacgtatatcgtctgttacgctgtaggcttacgagttgaccctccagcagaggcgcctgatctggccctgtgtcccggtcagcggctgaatgttagccatcttcaccatggccgtcgtgaaggcgctgctgaacgccgcagcgttggacgcgaagttcctgaccgtgctgtcggtgctgccgttgttgaatagctcctggtccgagtgcaggagccccctttgggacagcaggttgttgtagtaggcgttgtcgaaggtgttgggcgtcgtgacgtccagcggcgccaggttggtgtcgccgcctgtcgcggggcagctggtcctgagcgacgcggcgaaggcggggttgatgttgctctcggtgatatggtcccggaagttcgtgcactgcgcctgtccgatagtgtgagcgcctgagagagcaaccatgtctgttgcggagagggtcttattcccaaacgcatctataagatttcggaggctagattgaggagctgggaggtcggtatttgcctggttcgggaatgaactggtagagtcccttcttcccagtagaacagtccacgaaggcccgccgagcgctacgacggagtcgcgggcggcgacggtgaggatgtcggcgcaggagacggtctgcgggcacaaagcctccacctgtgccttgatgttgtcgatgacgccgaagcctctcagcgatcccacgttcggacccgcgctctgctcgccgttcgtgtcattcagcagaacggaagcgtcgcagccttggacaaagcaatcgtggaagtgcagcctgagcagggacgcccccatgcgagcctcctgcgccaccgcggcgttcacggcggtcctgatggtggacagcgcgttggggcacgacgtgtcgtagaacgtcggcgacagctgcgccgacgccccagaggccagcgccacgagcaccaacaacccaaggaaagaag

SEQ ID NO: 12041 - DNA, 290 bp, Setaria italica
  Peptide Sequence Number=SeqID_78015
gtaaaagagctgtaggaaaggaagggaaggagaagaacaaatgccaggctagcaagggcaacaactgaaaaggagaacctaacagccaggtaccaactcaaaccatcatttcagcgcattaaggtcatctctagctactcccacagcacctccatccaataatccatccagaacgttcgcagcctaagcatggcgattgggattgacccgcctccctccgctccggcgatctcttcggaggcacaccaagatgaaaaaccaaagatgcatgtgtctatatacgcatcgta

SEQ ID NO: 12042 - DNA, 448 bp, Setaria italica
  Peptide Sequence Number=SeqID_78016
aaccaagaagggatttttattactgtttcaccaaggagatcaatcactaataattttacctaagcatggcgattgggattgacccgcctccctccgctccggcgatctcttcggaggcacaccaagatgaaaaaccaaagatgcatgtgtctatatacgcatcgtacggcggcggcggggagggtgggtcggatcggagggcgcctattgccgcccgaaggagttgcggttcttcttgatgaagtcgtcgaaccgccggttcatctcctccgcgccgagcgacgggtcccgcgccctcggtggcggccgctgcggcgatcgctgcgcgggagggggagacgccggcgctggtgccgcggcagcagccgggcgcgtcttctgcatgatggccttccacatggcgtccatgtcgtcgtcgccgtcgccgtcgcagtccacggactgggac

SEQ ID NO: 12043 - DNA, 651 bp, Setaria italica
  Peptide Sequence Number=SeqID_78017
ccagtgcttataacattctgtatattcatagtcaagctatctagcagaatgtatgcaggtaaaacattctttgatttaagggcgccaagtagttgaagtttccggagtagataattgaaattctccggtctgccctgggtgcccacatctgggataaaacccagatagtggccagcacactctagcacatgccaccaatacctcacagtatctcacatgttgtcctaatatcatctgatatcatgataagatatcaattttcattagcatccccaaacccaagtttgttaagtgacaaatatttatttaaaaaacaaacaaattgtactgatgtggatcaatcaaaccttgtttttcagggacaagatagctgaggaaataataacttgtaataatcaagatttgcaaggcagaaaaaagtaatattacgaagatgaaacaatgtacgtgttaagatagacaagccgaagaaagacttgggcaattttgtttgcagtggccttctcaacaacttcaatagacataagtatattctttctccttagatgttcacggtgctcacttcccctgtcaagtagtattcccttgccatcaaaatccatattttttgatatatattatcatgttcattgagaagagatattgagcaaa

SEQ ID NO: 12044 - DNA, 681 bp, Setaria italica
  Peptide Sequence Number=SeqID_78018
agtgaagggggactgggaacatgtcaggattataaaatcgtgccaatgctgtactttctgggaccacaatgcacctataatttgcatgctaggccatgaactagatgttgcacaagtttcaattccttggctaatgattccatggaggtgattaaatttctccatcttaactgttatcgataaactgattagggctgctataggcaatggcagcattggcatcactgaacgtggttgagaagagatgttgatattaacaccagcagatgcaagaacttcatttatctcaaattcaactactggaagtgttgcagctggacttggccagtctgttccattcaacataaccggcttccatatgccacgagtaatttctgctgaaaagtagctgacaatagcagcaagtgaagcaggcaggaaatctgcaagatctcttagacctgtaaccaaatcacgggatgaaagcctcccatgagcgcatgcagttaatacagcctcaagcacaaaagggacagcttccagaacttcccatgcaggaacagttggccactggcactcatcttcctgtacccctggaagtggactactcatactggaatttgatgttgactgaggattttactagtaacaaggaacgaccaaccttttagaaaattttaacggacaataataaattttaca

SEQ ID NO: 12045 - DNA, 725 bp, Setaria italica
  Peptide Sequence Number=SeqID_78019
agtgcttataacattctgtatattcatagtcaagctatctagcagaatgtatgcaggtaaaacattctttgatttaagggcgccaagtagttgaagtttccggagtagataattgaaattctccggtgtgttaagatagacaagccgaagaaagacttgggcaattttgtttgcagtggccttctcaacaacttcaatagacataagtatattctttctccttagatgttcacggtgctcacttcccctgtcaagtagtattcccttgccatcaaaatccatattttttgtatatatattatcatgttcatgagaagagatattgagcaacccataatcatccaagatgcaatcaatcagcatttcaacaagacctaacacaaaaagaataacggcatgtccaaaatccaaatgttgaaagccgtatctatgtgcaagctgcatagcatcatcgatagatttggctaatatagacttcctctccgtgcattcggggtaaaccggcgcgacagcgtaccggccgagaagctcgaggtagagcctgtacgcctccggctgtctcggccggttcggcaccaccctcggggtgagcagggcgagggtgtggagcgggtgtacaaggcgggacgacatggcctggtccagcagcttccacatggcgcccgtgttgtgggcgaagcacaggttcgccaccagtgcctccgcgagagcgaggccgcaggaag

SEQ ID NO: 12046 - DNA, 1975 bp, Setaria italica
  Peptide Sequence Number=SeqID_78020
ccaaccttttgaaattttaacggcatataattttcagtataatgtttgccacttggaggacatttgtcctgttgtaagcactagaaagagtagaggctatgcaagcctggttctggaggtaccatgcccttagctttggaaatgagtcgatatatactggcttttgcaacgatggatctaattgaaatatgcttgacttactaacattagatagatttttcaaagcagaacgactattacgtaataataagagaaaatctaaacggggctctgaccaaacagagactccacgtcttgataaagcattctcaatagggggtctatgaaatttccacaagcgaagcagggaaaggaaagcacatgagaatactgagtacacagaagcctcttcaaaattacaactcctatgaccagatgcaggtaaggatccaaaaatctcacagagaggcattaacatggctgctacttctggcaccaggggccatacattgagagaatatgaacagcatcaacagaagaaattcctaatatgagagcgtgcagcataggcatgtgctgtaaatatcgctcatctgatctggaatccaaagggaggaatgtcgataacaacttaagcaccatttgaacaacatgttcctgaatgttccaaccacgaagaagtgatgccccacacaaaacctttgaagccaccaacttctcctcctctgacccacttagtgcaaaagagtacaatttctccaactctgctacactcgaagcaggtgtaaccataagtgcatccttgagttccatgagtggagacccttctattaaagatgaccatggagattcctgggcttgagaggattcttcaagtgcaaccacgtagccaggccagaaataagcagatgtatcaactaagttcctggctatacaggcttccacaataaggtgtatcatatttcctactgttttaatagaggaactatctttggaataactgtacatgttctcattcccacttttcagattagatagaacaactgctgctttcctagcagcactatttgccaaatgcatagcagctggaggaggtgaaagaagaccagaaaattgcaccagaatctgaagtgaagacactagttctccttttatagcagctaccattccaccatccaatttgtccacctcttcgttcacaatagttgcaattgacaaggggatgatagctaacagcatgcacaatcgtgaataaagatgaggaaatggtccttccaaagcagctgggccttgttgtaccagccgcaaagcagaaatccataaagcttgaaaggtctcttgccaggttgcccgatttaacactttaaatgtcttggagagttctgtcaaaaattcaactgatgatatggcatgaagatgtctcccatccattgcattctccataaacatgtcaaaaggaacccaacaggatcccttcccagctccaaaaatattgaatgcagatgaactgcaaggttgtgtgctaacaagaactcccaatagcctactcctgtctaattgatatccagtgcttataacattctgtatattcatagtcaagctatctagcagaatgtatgcaggtaaaacattctttgatttaagggcgccaagtagttgaagtttccggagtagataattgaaattctccggtctatcctagcatatccaaaaaggaacgtaagtgtcatcagtttaacaaacataatgcatggaacgtttgaataatagttaggtgctatggaaaaatttgttccacaattaaaacccctacatgaatatgaatatttctttaaacctgctgaatagcaaagaataaacctttaacaaacataatgcatggatatgcatgcacacttaaattctaaaaagaaaatcataaagttgaagtttttatcagacaaaccagaaatttaggaagttttgcatatgggaaataaacaagcataaacaaatg

SEQ ID NO: 12047 - DNA, 1250 bp, Setaria italica
  Peptide Sequence Number=SeqID_78021
cagaaagtacagcattggcaccgattttataatcctgacatgttcccaggtcccccttcactcgagataataccgcggtagctcaactgatcaggagttgcttcacatctttccttgggcctttgattgatgggcgttcctgctacatagaaaacagaggagttactaatttgctggggaggactcttgatgaaagaactcaactcgttatagcgccaggatttctttacataagatcttgccggttatttccagacaacaattttgtttgtgaagagattttgaagttggtcattgagagagcccgtgcactagcgaatgattgtatttctgaaagacctgctcatttgagatcagactgcatgccactctcagtttcctcatccttggtagagcagatgtcatcacttgcagcaactatgctttgtcatgctggtggggtgactttgatccgtctcctgtatgagcatattctccccactctgcttctttcagcgggagaagataagcttggttctgctggtcacgtatgcagcttatttgaaggatacgcactagcatacgttctcatctggtctggtgccagcatctggggagtgggagaaacctcgccagcatacacttcaatttacacgtcaaaaaggcagcggattgtggataggcacttggagttcatggtcaaggtaatggagggtaacatagtgctgggctgcggtgagaccacttggaggtcctatgttctctgttttgtcgggttgctggttgactttgtgccagcatggattctcgaagtgaagctggagacactacagaaattggcttctgggcttcggaggaaatggcacaagggtgatctcgccctcgctttgcttgagcgagggggaagtaagactgtgacttcggtggttgaatcgcttatgtgacacgctgatgctgaatttttagtacagttttcatgacaccaccttagtccatgcacacataacatgttactaatctgaaattcagtccatcagaaaaatggacagtacagtttaacaggagcttgcatgttgttcatattgtcgatcagctaagggtacgctaaagaggacgccgcagcagttagttttatatagttgtatacacttccgttggtaattaacaaacatgtcatttatgaagttcttattatggcagtcatttatatcgggtgcataaaatgtatggaacaatgagaacacttctgtgttagaaaatatcttctgacc

SEQ ID NO: 12048 - DNA, 284 bp, Setaria italica
  Peptide Sequence Number=SeqID_78022
gtcgtccggcgaaacgcgcgtcggaacggcgagcaccaggagccgcgtgccacgccatggcgggaggagcgagtcggaggcgggctgcggggcggccggcccgtgggaggaggaggaggtggcggcgacggccgaggcgtaggaggaggaggaggtggtggaggtggacgacgacgagtggtagaggtggatgacgccgctggtgtggtggatcctagggcttcgggcgggcgccgcggaggtcgcgccggggagctcgaggggaggtatggacaacgtggtgg

SEQ ID NO: 12049 - DNA, 1182 bp, Setaria italica
  Peptide Sequence Number=SeqID_78023
ccgtctccgtctccgaacttcccactcggcagcgacgaaaccaaagccggagaccttttgatccagtgctagggtacagggctttggtgcgaggccatggagggatccctggaggcgcggcccggcgtcctcctcgtcggcgcccccggcgtcggcaagcgaaccatcctctcccggctgctggcagctgaaatacctgactcgcatgacttatcatctggtgtgctgtgtcaggggtggacaattgacacaaagtattactcagctgatctttcgatctggacagcaaatcttggtgaagaattttctcttggttcccttcctcatctagatcagttggcagctcttgttatggtcttcgatatgagtgatgaatcatccttgcttactttgcaaagttgggctgccaatgttgatatgcagaggtttgaggtcttgttgtgcattggaaataaagcagatcttgtacctgatcatggtgcacatgtagaatataggaggcgtatgcaaaggcttggggagtcaagttctgatccacaccctgaatatttggactttgggataaatgaaagtgagggttgcggcttgttatcagtggaagaaccatgcatcgagatcagaaactctacttcacagtggtgtattgatcagaacatagagtatatcgaggcctgtgcttccaatactgactttgataaatgtctatcagtggatggtgatagccaaggcttagagcgactctttggagctctttctgcacatatgtggcctgggatgattctgaaatctggaaacagaataactgctccgtccttggttgaaaaagaagaatcttcggatgatgaatccaactatgattttgagtacgaggtcctgtcccatggatctgatgaccagtgggaattcgtcggtgagacaagtacatccagaagctttgagagatcaaatgaggctaatggtacacaggaacacacacatcaagttgtgaatgccagcgctgattcttcaaaacccaacgctctaccgagtcacgcacccacagaaactgctgaagaaaatactgtaactcagagcaacaaggctggcgatagtgatcatgtggataggaccacagcagatagtgccgacgaccatcaaggtgatgccccagaggctaacaacctgtttgatgatgagcattat

SEQ ID NO: 12050 - DNA, 1024 bp, Setaria italica
  Peptide Sequence Number=SeqID_78024
tgtttatgtgatcattgctttgcaaatgtacgaacatgtagactaggaacatcatgcgctgcagggttatgctgggatctctttggctagggctcttcagcacccctcctatatctgcccctgattctaaaccctaccagccacctagtgaaaagaaataggaaaagcaactatcgatctgtgttaattaggattttcttgttaaacaggacagtaacaaaatttgtattgcataagggatttcatcattcaagcctaaagaataccacatgtataaaacctaacaggccttacaatgtgctaccttggattgcgaatatatgagtacttctagaatcttcatatttgttccaaaatatatggggtcttaagattgtgaggcatttttaaattttcttcttatcataatcttgcttcaattctagtctcgtcaatcagtcccaacacagtaaaggctgagtggaaacaacgtcatcttattataatcaccctaattcttgtgtgccagtttataaggacatgtattttcaattgccaattggaaagaaaaaaaatacatcagtagatctttgatgcagcagagcataaatattctcaataacaagtctagcacatctaaacaagaactgtgtatacctggccatgatggatatgctctactaatttaagccaaattatggatgttaaaccctacttagtgaaaagagaataacaaagccattatctgtttggttcattaggatattctttttcaaccagtcaattaaaaaaattgtattgcatatggtatttcaggtatgcttatgaatacaaacagctagccaacacaatacagaaaaagcttaaagtttgttatacacaatcaatgatgtctgatggatataaaaacacatagacttctgcaagctgaacaacacacacaaatccaaaacaatagtctataaaattaatcaacttgttcaaaagagaaggatggggaatagcactggaaggaatccccaagatctgcgctcacaggtatctt

SEQ ID NO: 12051 - DNA, 3282 bp, Setaria italica
  Peptide Sequence Number=SeqID_78025
ccctccgccgcagcctcgccacccgcgcgccgacagccgccgccgccacccgatgcgcccgcggcttccactccaccgccctgcggcctcgctccgccgcccccgccgccccgggccgtcccgctctcccgcctctccgatagcttcctcgacggcaccagcagcgtctacctcgaggagctccagcgcgcctgggaggtcgacccctcctccgtcgacgagtcctgggacaacttcttccgcaacttcgtcgcccaggcctccccctccgccggcgtctccggccagaccatccaggagagcatgcagctcctcctcctcgtcagggcctaccaggtcaacggccacatgatggccaagctcgacccctcggcctcgacgaccgtgccgtccccgaggacctccacctcggcctctacggcttcaccgacgccgacctcgacagggagttcttcctcggcgtctggaggatgtccggcttcctctccgagaaccgccctgtcctcaccctccgcgagatcctcagcaagctccagcaggcctactgcggccccatcggctacgagtacatgcacatccccgacagggacaagtgcaactggctcagggaaaaaatcgagaccgccaagcccagggactatgacaaggaacgtcgcctcgtcatgctcgacaggctcatctggagcacgcagttcgagaacttcctcgccaccaagtgggccaccgccaagaggtttggccttgagggtggtgagacgctcatccctggcatgaaggagatgttcgatagggctgctgacctcggcgtcgagaacatcgtcatcgggatgccgcacagggggaggctcaatgtccttggtaacgtcgtccgcaagccattgtctcagatattcagcgagttcactggcggcacaaggcctgttgaaggcgaggatgggctctacactggaactggtgatgtcaagtaccacctgggtacctcttatgaccgcccaactcgtggtggcaagaggattcacttgtctttggtcgccaatcccagtcatctggaagctgttgatcctgttgtcattggcaagacgcgtgccaagcaattctactccaatgatgccgacaggacaaagaacatgggtattctgatacacggagatggtagctttgctggccagggtgtggtctatgagacgctccatctaagtgctctcccgaactacactactggtggaaccatacatattgttgttaacaaccaagtcgcctttacgactgatccaagagctggcaggtcctcccagtactgcacagatgttgccaaagccctgaatgctcctatattccatgtaaatggtgatgatttagaggctgttgtccgtgtatgtgagcttgcagctgagtggcgccagacttttcactcagatgtcgtcgtcgatctaatctgctaccgccgttttgggcataacgaaatcgatgaaccctccttcacacagccaaagatgtatcaggtcattaagaaccatcccagttcattgaagctttatgagcagaaactgctaggaacaggtgaagtctcgaaagaagatgtccagaggatccatgacaaggtgaaccgaatcttgaatgaagagtttactaagagcaaagactatgttcccaacaagagggattggctctctgcttattggactggctttaagtcgccagagcaaatatcgcgtgttcggaacactggggtcaagccggagatactgaaacgtgtaggacaagcaattactacactgcctgaaaacttcaggccacacagagcagtgaagaagatttttgagctgcgtgcagctatgattgagagtggtgaaggaattgattgggctgttgcagaagccctagcctttgcaacacttatagtggaaggcaatcatgttaggctaagtggacaggatgtggaaagaggaactttcagccaccggcatgcagttctgcatgaccaggatactggagcgaagtactgcccacttgaccatgttgcaatgaatcaaagtgaggagctgtttactgtaagtaacagttcgctttcagaatttgctgtccttgggtttgaattgggttactccatggagaaccctaattcattggttctttgggaagcacaatttggtgactttgccaatggcgcgcaagtgatgtttgaccagtttctgagcagtggagaggcaaaatggttgcgccaaactggccttgttgttctgcttcctcatggttatgatggccaaggccccgaacattccagttctcgtttggagcgcttccttcagatgagtgatgataatccttttgtcatacctgagatggaaccgacacttcgcaagcagatccaagagtgtaactggcaagttgtgaatgtgacaactcctgcaaattatttccacgtgttgcgtcgtcagatacatagggagttccggaagccactgattgtaacagctcccaagaacctgcttcggcacaaggattgcaagtccaatctttctgagtttgatgatgttgaaggccatctaggatttgataagcagggaacacgtttcaagcggctgataaaggaccgcaacgatcacaagcaagtcgaggagggtatcaaccgtcttatattatgttctgggaaagtttactatgaacttgacgaagagcgtaaaaagtcagagcgcagtgacattgcaatttgcagggttgagcaactttgcccattcccgtacgaccttatccaaagagagctcaagagatatccaaatgcggagattgtgtggtgccaggaggagcccatgaacatgggtgcatacagctacatctctcctcggctgtatactgccatgaaggctctcgggcggggttcatttgaagatatcaagtacgtcggcagagcaccttcagctgctacagccactggcttcctgtcggttcatgtgcaggagcaatcagagctagtaaagaaggcacttcagccggagccgatcaagttcccctgatgagatgcagatcttcacttcttagtacaaactatatcgaaataacaggaccctaacatgcctgtttgcaggaggctcaacataccgaacctgcattttgaaagttttgccatgtacgagcgttttctttttctgttccagttttgtggcttttgtgctctttggaaataatgacacattatcaagacatgaagccgtgtgaaactggtcattcaactttgctttcattcatagtggctttgttcgtgcaggtgtttcaaaaaaaaaa

SEQ ID NO: 12052 - DNA, 252 bp, Setaria italica
  Peptide Sequence Number=SeqID_78026
ctcgcctctgctttgctactgcggcgttgcgtgtcagctagctctgggggcggggcgctagtgcgctacggccggccatggccgccgtggcaaatacagccgcccgtggtcaccagccgtgggcgctggttgcggcgagcgccaatcgcagcagcggccgtccagctgccaccacggcgaccagagcgctggttagcacgggatttgccggtgccccgaatgcgtgggcagcgggaaggccgccgcggcgcg

SEQ ID NO: 12053 - DNA, 509 bp, Setaria italica
  Peptide Sequence Number=SeqID_78027
ccgtcggaatctcagttgtaccatgtgtgcagacacaaagcttcccgcgacaatggtaccccaccaccaccggtgtagatcctcgcaccaccgcaacgacaccactgttgccgtagcatccccggccagatctgccgaggtctcacccgtggcctgctcctcgtgccgccattcagcttggtcggcatgctcctgctgcgcgcctcctcagcgccctcactcgagtggcctcctctaggccaaggcctaccggatccgggccgtgggggcactggaagcccgcacagctcgctggagctggccgccggagagcctcccgctgccgtcgtcgcacgcgccgctcacggcctctgcgcagcccagcgtgaggcaagccctccgccgccgcttgagcctgcatcacaccgccgctcctccctgtgcactcacgcgtgccgccgctcgtcccgctcgcgtgcgcgctgctcgttccccacgccgccgccgctttctcttggggcgacgacgaa

SEQ ID NO: 12054 - DNA, 296 bp, Setaria italica
  Peptide Sequence Number=SeqID_78028
cctaggactactaaaaactggggtgtgactccaaaattgtactgggaatgcactgatcaacatgtactccaaatgtggtcaaattgcatctgcaaggcttgcatttgatgtcatgaatcttcatgatgtcacgtcttggaactcactgattcatggtttcgcgcagcatggagatgtgaacttgacactggaggcattcagtgagatgtgctccagtggttgcaagcctgacgattcaacatttcttggagtcttggtgggtgcaatcatgcaggtctggtgaaggaaggggagat

SEQ ID NO: 12055 - DNA, 415 bp, Setaria italica
  misc_feature (318)..(415): n is a, c, g, or t
  Peptide Sequence Number=SeqID_78029
cagcttcgtgctgctgcgtccctagccggctagcctccctctcagcaagtcagcaagttgctcagttgctgtaccaaaaacctgagccttcgcttgtacttctgctgcggccatagctttcctttccacgagtcagccttccattttccaccagactaggagtataatttcgtatcacaacttgttcagcccattttgatgtgcttcttgtgctgacgtgctgaaacccgatgcacataaattttatgctcgatgtataactctggatgagatgtgcccgaaaagagcctcccttgtttgtaattcaaaaaaaaaatnnnnnnnnnnnnnnnnnnnnnnnnnnnnnnnnnnnnnnnnnnnnnnnnnnnnnnnnnnnnnnnnnnnnnnnnnnnnnnnnnnnnnnnnnnnnnnnnnn

SEQ ID NO: 12056 - DNA, 779 bp, Setaria italica
  Peptide Sequence Number=SeqID_78030
gagtccgattattgcttcagcatggcttacaattgctgttggtctgaaatcctttggccactcaggtttcttagtaaatttacaggagattgccccacaatatgctggagtcctacatggaatgtcaaatacagctgggacatttgctgccattttaggaactgttggagcagggttttttgttgatcggatgggttctttccgtgggtttttgatactgacgtcgcttctgtacttcagtagtgctcttttctgggatatatttgctactggagagcgtgttgactttgatggcactggctagcgcctcagaggaactctacagtttctatccagcacaaaatgatgattcagaacaaagcgttaccgccccctcttagaaaccctcgagttctatgcacatggagagctgaagttgtgactgtacagcgcaaggtatgcagtgagcttatcttggaagtcaaatatcagtgatggtgaacacatggaaccggctttgaagatcatgttagattttcttgtagggcaagtccgaaatgtgttatagtcaatgaaattgaaggtgtaacttagaataaataacagggtaggagcctgaccatccatggcgccaaaaccagtagagaaactgatttgcaggctagttggaggctgggaatccagcatggattatgataacaggtgtttcaaaacacaggaaacttgagtgtaaatgccacgaaataagtggtgaggttttaaaatcctgaagaatcatgagggttttggggtaattaaaa

SEQ ID NO: 12057 - DNA, 1075 bp, Setaria italica
  Peptide Sequence Number=SeqID_78031
ctcgtgcagcgtagttcactggattgtaagtaatagattatgaaacgacagctgggggttgtctattggtcgcatacccaaagcacgagatgttaatgacaaatcaggaccaaatttgttatgacaaactatgacgagttaaacgtgaacatggactccaggggcagctcttcacagtggaatttgagctcattctgaaatctctgtaacacgaagtgctcgtcctctgttatcaaggttgtcacactgcattccaacctggagaatggttctctcccagttcttccagcacggtgcagatagtcagtcgcggtcttaggaaggtcaaagttgtatatgtggctggtttgaggaaggtcaaaccctctgcttgctatgtccgttgaaactagcatgaaacctcttcccatcacttcagagaatgaggcagctcgagcattgaaattcatatcttcttccagaagaagcacatctagacttcccttgtatgaatttctcaggaattcaataacgacggctgttgaaggaggatttccagccttctttgatctctcagactgttcagcaacaaatatgattgcagactttggtgcatccctctcaagcaatgatagtaaaacatgcagcctttccttcttagtgcagatcacatatttgtgacataggtgcgaaggcatgggctgtacagggttgacatgaacatgaaccacatcactcttggtccacttatgctgcacgcagtcatgcagaaagcgattgtgctgagggattgatgcgcttgcgaatatggtttgacgactggaggctgctgaataagaggttaatattttgcgaagagagctcacttgctttgatgatccaaaaataaaatcaacctcatcaataactaacactctcatggattgaagggagaaagcgcgcctctcaaccatttgacacaagcttggcacggtagctacaattattgcagggggctctgccttgacccagctcttttgcctcttgagcatgccaccatcaagcaaagccatgacggtgcaggccttggctgcaagcagtctagcaaccttggtga

SEQ ID NO: 12058 - DNA, 637 bp, Setaria italica
  misc_feature (545)..(637): n is a, c, g, or t
  Peptide Sequence Number=SeqID_78032
atggagctgctgcggctgaagatgcgcctgagggacccgtcggcgccgctccctccgaccggcgccgctccgccgccgtccgggcggcactcgatgccgaagaagcccggcgccggcggcggattcatgaacaacgtgtccaagaagctcgggaagctgaacccgttcgtgcggcacgacgccatgggcgtcccgaaggtgcgcacgaagccgcccaaggatcggaggcactcgatcggctggtgaggcggcttgtgttcttatggccgccggcttcttccgtcttgaaccatgacggcaacttcacttgaacaacaatggctcagcttttgagttgtgtttagtagatacgagtatagtaatatgtagcaatctcacttggacataaatactaagcatgttaccatgttagggagcatggatttcagtgggctgtaaatcctgcattgtacctaaatgttacagaggaacttctgtgtaaaattttgaattaagcttcagtgcaaacagtgctctcagctatacgtacaatgctaacagtggtnnnnnnnnnnnnnnnnnnnnnnnnnnnnnnnnnnnnnnnnnnnnnnnnnnnnnnnnnnnnnnnnnnnnnnnnnnnnnnnnnnnnnnnnnnnnn

SEQ ID NO: 12059 - DNA, 323 bp, Setaria italica
  Peptide Sequence Number=SeqID_78033
cactcctcccacctctctcagatctcccaactcccctcccctcccgccaccgccccccaaaccctacccgtcgccctcgccggatccggccagacccgcgattccccgcgcgacgaggaacagcagcggtggctcccgcggcggcgatgaggagctccatcgccacctaccgggagagcctctcccggctcgccgtcgaggtcgacgacgccgcggccgacgaggtccccgtgccgtcggccccggcggacgcgaggggaggggacctctccgccacgccgccgtcgtcggggaaggccgaccggacggtaactacccgaccc

SEQ ID NO: 12060 - DNA, 2200 bp, Setaria italica
  Peptide Sequence Number=SeqID_78034
cattcctgtttctggctcgggcacttgatctcatctccaacgagagtggccggattgtcattactgaaatcctatcaaatgtgttccggacagtgatggtgacgacaccggatgatctccttgcaacggtgtacctctcagccaatcggattgcgcctcctcatgaggggattgagctcggaattggggatgcatcagtcatccgtgcacttgcagaagcatacggacgcaaagaggagcatgttaagaaggaccttaaggaattgggtgatttggggcttgtggcgaaagcaagcaggtcatcgcagaagatgatgtttaagccaaaaccactgacaatatctcgggtgcttagcacttttcggacaattgcaaaggagtcaggcaaagacagccaagataaaaaaagaaaccatatcaagggacttcttgttgctgcgactgactgtgaacctcaatacattacacgtcttcttcagtcaaaaatgaggatcggcctggcagagaaaactgtccaaatggctcttgggcaagctgccgtatattctgacaaaaaatcttcaccaccagaagttcaatcacctttcgaagaggctgcaaaaataattaaacaagtatattcagttcttccaatctacgataaaattgtcccagcgctacttgaagctggagtttggaagcttccagagacatgcaaattttccataggtgtacctgttggtcctatgttagcaaaagcaacaaaatctgtctcggagatcattgacaagtttcaggggcttgagtacacttgtgagtacaagtatgatggtgaaagggctcagatacattgcatggaggatggttcggtagagatttatagtcggaatgctgaaagaaacaccggaaagtatccagatgttgttgatgcagtttctagattccgaaagcctacagttaaatcatttgtcttggactgtgaaattgttgcctacgatcgtcgtaaaaaaagaaaattttgccttttcagatacttagcacaagggcccgcaaaggtgttaccgtaaatgacatcaaagtttctgtctgtacttttggctttgatattctttacatgaatgggaaacctctcctccaggaacaactcaaaattcgtcgagagcatctttacaactctttcgaggaagtaccaggtgtttttcaattggcaactgcaattacatcaaatgacctggaggagatacagaaatttcttgacacagctgtcaactccagtttctgaagttgtgaagggttgatcatcaagacattggataaagacgctacatatgagccagcgaagcgatcaaacaattggttgaaactgaagaaggactacatggatagtattggagactctttggacttggtaccgattgctgccttttatgggagaggaaaacggacaggtgtctttggatcattcctcctggcatgctatgatgagcagaatgaagaatatcaaacaatatgcaacataggtactggattttctgagcaacagctcgaagaacgttcttcaagccttcgaagtaaagtgatagaaaagcctaaggcatactacagatttgctgacacaatggaccctgatgtatggtttgagccatcagaggtgtgggaggttaaagctgcagatctgagcataagtcctgtgcatcgtgctgctaacggtatagttgatccaaacaagggtatctccttaagatttcctcgtttgttgcgattacgtgatgataaaagcccagaacaggcgaccacatctgagcaagtcgcggacatgtaccgggctcaaagatcaaccacggttataaccaggaggatgaggatgatgactgatgctgacccaattcttatgttggatgcacgactcattgaggtattgaccagagaatgtgtttccagtggtttgcttcgtcctgattcgaacagcttaggacatttcagatttgtgcaattccttgcgatgttgtatcctgcttcatcctgtttcctttttttatgttctccacgtgtattttgtgagttgtgcatgcgcgccgtaggaagtttagctctatcaaactaacctgttaagtatgttagtacatataggtagcattaatatgcatagcaaattttgcctttcgaaggggagatttataacttacccatgcgcaattgcaaatgaagtgccatcaacgaa

SEQ ID NO: 12061 - DNA, 413 bp, Setaria italica
  Peptide Sequence Number=SeqID_78035
ccgcgccgccactttgccgtcctaccggcggcggcggcggcggcggcggcggccaccccaccaccccgaaaaggacgccctcgtagcgcggcggcgacgtcggccggcggaggaaggagctccgaagatgtggtgccagtcgtgcaaggaggagtacgaggaggaggacgcggggacctgcaaggagtgctacgaggaggccagcgagacggaggaggagctcaagcgcgagatcgacgacctccgatcccgcctccacttcctccgcctcccctcccctaccctcgacgccgcatccgccccgcactccgaccttctcctccacgccataccctcctgctcctcctccggggcgggggcgacggcgacgccgcgcgcgtccccgacacgcccgccgtccccgccatcgcgtc

SEQ ID NO: 12062 - DNA, 285 bp, Setaria italica
  Peptide Sequence Number=SeqID_78036
aatcctcaacaaacatgcaggaaacgagttgaaagaatgggagggctgagaaaacaacatatatggcatggattgggagattggatagtgcatatcctcccaataagctcccaaaaatcccaccaacagccatggatgaccaagacaatgactgtaaatcaccagcaaactgtggccctgctgatcgaactgattctgcaaccattgcatctataacaacatctgccatggcagatcccagattctgtactacgagcaaagctactttgtcccattacccatatg

SEQ ID NO: 12063 - DNA, 307 bp, Setaria italica
  Peptide Sequence Number=SeqID_78037
tggctgacacgctcggtagagcagggcgtgttgttgaggccgtgaagatgatagaggaaatgccttttgagcctgacgaagcaatgcttggaggtgcactggcagcctgtcgtgtgcatggagaaatggaggctgctgaacaggtttcaaagagattgatggacatgtctcctggaaagagtggctactacatgagcttggcaaacatatattcagatgctggaaggtacagtgatgcagagagaataagagacttcatgaaagaagttaaagtcagcaagcttcctggatatagttcggttgtaag

SEQ ID NO: 12064 - DNA, 467 bp, Setaria italica
  Peptide Sequence Number=SeqID_78038
tgcaaatatatgtggcgataactacttgcagtgagacgggtctctatagcagtgaggattaattgtgaatggcctggtattggtttgcatctgaatgctgttgcctcgaattcatccaacaacatgccattcacaattaatcctccactgcaacctgaacataatagtccgacaacaatagtttcttgcagtgagacgggtctctatagcagtgaggtatacactcgtattcatgatgatcactcttctcagaaaaccatgcctaatgctaatgagtcttgccaagaaagccacaagaaaaaaaggcgcaagctacagaatggtgatggtgactcatgcagacgttgtagctgtaaaaagtccaagtgcttaaaactttattgtgcatgttttgctgctaaagtctattgttcaggattctgctcatgtcaaggctgtttaaataatcatactcatgaggaaacagt

SEQ ID NO: 12065 - DNA, 642 bp, Setaria italica
  Peptide Sequence Number=SeqID_78039
tattacttatacaggatttccatatgctgggaaaaattagagttgaatgtattggcatcaccaagacaaagtagaagggtaaccagtggaaaaccgacagcaacatgtttgctctgcttatccatccaatacatgagctggactcttattcgcgtgacagcatcataccaaagtgacaatgcaggttctacaccaagtggaggccaatggttctttccaccctctgcaagtggggcaagtatacttgagagcatgttgcacaaagcatgttgcaattcactctttcttttgttgggaggacgatttagaggatttgcttttgcaatgaaggatacagaagcattcagaccaccctccgtcttcacccccaatttaaggtagcgcatcccattgattatgctgagtgtctcacttctaagggcaggtgtatcactacgccgtgtattaagctcgatgaaaaacctttctgtcacagagctgaaccttatgcgtgatatagcacctaaaagctgcgcaacaagatctaagagtagaccccgcaaatcaaccaatgaaggatactctacttggctgacaaccctgtaactagcattaattatccaatcgtatacaaaattttccaaggccaatccaaaagtttct

SEQ ID NO: 12066 - DNA, 342 bp, Setaria italica
  misc_feature (32)..(32): n is a, c, g, or t
  Peptide Sequence Number=SeqID_78040
gtcctttggtctagttctctttttagtttttnttttttttttagttcaatccattcgcaccatctacgttcgttctaaatctttaatgtaatatccataatttataatcgcacaagtggctttcctataaggcttccgcagtgtgtcaattcacagcagataggcttcgttgtcaaatggttacataataaaggcctagtcaaaagtgaaacgaaccctagcactagaaatgaaaaagtggaggaaaggaagctgactagggcccaaaatttcatctgcatcagaatgttgcggcctcactcacctccacttgtctctcaactcctttctcagaccaatcca

SEQ ID NO: 12067 - DNA, 459 bp, Setaria italica
  Peptide Sequence Number=SeqID_78041
tcccttattgtattgtattcttattatttgtacctttttcttcttaattatttttctatttgtcttacatcacttctaaatttcacgataaattcaatttgggaccccacatgttggacgacggcaaaagcttcatctttttctgctattgttagtgcatcactcactgcagctggttggtcaaatctctgaactacttccaacccattagtatctttaagttttaggaggaaaacagtagaagatgtttgcaaagttatgacaccattggacaaagattgaagtttgaatgttcccgataagtcttgaacaagatctgaaacatgcaccttcttgtagctaattctctcactcttaaactcgataagaaacagacttgacctggccttgtttaatgctaccaacacattatcagactgagacacgcaacaggggaaggcaaggcacacaggggatagg

SEQ ID NO: 12068 - DNA, 1233 bp, Setaria italica
  misc_feature (1215)..(1215): n is a, c, g, or t
  Peptide Sequence Number=SeqID_78042
cttgggctctcatttcgagatccccacgcctgaccgcctccgcctcgactcgatcccgatctcctcctcccgccgccgccgcgagctgccttgcacagccagaactctgagcgatggcgagatcaccaagaggccgcaacctgcaagctcgtcaacgtaggtcagcttcttctgatgtgcccttgtgctcctggaagacaaaaggaacaggcaaagaaaatgatatgtcagtgacctctgagaagaatgaatggaaaggtgccacttgcccagtttgcttggagcatccacatgatgccgtcctcctcctgtgtacctctcaccacaagggctgccgaccatacatgtgtggtaccaactaccgtcattctaactgccttgaacactttaaagaagcttatgcaaaggaaaaaatggcccttgatgtttcagcagagtctgcacctggccttcccttgtcctcgaacacacaacctgcaagcaagcagcaatgtgcaatggaacttgcttgccctctctgccgtggcgaggttaaaggatggacagtggttgaacctgctcgtcagtacctcaaccggaagcgtagaacctgcatgcatgatggctgcccctttgttggctcgtataaggaactttgcaagcatgtgaagtccaagcacccttcagcaaaacctcgtgaagttgatcctgctgttgcagatgagtggaaaaagtttgaatgtgagacagagcggcaggatgcaatcagcactattagggccatgaacccaggagctgtgatcatgggggattatgtccttgagttgaatggtggtggcagcagccattttccctctgatggagataactttgacttggaggaaaggctcaacttcttcacatccttagatcgcactctgaatgagaggattgacttgtatgactcatcagatggtggtttggatgagggctttgacttcttggcgtccttgtttgctcgtggcaggagaatctctactagagattcattcagcagggcttatagaagacatagggagaggcctaggcgttcaactagctctgttgatgcttctgacattcagcatgactcagttagcactcaaagggggcggactggtactgttcgggctgtaggcagaacttcacggcggatggtggctcatacaaggccagcacgtggcagctgagagatgaaatcacgtttgggggggtttnttcatgctatccatctgc

SEQ ID NO: 12069 - DNA, 327 bp, Setaria italica
  Peptide Sequence Number=SeqID_78043
gaattggaatgacagaatctgtcctaatctagacagagatgtattctttgtgatgtttgacctggttaacttcagtttttgcttgtggtgtttataacaatgttgtgcatgatttgctaatatttataaaaagtctagaaccacattgttgtgaaagctataactcgagatatggctgttgaaagtttaacgtcagaatctgtccaagtttgaacagatttgcttgtttgtgttgtatagtctcgttaactgttgaatcaccttgagatgacaataataaagttatagataacttaataatatttctaccaagttaataatcattgg

SEQ ID NO: 12070 - DNA, 212 bp, Setaria italica
  Peptide Sequence Number=SeqID_78044
ttttcagggcctttcagaaaggccgccgaaagcacagctggtccagatggatgggcctggattcaagttaaaatttccggcccattagtgtaaatggaagatggaaatgggtcactcaactatcgactttactcctccaaccgcaaaaccatgcaataccaggaccctcgttgattttagcggtgattttgtgtgaaaaaaaaaaaaaaaaa

SEQ ID NO: 12071 - DNA, 838 bp, Setaria italica
  Peptide Sequence Number=SeqID_78045
tagtacttggtcgatagaactaatactaaagaaagaaattaaaaataagaaataactaacttaaccctacttaggggaaaactagacctccttcgagctgccggcaccagaaagtcagtttccccagtatcctttggagcaatgcccgtgcaatgagttgaatcatccccaatatcacgatgagggtgctcttgcagcttctttagcagcaggcgacttccttccacctacttcctgctctatgcctgatatttcagttgatgatgttacttgcagcacaaaccttatgtggaatgactgctccaactcaacagtgtggtaccccttctcatgaacactgcacaactacctcagaggtatgagttgttgcgtttggttgattatgcatggatattttgttatcgaattggtaatttgcagtggacttatgattactgccattattacaatactgctgctcttctggacaagctaaaattctctgtaaaaatggaaactacccttctgacatttttagtaggtgaatcaggtcgaagtctgatcaatcttgcaatattgttgaccaaaatcttctgaattttgtcactgaagtctgcacttgaactccgttgagtcataaaattcattcgtactttcatcggtgaagtgaagctacaaaagatatcctcctacttttctggaacgatcccagatctggtgtttatcttgcaagctcttgcagtggtggagatgctctgtccgcttttgggtattcattcaatccacaactatccctcggcatgtaccggaagtgctcgacattgttttgctaacttcttttactttatttccttgtctt

SEQ ID NO: 12072 - DNA, 1465 bp, Setaria italica
  Peptide Sequence Number=SeqID_78046
tatgcaactgggtctagggcaaatcgtttaacaccaaatggattctggaaatctactgggaatgatagaactattgtgcttaacactcgcattgtggggatgaagaaaacattagtttttcatgaaggaaaggcacctagaggtgatcgaactgactgggtgatgtatgaatatcgaatggaagacaatgaactggatgttggtggcttctcaaaggatgcatatgtattgtgcaaaatcttcaaaaagagtggccctggaccaagaataggagaacagtatggagctacattcaatgaagaagaatgggacaatataaatactgaaactgcgttccctttgatgccttgtccatcttcagaagtactaggtgctactaatgaaccaccttttcagcacactgttgcttctacttctagtgtcgtgagcgaaccacatgtcctcactgttgcttctgctgatggattaccatttgagttcagtactagttccattactgctaccgatgaactacagcgtcacaggctcagacataatggaagtgaaatggttactgtgaactgttcttctgatgctttagatgcatgtgatcccactgaatttggtggaatcacatcggaggagactgataagtgggttaggtttctgaatgattccacggaacgtgatggaggcgctcgtgaaaagcttgctggcctccctgctatatctgaagctcaagctcaagctcttgaaatgaactctgattactgctaccatgaattggtgaggcttgtggagtcaggaggtgtttctactgctaacgacctgtcccctggctatgtgaatactgagtgtttgaatacacccatggtatctgggcttggtgctggcgatgactatctagagattaatgatctcttccctcttggggaaactgcctccttcgagctgccggcaccagaaagtcagtttccccagtatcctttggagcaatgcccgtgcaatgagttgaatcatccccaatatcacgatgagggtgctcttgcagcttctttagcagcaggcgacttccttccacctacttcctgctctatgcctgatatttcagttgatgatgttacttgcagcacaaaccttatgtggaatgactgctccaactcaacagtgtggtaccccttctcatgaacactgcacaactacctcagaggtacgaagtctgatcaatcttgcaatattgttgaccaaaatcttctgaattttgtcactgaagtctgcacttgaactccgttgagtcataaaattcattcgtactttcatcggtgaagtgaagctacaaagatatcctcctacttttctggaacgatcccagatctggtgtttatcttgcaagctcttgcagtggtggagatgctctgtccgcttttgggtattcattcaatccacaactatccctcggcatgtaccggaagtgctcgacatgttt

SEQ ID NO: 12073 - DNA, 448 bp, Setaria italica
  Peptide Sequence Number=SeqID_78047
accgtacgactaccttacctaccgcgccgtctccaccgcgcgcgccgccgtgcgaaaacctcgcccgcgcgctgtccacgcacctccgcagccccgcgagccccggcccgaggaaggagaccttcctcaaaccgcgcgttccacgccgacttcgagctggacaccgacgccgacgtccacaccccggatcccgcgggccggtgcgaggccaacctcgccgcgtaccacgccgtcgccgtgctgacgtgggaggaggtcctgctgcacggcaccaagcactacagcgaggggctcagccggttctgtgacgccaagatgagcgaggtggtgtccaacctcggctgggcccgcgcacgggcgtggccggagccgctgctgcaggcgttcttcctggccgccaagggcgtgtggggcgtccgcctcctggcccggtccgtccacccgccgc

SEQ ID NO: 12074 - DNA, 220 bp, Setaria italica
  Peptide Sequence Number=SeqID_78048
ccaatcatttttatcagaacctgaagcccaagcacaagaagtgtccacatcctatcgaagatgacacaaagaggtgatgcccgagaaatgaagttattctatgagaggaaaaggaaagctaatgcacttgatgaactcttacctgtcctgcaagaagtgctgaaggctcttctcagtgggaccggcttggagaaccttgttgctggtgaagattttacag

SEQ ID NO: 12075 - DNA, 387 bp, Setaria italica
  Peptide Sequence Number=SeqID_78049
cacgcgtttgaaaaggctcatacaatggatcgactttccacagggaggggtgttcggcaatttaaaactgcacttcttcagagacttgagcaggatgagagaagcaccaaatcgaagatgacacaaagaggtgatgcccgagaaatgaagttattctatgagaggaaaaggaaagctaatgcacttgatgaactcttacctgtcctgcaagaagtgctgaaggctcttctcagtgggaccggcttggagaaccttgttgctggtgaagattttacagacaagtcaggcttattaagatataatattcttccactccatcctaaattcagtcaaagaccaattatgcttctccctgagatcaaagttgcggtctctgcggtgtttaat

SEQ ID NO: 12076 - DNA, 3351 bp, Setaria italica
  Peptide Sequence Number=SeqID_78050
atgccgtagagatctggatgatgttggtgcaaagtgcgtggaagtgcatgctttaaataagcttccatattctaagctagactctaaagccattgggatcacagagggagttgtttttgtaacttatagtagcttgatagcatcctctgagaaaggcctctcccgtttgcagcagttggtacagtggtgtggatctgactttgatggtcttctggtgtttgatgagtgccacaaggccaaaaatctgattcctgaggcagggagccagcccacccgcactggtaaagctgtccttgagattcaggaattgttacctcaagctcgggttgtttattgctcagcaacgggtgcatctgagcctcgaaatttaggttacatggttcggcttggtctctggggagatggaacatcatttgagaattttcaccaatttctaggtgctcttgagaaaggaggtgtgggtgctcttgaacttgttgctatggacatgaaagccagaggtatgtatgtttgccgtaccctaagctataagggtgctgactttgatgttctggaagctcctctggaggaaagaatgatgaatatgtataaaaaggcagctggactttgggttgaactgcgtgttgaactcctatcagccatcgaatattacgcagaagataaaggcaattcagctcaaatatggcggctatactgggccagtcatcagcgcttttttaggcatatgtgtatgtctgcgaaggtacctgctgttgtgagattggcaaaagaagccttagcagaagaaaaatgtgtggtgatcggtcttcagagcaccggagaagcccgaacggaggaagctattgcaaaatatggcgttgaattggaagattttgtctctggtcctagggagcttcttcttaagctggtagaagatcattatcctttgccaccaaagcctgattgttttcagcaagatgaagaaaaggtcatggagtttcagcgtaagcggcattatggacccgatgtgtccttgaaaggacgagttagtaaacttggaaaactggaagatgtgagtgacgatggaagtgacgggcatcctccaccagagtcagatcatgaatcaacagattctgatgaggaattctatacgtgtcagatctgcaacactgaggaggagaaaaacctgttgctttattgctctgtttgtgctgcacgtgttcaccctggttgcctgactccaccttggactgaaaccttgactgatgattggtcatgttatagttgcaaggagaaagtagaaaactacttgaaaaaaagagatgcttacttgactgaactgtcgaagaggtatgatgctgcagtggagcgaaagtcgaagattcttgacattatccggtcattggatttccctaataatcctctagatgatatcatcgatcagcttggtggtcctgataatgttgccgaaataactgggcgacgtggtatgctaataagagcatcagacggaaaaggtgttacttaccaggcgaggaacacgaaagaagtcgcattggacatgatcaatatgcatgaaaagcagcagttcatgaatggagaaaagaatattgctataatctcggaagcaggatcagctggtgtttctctacatgctgatcgaagggcgaaaaatcagaggagaagggtacacataacactagagcttccttggagtgcagaccgtgcaattcagcagtttgggagaacccatcgttctaatcaaacttctgcacctgaatataggcttctttttacaaaccttggtggtgagaagcgatttgcatccatcgtggcgaagagactggagtctcttggagctttaacacaaggagatcgaagagctggaccatcacttagtgcctttaactatgacagtaattatggaaagaaagccctgacaatgatgtacagaggaataatggaacaggatgcatttccagttgtgcctctgggatgctctgagaatcaatctacccttgaagagttcatcactaaagcaaaagctgctttagtgtcagttggaattattagggatcctgtaatgtgcaatggaaaaaatggtggaaagcttactggtaggattcttgattctgatatgcatgatgtggcccgtttccttaatcgtattctggggttgtttccagacatccagaatagattatttgatcttttcacaagcatactggatttagtcattcagaatgcacggactgaagggcaacttgattctggtattgttgatatcaaagctaaaagtgtcgaaatgaaagaatccccaaagactgttcatgtcgataccttgtctggtgctactacaatattatatgcttttacaattgatcgtggagtttcttttgagttagcaaatgcaattcttgaagaaaggctgaaagatgaagcaggttcttccagtgatggattctatgagtccagaaaagaatggatggggagaaggcactttctgctagcttttgagggctcaactgaaggaatgtacagagtaattcgtcctgctgttggggaggcttcaagggagatgcctttggttgaacttaaaagcaagtataggaaggtctcatctgttgacagaattggcaaaggttggcaagaagagtatgatgcttcatccaagcagtgtatgcacgggccaaaatgcaaacttggaagccattgtactgttgggagaaggttacaggagattaatatcttgggtggtttaatacttcctgtatggggtgtagtagaaaaggcactagctaagcaggtgcgacagattcacaagagaatacgtgttgtccgcttggaaacgacaaatgataaccggcgatttgttgggcttattattcctaattctgcagtggaatcagtactcaaaggtttgcaatgggtccaagatattgacgattgacttggaaagatgcaactcttttcgcatccttttcaatgttgtggaccaaatctgtgaagctaaggagaggcaccctgggaggcttatctaatctggtgtgattctacttgtgattaggaaaagtataatagagaacctctccttgcatcttttgtttgttatatagttaggtttatcaatttaggtccagttacaggtctggtgtgtacccatggaccatctgccagttaaatcagaggtctacatgtatgatatgcatctttgtcatgtaatgtggctgtggctcttttagctaccatgtttgacagtcggccgcgctagcctttctgactggattgcacaacagaggttaaggtatcaaccagatcgatgcggtgatgtaacttttgctccgccaaattggtgcgtgattttcggttaaa

SEQ ID NO: 12077 - DNA, 389 bp, Setaria italica
  Peptide Sequence Number=SeqID_78051
cgtagaggtagttcccgctgacgttgacgatctccagcgcggcgagccggccgagcttccctggcagggggccccagaggccgacgctggagagcgtgagcaccttgaggtcggggagcctggacagcgtcgtgaccagtgcgccgacggagaagttcctgggcagcggcggggagcccggggcgccggcgatgtggagctgcgtcacggtgtcaccgtagcacaggacagcagccgagccggtagggcccatgaagccgccggcgccgccacagaagtcggtgctgtggcgccagtggctgagcattggaggatcgttcaggagctgctggatcttgatcagagtccatacctgcgaaggctggagctgtgtggtctccgggagcaac

SEQ ID NO: 12078 - DNA, 3159 bp, Setaria italica
  Peptide Sequence Number=SeqID_78052
aaagacactgatatctacgactggaatgatttcatggatgacgcttgtcttttaacatcattagaaaaggatggtcaatgggagcaagctcgcacatgggcaaggcaactggagtcgagtgacatagcttgggagtctactcttgaccatgtcactgaatcacaggcagaagccatggttgctgaatggaaggagtttctttgggatatcccacaagaacgtgcagccttgtggggtcactgccaatctctcttcatgagatactctttacctcctttaaaggctggattattttccttaagcatgctgaagcagtaggtaaagagataccagcaagagagcttcatgaaatactactgctatctctacaatggctaagtggaactatgactaaatcctctccagtctatcctcttcatcttctacgagatattgagaccagggtttggctcctggctgttgagtccgagagccagtccaaggctgatggtgaatttgccactcccgctgttgctcacaacatagctgttggaaacggtaccagtattatagaacagactgctgatgtcatcacaaaaatagacagcaatatgggttcgccacacatgaaagctacagaaaggaatggcataagggacaatttatcatgccagcatgcgcaacttttcgagtctaacagtgaagcatcttcaacaacaataaataacacaagaggaaagcgaagggtgaaaacaaatttaccacttagacgaggtgtcaatgataattttgaaagtagaactagtgatctggataacaattctaacaattttcaaagttcaaagattggtgaacaagctagaaatatactttctgaagaggaatttgcaaagatggaagaatctttatctggttgggaacaaaatgttaggcctgtggatatggagaaggctgtgctttccttactggaatttgggcaaataactgctgctaagcaactccagcaaaagctgtctccatcatatattcccgaagaacttgtccttgttgatgttgctttaaaaattgccaataacagcagtatagggatcagtttgtcatgctttgacacggaggctctttcaatacttcaatcactgggagtagcaagtagcagcgatatgattgacccgttacaggttatggagaaactagctgtgaaatgtggcgagggccgtggacgagctcttattaggagaataatagcagttattcgaactgctaaattattgggactcccattttccgaagcatttgagaaacagccaattgaaattctacagttgctttccctgaaagctcaggattcttttgatgaagctaaatttctggtggaaacacacatcatgcctgcatctagcattgcaagaattctcgctgattcgtttctaaaggggcttttagctgcacatcgtggaggttatctggattcccaaaaggaagaaggtcctgcaccactattgtggagatcaagtgacttcttaaagtgggcaaaattatgtccatcagaaccagaaattggtcatgctttaatgcgtttggtaatgactggacatgaagtaccgcatgcttgtgaggttgaactcctaatattgtcacaccacttctacatgtcatcttcttgtcttgacggagtggatgttcttgtaacatttgcagcaaatagagtggactcatatgttttagagggggattttccttgtttagctcgcttaatcactggagtgagcaatttccattccttgagcttcattctttccatccttgtagagaatggccaattggagttgctacttcaaaagtattctgccactgacacagctactgggacgcctgcatcggttcgaggatttaggatggctgttattacatcactgaaacagtttaatccgaatgacgacgacgctctctcaatggtatacaggcacttcgacatgaagcatgaggctgcttctctccttgaattgcgtgcagagcaatacatgaacagctggttatcgcgatacgacaaggagcggagaaatgatgaactccttgaggctatgcatcacctcgtagagacagctgaggttctttcaacaattgatgccggccaaagaacacatcgtgcttgtgcccgtgcttctcttctgtcacttcagattcggatacctgatcttctgtggattggtctttctgaaaccaatgcccggcggatatttgtggaacaatctagattccaggaagcccttattgttgctgaagcatacaacataaatcagcccatggaatgggctccagtcttttggaaccaaatgctgaaaccagatctaattgagcaattcgtggctgagtttgtatcagtgctgcccctgcagccgccaatgcttctagagcttgcaaggttttacagggcggaggttgcagctaggggggagcaatcacacttctctgtctggctttcgcccggaggcttgcctgcagagtgggtgaaacatcttggcagatcattcagaagcctgctgcgtagaacgagggacatgaggctgaggctgcagttagcagccctggcgacaggcttcgttgatgtccttgatatatgcaataaagttttggacaaagtcccagagaatgctggcccgctgatcctaaggaagggccatgggggtgcataccttcctcttatgtaaatcccttttctgttgatgcatttggttcaaaactttttggcagtaaggtggttttggaaaggttgatgaatcttgcaggtgtgagtatatactacataggatggtgagaagattatgtatcagctttttttcgttcagtgtttcggcaatcatgctccgctgtggtctccgacgtggattctcattgatgatgccatggaagattgtgtatacagcattctgagtcgtaaagttggaaacagccgacagaagtggggtttttgcagcttcatccagcagatgttttcccatggctggtagtaggtgcacccatgatatatcggatgtttgtacagcacccaaacaataaaattttgtggagttcagttcttttcttttttttccttttttgtggtgttggtttggtccgagccatcacctttgtactttattttatgccagatgcactccgtattttctttcctttttgtgg

SEQ ID NO: 12079 - DNA, 287 bp, Setaria italica
  Peptide Sequence Number=SeqID_78053
tctcaaactgtcgagtacaagctccttgacaacaggatggttgcagtttagtgtattccctggatcaaaccggacaatttataaagagcaaacacaagccctgctagttgtaagattcagagcaaatctccagaatagcaaaatatggccacctagaactagagtactaggccaacacgacatttaagcaggctttaacaaatgttcaacaaggcttgccctacaggttgcagctctcaaatcaatgtaaggctgtaaatctatgtcttcttcacccttctatcagt

SEQ ID NO: 12080 - DNA, 806 bp, Setaria italica
  Peptide Sequence Number=SeqID_78054
ttttcacctgtcgaaaaagaaaccagtcctgctttccatgccaaaaacttagaactcaacaacaaatgataaaaattatccataaagaaaaatgaaataacatgtgacagcatggacaactggctttacatttcaaatggcgtctcaatagtcactatggtacttgttatacaaatactacttttaaacaactggatctaggcgaaattaatatgataactctaaacaaggcaaagtagtttccataaagacacaaatttgagcctatttttcttgcaagatatgtggtaggtggtgttacctgctgcagtctaatgatgacacaagatacatataagtaactcttgaataattttgaccaaactgctcttaacacagaaaagcattgagcaaaatcaaggtcccaaagcaagtagcgcttcaacgaaggaataaccaggcaagcaatgttgtcaacaaaggctaaataataggccggtaaagaaatagcacaacagaacctggtagagatccgcagaaccagaaacacgagttgcaaacacccccttcataccaggatctcccttaataaatcttcgaatatcatccctgtattgtcagttaccaattacaacccacctgtcccagttaagggaacctccctactagataaaggccaccacagtcccatggttccgcaatgatcttacacctagacaatatagagtctttggcaatttccttctaaccaaataagtaaacaatcagataaaatcattaaaaacatctgaaaggttttacaaatatgactaaaccaactgggacgg

SEQ ID NO: 12081 - DNA, 1941 bp, Setaria italica
  Peptide Sequence Number=SeqID_78055
ttttcaacctagtcgaaaaaagaaaccagtcctgctttccatgccaaaaaacttagaactcaacaacaaatgataaaaaattatccataaagaaaaatgaaataacatgtgacagcatggacaactggctttacatttcaaatggcgtctcaatagtcactatggtacttgttatacaaatactacttttaaacaactggatctaggcgaaattaatatgataactctaaacaaggcaaagtagtttccataaagacacaaatttgagcctatttttcttgcaagatatgtgataggtgttgttaactgctgcagtctaatgatgacacaagatacatataagtaacttctaagtcttcttctatttacggttattagtattattgtccgtaactattgtgccacgttaaccaagcgcttgtcagccacttgcaggtcgaacggaaaatgaaagaacatttgtgaatactagttacaaacgagccatgcttaaccagaactccagtgaataaaaaggcttttcttgcttctgtgtgcgggggattattcaccatgtgttgttataaacaagtcctccttgaccataccaattgcaaccatagctccttccagtcaattttcgtaaagattggtccaactttatagatcgaagttcgctttgcagcgcagttggttaagacttatgagcttggaaatgtaagccaatcttcttaaccagccaaccaaagctagaatcaacattattctcatgcttcctacagaacggcttgcctccaccttgctaaggctttgccttgagcaggatggaagagtagggagcaatcctataccgtgaacttgtcaatggcactccttctgggataatatcatttggtgattccaggttggtatccaccacgcggctccaagatttatggtgtggtggtgggggaattacagcatccacaaaatactcatgagcattgaatgccaaataaatatctccaccagaattgtgatcatgtatcgtgaacgccaaaaaatttgctttcctggttctcccaacaatcttcatgccaggtgacatcatttttgctgagaaacctgtctcgtctcagtattggatggttatgacgaaacttgatcatctctgagaaaaacctgaaatggccatcctttctttcttctaactggccccactgaaaattattaatgtgagtatcatgtccatagctattattgtttccataacgtgtatgaccatattcgtctcccatcagcatcattggagtgccctgagaaatcatcaatgcgacatggaagttcttcatttgcctcgaacgaagacttagcacattcaaatcatctgtttctccttcaacgccacagttccagctatagttgtcattgcacccatcacgaccactttctccatttgcatcattgtgcttggagttatatgaaacaaggtcgcataaagtaaatccatcatgagcaattataaagtttacgccatggtaaggcttccgattgttcacctggtagagatccgcagaaccagaaacacgagttgcaaacacccccttcataccaggatctcccttaataaatcttcgaatatcatccctgtattgtccgttccattcagcccacctgtcccagttagggaacctccctactagataaaggccaccacagtcccatggttccgcaatgatcttacacctagacaatatagagtctttggcaatttccttaatgagtggaggtgcatcaagaggactgccatcaggtccacgacaaagaacacttgcaaggtcaaaccgaaatccatctatgtgatactctttaacccaatgtctcaaactgtcgagtacaagctccttgacaacaggatggttgcagtttagtgtattcccgcaacccgagaagttcagcagctcagcattgttgtttagatct

SEQ ID NO: 12082 - DNA, 244 bp, Setaria italica
  Peptide Sequence Number=SeqID_78056
cccggaacgccatggcggacggccaccgcggagcgtcattgtgcacgcgcaacgggccaggcagaggtgctgcattgccgcggcggaatacctcgccggcgatctgagcgcttattccagagcggtgtcctgttcctggccacgattgccggctcgcggcttgccggcgggtggacttgccgcgggacactgcaaccgcgggtggacggtatctcatttagggtgtatttggttgcagatgatt

SEQ ID NO: 12083 - DNA, 1190 bp, Setaria italica
  Peptide Sequence Number=SeqID_78057
ccccgtccccgaccgcctcctcgtcgtgtccgccggcgtcgccgccaacctcgccttcgccttcctcatcgtctacgcgcaggcgctcaccgtcggcgtccccgtccaggcgcagctccccggggtgctggtccccgaggtcctccctggctcatcggccgcgcgcgcgggcctcctccccggggacatcatcctcgccgtccccggcgccgcgccggacccgtccgtgcccgtcctcgtcgacctcatcaaggccagccccagcaagaaggtgcccatcaccgtctcaagaaccgcgcccggggcggtcgacaggcaatccgttgagctcacagtcgtgccggacaccagcgccgatggcaccgggcgcatcggcgtgcagctggcgcccaacttccgggtcacgcgcgtgcgcccccagaacctggccgacgctaccgtcctcgccgtgcgagagttcacgctcttgaccgggacggtgttcgacgggctcaggcagacattgctcaacttctcgcagtcagcggagaaggtgtctggccctgtggccatcattgcagtcggagcagaggtggccaggtcaagcgcagacgggctttttcagtttgcagcagtgatcaacctcaaccttgcagcaataaacttgttgccgttgccagcattagatggtgggacgttagcgttgatccttcttgaggcggcccgtggcggtcgcaagattccccgtgaagttgagcaggggatcatgtcttcaggaatattggtggtgctgatgattggcatgttcctcattgtgcgcgacacgctcaatcttgacttcatcaaggagattttgtgatactcatgatgaaagcccaaaattgatcacagttgtagtgaaatcgtcatcgttaaacttttgttggcaatgaaaagttacaccgtttcgcatgttttaagttaaggtactcgtatgcgacaactagcacaagatttttttccttatcggagcacaagagtatgtctgaacaaggttacctgttgtgctctgtttataaagagaggttctgcccaacgttggtaaccattatgcatttatacagtacatatttaataacaccatcagcgccggcttctgttcaccatgatggcatcaccatcctgatgaattttgtactcaaacacaactagatgcaataattacagcgcaa

SEQ ID NO: 12084 - DNA, 258 bp, Setaria italica
  Peptide Sequence Number=SeqID_78058
cgatgagaaggagattgagcgcatggtcgtagagaggaagaagaaggagctgcttagcaagtatgcaagcgatacccttcaggtcgagcaagaggaggccaaggagatgctcaatgtgcgacgctagaaaagatggtccgttcttgatttccatatccccattgaaaaatttttacctgctgtagtgatcttgactttaagtactgtaggcatgtgttcagtaatagactttaaagaaaatttaaagaaaggaaataa

SEQ ID NO: 12085 - DNA, 346 bp, Setaria italica
  Peptide Sequence Number=SeqID_78059
cttgtccaactgtggtcggtggtggtagacggccggcgacgaggtgggtcttcctgctcatgctcctcgttcctctctcggattgaggctggtggtggctccacgagagacgcggcggccaggttctcggagccttccgcgcggcttagcatggaggccgcggcggcggcgctgcatctgctgcactgcggcggcttcggccgcgtcgcgcacctcccggcgctccccggtcgcctccgccgccgaggacggtagctccactgcgtccgcgccgtcgccacggagccgaaaccgtccaccacctcctcctcctctcgccccaggacccgtaatgatctctccagca

SEQ ID NO: 12086 - DNA, 617 bp, Setaria italica
  Peptide Sequence Number=SeqID_78060
tggcgcagctgcagaccttctcggtgcagcagggcagcatcatggacacgaggcttgcgccgggctcctcctcccttcgcccatcccgccggcgtcgctgcaggcgatcccctacgccatgctcctggcgctcgtcccgacctacgagctcctcctcgtcccctgtcatgcggcggctcacgggcacccggtccgggatcaccccgctccagcgcatcggctggggctctgcgtcgtcgcgctctccatggccgccgccgcgctcgtcgagcgccgccgccgggacgcctccgtctccggcggcgggaggctctcggtgctctggcttcgttgccgcagttcctcgtcttcggcgtgtcggagctcttcaccaacgtggggctcatggagttcttctacaagcaggcggccgccggcacgatgcaggccttcttcatggcgctcttctactgctccttctccttcggcttcttcctcagctccgtcctcgtctcgctggtgaacagggccacggcgaggggcggccgccgcggatggctcggcgacaacgacctcgacaaggacaggctggacctcttctactgggtgctcgccgggctcagcgtgctcaacttctt

SEQ ID NO: 12087 - DNA, 788 bp, Setaria italica
  Peptide Sequence Number=SeqID_78061
gcaccgaccaacacgcagccgcgagcaagcagagctaggcgcgaggaaggaacaagaacggccgatcgagcaagatggtcaacttcatcgaggcgcagaagccgctgctgtcgcggctgatgaagatggccgggctccgccccatcgagatcgagctggagccgggcaccaccatgcacatctgggcgcccaagcaccacgtcggcaagaagggcaccaccatcagcccgctcgagcctacctccgccgccaccgccgccaagaagtccaaaagtagcaaaaagaggagcccggagtcgaagcccaacgtggtgctcatccacggcttcgccgccgagggcaacgtgacgtggcagttcaacttcggcgtgctcgtgtcgcgctacaacctctacatcccggacctcatgttcttcggcgggtcctcgacggcgagcgccgaccggtcgccggacttccaggcggggtgcgtggcggcggcgctggcgcggctgggcgtggcgcggtgcgacgtcgtggggttcagctacggcgggatggtggcgttcaagctggcggaggcgcggccggatctggtgcggtcgctgtgcgtgtccgggtccgtggtggccatgacggacgccgtgaacagggaggccatggagcggctgggcgcggggtcgtcggccgagctgctcatgcccgagacgctcaaggggctcaaggccctgctctccatctccatgtacaagaagatgtggttcccggacaggttctacaaggactacctcaaggtgatgttcaccaac

SEQ ID NO: 12088 - DNA, 503 bp, Setaria italica
  misc_feature (1)..(31): n is a, c, g, or t
  Peptide Sequence Number=SeqID_78062
nnnnnnnnnnnnnnnnnnnnnnnnnnnnnnnttttttttttttttttttcgttccaagagaacaatctggaaaatggagcactagcaaagacgctagctgttggatcaagcacagcacacactcctccccttgaaaatgggcttattttgtcacgggaggagcacaccattcttagcaaacttaattctggccattacaagtttaattatatcgcccttaactatatcttacacaaacataggtgaacaaatgccagttaagcgacgcaggcacaacaacacacagctagcaggtggtgaacatctgggcctgggcttggcgtacgggctagctagtaccccggaccgaccttgttgacgagggcgagcgcgttgctggtgacctgcgccacctcgacgaccttgccgcggatggcggcgcgggtgccggcgtccacgccgcggccgccgggtagcccgtcgaggcaggtgttctcgtcggtcagcgccgcgctgcaccaggt

SEQ ID NO: 12089 - DNA, 451 bp, Setaria italica
  misc_feature (391)..(391): n is a, c, g, or t
  Peptide Sequence Number=SeqID_78063
agtgattaatgttcaataaaaaacagtcttcattaaaacgtttcttaaacatacaacaaaactatagcttaatgaaaatgggaatgtaaattctttcagtgcataaaagtctatataatacagaaacttgatgttgacaagcccaaaaagaaagttaaatagtgataacatttatccagacttgatagagttcaacatgtttccaacaagtttgtttgttaaaaagcgcaacaatcaaattgacaagcatacaagttcgcagcagtataccttcagggcaccaaagacacggtttccggtggtggtcctaacaaggccaacatccaaaagagcacggaaaggcctcctctcatcagctggctctacagagaagtcctctaccagtggcctnaacattgccctcatattcctgatccaaatcacgaatcttgagcacacgacgagccagaag

SEQ ID NO: 12090 - DNA, 605 bp, Setaria italica
  Peptide Sequence Number=SeqID_78064
ttcctctgctcataggtcagcttcttggggttgtacctcttgtgctcctttggtggctagacttaggttaatcttggccatggtaggttcaccacggatagcagcatggaccttcttgtacaaagcttccatgtcatcagcctcaattcccttcttgatgtactcactgaagtgagcctggtacttctctggctcctcctcagccagagtcctcatgtagtcggcaacatggccaccatagatgtacttgcggtggatctcagcatccaggttcttctcatccttcttgaaaccagcaaacctcttgtcactgtgaggaatatccagaccaccatccaaagcacccttcagggcaccaaagacacggtttccggtggtggtcctaacaaggccaacatccaaaagagcacggaaaggcctcctctcatcagctggctctacagagaagtcctcaccagtggcctcaacattgccctcatattcctgatccaaatcaggaatcttgagcacacgacgagccagaagaagcccagtgcagtaggctgcagcatagttggtcagaccaacttcaagaccatattgcgggtgatatggtacttgctgtc

SEQ ID NO: 12091 - DNA, 710 bp, Setaria italica
  Peptide Sequence Number=SeqID_78065
atgtacttgacggtaggaatctcagcatccaggttcttctcatccttcttgaaaccagcaaacctcttgtcactgtgaggaatatccagaccaccatccaaagcacccttcagggcaccaaagacacggtttccggtggtggtcctaacaaggccaacatccaaaagagcacggaaaggcctcctctcatcagctggctctacagagaagtcctcaccagtggcctcaacattgccctcatattcctgatccaaatcacgaatcttgagcacacgacgagccagaagaagcccagtgcagtaggctgcagcatagttggtcagaccaacttcaagaccatatcgtggcagctcatgggaataggcagcagcaagtaccatatcacccgcaatacttgcagatacgatttgtgcagtgatgtccttgttggtaaatcgcacaacaaatctgtatttgggcgtattgtacttgttcttgtcttggttaatcaacctgatcctggccctgtagtcagtcttaccagcgcgccttctcttgaacttgacttggaaacgcttgaagtacgcattggtcttctgggtcttgacaaaaccacccatctcggttgcctgcggtggctgtcgaagcggcggcgttgatgatccggagcaggtacctcccgttgctccgcacctggaacctgtacgtctgattcgcgttggagcagtttg

SEQ ID NO: 12092 - DNA, 1520 bp, Setaria italica
  Peptide Sequence Number=SeqID_78066
aggctgatgacataggaaagactttagtaacaagaaggtccatgctgctatccgtggtgaacctaccatggccaagataaccaagcagccaccaaaggagcacaagaggtacaaccccaagaagctgacctatgagcagaggaaggccagcctcgtcgaaaggctcaacgccctcaactcctcgggtggtgctgatgacgacgatgatgaggatgacgagtgaagtgtagtcccatcgtagtagttctatcttatgtggtgatctgaacttgtgctgtggcacttatttacctgtagtcctgcaacaggcattttttttttttctagaagaaccatgtccaaatggtagcatcttaattttaagataagagtaaatatccataactccagctcaaaactaagaggaacagctttgttcacatcaccaaacttaaacaaaaatagcctgttgcaggactacaggtaaataagtgccacagcacaagttcagatcaccacataagatagaactactacgatgggactacacttcactcgtcatcctcatcatcgtcgtcatcagcaccacccgaggagttgagggcgttgagcctttcgacgaggctggccttcctctgctcataggtcagcttcttggggttgtacctcttgtgctcctttggtggctgcttggttatcttggccatggtaggttcaccacggatagcagcatggaccttcttgtacaaagcttccatgtcatcagcctcaattcccttcttgatgtactcactgaagtgagcctggtacttctctggctcctcctcagccagagtcctcatgtagtcggcaacatggccaccatagatgtacttgcggtggatctcagcatccaggttcttctcatccttcttgaaaccagcaaacctcttgtcactgtgaggaatatccagaccaccatccaaagcaccccttcagggcaccaaagacacggtttccggtggtggtcctaacaaggccaacatccaaaagagcacggaaaggcctcctctcatcagctggctctacagagaagtcctcaccagtggcctcaacattgccctcatattcctgatccaaatcacgaatcttgagcacacgacgagccagaagaagcccagtgcagtaggctgcagcatagttggtcagaccaacttcaagaccatatcgtggcagctcatgggaataggcagcagcaagtaccatatcacccgcaatacttgcagatacgatttgtgcagtgatgtccttgttggtaaatcgcacaacaaatctgtatttgggcgtattgtacttgttcttgtcttggttaatcaacctgatcctggccctgtagtcagtcttaccagcgcgccttctcttgaacttgacttggaaacgcttgaagtacgcattggtcttctgggtcttgacaaaaccacccatctcggttgcctgcggtggctgtcgaagcggcggcggcggctgcttctcctggcgggcgagagggtgggagcggatgg

SEQ ID NO: 12093 - DNA, 1177 bp, Setaria italica
  misc_feature (1159)..(1159): n is a, c, g, or t
  misc_feature (1175)..(1175): n is a, c, g, or t
  Peptide Sequence Number=SeqID_78067
tgtccctatatgcaacaagctattgagccaagagattatgcgggtctcgagcattgtccacaaccatggatttggcgatttcgacaggcatcggtttagaagtcctagtccaatgtcttctccaaatcccagatctaatgtccctggcaatggattcagtccttggagcggattacaagagagattaggttttccgcaaggaactagtatggactggcaaggagcaccgccgagtcctagctcacatgttgtaaagaagattcttcgtctggaggtcccagttgattcttacccgaatttcaattttgtggggcgcattttaggacctagaggcaattctctaaagcgggtagaagcatccactggatgtcgtgttttcattagaggaaagggttccatcaaagatccagggaaggaggacaagctacgaggaaaaccaggctatgagcacctgagtgacccgctgcatatcttgatagaggctgagttccctgccaatatcatcgatgcaaggttgagacatgcacaggagattatagaagagttgctgaaaccagtggatgagtcccaagatttctacaaaaggcaacagctcagggagctggcaatgctaaactcaaccctgagagaggacagccctcatcctgggagcgtctctccattcagcaacggtggtatgaaacgtgcaaaaacgggtcagtagagaagcagctataccgtcctacctggcactgtccaggagtgttatgccgttgtcatgggaacgcaatgccttcaggcaatatttgccatgggcatgccgcatgcgtgaaggaagcaatgtgccttcactagccgagtctggtatcagttagttttcgccttcagacaggggaaactgttgggatggtgagagtagtcgcggatccttggttggatctggcttggttgttgtatggtctagaacattcgttttatttgttattgacggttaaccctagtatgtggtggtatggtggtgaactgcaaactgcatgataaactagaggcctgagtatgtgagctttaggtggtttgttaaccttgtattataaccttttaacattatggagttgcaaaaaataaaaaataataaagatcgtcagcttgtaccttctgaataaaaaaaaaaaaaaaaaanaaaaaaaaaaacctgnga

SEQ ID NO: 12094 - DNA, 412 bp, Setaria italica
  Peptide Sequence Number=SeqID_78068
cagcagtacgtcggccgccaattcagtgagttagatgaggagatgcaaagtgcagtgcgagattacttggagcaaagaggagttaatgatgatcttgccgcgttcctgcatgcgtacatggaaaacaaggagcatactgaacttatcagatggttgaagaatgttgaatatcacgtaaaacaatgaacatttgtgttagattaattagtatgttttacagcatttagagccatatgaccaccatcttggcactttgacattactattattatttgaaggtttttttttggttgtgccagatatgcaaagaatcttactgtctgtacgtactagttactaccaatacaagcaggggttctgcctgactataggctagcagtgtttcctttcttcttaaaatttactaaaaaaa

SEQ ID NO: 12095 - DNA, 689 bp, Setaria italica
  Peptide Sequence Number=SeqID_78069
acaatcgaagccgaaaatcaataaatctgacataccacatataaaagatgctgtggataatctgcataagatttctgaggatgtccacaacgctctactgctagagaaacttgatggaatcaaccgatcgactcaaaacacaagcacagacacacgtgaggcggtagagaacttcactgaagctaaggtgttctcaagagaagagaagaatgagattgtggacctaatttgtcaccatgcatcaagtgatcaagagctttttgttcttcccatagttggtgatggaggtattgggaagacaacacttgctcggttagtgtaccatgaccctcaggtaaaaggtaaatttgacatcatgatttggatctatgtatctgccaactttgatgaagtcaagctcacacaagggattctggaacaaatacccgactgcgaatataagaacactaaaaatcttactgtgcttcaacgttgcatcaagaaatatttgaccaaaagatttctacttgttttggatgacatgtgggaagagagtgagggtcgctgggacaagctattagctccacttagatgtacacaagttaaaggtaatgcaattctagtgacaactcggaagttgtctgttgccatcataacaagcaaaaaagaggcacacatcaacctggatggtatgaaggaagatgtatttt

SEQ ID NO: 12096 - DNA, 705 bp, Setaria italica
  misc_feature (582)..(705): n is a, c, g, or t
  Peptide Sequence Number=SeqID_78070
gtagctccgcaaaatccgaagaatcattccacgacagcgacgacaggctagcgcttgtgctggtagacccccagctcgtcgcgcaagcggacggtggctcgagaacggaagccaacgacacgcaagcagcagagctccaccccgtgtcccacgaggaagcacaacaggaagaagagaacaacaggcttgccatcgttctagccgaccaccagcctcagccggccgccgcggaaccgaagccgcacgccgacgtggagtccgtgctcctggcgctgcggcgggtgaaggagcagctgcgctacacgatcgagcggcggtcggagctcgtcgttgcccaccgggagctctacggccactgaagccaccgggagccgctcagacgctcagtatcggatctgcatcagtgatttattctattcataatgatgtttattagggtgcaatatctgttcctagttccttttcacctgcagtgatttatacatagcgctgtttagggagtatctgtagagaacggaataagattggctcatgtggagccacatctatttttacaaaggatgatttcttggtaaaagtttnnnnnnnnnnnnnnnnnnnnnnnnnnnnnnnnnnnnnnnnnnnnnnnnnnnnnnnnnnnnnnnnnnnnnnnnnnnnnnnnnnnnnnnnnnnnnnnnnnnnnnnnnnnnnnnnnnnnnnnnnnnn

SEQ ID NO: 12097 - DNA, 877 bp, Setaria italica
  Peptide Sequence Number=SeqID_78071
catgttgctgcaatctatcatacttgaaacgagtccactatggccttgagaaccttctccgacgacgaccactgcttgtcgttggcgctcgcgacgaagagcaccaccgtgttcccttggcggtggccttggccagattgtgagaaccggtcagtgccagtggagtctccagcacgtagctgtagtactgcatcaatcaaaagaaccatgaaacatatttcaattgctgcgcgggaatcgtgccatattgagaggggatcgatcgatcgagttgaattacagtttggccgtcgatcttctcgacgctggtgtcgacaagttcgtcggggtcgaaggtgttgccggtgacgaagggccccagggaggcgatcagcctctcggggctgccgatgtcctcgatggtggcgttgggcttgttggtgaggcggatgagcggcgacgccaccacctgcaccttgccctgcttctcgtcctcgaacttcacctccacccacggctccgcgcacttgggctggcagtagttcccggacaggatgttggccacccgcgtctgcttccacgtcggcggcaggacgaactcgtacggttgcacattgccggcgcggagggcgggggtgtccttgggcgtggcccggaagaagacgaagcccgggttggacggcgccggcggcaggtacgtgccgaccacgacctcgcgcgcctgcgccggcagcggcgcccgcgacagcagcgcgcccagcgccgccccgagcaccagctccctccggtggctggcgaccgcaacgagaggcgccggtcgcgggactgtgactgctttgtctgccgacggtgccacggcggtctgcggaggaggagtgcagcgcgagctggtgggcgc

SEQ ID NO: 12098 - DNA, 939 bp, Setaria italica
  misc_feature (1)..(52): n is a, c, g, or t
  Peptide Sequence Number=SeqID_78072
nnnnnnnnnnnnnnnnnnnnnnnnnnnnnnnnnnnnnnnnnnnnnnnnnnnntttttttttttttttttttgtgaagtggcaatatagaataacatttgcaagatacccgcataaggtgattctcacttacaattcttactataaacaatctgttcctcactgagtcactgtgtacacttaacctctcttcttcaataatctatgaacagccccatatatagcaactacatagaaaatcttttgagaatgtgaagagagcattacatagaaaatcgttgtttgctccactccccaagcctcaaaatccagtagtttgcctcgtcagattatgtacctcatatttcagagcttcagataagcaacccatcacctgattttgctagcgaacaactcatcacccgctgaaccaaccagctcacagagtgcattgttgctgcaatctatcatacttgaaacgagtccactatggccttgagaaccttctccgacgacgaccactgcttgtcgttggcgctcgcgacgaagagcaccaccgtgtttcccttggcggtggccttggccagattgtgagaaccggtcagtgccagtggagtctccagcacgtagctgtagtaagtttggccgtcgatcttctcgacgctggtgtcgacaagttcgtcggggtcgaaggtgttgccggtgacgaagggccccagggaggcgatcagcctctcggggctgccgatgtcctcgatggtggcgttgggcttgttggtgaggcggatgagcggcgacgccaccacctgcaccttgccctgcttctcgtcctcgaacttcacctccacccacggctccgcgcacttgggctggcagtagttcccggacaggatgttggccacccgcgtctgcttccaccaatgaaacaataatttacaaatttagtacttagtacgtacgta

SEQ ID NO: 12099 - DNA, 442 bp, Setaria italica
  Peptide Sequence Number=SeqID_78073
ggttcaaaagccactggaggatatcactgacagtctcaaggttgctggtgttagggccttggattcagttgaaaggaatgtcagacaagcatcaagagcactgaacaatgggagagacttaattcttgctggtcttgctgagtccaaaagagcaaatggagaagacttattgaataaattggctgttggacttgatgagcttcaaagaattgttgaagacaaaaatagggatgcagtagctccaaagcagaaagaactgctccagtatgttggaacctgagatcttcctgggacattgcatttctgcagtgtagaagaagacatggttgatggctttcccttgaaataccagaagagtacagcaacatgcctcttctcaaaggaagagctgctgtggatatgaaggtttaaaattaaggacaatccaacatagaagattgtg

SEQ ID NO: 12100 - DNA, 1049 bp, Setaria italica
  Peptide Sequence Number=SeqID_78074
ccactaaccctcaccccactacatggcggcagcgctcgcctcctctcgctgctgctgcagccgcccgtcgctgccgccgctcccgacccgcggccgccgcgccgtcgcccggtgcgcgctcggcggaggagagaaaagaaacaacttcagctggaaagaatgtgcaatttcagttgcattatcagttggattaatcactagcgcaccagcaattggatcgccggcctatgcttctcctcttgaacctgttcttccagatgtatccgttctgatctctgggcctcccattaaagatcctggtgctttactgagatatgctttgccaatagataacaaagctattcgtgaggttcaaaagccactggaggatatcactgacagtctcaaggttgctggtgttagggccttggattcagttgaaaggaatgtcagacaagcatcaagagcactgaacaatgggagagacttaattcttgctggtcttgctgagtccaaaagagcaaatggagaagacttattgaataaattggctgttggacttgatgagcttcaaagaattgttgaagacaaaaatagggatgcagtagctccaaagcagaaagaactgctccagtatgttggaactgtagaagaagacatggttgatggctttccctttgaaataccagaagagtacagcaacatgcctcttctcaaaggaagagctgctgtggatatgaaggttaaaattaaggacaatcccaacatagaagattgtgtatttcggatagttctggatggatacaatgctcctgtgactgcggggaacttcatagatctggtggaacgtaagttctatgatggcatggaaatccaaagagctgacggctttgttgttcaaaccggagatccagagggaccagctgagggatttattgatcccagcactggcaaaattcgcacagtacctcttgaaataatggttgatggtgataaggctcctgtatatggtgaaacacttgaagaacttggccgctacaaggctcaaacaaaacttcctttttaattgt

SEQ ID NO: 12101 - DNA, 757 bp, Setaria italica
  Peptide Sequence Number=SeqID_78075
cccatcagaatttggaaagtccgtagcaagcagaatgtattatatttcggtttcatatccgaaatcctttacagtgaattaaattcaagcccaacatgccattggcatgggacaaccgatcaataactctgaactttcaattaatattgaattccgcatgacacaaaacctcattattaacaagagagaaggatataagagttagatattatagtgctttacatcgatttcaagacagaattgccgacaaggaactctgatacaaaacacgttatcctgcaatcttgtagcttgggttgacaaggttgtccaagcctgaaatgacttggattgattcgatgacatccccaactttgacatccgccaagtaatcctcattttcagttacatatccaaataccgcataccgcccatccaatatattggcattgcttggtgttagctcactctcttttaagagccaaaagacttgactagaagctgaattatcatcaaattcttctctagccattgccatagttccaaatgcattaaaaggaagttttgtttgagccttgtagcggccaagttcttcaagtgtttcaccatatacaggagccttatcaccatcaaccattatttcaagaggtactgtgcgaattttgccagtgctgggatcaataaatccctcagctggtccctctggatctccggtttgaacaacaaagccgtcagctctttggatttccatgccatcatagaacttacgttccaccag

SEQ ID NO: 12102 - DNA, 787 bp, Setaria italica
  Peptide Sequence Number=SeqID_78076
cataaattaccttattaaaagggactgtgatttcatgaaggaattcaaggcgtgcatcaattattatgaggaagagagggagctttttacttcttgggaagttatgatcaataagtatagccttcatggcaatgtgtggttgcaaaaggtatttgaagaaaagaaaaatgggctgggccgtacatgaagtggacattttcagctggtatgaagaacacacaattgaatgaacgtctgcattctgatgttggggattatttgagaacagatgtagatattactctgttcatgaagcaccttcagaaagtggtggatgacagacggtatacagaattggagatcgaattcagttccaagctaaagttgccagactttaagattagagctcctattctgatacaagcttctgaggcctataccgatatgatatttcagcttttccaagaagaatacgaagagttccagtcagcatacattgtgagtcgtgatgaaagtggcccctgccgtgagtatattgttgccattcttgataaagaaagaagcataaagtctatggaaatccttccgagcagactgttttatgttcatgtaggaagtttgagactcttggtttcctgtgcagccatgctttgaaaattttagatacaatggatataaagtacctgcctcataggtatatcttgaagaggtggaccaaatatgcgaggtgtttgacatcacaagttgatgatcgaaaagttcaggaagatactacattagaattttctaatcgctaccaatacttgtg

SEQ ID NO: 12103 - DNA, 1623 bp, Setaria italica
  Peptide Sequence Number=SeqID_78077
ttttttcatcctccaaaactttctattattcgacaataatttcttttcctaatctgactgacaattgtacaatggtacaggcgtcatttcccaacgctcaacttgtacagagtcctaaactactgcagctgccgtgcatgtgttctctggttacaggttgcaactagagctacaaaactggatggttaatggtacagcaacaccgtgagaaattccattggagcaccagattctgatcagcatgaggcattttcttccttgaacatccgagttccacttggaaagcacaagcaggccagcaactcctgaagcacaagcaaatgtttctttgccgatgtgctttagagtgaacaaacttataggtcatcctccatcagttcatcaggaaggtgtactttctccattgcagacttgattatagcaaggtcagcagcagggggtttcaaatccagggcaatgccaaagcaaaaaacagctttgtcaagaatgttgagttgcttgtaaatctttcccatcagtgcatacatactactctcatgaggcgcaatctcctttagccgctccaactcttccagagcttctgagtatttttgtaggcctaaaaggattaaagccttctgatacttgggcagtggattcttcttatcagcagctatagctttctccatcatttccaatgcctcctcattcctctttagagaatgcaaggccatcccaagatagcacataagaacagaagagcgaggatttatctgaaatgccctcctgaaatgatgctcagcaaactcaaacttctcctgtcgaagatagaccaccccaaggccataccaggcattgtagtgcctttcatctacctgaagtgcacatcggtagaatttgatgctattttcataatcctccaatgcagaatactcatgaccacatagagtgtgagcatatgcaaatcttgagtcaagctgtaccgcgcgttgaaaattcttcaaagcagtctcatggtctttcctcaaggcaaagcaattccccacggcgcaccatgcttgaggagatagtcgatcaatagaaataagctcttgagcaaggtagcttagtctcatttccgcattcagatgatatagaacagtggagtagatgtccattccatccaatgtacaaggtgacagtcgatgcgctaactcaaagtaatggtcggcttctaaataatcaaccaattcaaaatatgccttaccaacctggcatagaacccatccagtgttaaattgtggttcagggagttttctgtagacttccaatgcttcctggcacttaaacaagcaagaaagcctaaaaccttccccaagtgttcgcaaaagtcccagtagctccctgattccaactgccactttggagtcttgggacataattcgttcagttttatcttgctcaaagaatcttccatcagttgtacttacagaagatgaggttgctggcatattatcagtccacatctcatcaataacttcgtatctgcttcctcatcactgtagcccgtggtttctaaccggaacgtaaaattcagaaaaatgatttttcatcattcatgaagagcagaaaatgctagtctacacagcccatgcgaaaaaccat

SEQ ID NO: 12104 - DNA, 1188 bp, Setaria italica
  Peptide Sequence Number=SeqID_78078
agtatataagatataactgatgtaaactcaatggaacagaacatcaagcaaatatgcaaatggatcctgatcacacaggtatataacaacacatcaaccacatttttctacgtttatgtaatctgatgaatcatccacattgaaatgataatcaccttcatcaaaattttctgtagcccgtggtttccctttcctaacttgcacggaacgtacggctgttgaacacaattttgatggtgtggacgagtttactcgcaatttacctgacgagtgatctggtccattcccaccaaactgagagatatttgaatttgaatttattgttgcatctcgagaaagtcttgcacttcttcgaggcagtgaatcactactctgattaaaaagccttccagaaaccttctttagctttgcttcatccaagtgtttccttctaagtggttggtttgctccattagctttctgtttggcgggaacatcaccacttattgtattctgaaaagcatggacgttcctgaagagtggtggaggtacaatactagaagtctgtgttgcaattggtgatggggtgtcaaactgtgctacgttagaggttgtgctgttctgcacatgcagtgcagttgctctaacatgagggtaaccaggtacttctgctgtgttgttagcatgaagctgtttcatttgctttgggataatatctccgagacttgagggaagactggaagataggattcgattttcattggcaaagtttgacttttccagagtggatgtggatgtgtgttcctgctggagacgtagagcagttgcttcactaaaacatccatctgcatcttcagcaacaccaagtatacacaattcctcatatgctgcccataaaagaggatccagagtcaacgcttgtgtaaattgttcagctgcagctgacattctgcccgtgcacctgtaaatcactccaaggaggtagtgtcctgtagctccactgggaacctcaatgtttgtttcattgtgtcattgactggacatagagtatcttctgtgcttcacgcaaggatgcaaccaatagaaataacaggtgacactaaaggaataaaagcaaacaaagatgtgatcgcttttattctcacttattacttcacccctgtagaatcaatagtagtaggcaactacatgtgcatatcaatatgccat

SEQ ID NO: 12105 - DNA, 471 bp, Setaria italica
  Peptide Sequence Number=SeqID_78079
caatcctccttggacagcaccggaggcggcagccgcgggttcagatttccgtgagagtagtagtacgacaggtaggctgggtcggctcggagctcctcctccgagaggaggccaccatgcccattcaacgcctcagcaacaggaatcggggcagccgtcaccgcagcctccgcgtcgccgcggagcaggccgctgatggcgttcagggaaccctctatggtcggcggcgccgacccgctcctgaacatgctgagttcacgctcccgctccctttcgcccgcgtctaccgggcgccgccgctgaccaccggcgccggaactaagcagcgcgtcaagctcgtcctccagctctccctccccaccgccgccgcccatctccgcacgcatcgccacggcgctggcgctcatcatccaacaaaccctcctcgcggcgtaaaggcggctctgcacgatccaaccccgcaccaactag

SEQ ID NO: 12106 - DNA, 1158 bp, Setaria italica
  Peptide Sequence Number=SeqID_78080
ccgccgacggcgccgtcacgggcgacgagctggccgcgtggaacctcgccaacgcgcggcgggaggtgctgcaccgcaccgcgagggagctcgagctgcacgaccgcgaccgcgacggccgcctcgccttcggcgagtacgagcggcccagctgggcctggcgtttcgatgatcataactcaaccaatgatggggtgggatggtggaaggaggagcatttcagtgccgcagatatggacgatgatggctttctcaatctgactgagttcaatgactttctacatccagctgatactgccaacccaaagctaatacattggttgtgcaaagaagaagtcagggaaagagataaagacaatgatggaaagctcaattttcaagagtttttcagtggattgttttactccattcgacattatgatgatgaaggcataacagatgacactggtggctctgatgcaccagctaaaaagtcattttcacaccttgatctggataatgatgggctgttatcagcagatgaactaaagcctataattgataatctccatccatcagaacacttctatgccaagcaacaagctgactacgtgatatcgcaggctgacacggacaaagatggacagttgagcatgaaagagatgattgagaacccctatgtcttctacaatgctttattcacagaaaatgattatgggtttcacgatgagctccgttagttccttaggcaacagcacaaagctttgcggaatcaccacctctggaagttagaacactttgttatgcactgctgtgaatagatcattttcatgatctgtctgatttgtgattttgtccacggctgcaagcacattcgatggtgattccatgtacaatacaagcatgcttttgaatgcacctgttccagaagctgtgtgttcttctgtagccttttataacctttttccagtttgttttcatcgcagttacggtgaggatgcaagttagttttggttctttcattttttgatatgaaagtagcttctcgtacaaggatcacaatttgtaaaccaaacaaaaccaggaaggtgttactgtaagccatgaaatgaatttgcctccctgaacactatgtctgtaaaaatcttgcatgtctcatagaaataaaaaaaaaaaaaa

SEQ ID NO: 12107 - DNA, 1680 bp, Setaria italica
  Peptide Sequence Number=SeqID_78081
ctcctctcccctagaccccctttaccgccgggcgccggcatcagcgccgcggccacccgcacggtgcagcgcgtgcctgctgggcgttcacggttcaccctttccccctccatctctttttctctcccccgttcccttctctcagtctctctcctatcttagtcttcttttcctggcggcgactactgggtgagcggcggcgctattcggtcttcgcagggcccttttccggcgacgagcacccacgacatcttccaggattcgacctttccagcaaccgtggaccttgctcgaaccttgcgaagtggtaccacgtgactgacgacgtcggctgcctgcgcatcacagaagagaattttgcggattcggcatcggccggcgggcttggggataagcccgcgcgcccgtcccctacggccctacaggccccagcagcccagcgtccagctcctccagcacaccgattcctcgatccctccccagtccccacatcggcggtgaccggagctgcctcacctcgccggatctgccccagctcgagcgcccaggacctcgccggagctgcaccacctcgagcgcgacgagccagcggccctcccctccgccgttgcacctcgccttcaccagagatccgcacaccgcgaaccgtcaccaccggttcagtgtgtggatcctgcattgtgaaatgcttgccaaagggaggaagttagctggaaggggtgaagaaatgtctgcacattatgcatttggaccacaggaggatgatgcgattattaagcacaggcttctgactagaacgacaaccaccaggggtgaaccaccactaaagaagcttcagaagaagttcatgtcctttgccactgagattgagaaggatgcagataacacgagtgactgcgagagactgtacaaggccttcctacaggaaattaacacctttgagcttcctcttctgaaaagcaagactgttgttgatgcaaacattagggagaaggagagctttaatgagctgcaggttgagattgagcgacagaccttgcaagctcagactgatattgatgatcttaggaagcaatttgagcagagcaagatcgagaggcagcacaaagaggagtgtgaagcaatccgaaaggtgatttctttgcagcctccacggtcagaaactgagagactcattgcagaccttgagaaggagatagctgatttggaggctgagaacgtagcatgcttaaggactttggaactacggaagaagcaatttgcccttcttctacatgtggttgaggaattgcagatctcgattgaagatgagcaaaagagtatagcagatgagctgagagctatcgctgaagagcagaagatgagcatagaagaaagcggcggtgcttcagatgccatggctgtagactgatcaagatagatgcatcttgcaaaccttgcttgaacaaatgcaccacatggtttgtgggccatatcgaatcctaacaagctggtaggacttaggagatgtcttctgtcatggttttgtacctcctgtaaattgagccgtatgctgtttgtactatgaagaaaaattaaagcgcgccttgttgtgtgacaaaagttgtgctctccaatatttttgtgcgctgaataatgccgcactgccattctggttgaagtggaatagtcaatcatgcc

SEQ ID NO: 12108 - DNA, 612 bp, Setaria italica
  Peptide Sequence Number=SeqID_78082
acgaaggactacaatgaagggatcaagagcctgtctctgatgttcgccggcgacggcgacgacggcgaagaggaggacgaggagcgggagatggtgatcgggtacccgacggacgtgcagcacgtggggcacatcggctgggacggccacaacaaggtcagcggcgccatgggcatggtgaacgccttctccctgccctcctccctctccctccgccagctcgagatggccatggaccaggcagcgcacgcctcggcctgatgatcgaccaacttgtctgcaacacttgagagagttcatcagtacttgaaatcgaaggcggtagtagaatccattgatcggttggttagcacggagatggtgaaaatttccatgtgtgtttgttggttattactgctgtcctggtgccgtaacaatccctgtcatttggtacatgcctttggttttctttcttcatcttttggtgagagcatgagagacgagaagcatgttttgtgtatatatgcatgccaaattgtatagattgtgagagttcacatcatatctccatcaacactggtggtgcttgctggagtattatgtcagtttgtgcctgctgtgacctctgtgttt

SEQ ID NO: 12109 - DNA, 3511 bp, Setaria italica
  Peptide Sequence Number=SeqID_78083
gaagaggttgagggggggaaaagacgccaacccagctccggcgcccgctataaagctcgaggaactcccagtgctgacaagatgggactcactcgccgccgaaatgctgtgcatcacgtcgtcgtcttcctctccggttcctctccagcccacgcggcgcccgcgcgcgccttctgatcgggcggcgccgccagggatcgcgggtggtggcaatgtgcgcctgagtgtgttgtctgtccagcgcgacgttcgccggtcggggccggcaaaggccaagagcaaattcgccactgcagcgactgtgcaagaaaataaaactatggaagctaccaaagatgatgtcaaccatcttacccaataataacaagctggaccccaagttggagaaattcaaggaccatttcagctacaggatgaaaagatacctggagcagaaaagttccattgagaaaaatgaaggaggtcttgaagaattttctaaaggctatttgaagtttgggatcaatacaaacaaggatggaactgtatatcgtgaatgggcacctgctgcacaggaggcacagcttgttggtgacttcaatgactggaatggtgcgaaccacaacatgaagaaggataaatttggtgtttggtcaattaaaattgaccatgtcaaaggggaacctgccatccctcacaattccagggttaaatttcggtttaaacatggtggggtgtgggttgatcggattcctgcatggattcgttatgcaactgttgatgcctctaaatttggagctccctatgatggtgttcattgggatcctccctgcttctgaaaggtacgtgtttatgtatcctcggcctccaaagcctgatgctccacgtatctatgaagcccatgtggggatgagtggtgaagagccagcagtaagcacatacagggaatttgcagacaatgtgttgccacgcatacgagcaaataactacaacacagttcagttgatggcagttatggaacattcttactacgcttcttttgggtatcatgtgacaaatttctttgcagttagcagcagatcaggcacaccagaggaccttaaatatcttgttgataaggcacacaggtttaggattgcgagttctcatggatgttgtccatagtcatgcgagtaataatgtcacagatggtttaaatggctatgatgttggacaaaacactcatgagtcctattttcatacaggagataggggctatcataaactttgggatagccggctgttcaactatgctaactgggaggtgttgaggtttcttctttctaacctgagatattggatgcacgaattcatgtttgatggcttccgatttgatggagttacatcaatgctgtatcatcaccatggtattaatgtggggtttactggaaattacaaggagtatttcagtttggacacagatgtggatgcagttgtttatatgatgctcgcgaatcatttaatgcacaaaatcctgccagaagcaactgttgttgctgaagatgtttcaggcatgccagtcctttgccggccagttgatgaaggtggagttgggtttgactatcgcctggcaatggctatccctgatagatggattgactacctgaagaacaaagatgactctgagtggtcaatgggtgaaatagcgcatactttgactaacaggagatatactgaaaaatagcattgcatacgctgagagccatgatcagtctatcgttggcgacaaaactatagcttttcttctgatggacaaggaaatgtacactggtatgtcagacttgcagcctgcttcacctaccattgatcgtgggattgcactccaaaagatgattcacttcatcacaatggcccttggaggtgatggctacttgaattttatggggaatgagtttggtcacccagaatggatcgactttcccagagaagggaacaactggagctatgataaatgcagacgtcaatggagccttgtggacaccgatcacctgcgatacaagtacatgaatgcatttgatcaagcaatgaatgcgcttgatgagaaattttccttcctttcatcatcaaagcagattgtaagcgacatgaatgaggagaaaaaggttattgtattcgaacgtggagatttggtttttgttttcaattttcatcccaagaaaacttatgatgggtacaaagttggatgcgatttgcctgggaaatacagagtagcgctggactctgatgcatttgtctttggtggacatggaagagttggccatgatgtggatcacttcacgtcacctgaaggggtaccaggagtgcctgaaacaaacttcaacaaccgcccaaactcattcaaagtcctttctccaccccgcacttgcgtggcttactaccgtgtggatgaagaggctgaagggcttgaggggaaagcggagacagctagctctccagaagtcatcgaagtcgatgctaccccttctacagaagggtatggagaagcagcagacaggatggcaacatctggtggcaagaagtatggttcgacagaggatgcttctggcaagaagggaaggaagcttgggcgtcagtcatccgataaaagcaccaaatgaagccatatgtccttgatcaggactggactggctgctggcgcctttgtaatagtcctcctctactggactaggtgttggtggccttgtaatggtcctggtctgtagctcatagggaactggtgtcatcaccgagtccttcgtgtgtatagttgtctagagggagaagaataatgagggaagcgagttgtgctcatacagaggagccatggtcttctccctctagacaactatacacacgaaggactcggtgatgacaccagttccctatgagctacagaccaggaccattacaaggccaccaacacctagtccagtagaggaggactattacaaaggcgccagcagccagtccagtcctgatcaaggacatatggcttcatttggtgcttttatcggatgactgacgcccaagcttccttcccttcttgccagaagcatcctctgtcgaaccatacttcttgccaccagatgttgccatcctgtctgctgcttctccataccccttctgtagaagggggtagcatcgacttcgatgacttctggagagctagctgtctccgctttcccctcaagcccttcagcctcttcatccacacggtagtaagccacgcaagtgcggggtggagaaaggactttgaatgagtttgggcggttgttgaagtttgtttcaggcactcctggtaccccttcaggtgacgtgaagtgatccacatcatggccaactcttccatgtccaccaaagacaaatgcatcagagtccagcgctactctgtatttcccaggcaaatcgcatccaactttgtacccatcataagttttctgggatgaaaattgaaaacaaaaccaaatctccacgttcgaatacaataacctttttcttccttctattctattgt

SEQ ID NO: 12110 - DNA, 573 bp, Setaria italica
  Peptide Sequence Number=SeqID_78084
ggaggtcctcagcactgtccagttcttcatcatctccttctgcccaagcccagctcatcatcagaaatgtcatccatgtccaccccttcctcaccttcggccaccgaactagaaacccactggtcattgctcgattcttcaccgtgcatccacggcgcagagactggcttgttcccaagcagatagctcggccgaaaatgtgatccatcctcctggtcccgagccgcttcggcccggacagcagcggcgttgcccgcccctttctcttctcgctcgccgccttcgccgtcatcaccggaggagcctccagcgaagtattccacgatggaccgcaacgtcttgctagagcctccgtcagtggttttttggccacccgaaccaacgctttctcggccagcccggtgcggcggcgacggcgactgctgctgaggctgctcccagggcacggaggacacgctgggagggcgccctggcggaccagcgtcggagggcctgctcctcgaagctcggctttaggggcctcctcttcttcttacccttccctccaacggcgccgtccgacgccgccggcgg

SEQ ID NO: 12111 - DNA, 271 bp, Setaria italica
  misc_feature (206)..(206): n is a, c, g, or t
  Peptide Sequence Number=SeqID_78085
gtaatttacttatgcaattcgtttttaaaaacatactcatatacgaatacgattctaaagtcgttaactgccaaaatgtcgaatctcgtcggggcaaaaagaagtggcagcacgagtcgcggtggcggtgccgcagtgcatcccacaccaagaagacatgtggtcgactgtgaaagcagaaacgggccggacacgaaaccccccgnggcagcggcgggctggcaactcgcgggcggagacgggccggactgtctctcctatcacatccaca

SEQ ID NO: 12112 - DNA, 600 bp, Setaria italica
  Peptide Sequence Number=SeqID_78086
ggagcgtgagcagcgacatgccgtcgccgagcgagtggtgcacgcggatcgccgtggttgccgcggcctcggaggtcgggaagtcgaggacgtggaactcccagagcgggcgggtctcgtccatgggcagcgtcgacagcgtcgccacgtagtcctccaccgccctgtccgggtcgcgcgccaccgccgccgcgtccagcttcgggtagatgatgtggtcgttcacgtccaccgtcgtcggctcccaccgcggttggcccgacttgtccttcacttggatgctgcggaagcgcgggtagcgcgcgagctgggcctcgatgccggcgcgggcgacggggaggttcacgggcgtggcgatcccgatcacgacgacgatgtagaagtcctccacgagcctcgcggaggggctcacgagctccccttgctcttgctccccggcgtggcccgcccgccggatcccgaccccgttggcggccgtgccattgctcccggtcgtgtgcaccgagagctgccgcttccgtagggtgcctgccgccgcgtccatccggtcgtcgtcgtcgtcgtcgtctggtcctccggtgtggtgtgcgccgcactact

SEQ ID NO: 12113 - DNA, 1055 bp, Setaria italica
  Peptide Sequence Number=SeqID_78087
ccccactcttcgccctcttcctgaccgatccaaagttgccggcgtgcgttgtgtcatggcttgattacgtcttcttctgacgttgctgcttttcccattcccaaggagctgtcctcgcacgcgcgcggcggagaaaggaggcggatccggaggcgcggccgcgagggagggaaggagaggagaccagagatggcgtcgcggacggcgtccaaggacatcatcacgctgctccgccgccatcgttagcgagttcttcggttacgcggcgaatagcatcctgtacaaccgcgcggtgtacccggaggagagcttcaccaaggtgaagaattacgggctcaccatgctgctgacgcaggacgagggggtgaagaccttcatcgccagcctcacctcccagctctcagagtggctggaggccgggaagctgcagaggattgtgctggtaatcatgagcaaggccaccaacgaggtgctggagcgctggaacttcaacatcgtgaccgacgccgaggtcgtcgagaagggggctatcaaggagaagagcgacaaggagatcatgcgggagatccaggccatcatgcgccagatcgcgtcctgcatcacctacctcccctgcctcgacgagccatgcgtgttcgacgtgctggcctacacggacacggatgtcgacgcccccggcacctgggtcgagagcgacgccaagctcatcagcaaccctcagatggtcaagctgcactcgttcgacaccaagattcacaaggtggacacgctggtctcgtacaagaatgacgagtgggacgacgaggagtgaagttctcaagagcatcaagtataccctgctcttggcgtgaaggctgtgtgaatcatttattcacgtctaggcgcgtgctgtactagtctaccgctactactgctttggggtgaaagaaaagtctgatgcctgtgacatttcttgcgtgttccctgaaatctctaaacctcgtggagtgggaggcatatgtaattctgagattgaaattcccctctagtgaaagcaactcatttactatactttt

SEQ ID NO: 12114 - DNA, 190 bp, Setaria italica
  Peptide Sequence Number=SeqID_78088
tattccggtttagtttatttccgtttagtttaggtttaagtttgtttcgtttatttgtttatttacttacttcgttagtttcttctattccttgcaagtgatgggctgtgggatgtggtctccaacgaggaagctgtcgccatgaccagatccattcaggacccggaagaggctgcaaagaagctcttgc

SEQ ID NO: 12115 - DNA, 960 bp, Setaria italica
  Peptide Sequence Number=SeqID_78089
ctagccgcaaaagcgccgacgagcgagcaaggagttttccactagaaatgtgccaaccccgtcgcctcgtcctcccccttccgcttccgctcctcccaaatcttgccgcaaacctgacgcgttggagggccgattcgctgctcccagctgcttgatccgagcgggctcgtcaccacagctggtgatctgcgggggatggggtacttgagcacggtgatcggcaaccccaccgatggatcgcccgtcagcggcggcggcctcagccagaatggtaaatttagctatggctatgcaagctcccctggtaaaagggcttccatggaagacttctatgaaacaaaaattgactgtgtggatggtcagatagttggtctttttggagtatttgacggtcatggtggtgctaaagtagcagagtatgtgaaagaaaacctgttcagccatcttcttaggcatccaaagttcatcagtgataccaaagtcgctatagtgtggatcgactgcatcaactgctgtccttgttggtgatcgcctctttgtcgcaaatgttggtgactctagggccatcatatgcaggggaggaaatgctgttgctgtttcaaaagatcacaagcctgatcagactgatgagcggcaacgcattgaagatgctggaggttttgtgatgtgggcaggtatgtcagtcactgcattctcttcatagtttcttggtgggatatggttctcctcctaatgaccatgctttgttctataggaacatggcgtgttggtggtgtacttgctgtttctcgtgcttttggtgacaaactcttaaagcaatatgtagttgtggatccggagatccgagtacgtaatctccgacatttcaattatttattttttcactttattcttctcccaaaatgcataatatgtgataggtattcatcttaatgctatgctcagttagtaataataata

SEQ ID NO: 12116 - DNA, 934 bp, Setaria italica
  misc_feature (908)..(908): n is a, c, g, or t
  Peptide Sequence Number=SeqID_78090
cccgcggtggccaaggacgcgcggcccaccaaggtgcaggagctctacgtgtacgagctcaacgagcgggaccgggagagccccgcctacctccgcctcagcgccaagcagacggagaacgcgctgggcgacctcgtccccttcaccaacaaggtgtacagcgggagcctcgacaagcggctgggcatcacggcgggcatctgcatcctgatccagcacgtcccggagcgcaacggcgaccggtacgaggccatctacagcttctacttcggcgactacgggcacatctcggtgcagggcccttacctgacgtacgaggagtcgtacctggccgtcaccggcggctccggcgtcttcgagggcgcctacggccaggtcaagctcaaccagatcgtcttccccttcaagatcttctacaccttctacctcaagggcatcccggacctgccgcgggagctgctctgcacccccgtcccgccctcccccaccgtcgaggccacacccgccgccaaggccggcgagccgcacgcctgcgtcaagaacttcaccaactgatcggattcggttcgacgtcgtcgcgtagcaaccagcagtcgctgtcaggatcggagagatggcttctctagctctctgtatgtgtaattgtgtgtggctagttccttggacgattcgtggtagtagcaataagagaggggagaatgacagattgggggtggtgagtcgtctgcttcacttctcttcccctggctcctcctcctgattgtgatcgatttgcagcagcccgtcctagaaaaggattgatcgattagtaccgttaatgggcgtctgccgccttgctggtgtgtcaccgatcgagacgagatatttcttgcgtacatcagtattgttagaaaaaaaaaactaaaagngactgccaaggcacacaggggatagg

SEQ ID NO: 12117 - DNA, 272 bp, Setaria italica
  Peptide Sequence Number=SeqID_78091
cggcggtggcggcggaaggcacgggtacaccagcctccgggacatcctgtcgtcgccggagtacgccttgacggcgggcggctcgcccgcggcctgcggcggcgtcctcggcggcggttgcggcagctgcggggacatacacatgatccggcacccgcttgtgaagcacgcggcgtacgcgtacctgcagatgacgccgtcggccagggaggaccccgcccgccgcggccggcgctgggcggagccccgctctgccgcctcctgctcggctg

SEQ ID NO: 12118 - DNA, 264 bp, Setaria italica
  Peptide Sequence Number=SeqID_78092
caacatagcaaagtgtcaaattgaagcctttcaagtaatgccatttgtcatcctgtagtgtaaatgcagttgtaaatacagtcataaccaatgatccagtctcaagaaggttcaagttgagatccatagggatgccattcacccaggatacaatcaaaatgatgggcaccacaagcagcaaaatttgagtagctgaaccaagagcaattcccagggtgatgtcaattctgttcttgaaagcaaaatatgatagcacctgcatcg

SEQ ID NO: 12119 - DNA, 330 bp, Setaria italica
  Peptide Sequence Number=SeqID_78093
agaggaccgggctccggctgctcttctgggcgcggaacgtggtgaccaagtccgactccgccagggaggtggagagggcccaggcccaggccgccgccagccccctggagatcgagaacctcgccgagattatagaagatttcaagatggtgctggtcgtcaggaacgatttgaagatgggcaaggggaagatcgctgcacaatgcagccatgcaactcttggtctgttacaaaaaactccaacagagagcgccaaaatcactaagaaggtgggaacgatgtgggcaagttaaggtggttgtgaaaatagaaagcgaggaagatatgctt

SEQ ID NO: 12120 - DNA, 219 bp, Setaria italica
  Peptide Sequence Number=SeqID_78094
aggatggcgtggctgcagccgcccaaagcgccgcgcgccacggcggcaggggcacctcctgccccccaggcgcctctgcccccagagctccgccacggagaagccgccacggtgactcaacgcaggttgcagccggaagcgagggctcccgatgcggccgcgggaccggcggcggtgaccacctcgtcggtctgctccggcaacggtgaccggagccag

SEQ ID NO: 12121 - DNA, 341 bp, Setaria italica
  Peptide Sequence Number=SeqID_78095
ggaatccaaataagggttttgtcgtcttggctaccttaagatcatcgcatttcccagaaacgacggcaggtggagggagctctgcctctgcccaggatccgcgcgacactgcatggtccaactccagagcacgtctgatcgtggactccggcgccaccagacacgccatcggcgacatctctctactggagggcttcgtgccctaccggccccccttggtggcgacgctggcagacgggagcggtgtgcgcatcttgggcatcgggcacattcagaggggcaacttcagcatccccaatgtgtccctcgtcgagggggtgcgggatggcctcatctcgacg

SEQ ID NO: 12122 - DNA, 437 bp, Setaria italica
  Peptide Sequence Number=SeqID_78096
ccagggaagacgagcacgatgacgtaccaagtgacactcttcgtcgacaccgagtttggcacgccgggggccatcgtcgtcaagaacggcctcaagaacgaccaattcttcctccgctacgtgcagctggagctggccgaggaccggagcatccacttcgagtgcaactcctgggtctacccctacaagaagaccaactccgaccgcgtcttcttcatcaacacgagctacctgccggaaaagacgccggatgcactgcggctgctgcgggaggaggagctccggagcctgcgagggaacggccgtggggagcgcaaggactgggagcgcatctacgactacaattactacaacgatctcggcaaccccgacaaggaggaccacatccggccggtgctcggcggcaccgccacatacccctaccgcgccgctgcccg

SEQ ID NO: 12123 - DNA, 389 bp, Setaria italica
  Peptide Sequence Number=SeqID_78097
ggattttggtttattcatggagcatcacaaggctcagggtgggaaatggattatctaaggcagatgaatgaaaatagaatagcacgccaagagcgatctagatgcaattcttcagcagcaatgtcaaattcaagactgagggatagctcatatagaattccaagtgctcctcctattgaatctttcagttaccaaagaaatacggacactccttcgagagaccagaaccctgcaaatactgaatctttcagatatcgaagaaatataaacactcctttgagggatcagagcccttcaaatggggctcacaggcatggcaaaggcagaagaggaactaaagcacagagccatagcgtaagaacaggtttcaaggcacagccaagtataaa

SEQ ID NO: 12124 - DNA, 630 bp, Setaria italica
  misc_feature (1)..(17): n is a, c, g, or t
  Peptide Sequence Number=SeqID_78098
nnnnnnnnnnnnnnnnntttagcacagaaccatcttgcagagtgtggccgcagctagctctccattaagtcatctaaaccaaatccaggaaagatacacgcacatacaaaaaggaaaaacttagtacctgtatgcataccaaaacttaacattacagatttgtaccaggaagttaagattcagcctgccaagaatcaaggatactctgcagaccagatctgtaagttgggtgaagcagcttaacaccaagttctttcttaagccgagcattagagacccttttctcagcaggcaactcttggaaacctgattctgtagaaccaacatcaggagattcagctatcagatcagggtatctcatctctatcaagctcctggcaaatgcaaatacttcagctctaggggcagggtcatcatccaccacgttgaatattttccttgcacatctcatgctcatgctggccaagacagcctggtagatgtcagccacatggattcgtgcagtgtactgcttagattctctcaatttctgtctttgtgataaagatttgctcttagctaaggtgtccaaagcacttcttccaggtccatatattccgcctaaacgaaatataaaagctgacagattta

SEQ ID NO: 12125 - DNA, 687 bp, Setaria italica
  Peptide Sequence Number=SeqID_78099
tgaaacaagggaccaataaaagaaaaagaaagcgtatgaaagcaggcattggaaaaatattgatgagcctatcacgagaaaggggtatgtttgtcttgcccagaccctgtcgaatcgctcatcctctcaatacccaatccttctccagctacgttacttcaaggataccctgctgaaaaattcttgtggaaacggacaagcattccatcagaactattgtcctccagaaacaaatgaccctaccgatatggcaggttagcgaattcggcaaagtgcagcagcaccagcaaatcgcaggcctgtcgctccacagtccgccgcacccacatgcgtggacccacacgcactgagctaaatggagtaaaattttcccggcggcagcgaatcaagcgcacaatcagttccccagctggtttcctcggtggaggagcataaacaaatccgagaactcccaatctacagctaccaactcgcttgtcaccactttagcgataacagagcgagagaagaagaagaaaaactaatctcagctgagcagtactgactgacaagcgacttcagccagcaattcggtagcaaggcgtctcgcccgcccgctccaccggcgaatctgccacgatctcgtcacggaatcgagtcggcgccgagcaaggaggcacgccaccgcggcggggggcggcggcggca

SEQ ID NO: 12126 - DNA, 801 bp, Setaria italica
  Peptide Sequence Number=SeqID_78100
ttcccacgttgaattcgtgcaagacttttgtaggtattctttattgcatccagcatcctgtccaagaactgaatgaactgacggtcctcatgagcaacctggggatctgaaaacctgtcgagatgtggctcgtggtcctgcacgtatatcgcaagcagcaagctcagaagacttttcagcagaaacgatggatacatacacgcaaagaaggggacagaaaaggtatcaacacagaaatgggtccagatgaaattatctgaacgcatttcttgttggaaggcactgctgcagaccgatcgatcaccggccggtggaagaggactgcagagcccctcgccgcagctgaagctgagcagctgccgccggccatggccgccggacagactgccagccgactggatcctctggagcaacagccgcgacgccatggtttgccgaaaagagaggtcagagattgcgttggttccgtcgcctacctttcccctccgcccaagtatgcagggctgttcagctgcagcagagcatgttatacagacggagacggagatgctgacttgagggtttacgctaggtgtggcgttggtcatggaaaagcgttgaccacctcgttcgtttttcggtatttggaagtctggagtttggactgtgggcagctgcgccaacatccatgagcaggatggatcggaagcgcaaggtgtccatgtactgctgaagaaaaggagaagaaaggagaagaaaggagaaggagaagaaaggagaaggagaagaaaaggaggctgacaagtgggatccattcacatg

SEQ ID NO: 12127 - DNA, 948 bp, Setaria italica
  Peptide Sequence Number=SeqID_78101
atttgttgcagcagataaaagccaccctgattctgaagatatctacatgtccttgaagagccttcttcaagaactaagagaggaaggctatgttccgagaccagagctatgtcaccccatgcacccaaataacagatcgtaggttttgacaatttgatttgtccctgtggcactgatatgctcttctatggaaaatcaaggaaggacactttgtgatacagagagctgcctgcagtttacattttcagaagtggtccacgttgtccctacattccctttgccctgatatggtgccttgataccagtttacaagctcattggattcatgagtaacggtgacagttttctgtgccaagttctgcagtttagcttggatatatgccattctcaagccttaaaagatgcagaaaaccaaaggaaaatttgaggaaagttttttgtttgatattgagattttcaaggagaagcttcgcatgttcagatgtcttcctgagaggctgtgataatcaccatcatttgcttcagttgctacttgcaagcattatgaaagtttgggcacaagtatgaaggcagatactgtactattcagcttctactggctattgaattggccaaatcatttgaggaaagatggaactttcatatgtcatcatccaaagcttccagcccatttgcaagcttcccacgttgaattcgtgcaagactttgaggattctttattgcatccagcatcctgtccaagaactgaatgaactgacggtcctcatgagcaacctggggatctgaaaacctgtcgagatgtggctcgtggtcctgcacgtatatcgcaagcagcaagctcagaagacttttcagcagaaacgatggatacatacacgcataacaacgacaaaagaaaggggaacaagaaaaaggtaatacaaacaacaagaaaatagggtaccaaga

SEQ ID NO: 12128 - DNA, 604 bp, Setaria italica
  Peptide Sequence Number=SeqID_78102
aaagttaggaattactaaataaagacaagaccaagaaccaaagaaattcttggcacaggtatccatggtgtcaaggattcttggtctggctgcttattagaatccaactttttgactgccgcactcctaccatttcttagaacaccaaaatatactcttccaaaggagccctcaccaaatcaaagcttcatcaccataacccttggtcacctccctgatttcttctacaggaatagtggggacagcgattggctgcgctttcacaggttgagcacctctgggagttggatcagcagtgcgataagcatcattccttgctgggtagccaccagagtatggacctccactatcaggtgctctttgagtgtcttcgccgccacagcatgccagacaagacatgttcaaactaagccaagacctttcggctcccggagggcggcggaagggcggaagcggggcggtggcgcaggctagccacggcggccggcgcagggcaagaaaattcgccgcagcacggcagcagcgagagtaggggagaagggagctcggtgtgtacgggttccgagtcttcggtctttccttggagccttggagaggttgtcag

SEQ ID NO: 12129 - DNA, 565 bp, Setaria italica
  misc_feature (1)..(10): n is a, c, g, or t
  Peptide Sequence Number=SeqID_78103
nnnnnnnnnntttttttccaggaaataccaaggagtcatttcattaaggtcaagtgcattaagccaaacaccacaattttgtcttaatacaatgctacatgattgtctgaatcagatactcgcgtcaggtacaagcaagagcagtcattcactcatcctgcaaatcagaagaatcaatgaggtactactaaggcaaaaagcagattacaaaccgaatctacatacagccagcttcccggctactacttgaaaaaacccttgacaatgcaatattctgcaccacgaatggtacaaatggtgaatcgaaggttatgatccagagtgttcaccagggttgttggatgctcgcgcatttagcaggggctggagcgccttcaccacaatactcatgtttggtcgaaaatcagcctcatattgaacgcacaatgcggcaactgctgcaaactttgcaacagatttaggaggatattcccctccaagtcttgagtcaacacactgcctgactttgtcttcactaagccgtggagttgcccatgtcacgagacttcttgtcttgttcccctta

SEQ ID NO: 12130 - DNA, 1185 bp, Setaria italica
  misc_feature (1)..(64): n is a, c, g, or t
  Peptide Sequence Number=SeqID_78104
nnnnnnnnnnnnnnnnnnnnnnnnnnnnnnnnnnnnnnnnnnnnnnnnnnnnnnnnnnnnnnnnaaactttttttctaagctgtaacataaggaattccacggaatcacctcgaatcagaggctggaatgaggaagtttacggaatcatttctcaaggaacagaggggcaccagacggaatgcaaccaaacaaatggcatacagtttatacttgtatacgctagggccctctcaaggtacagagactagtcggaaacatccaggaaataccaaggagttatctcattaaggtcaagtgcattaagccaaacaccacaattttgtcttaatacaatgctacatgattgtctgaatcagatactcgcgtcaggtacaagcaagagcagtcattcactcatccagggttgttggatgctcgcgcatttagcaggggctggagcgccttcaccacaatactcatgtttggtcgaaaatcagcctcatattgaacgcacaatgcggcaactgctgcaaactttgcaacagatttaggaggatattcccctccaagtcttgagtcaacacactgcctgactttgtcttcactaagccgtggagttgcccatgtcacgagactctgctgtccccttggtaatgtatgatccacgggctttcttccagtcaggagctccagaagaacaactccaaaactttagacatccctcttagagctgagttgtccagtcattgcatacctgacacaaaaatttcaagcaacattagggtaaattaattaaaagatctatagaacaattgaaaaaggaaattggaacatactcaggagcatgatatccgaatgttccaagaaccctagtagagtgaagccgagctgccatgtcaggagcttggtttgacaaatcaaagtcagctatcttagctacatcatcatcaaaaagaagaacattactggacttaatgtctcggtgtatgatatggggctgtgctttctcatgaagatactcaaggccctttgctgccccaacagctattttcacacgttgtgcccatgataaaacaggaccaggttgagctcctttaacaccttttcttcctgtaagaggcatattccacatttttttaagcatggaaaattttccttttcagaaaaatcttagatcatgagatttcaaaaatctcccaaaagat

SEQ ID NO: 12131 - DNA, 1485 bp, Setaria italica
  Peptide Sequence Number=SeqID_78105
ttttttatacgatgcgtgccaccaataaacaggtcatcttgcaaccgatagaaagaatcaaatattgtgggggtacaagaatcttgatgtttacaactcgggggaagaataatcacaaatgttacatgctgccaggcaaacgttcgcaagaacgacattgtcgactcatatatcttacttatctatcatacaagaagggggagtgaagtgaagcttatgatccggcattttctccagggttagccgcccgcgcattcagcaggggttggagcgccttgaccacgatgctcatgttcggccggaagtctgcttcgtattgaacacacaatgcggcaacagctgcaaactttgcaacagctttaggaggatagtcacctccaagtcttgagtcaacacattgtctaaccttgtcttcactaagtcttggggtagcccaggtcacaaggctctgctgtccccttggcaaagtatggtcgacaggtttccttccagtcaacagctcgagaagaacaactccaaaactatacacatcactcttagagctgagttgtccagtcattgcatactcaggagcatgatatccgaatgttccaagaaccctagtagagtgaagtcgagctgccatatcaggagcttggtttgacaagtcaaaatcagctattttagatacatcatcatcaaatagaagtacgttgctggatttgatgtccctgtgtatgatatgaggctgcgctttctcatgaagatactccaagccttttgctgctccaacagcaattttcactcgttgtgtccaggacaggactggacctggctgagctcctttcacacctttccgtccatgaagaatatcgtgaagagaacccatagtagcaaattcataagcaaggatacgagtgtttccatcaacacagtaaccaagcaactcaacgacattgtcatgcttcagtcttgacaccatggagacctgtgccaagaattcttggtctggctgcttattagaatccaactttttgatcgccgcacttctaccatttctaagtacaccaagatacactctgccaaaagaaccctcaccaatcaaaacttcatcaccataacccttggtgacctccttaatctcatccacaggaatggtagggactgcaattggttgcactttcacaggctgagcacctctgggagttggatcagcagtgcggtatgcatcattccttgctggatggtgtcctgggtactgattcctggagtctggcactccttgtgtatcttcatcaccacagcatccaaagcacgacatattctatccaaaaaacaagatctttgcgtgtcccggcggcgatggcggcgaacggtggaagacgatgccggaggaggaggaggaggcggcggcggcacgaggacgaggggaggcagcggaggtacgcggaggaggacgggaagggaagcgagtaggaaggcagctagtactctccttgcgacggg

SEQ ID NO: 12132 - DNA, 360 bp, Setaria italica
  Peptide Sequence Number=SeqID_78106
tagaattaggaaccttttaatggtagaaaaagaaaggagtagaaaagctcaaaaggaaaaccccagactctagaaattaccaatccaattccagatgttatcacaaaagaaggttcacatgaacgatatggaattggagaaaagggctcaaagcaagacacaaacaaacgatctgataacaggattactgtttcattggggtcctctgatgaactacaagaaatacaagaaatggcctccgttgaagccacaagtaaacaacatgatactgggattactatgtcgttggagtcctcagatgaacaacaggaaatacaagaaatgggttcagtggaagccacacgcaaacaatgtggtacg

SEQ ID NO: 12133 - DNA, 538 bp, Setaria italica
  Peptide Sequence Number=SeqID_78107
tcatctgatgagcacgtcgcggtggccgaagcacgaggtggaggcgctgatccgggtgcggacggggctggaggggcggttccaggagccggggctcaagggcccgctgtgggaggaggtgagctcgcgcatggctgcggcgggctacggccggagcgccaagcggtgcaaggagaagtgggagaacatcaacaagtacttccgcaaggccaaggagagcggcaagaagcgcccggcgcacgccaagacatgcccctacttcgacgagctggaccgcctctactcgcgcaccgccggagccaccgggagccggcggcagcaacaacaatgccggagacgaggcggccaaggcgagctcggagctgctggacgccgtggtcaagtaccccgacgcgcacggcggcccgccggggttcatgttcgacagggagcgtcagaacgagggcaatggcaacggcggcgctgaggatgggaacgacgacgacgatggcattgccaagcgaagagccggcggcgacgatcaggagcaggagcaggg

SEQ ID NO: 12134 - DNA, 311 bp, Setaria italica
  Peptide Sequence Number=SeqID_78108
gcttcaactccaccgccgccgcttccttccttccttcggtcccatctgctcccccgtccgccacctgcgccggagctgcccgcgggcgcgccgccgctagtcgacggcaccaccgccccctgtcgtagccggctccgcgaaagcccgggctctcaccgaataatacctccagtcgtccggtgcaagtgcaacggcatccgccaccaggctgtgggctgtgcccccccggcatggcactcggaggggaggggctcaacaggtctaggtactgtatttgcagactcggctgaagaaattggttgctgttagga

SEQ ID NO: 12135 - DNA, 677 bp, Setaria italica
  Peptide Sequence Number=SeqID_78109
ttagttaagttaaattttactaagtaccttcagctagaaacagaggagcacgcgcgcccccgattcggaaaggttcgcgccccccgaggaggaagactgccgcagaggcgatggcgggcgagatgagctgggtgggcaagaagatccacctctacaacgtcaccatgggcctctacatgctcgattggtgggagcggtgcctattcaacatattggtgctgatcctgctctggttcatctgcttcaacggttcgcgcttcgccactgacgtcttcgagagccacctgaaggcacggattctccaaggagcaaattacggcatggggattggcatgccctcctcctaagcctgcagtgaaaaacgctgaagcagtgtaaatcttctggttcggaaatctgaatggcttcaagtaatttagtactgcaattatgtgtacgaaatagttccaaaatataagatgcttaatgttctgattgttttgttattcttgtaccgtgtgtggccataattttgactgcacgtcatcacactgagttcatactgtaaaatcattttttttaccagtataatatgttttgttactcttgtaaggcatgtagtcataattttgactgcacgataccacattcagagttcaatctgtaaaattttcagtataatacatctcaacgcttcc

SEQ ID NO: 12136 - DNA, 1331 bp, Setaria italica
  Peptide Sequence Number=SeqID_78110
tttgtccacaaaggaattctggataagacaatcaggttgcaaagattgtaaacaacagtgatggttcacaggtaagacgttaaatgtcaatcagtttaacagtaggagcactgaacagaaattactctggtggctgattgtccatcaggaggaatgaaacatgagaaccaaatgcaggctataaagggtctgatttaaccagttccctcctcataggtttgcaaaagggtacaaagagaatgcttgtaagaatgtaaggaaatgcatcatgatgcactggatcgcggaagcctttagcttatggtgatgccttcccgtgaacaatccagttcggctttcgcggagtcagttagatcccactcgatttacacgtggcttcaccggagtcttagaagggctcaccctgacaggtagagttcccaaaatcatcccactgcaattcagagccaagatggcaccctcagcatggacaaactcaacaaaagcaatccttgtagaatgtacattatcccctagaagtctcaaccgagagacctcaccgcaaagtccttcaaagaaattctttacatctaattgagtaaccatcttatctatgtttgtacaatagacggttcgcataaccatttccttctcatcttccgtcctgggaagaaactttggattaacaggtaagatagctgtctttgaaggcaagactctaacagggtagaaaccaaaaactgtgcctccaaggttaagtgcagttcttgcgccctcctcatcagagaactcaataaatgcaaacctaagaacagagtgaggatcaccacaaattcggcaatcaacaacttgcccgcaggttgcaaagatatcagcaagtctctcctctgtcacggtatggtcaagttcagagacataaacagttcgcctaatgctgtcctctctgtctgcacgcctcgccctatcaattgccctcctccttccttggttgatgtatccattccccctcttgcgctgctggttcccgatgtaaaacgaagcgtcggtggcggagtccttggtgcccccattcccggctccgatcgagtggtagtcgaacaccggcgcgtccgccgacagcgccttcttgggcggcgaccccgccgctgccgaggaggggacgaactccttggcggccgggttgagcttggagagcaggtccaccagcttctgcacgcccgcctggtactccacctccttggccgccgccgccgccgccgcggaagccgatccctccgccaccgccgccatcctaggagacgaggcggatcgagcccgacgcgcgcggccgcctgccgatcttggtcaaaccc

SEQ ID NO: 12137 - DNA, 149 bp, Setaria italica
  Peptide Sequence Number=SeqID_78111
aaacataccaagagatccacccatgtgctgctcccaacaaggatagagaaccccaaaaggacctgcgattcaagagaaaacaattaagacaatgaccatgttctgcttgattggagttgagatctcatcaagttattcaaagcagttct

SEQ ID NO: 12138 - DNA, 248 bp, Setaria italica
  Peptide Sequence Number=SeqID_78112
cagttctccctctaaatgagttctcctcaagaagcttgcagtatcgtgcaagaaaaaacatatggaacagaaaatccaaatccatcttgcggaagtagaggaagttggtgacgaggcgccagatctcgtagtgctgcaccacgagcttcgggttgaggtacaggtgatacggcgaaatgatctgcgggcgcccagggaggaacctgcgagcctggcagctgcgtcggcggtaatgacgtttgtctccc

SEQ ID NO: 12139 - DNA, 720 bp, Setaria italica
  Peptide Sequence Number=SeqID_78113
ccaatgggtaatcacagaagtccatgaccatgctcaatacatcaaacaacatccgtgctttgcttggctccttcagctcgtatagcctcaaatgcccgtcagattctaacctcatgaattgcaatgaacttgctgatggtagtgtgaagatcttctctgggaatccaaggctgccattaacttgtgcatctcaggttgatggtgtagaagttgatattggagtagtttgtgtcaaacgtagttgtaacccactttcagtttggaacaactgtgtgtatgctgctggttcgaaggagtactgcagcccattccactctgccgatagataaaccttggaagatggccattttgtgtttgtgggtttggcactgaggttcattcccctacatagtgattggcccatgaccaaagtatctgttgggtggtcaaacgactgccagactgcggaattattctcatcaaaaagcacaaggtttcctgaagcaaggctcatgtttgcaactgacttgttcgatgtagctgtggaccagatcgtggtgccatcaccattgtggaggagcaaatccccttctcctgtgaagttcaagatggcatcatggcttacaggattgtcagggttagcagaccagatgactggagattggggtcccaaaaacactacagcgagaatgaacgaatgaccatctgtggtatagaagccaaaataacttgtatatgaga

SEQ ID NO: 12140 - DNA, 574 bp, Setaria italica
  Peptide Sequence Number=SeqID_78114
ctagggtttcgggaggcgcggggagggtgcggcggacgggcggagaggaagggcagttgcactccaaaatcttggagaggagcatttgttagcattattggcaccgctgttatatgcaaaaccatctgcactaataatgctaacaaatgctcctctccaagagattttggagtgcaactgcccttccaactctcctgacacatcaaagcatcccagctgctgaacacgcaactcatagtcgcagcaggtaaccgagtgaggtaccaagaagcgccacgtacaccacaaacagcgaaggggaaacccacttgacctcctcggggctcccttctttcttagaaataccatttcttgctgtaacttatcccgctcctgggtggtacttctgctctcttctcttagccttattatcattcttttcagcctcttccaattttgattcaagattgttgagctttgacttcagattctgaacatcttctgttacctggtacatatgtacaaggagaaagtcaacaaattggctatacaacaagaataaggagccttttgtcccgcaagtagggtaggttaa

SEQ ID NO: 12141 - DNA, 1651 bp, Setaria italica
  misc_feature (1)..(28): n is a, c, g, or t
  Peptide Sequence Number=SeqID_78115
nnnnnnnnnnnnnnnnnnnnnnnnnnnnggaaaacttgggcaaatggaataatcccaggttagtctacaaggcagcaggcatctttttgttgggttgagttctatacattgcaaaaaaaaactgttctatacatacaggcaactggtagtttagtttggcaccgctgttatatgcaaaaccatctgcactaataatgctaacaaatgctcctctccaagattttggagtgcaactgcccttccaactctcctgacacatcaaagcatcccagctgctgaacacgcaactcatagtcgcagcaggtaaccgagtgaggtaccaagaagcgccacgtacaccacaaacagcaaggggaaacccacttgactcctcggggctcccttctttcttagaaataccatttcttgctgtaacttatcccgctcctgggtggtacttctgctctcttctcttagccttattatcatcttttcagcctcttccaattttgattcaagattgttgagctttgacttcagattctgaacatcttctgttacatgagataattgatgattctgcacattgaaaagtcctctgtcatttagcataacagcttctttaggaggagtttcctccagtggaggagattccttaaaaactgcaatgctttgtttcaaaggaggaggggattcaatcttaatagcaggggcatgttcaattgtaacattagagggatgttcaattgcaatagcagaggagtcatttcgagtggaaggagattctgtgaatgcagctggtgcttccttcagtggcacaggaatttctctcaggcctggagtctctttgacaggtgaaggtatttcagtggcaattgctggagtttgttccagaggaggagggacttcttttgtagcaggtggcagcacttctttctctatatttggcatctctttcagtacaggaacttcaaaagctggctcagtgccatgaactccattaattggttcctcttcaagagaatgggatgcactaacgaggacaactctcaatttgctttcctcgatgtacctgccagcttctttggagaaaaaggcaggaacaaggtcctcatcagatgtaccataaggaacaactgtggtctgcaccaaaaacttgtcttttaattgcatgtctggtggagcagttcggagtgcttgcatggtaactgtaaattcacatgttttcctaggaaggataactccagtatttggtcgaacacaatacctttttggagatgttgttttaaccttgaaagcaacatattcattggacttgttgactagatggacagtgcatgaactttgtttcttcacctcaaaggtgaactggagctcgcgcgggtggatctcgacgaggtcctgccccatcgccgccgccgccgcaggtttcggaaacaatacaccaccagcagcagcacacaagcaattcgccggcgtgcaccgagtccggcgggtctgtgctatcaatcaatcaatccccgtcccgaagcctcggcgtcgctcgcgacaaggaccggcctcccaatacgaatagcggcaggggaggagttggagtgaatactacgggaggacggcacggagggggaggccacttcgtcgtcgctctctctcgcggtctcgcccctctcgc

SEQ ID NO: 12142 - DNA, 1229 bp, Setaria italica
  Peptide Sequence Number=SeqID_78116
cgttcgaattcgtgcactcctgttaaagaactgttagaagggtgagaaggagttcattttcaaagaaaggagctatgagaaattcaaccgtttcaaagttgctagatctccatgtgaactcaggtgagcagtctgaggatactgagaattacaactctgagaatcacgagcagcttcagaaggcaggctatttttctcgctctacatcaccactatttgctgcatcgggatgttttagctcatcgaatccctcaaagctgttgagagtgccaagaagagaaggatcttccttttcttgcactccggtctcgactagctcctattacaggtacaaagggaggaatcctagtactgtaggttcatgggatggaacaactgctgcttcgcttgatgacgatgggctgaaccaaccagaactgttgacaagtagatgtggcattccatgctattggtcaaagaggagtaaacaaaagggatctgaaaggagttgttctccttcactttctgatacccttagaagaaaagggagcagccttttatgcggtagtcagacaatgcatcgaaggaagaaatcatcaggctccaataaatatggatatcttaataaatcttcccaaggtgtgccactgttgggtgatagtagtcactttgcttattcatcatttgattcagcaagtgatgaagtttcaaccatctttggagaattagatctggaagctttgagccgtttggatggcagaaggtggtcaagctgtaaaagccaggatgggatcgcactgtctgtgagtggagctgatcatgtagttccagaccacagaagcttaagccagaaatatcggccaaggtcatttctcgaaattgttggtcaaaattttgtcgtacaatcacttagtaacgccatcacaagggaaagaatagctccagcatatctgttccatggacctcgtgggactgggaaaacatctgctgcaagaatattttcagcagctttaagttgtactgctactggagaggccaagccctgtgggatttgcacagagtgtaatgactttttcactggaaatggaattaatctaattgaggttgatgctaccaacagaaaaggcataaacagagttaggcacttgattgaaaatataccagcatccgcaacttcttcacggtacaaagtattcgttgttgatgaatgccatatggtatcttcgaaagtctggtcggcatttatgaaa

SEQ ID NO: 12143 - DNA, 811 bp, Setaria italica
  misc_feature (798)..(798): n is a, c, g, or t
  Peptide Sequence Number=SeqID_78117
cgacgagggcgtcacggtgctgatgctggtgtgggacgaccgcacgtcgggggggctcggcccgatcaagcgagacgggttgatggccacgcacgacgaggacacggcgggcttcttccgcgggaccagggtgcactgcgtgctctgcccgcggaaccccgacaaggaccggagctacgtgcaggacgtcgagacggccaccatgttcacgcaccaccagaagacggtggtcgtcgacggcggcggcgtcccggggccgaacgcgccgccggggctcgtgagcttcctcggcggcatcgacctgtgcgacgggcggtacgacacgcaggagcacccgctgttccgcacgctgggcaccacgcacaacaaggacttccaccagcccaacttccccggcgcgtccatcaagaagggcggacccagggagccatggcacgacgtccactgccgcgtcgagggcccggcggcgtgggacgtgctcgacaacttcgagcagcggtggcggaagcagggcagcggcgacaacctcctggtcgcgctggacaaagcgtgggcgccgcgcgaggcggccgccggcgacgccgagtcctggaacgtgcaggtgttccggtccatcgacggcggcgcggcggcagggttccctgagaaccgcgacgaggcccccgacgaggccgcgcggcgcggcctggtgagcggcaaggaccacgtgatcgagcgcagcatccaggacgcatacatccacgccatccgccgcgctcgggacttcatctacatcgagaaccagtacttcctgggganctcctacgcgtgg

SEQ ID NO: 12144 - DNA, 1832 bp, Setaria italica
  Peptide Sequence Number=SeqID_78118
cactcttgtcgtggtagctgagctgctgagacgatcgagctgtgtgaagtgagctcaggaggaggaaggaggagcaatggcggccatgctgctgcacggcaccctcgacgccaccatcttcgaggccaagttcaacatcccagtcagtaagttcctcgttggtctcatcccacgcgtcgatggcatccccacggggctgccgcagctgtacgcgacggtggacctcagccgggcgcgcgtcggccggacccgcgtcgtcgacgacgacccggcgaacccgcggtggaacgagtcgttccgtatctactgcgcccactccaccaccgacgtcgtcttctccgtcaaggcggcgctccccgtcgacgccgcgctcgtcggccgcgcctacctccccgtccaggacctcctcaaggcgaaaggcggcgaggtgatcgaccggtggctggacatccttgacgagggcatgatgccgctcctgcacggacccaagatccacgtccaggtccgcttcaccgacgtcgcccacgacccccagtggggccgcggcgtcggcggcgcgcagttcaccggcgtgcccaagaccttcttcaagcagcggcaggggtgccaggtcacgctgtaccaggacgcgcacgttcccgacacgttcaagccgctgggcatccagctcgccggcggccggccgtacgagccgcggcggtgctgggaggacgtgtacgacgccatcgccggcgcgaagcacgtggtgtacatcaccggctggtccgtgttcccggagatcacgctggtgcgggacggcggccggcgccatcccggcggcggcgtcaccctcggcgagctcctgaagcgcaaggccgacgagggcgtgcgcgtgctcatgctggtgtgggacgaccccacctcggtcctgaacctcggcctcatcgacgggcagatgaaaaccaacgacgccatcacgctcaggtacttcaggggcagcggcgtccactgcgccctctgccctcgcgaacccgacgacgccgccagcttcgcccagggcctcaagaccttcgccttcagccaccaccagaagtgcgtcgtcgtcgacgtcgccgacgtcgccggcggaggacgccgccgcatcgtcagcttcgtcggcggcctcgacctcaccaacggccgctacgacacgccggagcacaccctgttccggacgatcaacacggcgcacagcaacgacttctaccagggcaacctccacggcgcgacgatcgccgccggcgggccgagggagccgtggcacgacatccactgcaagatcgagggacccgccgcctgggacgtgctccacaacttcgagcagcggtggaggaagcagggcggcaaggacggcatcgtccacaacctgctgttcccgtggaaggcccagaaggacgtgctcgtcgacctccggggcatggaggacgtgatcgcgccgcagtcgacgccggcggctcccgccggcaacgacgagtcctggaacgtgcaggtgttccggtccaccgacagcagcgcctgcgacgggttcgccaagaccccggcggaggcggcgcagtcagggctcgtcagcggcaaggaccacgtcatcgagcggagcatccaggacgcgtacatccacgccatccgccgcgccaaccgcttcatctacatcgagaaccagtacttcctcggcagctccttcgggtggaagcccgacggcgtgacgccggagaacatcaacgcgctgcacctcatccccagggagctctcgctcaagatcgtcagcaagatcgaggccggcgagcccttcgccgtctacgtggtggtgcccatgt

SEQ ID NO: 12145 - DNA, 448 bp, Setaria italica
  Peptide Sequence Number=SeqID_78119
atttgttctgtgtgaatcagctaggaggatcagctccacgttgtccctcagttgcatggaaactgacacaaaaagttgagaagaacttccattcacatcttgcccttcagttttcatcgcgatggttaaaatttccattagggattccactcactggggagatcatttttgactttgaaaggcagattgtaagatgcctggtctgtcatgggcagttttggggcgctatgaacattccagccttcagtggcttgccagattttgttttcagaaaagaacttgatctgttgcctttccataaaaccttgccagatcctcaactttaagggaacaaagacagcttgtttccctgtccaaatctctgatgattgatcaattttgcaggttataaaccatgggatcagtcaatctgtcatggattgtgctgttaaatcagcttcagatttct

SEQ ID NO: 12146 - DNA, 455 bp, Setaria italica
  Peptide Sequence Number=SeqID_78120
gcaccgtatacattgccacaagttacactgagcaagcgcaagaaaactaaacgaaatgggtaatgtagatcatacgtttaacattgccataaaagttacgctgggcaacaccacaaaacttggacgcagcaggatgtttaggtcagtacatgccggaaagtcaggttgatccttggtgagcttgccttggctcgcttcggaactgagtgctgccaatcccgctgggtgtagcctctcatcacaagcagcgagccatgcttcaggaagaaagaatgctgctgttgaggagcagcgagcttgagccgctttcgagcagcttctccggatccagaagcggcttgtgatttggtaggcttttcctaagtacgaagtcgcgttcacaaccaaagctcacagatgctatttctggagttggtccatagagtggctcatcgtctagcattgtccattgtaaa

SEQ ID NO: 12147 - DNA, 585 bp, Setaria italica
  misc_feature (537)..(537): n is a, c, g, or t
  Peptide Sequence Number=SeqID_78121
gcaagtgaaatgtcagtcccaaatcctgagtttattcttcctccttaaattcttgatgaacttatacatgctttctcgctgtagtcctgcacatttgcatgaacatgaaacatcataagcctattgcagtaccaagtagcttctgtttgggaattatgctgtgacgcaagtaacaaattgtgccctgagcccaaaaactttccgcaaaggattgactttgttgactaggagatgttttgttccatgtttgtaagatgtacgtaatatgtaataaacatgcctttacaactttgatgacaatttcttgaggccttcttcaaagctcttcatctttggtggggtcgataggttggctaataaggtaacccttgctgttgagaccagatctttgcactctgatgtggaaggatctatcctccatatctggacctcccaaacctggattttgcggccgagctggatgggggtggccgtggcctggacgaggtcgccgagccccgcgggcccgacgtggttgatggagagctgcacgccggngagtctccggtagcccgaggacgacgtagcagccgatgctcgccgtga

SEQ ID NO: 12148 - DNA, 246 bp, Setaria italica
  Peptide Sequence Number=SeqID_78122
aaaatcttgtgctttcacacgtccactgccatggtttaaatggcgttatttatcatgtatttgtgaaacaacatcacatagacttggcagttctccattaaggaatgaggagtcttactcgctgtcaggattcatagccaggaagtgttccaatagttccattgcttctgctgtgcttacaccatacatatcttttacccaagccatttccaccatgtaattcgagcaattagcctgcaaatagaa

SEQ ID NO: 12149 - DNA, 1879 bp, Setaria italica
  Peptide Sequence Number=SeqID_78123
tcttgttacaggaatgaagattacaaacgatttctatgtgcactcagttcgatggatgttctacttccattccatatgcaagtccggcgctactctcacagctggttttcgtaataacaataaataattttaacgaagaaacgaacaaaactgtcgcactatactggttagccattagatgcaaccgaagaataaatatggttgttttgggtttcaaaatggagaagccgtagtggggtatcccattgcataaacggaggatcccctgcctgcgtctggcagctccagccttttactcttacacgccactgcatcacacattcagactatctcgatgtacacttccccattgatcggggctgcgaagaacgcgatcaggaacgggaacctcccaaggcacgtgatgaagtcgtccctgctgatcttttcgtcaccatcaacatcgaacgtcttgaacagcttctgcatcccgtcatcagacagcagcagcatgcttaaccgcaggatgtcagctagctgccccctggaaatttcggatgtttcaggatccctgcacttctcaaaggcggtctcacaggcaccctggaacaacggttgcttcctcaggtgcgcacacccaaccaagaactgacggaacgtaatggattccttaatgctgaagtcaaagtagtgaaatatcttcttgcacagaggactgcaatctagaccaaaataagcccaaaaatcttgtgctttcacacgtccatcgctgtcaggattcatagccaggaagtgttccaatagttccattgcttctgctgtgcttacaccatacatatcttttacccaagccatttccaccatgtaattcgagcaattagcctttccagcttctactgcccgtgccataatcattgaatcaccatatgaataagaagtgggtaaaacattaagggcacgtgccatagcatagttggtattctctgcaaaatgaagggcattctcttgcttgatctcaggagggtagacaacagggaggtactctacctccatgaaattatgaaactgggtgaacatcttaaacatgagctttaacaacgatatgtttccccatgattgatcaaagtgcacatgtggataatggacaacaacaggttgaacagggtagccaggtatgaatgcgccatgttggaaagaaatcaggaatctcccattcgttgtagtgccttcagggaataacaggacccgcgggaagctattgcaagcggcctttctctttatttcatttacagcagccttcctagaagctggtgagaatctatcaacatatataacctgcattgctcgaataatcgttccaacaaacggcagggcatcatgagattcggacgcaacaattgttgggaacaattcgtagaagaagaatatgggctctatgtatgagacatgattggaaacaactataggtgcaagttccctaggagcaggccttcctttctttctgatccagtggtacccgaacgagaagaggatgcagcgggcggagatccgcgtgatccacatgaggcggcggcgccacgccggcatgggcccggcgccctcccgcggccggtcctgcacgtcggcccaccctcgcagcgccacccacgtggccgcgtagccgatcgcgatggcgagcccgaacagcaccagacgcaccgcggcgaccggcgcgagcagcagcgtcctcgcccacgcgtacacgccgccgccccacgccggcgtcccgttccggaacgggtccgctggggacggcccccggtcctgcggcggccgatcctcggacaggaacgcgaacgggtccccgccgccgtcgtcgcacacggagaccgccgcggcgccgtcgctgtcgccgtggtgg

SEQ ID NO: 12150 - DNA, 191 bp, Setaria italica
  Peptide Sequence Number=SeqID_78124
gtacactgcacaaacaaacatggatacaagcagtaacatctgtgttgccgcactctgctgtgttcccagcacacagcagagtgcggcaacacagatgtacactgctgtgtgctgggaacacaaggtcttgtatgtgctgtattttgtgtgtatgtgcaatgaacccaagttgatttaatgttttgttgtac

SEQ ID NO: 12151 - DNA, 252 bp, Setaria italica
  Peptide Sequence Number=SeqID_78125
ggactctggctgatccgcgctctgctgcttttctccgcccgccgcactgtatcaaagccatagtacctgtttggcaggtctaggcatctaccctactagtatatatagactagtaaaataatgtatcctgcaaaccactatatggatccataccactcacactacagaaatcacagtccctacccttactatcctcctcatggatgggaaattccatgggctgagggtgaccggatggaatttcccatccat

SEQ ID NO: 12152 - DNA, 5305 bp, Setaria italica
  Peptide Sequence Number=SeqID_78126
agaacacgcagggaaaccgaaagcgctcgcgagaaggaagaggggagagagaggacgacgacggcctgggacccgcggaccgcatcgcccgccggtagctgacgccattcggccccgtggatttttcaagctttggtggttggcttgtctgtctgatccgcgctctgctgcttttctccgcccgccgcactgtatcaaagccatagtacctgtttggcaggtctaggcatctaccctactagtatatatagactagtaaaataatgtatcctgcaaaccactatatggatccataccactcacactacagaaatcacagtccctacccttactatcctcctcatggatgggaaattccatccggtcaccctcagcccatggactcatcctatcggccaccaacctatggaccttggccatacaatgctggtatgcatcatccgcatccttccgagttccactgttgctgcaaccgcacgtatcctcctgattactacagtttcagacccccattacctcaagaacttccaccccctcatctatattatcacgggccatttccacagcattcaaacacctgcctttcttactttgtcccaccacatccttatcctgttgatcaaatgccatatggttatgacaagctcaagagccattgctgtggatgtccaaaccatgtgtgccatggggcagataagagcaatgtgaaaatcgaggaagaaaggcctgatgtcaagcttgagagtgagtacaaggatgctgatggtggcagtataattcgccatccaaacaaccaatatccgttcatatgggtgccgtctggcaacatggaaggcaaggagaatggaaagcgttatgaattctcacctcagctcttgaaagaatgggctcctatgagtagaaagatgacaggggatgtcaagaaacaaaatcaagacaatcagttcttaaatggatgggctcctgtgagtagtaagaagacagaggatgtcatgcaccaagaggaaggcaatcagaaggagaggcagttccattggccgatagtttggatgcctgcaggatatgatgagccgaagcaaaaggctaaagagctgaagatagaagagtccccaaacaattctgaagaggctcctcaatcacccaagatcaagatcattcccctgtcatggtttgagaatggtcatcatgatcagaagccagctaccagagatggatctggagatcatggtgacagatcggcaactaagagccaacctgcagttactgaacatcgagatggcatgacactggaaggaagccctaaaaccactccagctgtgcctaaaagagtaaacaatgagagcaaacctgcaagggaaaactacaagaccattccagtcgtgccggagaacaagattgatgaaaagaaggccagtacctacagaatcattccggtcactaaagaaagtgatgagaagaagactggcatgagtgaaaaggaagaggcaaagaaggccagcaatggtgacaaggtagaagaaaatgggaaaacaaaacatagtgaatcatcaacagctaagcattcaaaattgccaccagtatgcttgcgagtggatccctttccaagaaagaaatctggaaatggttcttcaaggtctcccagcccaccaaccaggaaggacggtgacaaggccaagaaggacgtgaaggaggcagcccaaggccagaacatggagcctaagcagtctgatacaaggcatatcactgtgtctgagattaaaggaaaatcacctaatgaaatggataagggaatgcagtttagcaataaaacagtgcaagctgcttctgtggaacatccaagggaggaagaagttcccacaagtaaagatgagcagaaggtccaagctggtagcactaccattggcactcaagaaaatgcgggtgcaaagagtttacagggaagtgctgtgcaagaaaaagaaaacactggtgcagaaagcttcatgggatgtgacgaaagcaaaaatgaggatgaggcagtaattgaaagtgaagctgcaaaagatgatgccaaaacatgcaaagccaatttatcagaaccagatgctgcagtttgtattcagtctgcatacagagggtatgatgtccgaagatggcaacctttggataagctccggaagatcaggaatgtgcatgaacagatgcaaggtgtgaagaagcagcttcaatgccttgaagattcttgcaagaagccaactgaaaaagagcaagtggccattggtgaaactattatgaatttactcttgaagcttgacacaatccagggcttgcatccaagtgtaagggaggctaggaagtctgttgctcgagaactggtttgcttgcaggagaagcttgatactttatgcaagcaacaatctggggagtttgatcacacaaacagtgatgaagagaaatcagagacgaccgagaacggtatccaaattgtagctcctaccataacaactgaagcttgcgacaaagaggagagagctgtggaactgggtaaggtagaagaaccatcttcagtggacaccatggagccatacaatgcagttccatctggaattcccatggaggtaaagcaagatgcggatgccagtaagaagaatgaaaaagaggagtcatgtgtcaccacaatggaagaagcaaatgaacaaggaaaagctgcaggacagttcgagttacaggtgccatcatcgatggatacgttaagtgatgcagctttgccagaacatcccactgacaaccaggagctcaaaattgaagaatcaaatgctgtttcagtggaacaagtggatgaaaagtcagaagtcgagggtgaaggaaaggaggccatgttgcatgatgcagcttcaacagtggactctagtgggctgaaacaatgcacagcttcaacagagcagagtctgcatgctaaatctgaatcaaatacagggttgtcttatgattccactgagggcattaatgccagtgctgtggcagcatcggtagaaagtggagtcacaaatgagaaggatggcccagttaacggtcaggaccacgcaagcagcagctgtagaaaacctggagctgaaacatgatgtttctcctgctgaagaagatcagcaaagagagttgagcggcccagttgttcatttggaggattcatcaatatctttacaggatgaagaacaacatgatctaattcctgcagatgactctgttatgtctaatacaaaagatcaattagaggtagccagggatgtcagcatgcaggaacaagctgtggataccgtgcaagattcaacgaaagaacaagatggaatgctggaagattcaacgaaagaacaagatggaatgctggaagattcaacgaataatatggaactctctgcttctggaaatgcagaaaagcctgatcagcctgccttgcttgaaccagttttgaagtctgactcagcctcagccccagaagaaactgtcgtgggcgagtctgatgacacagtgcaatgtgcggtttttggcaaggataagccaccacatgaggatcaggaaactgaagcaactattgacaagctaacaggaggttccacaaatgatggggattctcttcctgggacctctaggaaggagcctgacattcaggagagtcatcccttgtactgtctgcctcttctgcaaggttaggatgactctcctgaatgtcaggctccttcctagaggtcccaggaagagaatacccatcatttgtggaacctcctgttagcttgtcaatagttgcttcagtttcctgatcctcatgtggtggcttatccttgccaaaaaccgcacattgcactgtgtcatcagactcgcccacgacagtttcttctggggctgaggctgagtcagacttcaaaactggttcaagcaaggcaggctgatcaggcttttctgcatttccagaagcagagagttccatattattcgttgaatcttccagcattccatcttgttctttcgttgaatcttccagcattccatcttgttctttcgttgaatcttgcacggtatccacagcttgttcctgcatgctgacatccctggctacctctaattgatcttttgtattagacataacagagtcatctgcaggaattagatcatgttgttcttcatcctgtaaagatattgatgaatcctccaaatgaacaactgggccgctcaactctctttgctgatcttcttcagcaggagaaacatcatgtttcagctccaggttttctacagctgcagttgcgtggtcctgaccgttaactgggccatccttctcatttgtgactccactttctaccgatgctgccacagcactggcattaatgccctcagtggaatcataagacaaccctgtatttgattcagatttagcatgcagactctgctctgttgaagctgtgcattgtttcagcccactagagtcccatgttgaagctgcatcatgcaacatggcctcctttccttcaccctcgacttctgacttttcatccacttgttccactgaaacagcatttgattcttcaattttgagctcctggttgtcagtgggatgttctggcaaagctgcatcacttaacgtatccatcgatgatggcacctgtaactcgaactgtcctgcagcttttccttgttcatttgcttcttccattgtggtgacacatgactcctctttttcattcttcttactggcatccgcatcttgctttacctccatgggaattccagatggaactgcattgtatggctccatggtgtccactgaagatggttcttctaccttacccagttccacagctctctcctcctgagatcttttgtcgcaagcttcagttgttatggtaggagctacaatttggataccgttctcggtcgtctctgatttctcttcatcactgtttgtgtgatcaaactccccagattgttgcttgcataaagtatcaagcttctcctgcaagcaaaccagttctcgagcaacagacttcctagcctcccttacacttggatgcaagccctggattgtgtcaagcttcaagagtaaattcataatagtttcaccaatggccacttgctctttttcagttggcttcttgcaagaatcttcaaggcattgaagctgcttcttcacaccttgcatctgttcatgcacattcctgatcttccggagcttatccaaaggttgccatcttcggacatcataccctctgtatgcagactgaatcaaactgcagcatctggtctgataaattggctttgcatgtttggcatcatc

SEQ ID NO: 12153 - DNA, 253 bp, Setaria italica
  Peptide Sequence Number=SeqID_78127
gggcggtggggcacggccctgcggcggggatgggggtgggcgggggtggcggtgggcgtggcggccggcgccggcgtggccttggaggacttgggtggggacttggcgggagcggccgcgggggactgcgcgagggcgcccgtggccaggacgaggaggcagagaacgacggcgctggtggcccgcgccattgccaacgactgcgggaggctggctgcgagtggagtggcaacggggagatgactgggctggg

SEQ ID NO: 12154 - DNA, 290 bp, Setaria italica
  Peptide Sequence Number=SeqID_78128
aaaaggatcatcattattttgaaccatttcatacatgaatcaaataatacaaccaaccaaacataccctcactctgctcagcgcagcatgaaggcatgcttcataatcaccccactagtttgatctggtctacataaaacaggacacaactactacagttcaggttttcatgtagcactggacaaatttcactctagtttatatatattagctaatacctaacctacaaaaaacaaagtacctaataccaaggacaaccaatactactacaataactacaatacaaagga

SEQ ID NO: 12155 - DNA, 943 bp, Setaria italica
  misc_feature (1)..(10): n is a, c, g, or t
  Peptide Sequence Number=SeqID_78129
nnnnnnnnnngtcctttggtctagttctcttttttagttttttttttttttttttttttttttttttctttaaccaaccaaacaaaaggatcatcattattttgaaccatttcatacatgaatcaaataatacaaccaaccaaacataccctcactctgctcagcgcagcatgaaggcatgcttcataatcaccccactagtttgatctggtctacataaaacaggacacaactactacagttcaggttttcatgtagcactggacaaatttcactctagttttatatattagctatcctacctcaaaaacaagtcctatccaggcaccatctctcatactcatcaaggttgcttcacttcagttcatccccaccggtagatacactaagcgccccaagtaccttacatattacgagttctgtcactgactcaggttggtcaatcttgagcttcctccagggcttctttctccctctgttgctccaatgcaatttccgccaatgctttctgtgttcgcttctccagtttgtcaattctcttctgcacatcacgtttcagatcccagtttggattctttggggctatgtttccaaaagggttctccacttgctttggttctgcagcttcagcactgattggatcttcaaacttaggaagagaaactggagctagcttactacctcggagttgttcatcatgaggaaggtagtttctgaacttcatggcaggaagctcaccatcatcttgaacctcctcgacctcctcaatggagctaatgttctccttagaagcttcatcaggtgcatcctgtggacctggtaatgcaggctgttccacgtgttcttctgtggcaccatgggttccattttgctgttctccgtcgggggccgggtgtggactaggagctccttggcggcgcggagggcacggaggcgctcgcgg

SEQ ID NO: 12156 - DNA, 383 bp, Setaria italica
  Peptide Sequence Number=SeqID_78130
acagcattccggtcacttggttggctcaacctaagtaggtgtgatttatctggtatgattccagaagccttgggagatttgcagaatctccagtacctggacttgagcaataaccaacttactgggcccatgcctttctcgttatatgatttgaagatgctaaaagaaatagtgctagacagaaacaagttgtctggacaattgagccctgccattgctcagcttcagaacctcactaagttattgatatccaagaacaacatctctggagtacttcctccggagctgggcagtctgaagaacctagaggtcctgggctttcaccagaacagatttgatggatcaataccagaagcttttggcaacctaactcggctcttcta

SEQ ID NO: 12157 - DNA, 829 bp, Setaria italica
  misc_feature (1)..(12): n is a, c, g, or t
  Peptide Sequence Number=SeqID_78131
nnnnnnnnnnnncctatccctgtgtgccttggcagtctcttctagttttttttttttttttcttgcaattagtttttattaattcattcatatttagtctatctaattagtattcaaacatccacgtggtctaatgctatatacaaccgtgagacgtatagttgcagaggcgcgtagctagctatgtatatgcgtacaggcagatctgttctgcattcttctacgtacacttgatcagatttgaagggagcaggcggcctgcacgtggccggagaattcgggcggcgccggcgcgcgcgcccaggacgcgcccttcccggcctcctcgcggagcacgtacacggtctggtccccgccgtggcatccggcgccgatcaccacgacgcgcccgtcggggatggcggagacggtcgccgcggtgagcgcgtcctccggcacctgcgccaccgggcgccacgacgcggcagggccgtcgcgcgccacgaggtggccgtcgcgaagcatgtacatccgctccgacgcccccggcgccgcgcagcaggtcctcgggcacgcgccgtcctcgatcaggccgtcctggacgggcacccaggccgacgtcgccgggtcgaaggcctccgcggagccaacgaagcggccctgcgcctgcgtcgggtacccgccgacgacgaggaacctgccggcgacgcagaggccgcgcggctcgtcgcgctccgccgccatgtccgggagccacgcccacgcgtcggcgtccgggtcgtacgccagcgcggaccgcagcgcgttcttctcctcgtcgtggccgccggccacgtacacggcgccgccc

SEQ ID NO: 12158 - DNA, 617 bp, Setaria italica
  Peptide Sequence Number=SeqID_78132
ttgtaactattttctaaagtattgttggtaccttagtttatttgtaggtccgtttatttgtagtaattgttgtaagtttgtaagtctagcaaatattttctgacttagagaagtattgtccttcccactgtgtccttgctactaatacatctacaattgaccttaaccttattggagagaaaacaaagtctcaagatcgtattgttggtgcgcacttctttagtcctgcgcatataatgccacttctggaaatagtccgtacccagcgcacctcaccacaagttgttgttgacttgttggatgttgggaagaagataaaaaagcaccaatagtggttgggaactgtactggctttgcagttaacaggatgttctttccatacactcaatcagcactcttttatgttgatcttggtatggatgtttataagattgatcgtgcctgtaccaaattcggaatgcccatgggtcctttcaggtaagacattaacttaattgccatttaatctgtaagtttctggaaccttgtttatgtttcatgagcttgctattacttatttgagttaactttactagatggattcaaaattgttgctctttttctattgcttgtatcca

SEQ ID NO: 12159 - DNA, 656 bp, Setaria italica
  Peptide Sequence Number=SeqID_78133
acttagtttaatagtttcatgagcttgaatccatctgtaagttactcaatagtatgcaagctcatgaaacataaacaaggttccagagcttgcatactattgagtaacttacagatggattcaaaattgttgctctttttctattgcttgtatccagactggcagatttggttggatttggtgtggctgtagccactggtatgcaataccttgaaaacttcccagagagggtctacaaatcaatgctacttcctctgatgatggaggacaatagggcaggtgaagccacccaaaagggattttacaagtacgagggcaagaggaaggccactcctgatcctgaaatcatgaaatatattgaaaaatctaggagcatggcaggagttacaccggatcctgagtgataaatgaagcctgccgggtccttgatgagggtattgcggtcaaggcttctgaccttgacattgcttccatctttggcatgggattcccaccttacagattccatcggtgcaaagtacatccatggaaagttggaggagtggacaaaacggtatggcagcttcttcaagccttgctcctaccttgctgaaagagctgcaaaagggattcctctgagcgcaccggcaaagaaagttcaagctcggctattaaga

SEQ ID NO: 12160 - DNA, 467 bp, Setaria italica
  Peptide Sequence Number=SeqID_78134
cctgacatgaaatgcttgagcaatttggatataacatttggtacagtaaatgttatatttttctctgaaacttgataaggtttcttctaatgctataaactttggtgctgttgtaccagttgctgaagctaagtgagaaagacatagttgagatggtgtttttcccagtgataaatgaagcctgccgggtccttgatgagggtattgcggtcaaggcttctgaccttgacattgcttccatctttggcatgggattcccaccttacaggggaggtgtcatgtactgggcagattccatcggtgcaaagtacatccatggaaagttggaggagtggacaaaacggtatggcagcttcttcaagccttgctcctaccttgctgaaagagctgcaaaagggattcctctgagcgcaccggcaaagaaaagttacaaagactacggactaataaagaatagaaccgttaca

SEQ ID NO: 12161 - DNA, 758 bp, Setaria italica
  misc_feature (1)..(76): n is a, c, g, or t
  Peptide Sequence Number=SeqID_78135
nnnnnnnnnnnnnnnnnnnnnnnnnnnnnnnnnnnnnnnnnnnnnnnnnnnnnnnnnnnnnnnnnnnnnnnnnnnnttgatgcaatctgatccattcctcaggaacaagaggggttacacaagtacacagggttgttacaaaccgatgtaacccaagcaagtgcagagtgaaacactcacacatccacttgcgcaagtagaaaaaaggaaacagctctctctctctctctctcctctataaacaatggtaaaaccctcaacctcagtgttgttaccacttgttttgcaacttctctgcagaagcagcatctcaccatatgaatgcaaattgcattgcaacatgccatccacaatggcttatcaaacagtgcaactttcaagtaaagttgactggaatgtgccccatttgggcactggcattgggcttattaacctaagctctcctctccataggaaagctcagccctctgctttgttcatctcttccacctctcacacaaaccaaaccaatccaatctgacagcagccaatgccatctgaagtttgcaagagctcaagctcaaaagcaggcagctaatcttcatcacccacttgtttgtattgatgtcgttgaagaaggcatagttgcaggaccacgagctgggctctggaaggaagcaactgctttccaggatctgcttttctcggatacatgtaaaagcttggttcatgtgttcttttctcagcgagcaacatcaaagattcctaggcatcaaccc

SEQ ID NO: 12162 - DNA, 1100 bp, Setaria italica
  Peptide Sequence Number=SeqID_78136
aactttaatatagagttatagattgggagataaatgccagcactagtagcttgccagctcccaactccaaacaagccataacttgcaagtctgcaactctgaaagaaaacaacaacagcaagaaatcttggaaccatcggagcagagatcgcggcggcgatggcggccaaggggaggacggagctggaggtgggcgcagacggcgttgccgtcataaccatctacaacccgccggtgaactcgctctccatcgatgtcttgtatagcttaaaggaaagctatgaagaagcccttcggagaagcgatgtaaaagccattgttgttacagggaaaggaggaaaattttctggaggatttgatattagttcctttggtggtgttcagggaggccaaatgatgcaaccgaaggttggttatatatcaattgatattctcactgataccctagaagctgcggcaaagccatcggtggcagcagtagatggtcttgctcttgggggtggattagaagttgccatggcatgccatgcacggattgcaactccaacggctcaattaggtcttccagaacttcaacttggaattattccaggatttggaggaacacaacgactcccacgtcttgttggactgacaaaatctctggaaatgatgttgctatctaagccaatcaagggtggtgaggcacatgaattgggtttggttgatgccttagtttctcctaatgatttggtgaatactgctcgtcaatgggctttggacatatatgaacttaggaggccatggatcaaaagcctttacaagactgacaagctggaacctcttggtgaggctagggaaattctgaagtttgcaagagctcaagctcaaaagcaggcagctaatcttcatcacccacttgtttgtattgatgtcgttgaagaaggcatagttgcaggaccacgagctgggctctggaaggaagcaactgctttccaggatctgcttttctcggatacatgtaaaagcttggttcatgtgttcttttctcagcgagcaacatcaaagattccaggtgctacagacttggggttgatgcctaggaaataagcaaattgcca

SEQ ID NO: 12163 - DNA, 1893 bp, Setaria italica
  misc_feature (1876)..(1876): n is a, c, g, or t
  Peptide Sequence Number=SeqID_78137
taaggaacaaggaagttaacaaccggaatacctagaagttagactagaaagactaagttaagtaggttagggaaactagtaactaggactttagacaagttggtgaggctaaattctgaagtttgcaagagctcaagctcaaaagcaggcagctaatcttcatcacccacttgtttgtattgatgtcgttgaagaaggcatagttgcaggaccacgagctgggctctggaaggaagcaactgctttccaggatctgcttttctcggatacatgtaaaagcttggttcatgtgttcttttctcagcgagcaacatcaaagattccaggtgctacagacttggggttgatgcctaggaaaataagcaaaattgccatattaggtggtggactcatgggttcaggaattgcaaccgcaatgatattaagtaactatcctgtgatacttaaagaagtaaatgaaaagtttctaaatgctggaatcgacaggatcaaagccaatttgcaaagccgggtgcggaaagggaaaatgaccgatgagagatatgagaaggctatgtctcttgtcacaggtgtccttgattatgaacatttcaaagatgtggacctagttattgaggccgttattgagaatgtgaagttgaagcagcaaatattttctgacttagagaagtattgtccttcccactgtgtccttgctactaatacatctacaattgaccttaaccttattggagagaaaacaaagtctcaagatcgtattgttggtgcgcacttctttagtcctgcgcatataatgccacttctggaaatagtccgtacccagcgcacctcaccacaagttgttgttgacttgttggatgttgggaagaagataaaaaagacaccaatagtggttgggaactgtactggctttgcagttaacaggatgttctttccatacactcaatcagcactcttttatgttgatcttggtatggatgtttataagattgatcgtgcctgtaccaaattcggaatgcccatgggtcctttcagactggcagatttggttggatttggtgtggctgtagccactggtatgcaataccttgaaaacttcccagagagggtctacaaatcaatgctacttcctctgatgatggaggacaatagggcaggtgaagccacccaaaagggattttacaagtacgagggcaagaggaaggccactcctgatcctgaaatcatgaaatatattgaaaaatctaggagcatggcaggagttacaccggatcctgagttgctgaagctaagtgagaaagacatagttgagatggtgtttttcccagtgataaatgaagcctgccgggtccttgatgagggtattgcggtcaaggcttctgaccttgacattgcttccatctttggcatgggattcccaccttacaggggaggtgtcatgtactgggcagattccatcggtgcaaagtacatccatggaaagttggaggagtggacaaaacggtatggcagcttcttcaagccttgctcctaccttgctgaaagagctgcaaaagggattcctctgagcgcaccggcaaagaaagttcaagctcggctataagatgaccgttctgaataacagaactgccatggcatttgcagaataactaatgtcaaatactaggtaggatacaagaaaatgaagcacggagcgtctaccatgaattagaccagtgtcatacggagctgtgtaccatgaagtagaccattgttattcttgttggagtacctatcggtcactgagtggaatatatttgagacctctcctgtgataataaatgtggccaagctatagcgtagcattcttattaataaaaaaaaaaaaactaaaagngactgccaaggcacaca

SEQ ID NO: 12164 - DNA, 815 bp, Setaria italica
  Peptide Sequence Number=SeqID_78138
ctcgccgtgatcggcatctgccacctgccgtcctcgcccgacctcgaccgcgtcgcggccgacttcgtcgacacggcgcggtcgtactcgtcagcgctcgccaaccgctgcttcgccttctgccccacggacgagcagatggcggcaaaaagagggacgatattatcatgttccctccttctgatcagcaatcgctggaacttcatatggttacaatgatccaagatcttgctgcttcattgttgatggagtttgagaagtgggtcttgcgtgcagaatctacaggaactattctaaagacacctttggattcacaatccagccttggctcagaggaggtaattaaggctaaaaagagaaggctgggtcgcgcacaaaagataataggagattattgccttttggctggatcacctgttgatgctaatgcacattacaccaccgcaatagagcttgcaagattgactggggatgttttctggcatgctggagcccttgagggtagtgtctgcgcattagtggtagataggatgggccaaagtgatcccgttttggaggatgaagtgaaatatcgttattacaccattatccagctatacagaagagccactttacaagataatgctcaaagagtttcacctgtgagctttgagcttgaagctgccttgaagttggcaagatacttgtgcaggcgggaacttgccaaggaggtgtcagatttgttaatgggagctgcagatggtgccaaggctctgattgatgccagtgaccgactcatattatatattgaaatcgacaaagaactttttaggtaa

SEQ ID NO: 12165 - DNA, 358 bp, Setaria italica
  Peptide Sequence Number=SeqID_78139
gaatatttagataggcattaagccaattaactttagtttggaaaaaccgaatatataacctaattggcttttatttagaagagggtatgaagtaggcattaatcaaattaacaatcattatgaaaaatgatgtttaacactaaatagattttatttagagaagaactcgtttgtcaggcattaatcaatttaatataaattatattttcaaaaacatgtgtgaaggaaaacattaccactaacgtgtaattttcatcattatgaatctaacgcaacttgaacggacaaaaacggaattaaaatgtagaatccatgggttaaacaaggttgtaggggcttaaacataattaaccgtaga

SEQ ID NO: 12166 - DNA, 372 bp, Setaria italica
  Peptide Sequence Number=SeqID_78140
tttatttacatgtcatttcatacaaccagcctgctatcagcttttataagaagatgctatttaagctagtcagaaggcttccaatgttttactacataagaggacaacattatgactcgtacttgtttgtgtactatgtgaacggtggtcgttcgccttgctcaccactggagattacatcttcatttgttgttgacttcagggctttcgtgaagatgctggttgccaagttctggagcaaagaggaccattgtggtccgagatgggccagatgtcaggaatccaacaccctcttggcgccacagagcaataagcggatcatcagcggtgatagtaccagatgtcatgtctaattttaggtgctgtgacgat

SEQ ID NO: 12167 - DNA, 674 bp, Setaria italica
  Peptide Sequence Number=SeqID_78141
gaatgttgtgagcggccatggtattgtttcctggggcgctgtggacaccagcaggtcagacgaccgcagggatgagataataggttttgtaaccacgaggatgatcgcggcaaaagatagcgaggtatcaccatacagaaggccctgaaaatggtattataactggtgagctcagtgaagctaatgattttgatatgcagattgaggacttgtttaggtataacagttcacgcaaagatctaacacttgtgtatatattgacgctgggtgtggtggatagctacagaaaccttggcatagcatcgtcgctggttcgagaagtggttaaatatgcagcaagtatatcaaattgcagacgtgtttatttacatgtcatttcatacaaccagcctgctatcagcttttataagaagatgctatttaagctagtcagaaggcttccaatgttttactacataagaggacaacattatgactcgtacttgtttgtgtactatgtgaacggtggtcgttcgccttgctcaccactggctttcgtgaagatgctggttgccaagttctggagcaaagaggaccattgtggtccgagatgggccagatgtcaggaatccaacaccctcttggcgccacagagcaataagcggatcatcagcggtgatagtaccagatgtcat

SEQ ID NO: 12168 - DNA, 1039 bp, Setaria italica
  misc_feature (882)..(882): n is a, c, g, or t
  Peptide Sequence Number=SeqID_78142
cccgtcccggccgaagaacctggtcggtcgtcgtccccgccgccggagctgctcatgttggacccgagatccgaaatctaccccactatagagtatcggcctatccaaccctccgacctcgaagctctagagaagattcatctcgctctctttcccataaggtacgagagggagttcttcttgaatgttgtgagcggccatggtattgtttcctggggcgctgtggacaccagcaggtcagacgaccgcagggatgagataataggttttgtaaccacgaggatgatcgcggcaaaagatagcgagattgaggacttgtttaggtataacagttcacgcaaagatctaacacttgtgtatatattgacgctgggtgtggtggatagctacagaaaccttggcatagcatcgtcgctggttcgagaagtggttaaatatgcagcaagtatatcaaattgcagaggtgtttatttacatgtcatttcatacaaccagcctgctatcagcttttataagaagatgctatttaagctagtcagaaggcttccaatgttttactacataagaggacaacattatgactcgtacttgtttgtgtactatgtgaacggtggtcgttcgccttgctcaccactggttcatataaggatatgggcggcaatgcttgtctggacattgaagatgctggttgccaagttctggagcaaagaggaccattgtggtccgagatgggccagatgtcaggaatccaacaccctcttggcgccacagagcaataagcggatcatcagcggtgatagtaccagatgtcatgtctaattttaggtgctgtgacgatgttttctcctgtttttttctgggaaactggagtttcttgaaacngtcacttgcgatgctgttgtacacttctgacacgagtacataatttctcaatagttatagtcacatttattgtaaagagaggaaaaggaagaagttaaactgtcatctgcttctggtaacgttggccttgcaatgttgaaatgttgtgttggttgaa

SEQ ID NO: 12169 - DNA, 250 bp, Setaria italica
  Peptide Sequence Number=SeqID_78143
agtgaacaatgcatcaactatactattcaaccacgccatatttcaggcttagcacaaaaaaatgctgataggcatatctaaaccagagtaaccaaagaagtgtacttaattgcagaagttattttgctgaaaaatttcaaaatagtggtgttgtccttctgtaaatatgctagatgaggaactcagcatgttcctctactatctagtaaacaggatgagccatcactatgtccaggtgttcattaggatt

SEQ ID NO: 12170 - DNA, 981 bp, Setaria italica
  Peptide Sequence Number=SeqID_78144
ttttttttaaattttcgaggacgaaaccacgctaaattgcattctcttgagccttgaccaaagcatagttgcagttgtagtacgtaacgaagtgtttaacatcagcagaataggtcagctaacctaacacaccagcacgctaaacaaatcttatgaacatcgcatgcctggacttttctacttctcttctggacagtcaactacatcacgcaaatgatagatcgacacaggtcctaattggaagagtgggagtcaagctaatccgatctatatggtagtgtacaatgccttcccagctgagtgccgaccgcccactgcccagctaccactcccatggcgaaataactagtgcatggcatccgacctggggcgtgcagtagcctaccagttgataccagttcaaaaacgcactgaatttcaccgcaggaattgatgaggcacaaacttgccaggcttggtagtaatcactcacaggggaggagtaaagacagtatggatctacttggcggcataccaattctgcgcacatttggcatcaacagccaggtcaacattcaggatgttggtgccgtagaagggcttagacatgcactcgaccactatggacttggccagttcagcagactctgaaggcccttccagtatcacttcatcatgcacctgcaagagtagcgtccaaccaagctccttcagatgagtattcctgtctatctcaagcattgcgcacatggcaacatctgctgcactgccctgtacaggagcattgatagcagcacgctcaatgtgacccctttggccagaagttgcataagccatgtttggaaaacggcgtgatcgcccaagtaaagtataaacttcacacttctcctgtgctagttctttctgcttcatttgccaagccagaacctcctttctatcgctataccagagtttcagtgtgtcttttgcttccttaacagaaaccttccaatcccgagcaag

SEQ ID NO: 12171 - DNA, 599 bp, Setaria italica
  Peptide Sequence Number=SeqID_78145
tcttcgttggttaaaagtcttgtaacttgttgtttatccctcgaccaacataaacccggcatcaccaattcaccaagacgttagctggcctcactggaacagaacaaatcaggaaactaacctaatgcaccagcatgctgaacaagtcatcttatgaacaaacagcatgctttggcactgctacttctctcgagatcaagccatctcaaactccgatctggtcctactgagaacctacactccaagaaatctaagcgctactacactactagtgtacactcacaacaactcgaggtgactgccagcaagtcttcggtctttcaatgttctgctgcaaccaagaaatgggggtgtgatcctgccgtggttggggctaccacttaaaacgtgataatcctggagccgtggtctccaggatgactcaattccattttttttaatctgaatggaggggcgccgattgcaccactgtcatcaaccttgtggcaggcaaacgtgcatctgcacatttgtattttgtaggataacaggatgtgtgcagtgtctatttggcagcataccagctatttgcgcacttggcatcaacagccaggtcgacg

SEQ ID NO: 12172 - DNA, 1197 bp, Setaria italica
  misc_feature (1165)..(1165): n is a, c, g, or t
  Peptide Sequence Number=SeqID_78146
acactccaagaaatctaagaaacgaactaaactaacaactaactaagtagtaacactcacaacaactcgaggtgactgccagcaagtcttcggtctttcaatgttctgctgcaaccaagaaatgggggtgtgatcctgccgtggttggggctaccacttaaaacgtgataatcctggagccgcggtctccaggatgactcaattccatttttttttaatctgaatggaggggcgccgattgcaccactgtcatcaaccttgtggcaggcaaacgtgcatctgcacatttgtattttgtaggataacaggatgtgtgcagtgtctatttggcagcataccagctctttgcgcacttggcatcaacagccaggtcgacgttcaggatgttagttccgtagaaaggtttggacatacactccactactatggccttggccgtctcagcagattccgaaggcccttccagtatcacttcatcatgcacctgcaataggagcctccaaccaagctccttaagacgggtatccctttcgatctcaagcatggcacacatagcaacatctgctgcgcttccctgcactggtgcatttatagcagcacgctcaatatgacctcgttgaccaggaccaaattgagtcaagttaggaaatcggcgcgatcggccgagcaaagtgtaaacttcacatttctcgtgtgcaagcttcttctgcctcttttgccaagctaacacttcttttctatctccataccatagcttaagcgtatcccttgcctccttaacagaaaccttccaatcccgggatagcccaacagctgtctttccgtacgcaatggagaaattaagcattttagctttcctcctctcagcaccaaaagcatccttcaatagcggcactggaggtttctcttgaccaggttgaggatgccactcaagaagaactttcttttcatcaacagcatcacggatatgctggtacatattcatggcagtcctagaatggaagtcaccaccagccttgaaagcatccagcatgcttttacaattagtaaggtgggctaagatcctcagctccagctgaccataatcagcaacaataagagaatttcctggagccgcaacgaaggcttgccgaatccttatacctatccttttcaaggcaggttnattctgtagatttggagttcgtgctgacagcg

SEQ ID NO: 12173 - DNA, 1068 bp, Setaria italica
  Peptide Sequence Number=SeqID_78147
tggggatcacaagctccagctcctcaagcacgccgagccactcatccaggaagaacccctcaagccatggatcacgctcaagaggaacatcaacaacatcaggtacctcccggcactcgctgatatcagcttcaagcgccgctacgtgtacatcgatgttggcgcccgcagctacggctccagtataggcggctggttccgcaagcactaccctaagcagaaccacaccttccaggtgtacgccattgaggccgaccccgccttccactctgagtatgccgcgaagaagggtgtcacgttgcttccatatgcagcctgggtcaagaacgacacgctcaagtttgagatcaatggtgaccctggaaaggaggatgaggctaaggccaatggccggggccgggggcgcatccgccctgcagcagggaacaggatgtccggtgaggtcaggagtgtcccagcgtttgatttcgccgagtggctgaagcagacggtaacggagcaggactatgtggtgatgaagatggatgtggagggtacagagtttgatttgataccaaggctgtttgatacaggcgccatctgcttggtcgatgagctgttcctggagtgccattacaaccgctggcagaagtgctgccctggtgagcggtcgcccaagtatgagaacacgtacgaggagtgcttggaccttttcagttcactgcgggagagcggcgttcttgtgcaccagtggtggtaaaggcttcactggtaatctggcatatggttttctggattgtttcattgcagatagagctgaactacaaagagttacagatgtttttttttcttttttgactaggtaatttatttccacactgtattcatttctcctgtaaacatggcaattcacaaattgaattgttttatgctgctaggatctgttaagtaaaggagtctggtgaagggaaagaaatgtacttatactggtattaaaacttgctgtggattgcaatcgccattgttgagcaaacgattgaaatgatcaatggacattttattcttagaacaaaaaaaaaaaaaaaaaaa

SEQ ID NO: 12174 - DNA, 298 bp, Setaria italica
  Peptide Sequence Number=SeqID_78148
gaagaggcctcacaatcccatgcattactacgcagattcgtcatcagtgtacaaagccgcaggcaacagcacgtactacccgagcgggccgcagccgcaatggcagagcgacaccggcgcggcggcgacgatgagcaccttcggcgcgccggggggtggctggcacgcgccggcgccgccagccgacatgacctccggcttgtactccagcccgccgctgccaccgccttcgccgcacgaggcgctgggcctcggcaagggcaccttcacctacgagcagctcgcggcggccacggga

SEQ ID NO: 12175 - DNA, 501 bp, Setaria italica
  Peptide Sequence Number=SeqID_78149
cctaagattctcttgctttcctacagcttcctgcagaatacgcaatcaagaggctaaccaagcccaccaccaaacatactcgtagtgcataggacttgataccatgctcacaggattccttgttcacaagcagtattgtgataactacagatgacacgaatgagagtgagtttgagtagtagaacacatcataacgctttaaattgttctgctgaaggattggatctcctggtttaccactgaccgccttgtcatcagaccatacacctcctggagggttcatgccagcttggtacgtgactgttgccgctagaacagcaagcatcaataataaattacgcctccgctcccagttcctgtcatcagcatcgccctcctgattgtgaccaagctcacagtcattatcattaacatcacttctctggttgtgcccaaacgaagcctttgtccatatatatctgcaagagaagttctcaagcttatttgccacgttttttctgc

SEQ ID NO: 12176 - DNA, 485 bp, Setaria italica
  Peptide Sequence Number=SeqID_78150
ctgaaactgcttcaactgaatcaaagagattataagcaaaatgtctttgttcagacaagatagtcaacagatgattcataaaggatgtggccctgttaacctcctctagacccagatctttgttaaacttcaaggaaacttgtcgaagttgttgcatcattgccaaacatttaaagtattgacagtttgcatacttccagttatctgtggttaatagcatggaatggacaatgctaacatcttccagctttttctgcgagcttacttgctggagtaaatgtgctgcatcatacgactcctccaagaacaatgaacttggtgcagaaagctcatctctccactcatgacccattgacctgtgctttgatagtccacattcctcaagagttttgaacagattggatagagctgttttcttctggttctttttcccatgcttcagtgtattcgcaaaattagcagacccacagattctctcaagaagt

SEQ ID NO: 12177 - DNA, 1455 bp, Setaria italica
  misc_feature (1371)..(1455): n is a, c, g, or t
  Peptide Sequence Number=SeqID_78151
catatcatgtctatacctgcaggtttcatagccatttctatcatacttggagatggtctctataacttggttaagatatttgtcattattgctaaggaattctgtaatgtacgatccaaacaacatgatcttcctgttgaagctctggaagatgatgagaactctgaacagttagtggaagagaaactacaaactgaggtattcctcaaagatagtatacctccttggtttgctgcttctggttacatcgcactggcagcaatatccaccgccactgtgcccaccatatttccccagctcaagtggtaccttgtcctcttgtgctacttccttgctcctgctgttgccttctgcaactcctacggcatgggcctcacaaacctgaacctcgcccccacctacggcaagatcgccctcttcgcattcgcctcacttgtcggcagtgacggcggtggagtcatcgctggccttgcagcatgtggcatcataatgtccatcgcctgctccacagccgatctaatgcaggacttcaagagtggatacctgaccctctcctcgccacggtcaatgttcgttgcccagctgatcggcattgcactcgggtgtgtcattgctccactcacgctgtggctcttctggacggccttcgacatcggcaatcctgatggcgagtacaaggccccatttgccatcatgtttcgggagatggccatcctgggtatcaaaggcttctccgcactccctatgcactgcgttgagatctgctgtgccgcctttttcctcgccttggccatcagtctcctgaaggacgtgacgcccccgaacgtgtccaggttcatccccataccgattgccatggccgcgccgttctatgttggcgcctacttcggtgtggacatgttcataggcacggtgatcttgttcgcctggcaaaagctgaaccgggaggaggccgacggttacgcggtggctgtggcgtctgggctgatctgtggggatgggatctggagcatcccttccgctgttctctccatcctgggaattaacccaccaatctgcatgtccttcaagccttcctctgcttccaggtgagaagatggatggaaggttatattcttggccacgtggttgtaccatcgatgaactcttgtaaattgtaaatacacacaagttgtacattagcagttcttaatttgtacaaatggtgtaaaaatgatgggccaccatgagagccactattcctgattaattatatgaatcttgtaaattgatgaatttgtataaattttgcatttgttacaaatatattataagctacattccaattttctgaactgaaattctgttgcatattaaaaaaaaaaaaaaaannnnnnnnnnnnnnnnnnnnnnnnnnnnnnnnnnnnnnnnnnnnnnnnnnnnnnnnnnnnnnnnnnnnnnnnnnnnnnnnnnnnn

SEQ ID NO: 12178 - DNA, 338 bp, Setaria italica
  Peptide Sequence Number=SeqID_78152
aagactaggacgttaattcttgcttgtggtgcaacattgtactgggcagatggcaagactgccaccttcaactgctcctttcttaccaaccttgcttttgatgtcaccatatatggcacaaatggtactctccacgtcactgacttggtcattccatatgaagagaagtctgcagagttcagtttggcctcaaagtcaacatttgtcaaacccaccatcggatgggatcctatcccaagtaagcatattgttactacagatctgccacaggaggcgctcatggtcaaggaattctcgaggctcgtgcagaacatccgggatgctggcggcaggcctgg

SEQ ID NO: 12179 - DNA, 705 bp, Setaria italica
  misc_feature (649)..(705): n is a, c, g, or t
  Peptide Sequence Number=SeqID_78153
tagactgcttggtgggaggagttggtgaggagaggtcgcggccatggagaaccttgcgctgctgtgggggatcatcgggccaggcgtggccggggccatcttcggggctggatggtggttctgggtggacgccgtcgtctgcagcgccgtctcggtctccttcctccactacctcccagggatcttcgcgtcgctggcggcgctcatgttcaactgcgtgaacaaggatgagatcggatacgattattactcgccatatggggacgattcagagtggagagtgaagctctggctttttgttgcatacgtcgtttcttttgtctgtctagctggatctgttggtttattggtgcaagatgcgctgacagacaagggcccgtctgtctggactggtgttgctggtgttctgcaatgcgttctcgtgttgataagtgggttgacatattggacatgccactctgaagattaagcgtgtaatgttctgagcgaatggtttgcaaggttggcaatcgcttgaagaaaattatttctggcaacttatggtcgtgtgtgatgggaaaacgtgcctactgtatagtggaacggctatatgtttcatttgtgcatatctgactgtttttcggaaacgatgcttaacaaaccttcacgnnnnnnnnnnnnnnnnnnnnnnnnnnnnnnnnnnnnnnnnnnnnnnnnnnnnnnnnn

SEQ ID NO: 12180 - DNA, 300 bp, Setaria italica
  Peptide Sequence Number=SeqID_78154
accccgccgccttctcctgcgagctccggccgtcgccgctccacaacctctcgtccgcggcctccgttacgcgctgccgctccagaaagcttgccgacggcggccggttccggtgatctttccatttccatcctatgatttcgccacctaatccggattactagtccaatttttagcttttctcttccttttttggatttacattttgtccatctgtgaagaagagtctgtaagattgggcacaaccaaagtccaaactccaaaccactccgttgacatatactgctgcgtaggttacta

SEQ ID NO: 12181 - DNA, 880 bp, Setaria italica
  Peptide Sequence Number=SeqID_78155
aacaagaagtaatagaagaaccaaacaaggtagattttctcagaagatgaggaattgttgcctaagcaactgaagacgcttgcagaatcagggaaaatgcagaataaaactgaggaaatgggcattatagacattgacagttggattcatcaacaaatcatcgaaaacaccagcatatgtcaaagtgaaaacgttctagatattcctgaaataactgaatatggaacttacaattctagtactgcatcgccaattcaggaatgtattaaaggtggtaagcaggcacaagatgaagacagtaacctgaaactgcaatcctctatgcaaaatgtagaaggtatcaagcaagcaaaggctattaatcaattcccatcagcggaattatgcactcctccctcaaaagaactttgcaacaatgaaaaaatgaaggaacataaaagtgaaaggcttgcatataatgggaattccagaagaacgctacaggaaaagttggacaagtgcatgccagagcagccagacaaggaatcactcgagaaaaagccagagaaggaatcgaaaaccgatgcaatcatacaacctgaaatcaggctccaggatgaagaacactatatagataagtcgacaaagttctttcgagctcttcgaacagcatgggtcggtgctcttctagggctgggcattatgagccttggattagagcaagacttcttccagagcttgacgctctaagttaactagaatttcatcactttaagggggttctaagaggtagtattcaattttaagagtaactacttccgacaaactatgttctcactatgtcaaatgccacaatgaaatgtacacagccaatttgtcctaaatagttgctttgattaac

SEQ ID NO: 12182 - DNA, 1690 bp, Setaria italica
  misc_feature (1606)..(1690): n is a, c, g, or t
  Peptide Sequence Number=SeqID_78156
gtgggactgctactgcggttctcatcaacgggttccacacacctcagggagacaagaatgcaaaaaagcaaatgcgtggattcctcaagtacttcgggatgagcttcctttggagcttcttccaatggttctacaccgccggcgaggcctgcggattcgttcagttccctacttttgggctcaaagcttggaagcaaacgtttttcttcgacttcagtctgacgtatgttggcgccgggatgatctgctcgcaccttgtcaacgtctcgctgctcttgggcgcaatcctttcctggggcgtgatgtggccactcatcagcaagcagaagggcaactggtactctgccaaggcgtccgagagtagcatgacaagcatctacggctacaaggccttcctctgcattgctctgctggtcggagacggcctctacaacttcgtcaaagtaattctaatctctgtcaagaacgtacgcgagagatcacgtcgcaagagcctgaacagagtggcggacgcggacaccatggcgctggacgacctgcagcgcgacgaggtgttcaacagggacaacatcccggcctggttggcctacgcgggttacgccctgctcagcatcatcgcggtgatcatcatcccgatcatgttccggcaggtgaggtggtactacgtgatcgtggcgtacctgatggcgccggcgctggggttctgcaacgcctacggcacgggcctgacggacatgaacatggggtacaactacggcaagatcgcgctcttcatcctgtcggcgtgggcggggaaggacaacggcgtgatcgccggcctcgtcggctgcggcctggtgaagcagctcgtgctcatctccgccgacctcatgcacgacttcaagacgggccacctgacgctgacctcgccgcggtcgatgctggtcgggcaggccgtcggcacgctgatggggtgcgtcctggcgccactcaccttcatgctcttctacaaggcgttcgacgtggggaaccccgacgggtactggaaggccccctacgcgctcatctaccggaacatggccatcctcggcgtggaggggttctcggcgctgccaaagcactgcctgcagctgtgcgcggcgttcttcgcgttcgcggtggcggcgaacctggcgcgggacctcctgccgcgccggctcgcgcggttcgtgccgctgccgatggccatggccgtgcccttcctcgtgggcgccagcttcgctatcgacatgtgcgtggggagcctcgtggtgttcgtgtggcacaagctcgacagcaagaaggccgcgctgatggtgcccgccgtcgcgtccgggctcatctgcggcgacgggatctggacgttcccgtcgtcgctgctcgcgctggccaaggtcaagccgcccatctgcatgaagttcacgccgggaagctaggtagaacagatagggaggtagtagtttcaagtaaggaagaactcgatagttctggagcatatccggcgtgctcttctgttcacatgagttggatcgtgcattgtgtaacaaccagctaaaatggaaatttgaaggatgacaagaagattttcttgcctccagtatactggacnnnnnnnnnnnnnnnnnnnnnnnnnnnnnnnnnnnnnnnnnnnnnnnnnnnnnnnnnnnnnnnnnnnnnnnnnnnnnnnnnnnnn

SEQ ID NO: 12183 - DNA, 409 bp, Setaria italica
  Peptide Sequence Number=SeqID_78157
attttgcagaggttcgggacacggagagcagcctggagaaggtgaagcgccagctgtcgtcggggtctgggaggtacctgctgcaggggcccctgctcaagcgatctgagacgctgcggaaatggaatgaacgatgggtcatattggaccccacatctggaaagatggaatacaaactccggaggaatgaaactgccattaagggggctattctgtttgacgcctcaagcaccattactttatctcctgtgaactttcagtaagactatctcatgaacatagtctttttctaatacgttgtacctaaatttttgagttataacctacaattattctcatttttttcagagggatgccaaagtatgatggttgctgcttctacatcggaactcctcaaagaaggattact

SEQ ID NO: 12184 - DNA, 639 bp, Setaria italica
  Peptide Sequence Number=SeqID_78158
tttttggtttttaattttgtttaacgttattgggttcattattggaccccacatctggaaagatggaatacaaactccggaggaatgaaactgccattaagggggctattctgtttgacgcctcaagcaccattactttatctcctgtgaactttcaagggatgccaaagtatgatggttgctgcttctgtatcctatttttcttatattttgatgccaaagagattttttagaaaaagcatgtcttaaatagtaataagtaggagtatctttgctgcttttagtattcctttactgtatttagacatcggaactcctcaaaagaaggattactttctttgcgctgaaactcctagtgctgcgaaagcttgggtatctacattaaatgcaactcagttagtactacgagctcataaagaggcagtaaattctttggctgggaatggctctccagctacattaggcactgttgctactgcagttgctaatgctaatgcaacagccatggaggctaccaaggagatagaagcagcaatgaaggtttcgatgagggcagctcttgggttgggtacaaataactccaatgagggtcaactagatgacctaacaatcatgaaggagactctccgagtgaaagat

SEQ ID NO: 12185 - DNA, 1933 bp, Setaria italica
  misc_feature (1868)..(1933): n is a, c, g, or t
  Peptide Sequence Number=SeqID_78159
acgaatactagacaacgacgctctcccaaccggaccggtacgacgcgcctccgcctaccccctgcccgtcgccgtccgccgctccccgccccccaaaaccctactacccctgccgcctccgccgttccccgccccgtgccatggccaccaacggcagctccccgagggttcgggacacggagagcagcctggagaaggtgaagcgccagctgtcgtcggggtctgggaggtacctgctgcaggggcccctgctcaagcgatctgagacgctgcggaaatggaatgaacgatgggtcatattggaccccacatctggaaagatggaatacaaactccggaggaatgaaactgccattaagggggctattctgtttgacgcctcaagcaccattactttatctcctgtgaactttcaagggatgccaaagtatgatggttgctgcttctacatcggaactcctcaaaagaaggattactttctttgcgctgaaactcctagtgctgcgaaagcttgggtatctacattaaatgcaactcagttagtactacgagctcataaagaggcagtaaattctttggctgggaatggctctccagctacattaggcactgttgctactgcagttgctaatgctaatgcaacagccatggaggctaccaaggagatagaagcagcaatgaaggtttcgatgagggcagctcttgggttgggtacaaataactccaatgagggtcaactagatgacctaacaatcatgaaggagactctccgagtgaaagatgaggaattgcagcatttggctaaggatatccgttctcgtgatgctacgataaaggaaatagcagacaaattgacagaaactgcagaggctgcggaagctgctgcttcggcagcacatacaatggatgaacagagacgacttctatgtgtggagattgagcgcctaaaacaagccttggaaaggcaaatagaacaatcaatgcttaagctaagacaatccgaagagaaggttattagcctgagcaaagagaaggaccagttgatgaaggaaagagatgctgcatttcaagaggcttatatgtggcgcaccgaactaggaaaagctagagagcaagcagtgattcaggaagcaactattgcccgagcggaggagaaggcaagggtttctgaagcagatgctgcagctcggataaaggaggctgctgaaaaactgcatgctgttgagaaagaaaaggaagagcttctagctctggttggtgttctccaatcacaagtccagagagaacagagcagcacaaagcaagtatgtgaagagaggtctgaatcatgctccggtgccgacaattcccctcctttaacaaagcacgttgatgcatcagacgacaatgtggacaaagcctgtgtaagcgactctagatcagtcctgctttccagcgacagcactgaggtccaactggccgtggatggggtagacatccgtcctattggcgatgcagagtggggcaccttccagcagtcggaggcgctgatcgctgatgtgcgggaggtctccccagaggccgaaggtggcagcttggatattcctgtggtcaaccccccaccggtcagcgatcatatccagggaggcacaactcatccctgaaggccggggttgctgctggcctgctgccaccttctgagatttggtgtgactgctgataatctgatagggatttgaatcctggagagaattgctgttgccgttgttttgcatcgatgcgggttgtatgttcattgtatttaagtatatgactgaataaaaaagataagtagtgtttggctgtgggattgtaaatttaaaaaatcgtcccattttcatgctactttnnnnnnnnnnnnnnnnnnnnnnnnnnnnnnnnnnnnnnnnnnnnnnnnnnnnnnnnnnnnnnnnnn

SEQ ID NO: 12186 - DNA, 398 bp, Setaria italica
  Peptide Sequence Number=SeqID_78160
ttcccgctgccgctgctcccggaacagcctcagcagccgctgcgccttatcccgggccctggccgtgccgttcgccgtcacggacaccagcgccgggatcacgccctcctggagcaccgtctggctgctgccctcgttgccgctgcagatcacgtacaggcacgacacggccttctccatctcgccgggctcgccgttgtccaggatgagcacgatggtgcccaccatggccgcgtcggccgcgatctccgccttccccgcgcgggtcagcgccaggttcagcagcacggcgagagccttgtccgtccacaaggacgacggcgccagcacggcgcggaggctctcgatgatgccggaggccatgaggaacgggatgttcggcgcgtgcagggagaggt

SEQ ID NO: 12187 - DNA, 539 bp, Setaria italica
  Peptide Sequence Number=SeqID_78161
tacgtgtttaggattcagtacctctagtgctttgtgcttatccgtcctgagccatttagttcaaactgctagctgtgagttctgattttggagtacaatcatcttatcaggtatatatgatcgttatatatccaatgtaaagagagacttccctattattgtggagagttgggtaaccttctgtgttgctatatctttctttcggacgttctctgtgttacatctgttattttaacattgtatctgtcattgtactcaaaatatttaacagataggtaatgctgaactaggatagccaataccatgtctatgtcttgttgacacaactgaattacatgtcaatttgacatctagtaagcatttgttccttgtcaactcaaacagggtgatggtgactgtaatatttcttattaggtagtaacacgtctgttccagcaaatgaaaatggtagtggaccagttgggggttgagtccctttaaactaactcaaagcgcatcgtatgtacttttcatagatagaggacttgtctgagcatttg

SEQ ID NO: 12188 - DNA, 551 bp, Setaria italica
  Peptide Sequence Number=SeqID_78162
agaacaagaatctaaccttcactggggtgattgacatggtgaaggatcagcagaaagagataactaggcctttgctcaaggttgagttcagggacctgactttgatgcttggaaaaaagaaagctgttaagatctatcaatggcgagctccgcccaggccgtgtgactgctgtcatgggcccatcaggagctggcaagaccacattcctcaatgccgtcactgggaaggtgaacggctataagatgacaggttcggtccttgttaatgggaagaatgttaacatccgttcttacaagaagatcattggttttgtgccacaagatgacattgttcatgggaacttaactgtggaggagaacctttggttcagtgcaaagtgcaggctctctgctagaatgaagcatcgcgacaaggtccttatagtggagagagtaatagattctctggatcttcaagggatcagaacttcaagtgcctcatgccgaagagctctgagaagaagttgtgatgaggagctgtccaggccagaagtttggttctattcctaggt

SEQ ID NO: 12189 - DNA, 327 bp, Setaria italica
  Peptide Sequence Number=SeqID_78163
ggtcggtattgtattgtctagttagttagttactaactattgtctattattacttgtatattgctactatatatgatcaataatttatttggagatcaactttgttcagttggtctgctcatcatcatcagtaactgcaagctgctggtgcttcttgaagagcttgctgtcgatgtgctgcttgaaggttcgcggcgtgaacctggcggggttgtccggcgtgacgagctccggcatcgggcgcagcagcacgaggtccggtggcggctcgcagaagacgacccaggagacgcgcacggcgtcgcggttgacgaggccgcggtgcag

SEQ ID NO: 12190 - DNA, 632 bp, Setaria italica
  Peptide Sequence Number=SeqID_78164
aaatcatgcttgtgctggtcattcttatccccatcaactacccataaaagtctaaatggtgcctttcttgcaacaatcttttcatctggttttcggttaggtccaggacattcatcctggagaatttgatgtgaacatatcccatggtttccacaacaactggtttgatcaatggaggcagtctccaatgccatctgactagtcagttgctctaacttgtcgttcccaaagttactgcagcctttgattacattatgatgtttgtgttccttggatgccacctgtaattcgtacttgcgcttccattcagctgcctctgcttgagcagcagctttcccttccacaactcgtcgcagtgtttttgcaacagttctcatagcttcagaaaattcttcaaggtgtgcatcagttgatctgataggagtttggggaataaatgcataagcggccctctccacagaactaactttggtgagctcccaattttcagtttgatgtgaggtagccacactaaggtttattctctcatcacaaacctcccgcgtggccgccagctcgtcggcggacatggtcgcgcgatccaactgcttccccttcgtcgcgccgttttcgaactcttgttcaaattctcc

SEQ ID NO: 12191 - DNA, 358 bp, Setaria italica
  Peptide Sequence Number=SeqID_78165
gcagctgcagcaccaccagccgcagctcgggactgtgccccacctcctcgccggcggcgtcgccggggcagtcagcaagacctgcaccgcgccgctcgcacgcctcaccatcctcttccaggtgcaaggaatgcactcagatgtggctacaatgcggaatactagcatatggcgtgaagcatcccgcattgtctatgaagaaggcttccgtgcgttctggaaaggaaatcttgttactatcgcacaccgattgccttactcttcaattagtttctatgcgtatgagagatacaagaatttgcttcagatgctgcctggtcttgagaagaatggtggattcggtgcagatgttggtgtt

SEQ ID NO: 12192 - DNA, 708 bp, Setaria italica
  misc_feature (658)..(708): n is a, c, g, or t
  Peptide Sequence Number=SeqID_78166
ctcccgcggcggcgcctgcgagacccatccgccgccacgccatggccaagttcaacgtggtgcagaagaacaagcgccagtggaagcaggaccgcaagcgcgccgcgcatggggagcccggcaccggcaagctcaagcagcggaccgcgcccatctccatgtccggcaagcggaagcgcaagatcgagcgccgcctcaaccgggatcagaaagaggctgcgatgattaaggctctcgagaacaacatgggggatgtcgacatggtctctgctgaagagtcttcagaagctgcaaagggcaagtctcaagtgaaggtcagtgtgaagaaaagctccaggatacagatcaaaagattaaaaggcaaaggtagaaagaaagccaaaaatgcaaagccgcctacaaaggacaaagttgacgccatggtagaatgaaggataggtactgtgaagcctttgtacgtttgctgagaaccagcaaggattgcagagactgacctcgccaaagtggggagcgtgaactaccttgcggcttgtgccactaccgcctgaatgttcattaggaactacttagatctggtgttaatgtatcgaacttcaaacatgaatcaagttttgtaatagttgagtatgcattgggttttttttacctgttcttgttnnnnnnnnnnnnnnnnnnnnnnnnnnnnnnnnnnnnnnnnnnnnnnnnnnn

SEQ ID NO: 12193 - DNA, 260 bp, Setaria italica
  Peptide Sequence Number=SeqID_78167
catcgaatcaaggagttcatagaccctcctgaacttgcgctgcttacagtaagcctcaataacagcagtatacgtgatgaccgtaggagggaaccccttgtttttcatctcctcaatcgtccacattgcctcatcaatcctgcgcatactgcaccacccatggacaaagatgttgaaagtgtatgcatctggtgtgatgtgcgggctgagcaccacaaagacctcacgcgccaattcgattttcttctccttgcagagag

SEQ ID NO: 12194 - DNA, 983 bp, Setaria italica
  Peptide Sequence Number=SeqID_78168
taagaacaaattcatttcaatggtgaaccactgccagtgatgatacatacatagccaagctggcagggttatacagacttggcatatttgttacatttttctattacaaacttcgccatggagaaccacccagacctagttacatttatctatgatgacaaactgtggcgatagcctttgaagtgaccatttcataaacgtcacaattaccgttaagtatcgtggatgaagtacaacaaacaatatagatacaatcagacatcagtatgtgatacggtacaggattgaggcactgctttgcagctcataagtggcactgggaaccagagggcgctttgcctttctgaagtaaaggacagttcgagtgcagcagtttaaggtgaatcttgatcggctgatggctcatccacgacgagtggatcctgccggtagacatatttcttcgcccagtacaggtagttaaggaagccaagaaatccgacaacagttacaacccagtagaacaggtcaagacggctgttgttcaagcttgtaccctctagccatcctccatggtgcccatgccccgtggcgctgttcaccccttgcaccaggaaggtggccagcaacgacgcgagccctacctcacaccagaacaatgctgtggcgatggacttcatgccccgaggcgcctcactgttgaagaactcaaggagcccaggaaatgacgtgacatccgacacgcccagcaggaagaactgaggcgcgagccagaacagggacatctccactgcagcttcttttctctttctctcaacaactgctgcaaaagctgatgcaagtatcatggaggcaaagcctattccaatgcgctgcaaatgagtgatgccactggcatagcccgtgcgcctgcgcaagaatggcactatgaactggtcatagatggcgagcattaccatctggaatgtggtggggatgataaagagtgtcggcggggagagtat

SEQ ID NO: 12195 - DNA, 450 bp, Setaria italica
  Peptide Sequence Number=SeqID_78169
cttgctatctggcatctatctacatcgcggtgcgccaggccgcttgtccctcaacctcagcgaaggagcgagactcgccgtcgttgcacattaggtgaagcatggccttgacgtcgtgaggcacccgtcccggcatcggttggtcgccaagaatgtccgccatggtgcggtaccgcagtggctcaccatcgtggtacgcgtcgacgcggtcctcgtcgtgagggagcggagtggcgaactccaccgagcggggctcatcgtgagtcggtgttgacgaagcagtgctcggaggagtggccgtcggtgctggagtgtggcgtggctggctgtggtggtagcgatggagagctcgccgcgcccggagtactcgccggagtcggtggaggactcacctgcgccagtgaagagctcgccatagtcgatggaaacccgaggactggggtaggcacg

SEQ ID NO: 12196 - DNA, 619 bp, Setaria italica
  misc_feature (1)..(1): n is a, c, g, or t
  Peptide Sequence Number=SeqID_78170
ncttcagaggtccaagactgtgagcaactacactgtcatgatgcaagctagattgcattccacctccctgccttgactgccttattctatggacagcttcctcttcattgaccttgtttaatagcactctgtgttcctcatcagagactttcaattctcttcttagttcagtgatcagactttctttctcccaagttagggcatctgattgcattttgaatgatctgagaacaccagtatatgcttgttgttcgatctgatgtatatcactatccaacttgctgtgcagccttggctgccttggctgagaaagtgtccctgctaatgaccttccattcccactgaaatgcactctttgtccactaatttgatatgttggagggagttcatcatcagtcccgctgccgtcgaaggcgcggtacgccatgaccttccgcgtcgccgaggagccagcaaaccctgcaaactggcggcgtctcctgcggatccgcgcgtcggaacctatcagatctcaaatccgctgaatcttagatcctccacagccggaggtccgattcatagctagtagagcggggtccgacctcggtttgggggtttatcgtggtggaatcggatgggg

SEQ ID NO: 12197 - DNA, 359 bp, Setaria italica
  Peptide Sequence Number=SeqID_78171
agttataacaaattagcaaccccactgacacagaaaaaaggacaacaaaggctgacaataagaagtggtcttattgagcacatttgtttataacaaaataagcaagcagggcaaatgtacagagaacctacgagatctaatgcataagaattcattgaagatttaacttgtacacagaaagttagcactaacctagaagcagttgtatgtactgaacacttgaaatggatcaagagcggtgatgatattggaacaatttaatccggggggtttgacgagacgatgagccggatcgtacggggctctcccccaactttagcagcagctgcccttccctgggattccctttccgatttctt

SEQ ID NO: 12198 - DNA, 1150 bp, Setaria italica
  Peptide Sequence Number=SeqID_78172
gagcaggctttgtaagaaagtgtgcattcctagcatgttcacgcagctgctcataggtaccaacaaatttgcaagaatcatgggaacaagttctcaacttcctgtccagatactgtctcacctctccagcagggatccagccagatacagatcctctacacagagggcatttcacttcagcagaactttgcatagcatcatgacatccccctattacaacacttccttctcctatagataaggctgggttttcgtattcttgatagttaacaatctcaggctcagatctagatatgccatctgcattttggccattgtttgcattggaacgatgagatgcttcattatcaacatgtcttccaggtcttggactccgtgaacgtctggaaatgatattatagtgagctcttggttggacagttctgatattggagtttgaaagcaccgaataggttgagtgtgaagcaaggaccttactatcaccattcatttttctgaaccggtcaaggcaattagagtgtcgatggcttgtgttacaaacgtaacatctgcagccattcttgtatgaactgcatataagtaaaacagcattgtggggttgctccatacaaatagggcaagaaatcctgtcccattccatatgcagagcagtgcgtgatgtgactgtagatctgttacttttcttacttgtcatcttgaaaccaactgtgtcgaattcacttaatcgttagaattgttaaaaaatgattatcgtgccaagttaagaattaaagaagtttagagaaaaaaatggtgagaaacatgtttttaatgtaggaaacagtattacttattagatatcaaaagcatatgttcgtgccaaatcaacattcgagatagtttagcaggtagaataatttgcccaacaaatattttggttctaaggagagtattttgctgcaaagagatcatgccttgaaaagttataaatcatattcctcagaaggtaacagagcataaaccaattgacaaaagtaactacattgagaactagaatccaaaagaagatcagagaggatgtgtaactgctgataacaaacacaataactaaaacgaagtcatgaataggccatgtactaaccatctattgttccaaaagacaggcaaaatc

SEQ ID NO: 12199 - DNA, 1590 bp, Setaria italica
  Peptide Sequence Number=SeqID_78173
tttttttttctaagaggaatataacttttgcacctggcatagattgtttcacataatacacagattaaataaactaaagaaataaaacgtagtctttgccattcgtatttacaaagatagcttgggtggaaccaccaatgaatttctacagcagaactgctactgtttccatcagtagtggcttctgtgcgtgtaccgcagccgctgccgccggcttggcaccaacgatggatctatgctcctccctggatctcgggtatatgaccgatccagaaacgtgcgacgatagccacgataattgctgcgatgtccagagtggcgatttgagaagccaggtcgcagtagactctgcgtccttggttgacgaatcccctgccaatctgaatgcaagctacgcctattgctgaacgaaagcctgggtgaaactctgttgttctgtggcagaagccttggcaaattacgtctttcatctggccaaatgctaggtgatcctagcgtatcatttgcccaaacacttggggaatcaagtctgttacctggtgattcagcatcacctcgatctgaccaccactcttcactactttcatcgccagagtctatgtctggagacatgtcatctctagtttcaataacgtagtcaccaactattattgccccaggtatctgggatctgattgcgctaatgacatcaccaacctcttgctcacgctcaatgcgatcccaagttctcttccttgacagatctacatgagcaggctttgtaagaaagtgtgcattcctagcatgttcacgcagctgctcataggtaccaacaaatttgcaagaatcatgggaacaagttctcaacttcctgtccagatactgtctcacctctccagcagggatccagccagatacagatcctctacacagagggcatttcacttcagcagaactttgcatagcatcatgacatccccctattacaacacttccttctcctatagataaggctgggttttcgtattcttgatagttaacaatctcaggctcagatctagatatgccatctgcattttggccattgtttgcattggaacgatgagatgcttcattatcaacatgtcttccaggtcttggactccgtgaacgtcttactatcaccattcatttttctgaaccggtcaaggcaattagagtgtcgatggcttgtgttacaaacgtaacatctgcagccattcttgtatgaactgcatataagtaaaacagcattgtggggttgctccatacaaatagggcaagaaatcctgtcccattccatatgcagagcagtgcgtgatgtgactgtagatctgttacttttcttacttgtcatcttgaaaccaactagaagcagttgtatgtactgaacacttgaaatggatcaagagcggtgatgatattggaacaatttaatccggggggtttgacgagacgatgagccggatcgtacggggctctcccccaactttagcagcagctgccttccctgggattccctttccgattttctttttcctcgctcgcggaacagccgcctgccttgcggttatataggcgattgcgagggag

SEQ ID NO: 12200 - DNA, 1540 bp, Setaria italica
  misc_feature (1472)..(1540): n is a, c, g, or t
  Peptide Sequence Number=SeqID_78174
ctctgactggatcgatcagaatcaccggtggcggcgacggctgcggttccccggggagggcgacgggaggggccggcggcgggatggaggtgccgtggctgctggtggcgcacgggtcggtgacggcgctggtggtggtgtcgttcctgtgcgggcagtggcccatcttcgagggcaccttcatccagagcatcaaccacttcctcacctttggcgcttaccactacctcttgcggttcgtgcaggcggtatgcggcaccggggccagggatctcgtcctcggcgtcgagcagtactgctgcgaccggcccaacccgatcctgcaggtgttttatgttgccataattggggtgacatattttatgatagtgcagacatctttcgagtacattcctgggtattatgtgagtggatggcacagatatttgagcatagttgctgttgctgttggtgctatactcttcgtgctcactagcttttctgatcctgggaccgttactgctgagaatttctctcaatatgtatctgcctacccatatgacaacatcatttttgtggagaaagaatgttctacttgcaagattactagaccagccagggcaaagcactgcagaatatgtgataaatgtgttgctcgatttgatcatcattgtggatggatgaataattgcattggggagaaaaatactcgctattttgtggcctttttggtttggcactttcttatatgtgtgtacggggcactagtccttggcttcattcttgctggcgaactaaaagagaggaaagttatctacattctcacagcttattatggtattgagaattcattcttgggattatttccacatgttgcacagtggctgcttgctgtacataacacacagatacttctgagtgtatttttggctatactagcattgctacttggtggtttctgcgcctaccatgcacacctttgtttaacaaatacaacaaccaatgagtcattcaaatggcaagactacatcatgtggatgaaaaaggagaacgaagcgaaggcaaatgctgctgcactcaaggccagcatgggctcatctaacagcgaggcacacaaagctcctccaagcaaatggaggtcattctttgttaggtcccgaagaccgagtgtggaaccagttgtgaaaaacaatatatatgacagaggcatgattagaaacatgtgcgaggtgattgtccctttgtcggagcggaagtcattttcccgcaggaaatcagattgagaccgactgttcttacagctgttgtatcaacaaactgttgtatatccatgtagaattcgcaaaacattttttttcaataccatagaggaaatattttcaggataatcttgttcaggactgatgggttagcatcaaaatatagataagaagttttgaaattccatttatctgtaactttgtacccttcctgaaatagagaaacttgctgcnnnnnnnnnnnnnnnnnnnnnnnnnnnnnnnnnnnnnnnnnnnnnnnnnnnnnnnnnnnnnnnnnnnnn

SEQ ID NO: 12201 - DNA, 390 bp, Setaria italica
  Peptide Sequence Number=SeqID_78175
tgtttacgttggtactggcgtgcagttctttgggatgacactagcagtcatgagtcctccgcggtttgctggtgataagaatccaagtagcgcaaacatcatggttactagtgtcatcccaaagaactgcacgccagtaccaacgtaaacacaaaggaggcctgagtggacaggaggccggaatacatcaccatgcactaacttccatccagtttcttcctgggcctcatcctgattgtcaagctgattatagtttgctatgtccttgtaaagagttctcatcatgatcatggccaccataccagaaaggaataggacaatcatcaatgagttaacaattgagaaccaatggatttggctatcgctagaaagaaggtagacatcccagcg

SEQ ID NO: 12202 - DNA, 472 bp, Setaria italica
  Peptide Sequence Number=SeqID_78176
atcacgtatcaagatctcactttaacttccagcagttcttactcctaatggactacacatactctaccaaaaccatggaatcccatctcaaatcccagtttcctctatatgtcaatcgagcagcaccatgcgcgaccttgaaataaaccttggaaacaaggttgtcttcttacttgtctctagacagtagttcaatcagtcaatcttcacagaagcatatatcttcctcacgaaccagaagcaggcatagaagccaatggtaccagtcagcacaaagaaggcatatgcttctgtgaagattgactgattgaactactgtctagagaaacttagagcacccttgtttccaaggttttattcaaggtcgcgcatggtgctgctcgattgacatatagaggaaactgggatttgagatgggattccatggttttggtagagtatgtgtagtccattaggagtaagatctcacttt

SEQ ID NO: 12203 - DNA, 2249 bp, Setaria italica
  misc_feature (17)..(17): n is a, c, g, or t
  Peptide Sequence Number=SeqID_78177
tgtgagtagtttttttnttttttggaacatgacaaaaagaaaatcatgataaggcatattacaagacagcactcaatatctttaaaggtacaaaatccatgctgatcatcacgtatcaagatctcactttaacttccagcagttcttactcctaatggactacacatactctaccaaaaccatggaatcccatctcaaatcccagtttcctctatatgtcaatcgagcagcaccatgcgcgaccttgaaataaaaccttggaaacaaggtgctctaagtttctctagacagtagttcaatcagtcaatcttcacagaagcatatatcttcctcacgaaccagaagcaggcatagaagccaatggtaccagtcagcacaaagaaggcataagagatgatcagcatgtaaccaaagtacaggatgcctgagacaagcttcgtgatctccaacttgttgaagaagtagaagatagcataagcaaacagatagagtgctgatgagcctgcagtcaggtatgccctccaccaccagtggtaatcctcactgcatagctggaagtagcatagcacaatcgtgatctcagcacaggtcacaatgaggatgatgaagactatgaagaggaagccaaagatgtagtagaactggttcagccagatggatgtcaggatgaagaagagctcaataaagacagccccaaatggcaatatgccaccagcaagtatagcaaaagctggctgcaggtaccatgcttgctcgggaatttgcctgggaatcttgtttgtcttcactgggtcctcaatggctggctgcttgaatcccaagaaacttccaacaaagaccagcggcacagagatgccaaaccataggaggaacaaagcaaacattgttccaaaaggaactgcgccagatgatttctcaccccagatgagggcattcaaaaagaagaagagcgcaaagataattccaggaaacatgaaggcagttttgagggtgatcttcttccactcagtgcctttgaacatcttgtacaggcgagacgaggtgtatcctgccagtacacccatgaacacccacaaaaggaccatagcagtcatgagtcctccgcggtttgctggtgataagaatccaagtagcgcaaacatcatggttactagtgtcatcccaaagaactgcacgccagtaccaacgtaaacacaaaggaggcctgagtggacaggaggccggaatacatcaccatgcactaacttccatccagtttcttcctgggcctcatcctgattgtcaagctgattatagtttgctatgtccttgtaaagagttctcatcatgatcatggccaccataccagaaaggaataggacaatcatcaatgagttaacaattgagaaccaatggatttggctatcgctagaaagaaggtagacatcccagcgagatgcccatatgatctcacttgcctcaaaggtaacatcataagagaatactacatatgcatcaggagccacctcttgaggagtgtgactaccaggtgtaatcttaatgttagcattgcaagtttgcgctgtgggattattgtcatcccaggtaccgtattcatgcttgatgctgctaggaatcacatggaagccaacaatgcgagcgtctggagaagtttggtcttcatggtacaaaactttaaaactcaagtggttgttgatataatacttgtcatccttgagcttataaccaactcgataaccatgctcaaagcttggtgtttggcttccttcccgtgtctgtctaggtaccacaactgggagattatctagaatcatgttcactcggtattcatcatcgattttttctttgaaattcttcgcagcttcttgagaaagcttccttcgacaaacaaccttgcaactctcatccctcctcatcttgaaattatagacagaattttcaatgcggtccccacgaaggacttcacccaagttctcggcactgttcttaatcgcttgaggtttgcagtagtccaggaaatagtagtcatatgggagctgtgtctttatggatgacagcttgttgactttcacctgaagctcatcatccttctggaagtcgcggggggcgacgccggggaggtagaaggcgccggcgggggaggaggcggcgtagagcacggcggcggcgaggaagatgaggaggtggcgggggcgcaggccgcggccgggggtcgccatgggtgcggggccggtggcgtggggacgggg

SEQ ID NO: 12204 - DNA, 977 bp, Setaria italica
  Peptide Sequence Number=SeqID_78178
tctgctcgtggacagcctcgtctctttccttcgtctcctctccgcgccccctttggcaattccccaaccctaagaaacccttgccacctcgaggagagccagccatgggtggcgagatgcccgacgccgacgggaagccccgcggggcggactcgtcctccgcctcctacgggtacccgccgtcggcgccgccgcagccgcagcaccagcaccagtacggcaccttcgggaccccgtcgggtggctccggggagtttccgcagcctgcggtcgggttcccccaacccgcgctgccgccagggatgcagcagtacccgcagccgccgcctgcgtcgtacgcggtctacccgcctccgccgcagcagccttactcggcggccgcgccgtactacgcccagggttaccaggccgtgcaaggttatattcctgtagttgaagggaggcctgtgagaatgcggcgtcttccatgttgtggccttggcatgggttggtttctgtttataattggattcttccttgctgccattccatggtacgttggagcttttgttctgatcttcgtccgagtacatgattacagggagaaaccaggatatgttgcttgcactattgctgcctcgcttgctgcaattgctgtgctgcttggtgccacgaaaggagctgatgtgtggtgagaacgccttcggtggtcagcggtctgcctcagtaaatgttcattgttcgcctactttgttgagttgagttgtctgggttgtacatgtatacatagcaagaatagggcgaacgagttgacttcatctcccattgtctgacctatagcacatttgtaaaatgaagtgacgtcaatgtattctcatattaattagttttgatgtaaagttgcgttgatatcattatgttaatattacctgaaccccttgatcaaactttgtcatctgaccttgacagtaataagcttcgtcgtgttaaccgtaaac

SEQ ID NO: 12205 - DNA, 150 bp, Setaria italica
  Peptide Sequence Number=SeqID_78179
taaggtaatggcaaggaatttcggtatgtagatatcagccctgtagctggggaaggcaacaaaggcatacagatatatagtttagaatggattcctatgaatttattgctggaaaaacccaaataagtgctttcatgagcagtatttggg

SEQ ID NO: 12206 - DNA, 740 bp, Setaria italica
  Peptide Sequence Number=SeqID_78180
tggggtcgtctaggttcttctttggttgggtctacgtctagtattcttctacgggggtcggggtcttcctacctaaggtaaggtcggtctacttgtccgtccggtcctaccgtccgtcttcccgttgtcgtacctacctttctcgacggcaaggccgcagatctgcggggaaggcgccaccggcaagcagcctgggagcaacggcaacggcgacgccccagccacgactctatggagttacttcgataaattgctgcgtccagctatggggctgctgtaagtcgtcttggtcgatttccttttccctctgcttccagccactgcggttgatgtctcccgctgctgtgcgtgcttgttgtgccatcagcctccagttgtttgcgtccatgctgatgtgctgacctgcgtcaactgcttgcacgttgggagggagaatcaaggtgtaggatagcgcaggaaggttaagatttccccaatctcatttgaacccttggtaaattgctgagattgagccaaggtatcaatttccgatcagtacatagctaaaaagaattttgtaagattcaatttattggctgttcgagttatgtcgtatgaattaatttcttctgtgaatttctgcaaccaattgacgaggaatctcaaccttgtccaataacaaaagttttaggttttattgttatctttccaatggcgttggtgtcactcgaatatgattagcgatctaggagttgcccaaa

SEQ ID NO: 12207 - DNA, 962 bp, Setaria italica
  Peptide Sequence Number=SeqID_78181
tgggggcgcaggtctcttggtgggcacgcagatctcacgggggcggggctccaccaaggaaggcggcactgccgccggccaccgccgctcccgtgcgaccaccttctcgacggcaaggccgcagatctgcggggaaggcgccaccggcaagcagcctgggagcaacggcaacggcgacgccccagccacgactctatggagttacttcgataaattgctgcgtccagctatggggctgctgtaagtcgtcttggtcgatttccttttccctctgcttccagccactgcggttgatgtctcccgctgctgtgcgtgcttgttgtgccatcagcctccagttgtttgcgtccatgctgatgtgctgacctgcgtcaactgcttgcacgttgggagggagaatcaaggtgtaggatagcgcaggaagatgtcttctcatcggttagagacctctagtactagtgagagatcaacaactatagccttgaagggctatggtgtgtgatgtctgtgggcatgggaggtacggtaggggctgtgccgcaggtgagatgggttgagaagacgctagtggtaaacatgcttggatcaacggctgagaaaagcgatgcacgagatctcacggtcgatattttcaaggcgagtgcccaagcttggtggcaggattcggtatgtagatatcagccctgtagctggggaaggcaacaaaggcatacagatatatagtttagaatggattcctatgaatttatttgctggaaaaacccaaatactgctcatgaaagcacttatgctcttgctcaatcacttcatacacgtgtggctccttttaagctatgacagattatctgttagataatctgaagtccttggctagagatcttaaagaagtatccttaagcatataacaataaagcatttgtctcactctaaagtaaaaaaaaaaaaaaaaaaaaacaaaaaaa

SEQ ID NO: 12208 - DNA, 401 bp, Setaria italica
  Peptide Sequence Number=SeqID_78182
tccccataatggttgagttggaacataccctgccctggataggatgggtaaaatgttggttgagaattctgcagcatagcacctgggtttgcaattgatggtgctgtttggggcaaaggagcagcagatggaacaataggcctcccagggaggcttgttggattagagaagattggagaaggttgtccaggtacagatggtctagcagttccaaatacctcaggccgaggtggcaatgacagatttgatggcatctgaatagggattgaagaacttccagaagcacttgcaattgttgaaggggaatttgatggcgggccagtaggcaactgcatagtatgggggttaacctctggcacacttggggcatctgatttcgaagtattaatgtccaagtttgt

SEQ ID NO: 12209 - DNA, 199 bp, Setaria italica
  Peptide Sequence Number=SeqID_78183
gaaaggttatcatgcataatcatttatgttacaactaaatgattggagtcaatacctgctcattgaatgcaggtgcatggagtagcggaactcccaaaatgcgaaaaaaatcatattctcttgaatcctcaaatttggcagtgccagccacagggttaaccttaatgcccgtgcgaagtctctccgggatattaataca

SEQ ID NO: 12210 - DNA, 319 bp, Setaria italica
  Peptide Sequence Number=SeqID_78184
caggcaaatgggctatatcagctggtaataactttcgctcctcatctttttcctctgtatggaccacatcatctgatacatgagaacttgttgaagtttccgacacaatggaagcaatatccttgccttcgaggtcctcaacattttcaatgttggcagatgccaattcttggcttggatcagtaatttcgtccaaaagttcttccatcactacatttgcttgcaccatcttttcagtataccactttttagcctgatgtcatatttgtagtcaggaacaattgaaaagaaacttcataacaattaagtaagttccatt

SEQ ID NO: 12211 - DNA, 413 bp, Setaria italica
  misc_feature (140)..(140): n is a, c, g, or t
  misc_feature (155)..(155): n is a, c, g, or t
  Peptide Sequence Number=SeqID_78185
tgttagcatggttctcgttgtattctgactttgcctgcctccacaaaggaaaaaccctccttcgggcaaattggtggagaagaaagtgccctcacttccgacttttaagatacctagaagcacatcagacgatggcttcncccttttcctttccntaaaatgcttcagttgtttgagctgtttcagagcatccctcacctcaggtggtgttacaagaaattctggtcctagtatccatttcttgaaaattgggtcgacaggcaatccatgtgatttctctacagtttgatcaccatcagacaggatgctataagcatcttcatccgaaatctgatcccagtatttcgcaaacgcgtccttgttccatctacgattcagagcagctttggaagttggcacatgagcttcaagta

SEQ ID NO: 12212 - DNA, 779 bp, Setaria italica
  Peptide Sequence Number=SeqID_78186
cgacatgagcttcaagatgtctttcttactagtagacaagacattacctacccaaacatttcgaacacttgtacactttctgattaatgtgtgccctggtggatgaaaagtcaccagctacaaatatttccttttcatcgaccatagttttccaagaagcaaaagggttcttcttgtgaagggcttcatcttctactaacatgtatacaataccattgtgcttacaaatggtattgaattcctcgttcaaatacaaaataccaatttgtccaggctcaagttgctcttttaatgagggaaaaacctgctcattgaatgcaggtgcatggagtagcggaactcccaaaatgcgaaaaaaatcatattctcttgaatcctcaaatttggcagtgccagccacagggttaaccttaatgcccgtgcgaagtctctcggtgatatcaaagtactcttgaacgatttgatgaatctcaggcgttggcagtacattgatcttatgccagttcaaaatttttctcgaaatatgcatttccatgaatttggccactgtaaacttgggttcacgggaatcaaaattgactttattgttcaaaaccaaccaattcgaaagagaagttagggcagaagccgccctgtcgttgcagaccaaaacttttgtagatccgcccatgaactccatctcccgtgccgtgtacctcatctttctgtttcaagactttaccacgagttcgacgaacggcgtgaggcgacacaagggcggaggagagctctgctgcgta

SEQ ID NO: 12213 - DNA, 1327 bp, Setaria italica
  Peptide Sequence Number=SeqID_78187
aagaacctaaccaaacaaaaaggaaaaaaacctaccttacgggacaaaattaggtaggaagaaagaatagtgccctcacttccgacttctaggacagctagaagcacatcagacgatggcttctgcctatcccccttccataaaaacgcttcagttgtttcagctgtttcagagcatccctcacctcaggtggtgttacaagaaattctggtccaagtatccagttctcgaaaattggcttgataggtgatccatgtgatttctctacagtttgatcaccatcgaacaggatgctacaagcatcttcatccgaaatctgatcccagtatttcgcaagcacatccttgttccatgaacgattcagagcagctttggaagttggcacatgagcttcaagatgtctttcataattaatttctgtgcagaattcctccaaacatttcgaacacttgtacactttctggttgatgtgtgccctggtgtatgaaaagtcaccagctacaaatatttctttttcatcaaccatagttttccaagaagcagaagggttcttcttgtgaagggcttcatcttctactaacatgtatacagtaccattgtgcttacaaatggtattgaattccccgttcaaatacaaaataccaatttgtccaggctcaagttgctcttgtaaagagggaaaaacctgctcattgaatgcaggtgcatggagtagtggaactcccaaaatgcgaaataaatcatattctcttgaatcctcaaatttggcagtgccagccacagggttaaccttaatgcccgtgcaaagtctcttagtgatatcaaagtactctacaacgattcgctgactctcaggcgttggcagtacattgttcttatgccagttcaaaatttttcccgaaataagcctttccatgaattgggccactgtaaacttgggttcacgggaatcaaaattggcttcattgttcaaaaccaaccaattcgaaagagaagttagggcagaagccgccctgtcgttgcagaccaaaacttttgtagatccgcccatgaactccatctcccgtgccgtgtacctcatctttctgtttcaagactttaccacgagttcgacgaacggcgtgaggcgacacaagggcggaggagagctctgctgcgtggaggaggtcgacgtcctcgccgcgtcacgggcgtcgccggtagagacagcccgtggtcgtcgccggtagctcggcgcgtctacgggtccacacccgccgcacagagatgtcgagtcgtcggcgacctaggccatctcagatcgtcgggttacgcggcgggcggcggg

SEQ ID NO: 12214 - DNA, 1635 bp, Setaria italica
  Peptide Sequence Number=SeqID_78188
actgaagattctcagggatcttagttccacctcaaaagaccgaagtaactaaaatggcctctttgcgtgttcaatcacatttgaagtcacgcagcaaaattatagggacaattctcggggatgccttgacgggtggggtgggtgttagttccatctcaaaagcctgacgggtggggtgggtgttagttccatctcaaaagcttgacgggtggggtggggtggggccatctcaggagctccgggagcaggaagcaactgcagatgcctcaaattccttcattttcctcagtcccatcttcatcgatttcctcagttgcatcatcggatgttttgtatgcattccaagtgctgacaagcctttttggtttttcaaacacatataacacatgcagaaccagctttgtaataaatttgccaaggtcatatgcaaccataatatctagtataacaggatcttctattgattgaactccatcgatctgtgtgtacttcaagccacgattaatgaaattcctcacaaatctgaggagatcccagtaattatcgttgtatgggtgtgaaagactttggtcatagtggaacaccttgctatatggcatggtatcacgtatttttgtccacccaatgcaatctaagcgctgaaggggacgataatcaaaatctgcattctgtctacggatatcgtcacacaatttgaagagcctttcgagcaaatttgacgtggacgctggtggcagaaaagccatatggtcagcaagaaacttctggaaaatctcaaatttttcagactcaagctcagggagagacatcacatcagaatgaaattcatcaaaataggctggacccttgatgccttcaatcttgtaatacgggcgcaagaggactatgaacttctgaaggtcagcaacaattccatctttagttgcatttactggcatcttgtcaatgattaatgttgcaccatccccacgaacccgaatgtcaagtatattccattccccatcccagcagtggccagccttatgagctttcaagatgtagttcagcagacgtttagcaattttcctcccagttcgtgtcaaagctgtgactatatccttattgaaaagtgtgaacaacctaaccaatctttttcttgatacgaagtttgggaaatattcttcacttggatcagtacattccgccaaaagttctttcatcactacatttgcttgcaccgtcttttcagtataccactttttagccaacacttcttcaactctcaagctaaaatatgttagcatggttctcgttgtattctgacttttgcctgcctccacaaaggaaaaccctccttcgggcaaattggtggagaagaaagtgccctcacttccgacttttaagatacctagaagcacatcagacgatggcttctcccttttcctttccataaaatgcttcagttgtttgagctgtttcagagcatccctcacctcaggtggtgttacaagaaattctggtcctagtatccatttcttgaaaattgggtcgacaggcaatccatgtgatttctagaaacattttttttccatgtcaagccaaccacaaaaattatagaagctcgataaaattgtacaaagaattgtcaatgctcac

SEQ ID NO: 12215 - DNA, 1840 bp, Setaria italica
  Peptide Sequence Number=SeqID_78189
gtgttcaatcacatttgaagtcacgcagcaaaattatagggacaattctcggggatgccttgacgggtggggtgggtgttagttccatctcaaaagcctgacgggtggggtgggtgttagttccatctcaaaagcctgacgggtggggtggggtgggggcatctcaggagctccgggagcaggaagcaactgcagatgcctcaaattccttcattttcctcagtcccatcttcatcgatttcctcagttgcatcatcggatgttttgtatgcattccaagtgctgacaagcctttttggtttttcaaacacatataacacatgcagaaccagctttgtaataaatttgccaaggtcatatgcaaccataatatctagtataacaggatcttctattgattgaactccatcgatctgtgtgaattgcaagccatgattactgaaattcctcacaaatctgaggagatcccagtaattatctttgtatggttctacaatagttttgtcatagtggaacaccttgtgatatggcatgatatcacctatttttgtccacccaaggcaatctaagcgctgaaggggatgatatgtaaaatgtccattctgtctacggacgtcatcacacaatttgaagagcctttcaagcaaatttgacgtggacgctggtggcagaaaagccatatggtcagcaagaaacttctggaaaatctcaaatttttcagacttaagctcagggagagacatcacatcagaatgaaattcgtcaaaataggctggacccttgatgccttcaatcttgtaatacgggcacaagaggactatgaacttctgaaggtcagcaacaattccatctttagttgcatttactggcatcttgtcaatgattaatgttgcaccatccccacgaacccgaatgtcaagtatattccattccccattccagcagtggccagccttatgagctttcaatatgtagttcagcaaacgtttagcaattttcctcccagttcgtgtcaaagctgtaactacatccttattgaaaagagtgaacaacctaaccaatgtttttctcgatacgaagtttgggaaatattcttcaccaagaagctcaggcaaatgggctatatcagctggtaataactttcgctcctcatctttttcctctgtatggaccacatcacctgatacatgagaacttgttgaagtttccgacacaatggaagcaatatccttgccttcgaggtcctcaacattttcaatgctggcagatgccaattcttggcttggatcagtatattgcgccaaaagttcttccatcactagatttgcttgcaccgtcttttcagtataccactttttagccaacacttcttcaactctcaagctaaaatatgttagcatggttctcgttgtattctgacttttgcctgcctccacaaaggaaaaacctccttcgggcaaattggtggagaagatagtgccctcacttccgacttctaggacagctagaagcacatcagacgatggcttctgcctatccccttccataaaacgcttcagttgtttcagctgtttcagagcatccctcacctcaggtggtgttacaagaaattctggtccaagtatccagttctcgaaaattggcttgataggtgatccatgtgatttctctacagtttgatcaccatcgaacaggatgctacaagcatcttcatccgaaatctgatcccagtatttcgcaagcacatccttgttccatgaacgattctacagaatattgacaaagattcaatgaaacaatataaagagctcgtgtgttttgttgggaggaggaggcgggg

SEQ ID NO: 12216 - DNA, 1953 bp, Setaria italica
  Peptide Sequence Number=SeqID_78190
cgcagcaaaattatagggacaattctcggggatggcttgacaggtggggtgggtgttagttccatctcaaaagcttgacgggtgggggggatgttagttccatctcaaaagctttgacgagtggggtggggtgggggcatctcaggagctccgggaacaggaagcaactgtagatccctcaaattccttcattttcctcagtcccatcttcatcgatttcctcagttgcatcatcggatgttttgtatgcattccaagtgctgacaagcctttctggtttttcaaacacatataacacatgcagaaccagctttgtaataaatctgccaaggtcatatgcaaccataatatctagtataacaggatcttcgattgattgaactccatcgatctgtgtgtatttcaagccatgattactgaaattcctcacaaatctgaggagatcccagtaatgatctttgtatgtttctatactactagaagcttcgtcatagtggaacaccttgttatatggcatgatagcacctatttttgtccacccaacgcgatctaagcgccgaaggggacgatattcaaaatctgcattctgtctacgggcgtcatcacacaatctgaagagcctttcaagcaaatttgacgtggacgctggtggcagaaaagccatatggtcagcaagaaacttctggaaaatctcaaatttttcagactcaagctcagggagagacatcacatcagaatgaaattcgtcaaaataggctggacccttgatgccttcaatcttgtaatacgggcgcaagaggactatgaacttctgaaggtcagcaacaattccatctttagttgcatttactgccatcttgtcaatgattaatgttgcaccatccccacgaacccgaatgtcaagtatactccattccccattccagcagtggccagccttatgaactttcaatatgtagttcagcaaacgtttagcaattttcctcccagttcgtgtcaaagctgtaactatatccttattgaaaagagtgaacaacctaaccaatcttttcctcgatacgaagtttgggaaatattcttcaccaagaagctcaggcaaatgggctatatcagctggtaataactttcgctcctcatctttttcctctgtatggaccacatcatctgatacatgagaacttgttgaagtttccgacacaatggaagcaatatccttgccttcgaggtcctcaacattttcaatgttggcagatgccaattcttggcttggatcagtaatttcgtccaaaagttcttccatcactacatttgcttgcaccatcttttcagtataccactttttagccaacacttcttcaactctcaagctaaaatatgttagcatggttctcgttgtattctgacttttgcctgcctccacaaacgaaaaccctccttcgggcaaattggtggagaagaaagtgccctcacttccgacttttaagatacctagaagcacatcagacgatggcttctcccttttcatttccatcaaatgcttcagttgtttcagctgtttcagagcatccctcacctcaggtggtgttacaagaaattctggtcctagtatccatttcttgaaaattgggtcgacaggcaatccatgtgatttctctacagtttgatcaccatcagacaggatgctataagcatcttcatccgaaatctgatcccagtatttcgcaaatgcgtccttgttccatgaacgattcagagcagctttggaagttggcacatgagcttcaagatgtctttcataattaatttctgtgcagaattcctccaaacatttcgaacacttgtacactttctggttgatgtgtgccctggtgtatgaaaagtcaccagctacaaatatttctttttcatcgaccatagttttccaagaagcagaagggttcttcttgtgaaggg

SEQ ID NO: 12217 - DNA, 423 bp, Setaria italica
  Peptide Sequence Number=SeqID_78191
tcccatccgtcgacattgtaaatgcttctattctccgagtgtcatctccaaaacctgctttaacagcaactctccggactgcatcagctgctcccaacaaagcatttcgtgatctctgcaagaaaccaacaggactgcgagctttctctttccttggagaggagaataaggtttgctttgtttcatagctacatggatcctgagcagataagatgtcgaaacgggtatcaacttggccgtcaatatttaccacttttagaagctccttagtgcgtgaatccgcttttcttctctttgtgaaacaagtgacttctcaatcgcttctccataccatactttgattactcccccttcagacccagaccacaaatcaccgtagggagagacggccaacgcgaagaccggcccacggtgcgcctccca

SEQ ID NO: 12218 - DNA, 359 bp, Setaria italica
  Peptide Sequence Number=SeqID_78192
caaactaagccgggtcttagatttgtctccatggtcctaaactgttcgatgaaatgccaccaaccaatgtgaatattatgtaatcagctttgccttttgtatccaaatttctaaatgagagatcaatttgattacttttatatgtgttgaattatttgagagagtagtaacctttgacagggagacaatccaaatttcctgattcattggcttctgagtcacaggttcttttacctgagatattgcacctatggttgttatatttaactgatgtttacatgaagtccatgtagaatttgacttttttttcttcaacaaagggcaacgttacattatattaacttgagagctgagactgc

SEQ ID NO: 12219 - DNA, 697 bp, Setaria italica
  Peptide Sequence Number=SeqID_78193
acttctcaaggatttctcctgtaagacaagtttgtggtccacgaccatcatgtgcttttattactgctgtcagggcctgtgcagcaatgccatatccactaccccagtcgcccaaaacaggcccggcgccagctgctcttgccacttttccatcttctgtgaccccataagcaatgcatccagtgcccgcaatcaacacgcagccatgcagccttcccattgtcccactagacagagctgccacagcatcattttccacgtaaaatttggtattgcctgggaacagatcccggatccattccagcatcctctgctgatctgatgggtggttaactccagatacagctaaacaaactgcacggacagctgaacgatctgtgttggccattgcgagagcctgtgtcatgacctgctctagagtttccaacgcagcgctttctccgacggagttgcggttggagcagccggcgacggcgcgggcgaccacggggacggcggcgggggactccggcgtcggcattgctgccggcaggcagacgcagacggtgttggtggtgccgccgtccacgcccaggatgacgccgtcctccgccggcgagtcgccgttctcgtagccgcccatctcgcgcttggctctcggccccccttcctagcttctcgggcggcgaggtagacggggagagggagtcaaactctg

SEQ ID NO: 12220 - DNA, 748 bp, Setaria italica
  Peptide Sequence Number=SeqID_78194
ccagattaaaaaacacattcaggtatacggagtatgctttcctactgtgagtcccaacactctagtagcatggttagcaacttaacaatttagagatctagcaacatgcatgccatgtccctggcccataaaccttattcagaatgtaacatcagcttgtgtcatgcaccacatctggaaatgggaacagaatctaagctgaattcttaatactctccaagtctcagctccaaaaagtagtgtacaatacctttggaccattaaaaagaaccctacaagagcatcttaagtcttctgctcacttataacagcaaactacatcacttgataaatgctcatttacaacgcaataactaaagagcgttttgcagggaaaataccagttcagtctttgcttaattaataagacataatgacatccatttgtatggatgttacttgatgtctcaacaccagagaaataatatctacacttacgatgcaattactccattagaataatcaaaatagagctggtggacaaaattaaaaccaagtgatgttccatgatcaacataaacattaccttcaccacacaatctaagacgccgaacaacagctataacagtatcagctaactcttgcactgaatcatgcaaaattttgttagctacttcatcaccatcttcagcagaagataccactacaggtacaagtgctgcgatacgagcccaagacggatctgcatatgtccacccaatgatttcat

SEQ ID NO: 12221 - DNA, 277 bp, Setaria italica
  Peptide Sequence Number=SeqID_78195
ttaggaaataaagacgtaaatagatacagattcttttcacattccgcaaatcttttgtatcatctgactatatgttaaccacctccattttcttccagctgtcagagcgtttaggtagtggcttgtccagttggggttttacgttttacagcaatatacaaggctcagttccctaatgtaggcgctctaaaacacatcgaacatgttgcgtatgtttcataaagtatcagtttttacttggcttgatgtaaataaaaaaaaaaaaaaaaacaaaaaa

SEQ ID NO: 12222 - DNA, 295 bp, Setaria italica
  Peptide Sequence Number=SeqID_78196
ccctcctcctctcaccccttcaaaccaaaacccaaacaccaccgcctccgccactcgtcactgcagcagagagccgagaggagagccgcattgccaaaccaggcgaagccgcagcgccgcacgcgcccgccccacaccgcgcacgcgacggccggaccgagccggggaggcgccaccgccgccacctaccccagcctacgcgctttggcttggcgctagcgctcgcaagtagttgcgggctagcagcgggggccgagattccaaagggaaaaggccccgggagcaaaaggggggc

SEQ ID NO: 12223 - DNA, 290 bp, Setaria italica
  Peptide Sequence Number=SeqID_78197
ggggccacggaggtggcggcggcgcctcgggccggcggatccggtgcccccggggacggatctgcgcggcgcggcggtgggcaggcgaccgtcctggcctcaagtccggcgtctcggtgggcctaggatgtggcggcagcggttcctctgcggcgacagcgggggggagggtgttgggcgcggggcgcggtggcactccgccccctggacggtggtgctggaactccaccgcgggttgcaaaagtgaccggcgcaagcagccaccacccgttcgcgtttggcgggagcga

SEQ ID NO: 12224 - DNA, 876 bp, Setaria italica
  Peptide Sequence Number=SeqID_78198
tagctgcaggaatgttgcactctgcttgcattgatgaaaagtagtttgttcatatttgggcagaagactgagaagtgatttggaagatcaaatgaagcattcagaccagttattgttgaagagataccgttttcagaagaagttgcttgtggaggttaccatacttgtgttgtagcagatagtggtgatctgtattcttggggttcaaatgaaaatggatgccttggtctgggaggtacagacatggttcgctctccagaaattttgaaaagctcactatttaagcttcctgtgtctaaggtgtcttgtggttggaagcacactgctgtaatttcaggtgatgacatctacacctggggttggggaggcgctaatggtacttttttcgaagagggccattcttctggtggacaactggggcatggaaatgacgtagattattttgaacctatgatggtgccgtttggcaagaatgcaagagcagtccatgtatcatgtggcttcaatcatactggtgcaatttatgagtactgcgaggactgactgacctgccatctgcggaatggcatgtttcggactaattatccaatcatactggcatactgcacaggtgaacagataaacagcagaaaaaagctaaggtattggatctgcatctatgttaagagagatatagaacagaatgataacaccccttgagtgagggggatgtaaattaaacagaataagagataagccggatgccttttgtgatgcatcagggttacaggcagtgtatagtgttcattcatttatttggtggatatgtattattttgccggctaataagaaatccatcgcctgtgatctgaccaggctggtgttgtacaaaaaaaa

SEQ ID NO: 12225 - DNA, 738 bp, Setaria italica
  Peptide Sequence Number=SeqID_78199
tacatgttcgcaaaaatcacatatttgcgagtgttaaaaaatgattcttttgtcccgacaccatatttacatttacaaattaaatccaacaaaataaatgttgtacatgtatttctcgctgtacgaatgactccggtggattggaagttgttttttttttcgtgctgactcgaccgggtcgtgcgggggttggacggttggtaatccctttgtactacgaggcggagcccgtgcagcgcggcgtggagcaaccgagggaggccgggtcctgccgcgcggtttaccagtctagcctgatgtggaccaccctggctgcctgcgcaaagcatgtgaggccgggtcaggccggccaggtccggccgcggcgtgcgtgaccgtgacgcctcatgccaaaagccaacaagttgatgcggtggcggacgggaaaggcgtggcgatggcgaaagggcatcttctcggacgcaagtggacggcagcgcggggaagaaggaaagtggggcggtggtagctggcagcacgctattgactgacgcggacggcagcgcattcatgatggtccttgtcgggcgtgccgggtttgatgtgcgagccagcctggccgatgcggttggtcttgtttacttgagttacaaaattaacaatttgtcataaatgcgacactgtagtgtttcatttgtatttgtgaattattgtccaaatattgactaattaagctcaaaagattcgtctcgtaaaaaa

SEQ ID NO: 12226 - DNA, 1014 bp, Setaria italica
  Peptide Sequence Number=SeqID_78200
ttttgagttgtagtcgactgccatatttctgaatccgaacgcacacagcgtgatttcacaatctattactggcctgacccacatctcagaccagggcttcccaagaacaacatgctggattggtcctggaagctgcatcctgaactcctgaagcagctgccttcatctttctacttcttgctagttctagatgtgcctctcattattcaatcttgcatatattacacacaggagcaacatgagacgttgctactagaacacaatcaaaaggttgctgcagctcctgcaagcttcctgagtagcctggccgcctcaagcatcgcaaccccaacctcctccttgctgctgcttgcgacatcgtcattgcccttcccttgttctgcgtcgtcgtcgtcgtctggtgggaagcagtgcgcgggcgcctgccactgcgcgtcctccagcgccacgccgggctcgaagcgaatcacgtactgcttgatcccgtcgtcgtcgaggaagtcccaccgcacgggccggcccgtggcggcctcctcgtagtagacgatcaacccggccttcccccagacgtggcagtcgatgccgccggagacggcgcgccccgcgtactcggcgccgccgccggagagccaccagggcggcagcacgccgacggggaaccgcacgacgcggcaggtggaggagtcgaagtagaaggcggtgccgttgttccactccacgtcgtagagcgggtcggcggagagctggtggcggaccaggttgaggttccgccgccgcggccagtcgtagtagaggtccgtgatgcggagcggcgggcccgtggaggccgatgagtagttggtcaggttcgtaaacagcaccgcgtggaaccgctccggccacggcgtcggcgaagggagaggcaggccggatgcatcctctgccaccgtggcggcggcggcgaacaggaggaggaggaggaggagcggcggcgggggcagcgggtgggcgccatgtcgcgtcgtcgtagtctta

SEQ ID NO: 12227 - DNA, 680 bp, Setaria italica
  Peptide Sequence Number=SeqID_78201
ctacccgatccccgcccccgagtacgaagacgacggcggcgctccggcgttttcaggcggtgagaccgcgcccttgcggtcttccctggttcttctgtttgcaacctctgaagattgttgttggagtgaaattaatctaggtgctggtgtgaatgacaagtacagcatgctttgtgattgtgagtaagaatgacatacctatctatgaggcagaagttggatccacaccgaaaaaaggaagatctgtcttatcaccatcaatttatcctgcatgctgcgttagatgttgttcaggacctagcatggaccacaaatgcaatgttcctgaagtcagttgatagattcaatgaccttgtggtgtctgtttatgtaactgcaggtcatatccttcaaaaagtgacgatgacagtccttttgtttaattatatgacattgactatatatcattatcttcgtttttgaaagtttgatcataatggtgttattgtttcttaactgcaagtatgacacataccagattcatgttgcttcatgactcacgtagtgaagatggaataaaaagctttttccaagaggtccatgaactttacatcaagatattcctcaacccactttacctgcctggctctcgcatcacatcctctcattttgataccaaggtctagggtcctagggtccct

SEQ ID NO: 12228 - DNA, 1117 bp, Setaria italica
  misc_feature (1074)..(1117): n is a, c, g, or t
  Peptide Sequence Number=SeqID_78202
caaaacagcttctcaaattaacgcacgaaattacccgccactaccatcgagcaaaaccatcccgcagcgcccctcccctcgatccgcagcgctccgtctcgcgtctccgtcccgagcaggcgactccaggggcggctagggtttggtccccgacggccggcttcctccgcccgccggccgaaggtccctggagcgccgtcctcctccacacgagggaagaaggccaggacccggagggccggccgtcgcagcggcctcctgaagtaggtggccgaaggtcgtcgtcgcccaggccctcaaatccgacgcccacagaccatccccaaggttcttttgtttgcgacctcagaagattgttgttggggcgaaattaatctaggtgctggtgggaatggcaagtacagcatgctttgtcattgtcagtaagaatgacataccgatctatgaggcagaagttggatccgcaccgaaaaaagaagatctgtcttatcaccatcaatttatcctgcatgctgcgttagatgttgttcaggacctagcatggaccacaaatgcaatgttcctgaagtcagttgatagattcaatgaccttgtggtgtctgtttatgtaactgcaggtcataccagattcatgttgcttcatgactcacgtagtgaagatggaataaaaagctttttccaagaggtccatgaactttacatcaagatattcctcaacccgctttacctgcctggctctcgcatcacatcttctcattttgataccaaggtcagggccctcgcaaggaagtacctgtagtatgttggcatgggtgttttataagcttagcatcataatgtagaagcaggcagcagaagaggcaaaagttcattggtctggcgccatttttccgtgccctcgtagctcgactctttgagaaatgctgaaatgggatgttattgacttatgcacatcaaatccgagcttcctgtaatttttcttggctttggcttgtgttgtggcctatgaatcatttttcagaaccaaatgacctatgatttgtaacttttgaagaatttaactacgattacggnnnnnnnnnnnnnnnnnnnnnnnnnnnnnnnnnnnnnnnnnnnn

SEQ ID NO: 12229 - DNA, 1213 bp, Setaria italica
  misc_feature (1)..(38): n is a, c, g, or t
  Peptide Sequence Number=SeqID_78203
nnnnnnnnnnnnnnnnnnnnnnnnnnnnnnnnnnnnnnaatttcccaatccctgccttgcttgtggcacatttcatataataataatacactctataacaaatctacaattaacaccatgcatatgcatcaggagatggtctttgatgggccatggctatagtataatactgtactgatactactcttatcttagtactaattaattaaacattagcagtgtacttcctggcagatcaagcttcctaacccttcctcttcctctcttctcttctgtacacctccacatccaaacgcatagcaatgtggagccgcaacgcgtttcgcctagagacccatggatcaatgtctctagatgttgttgccatatgtttatcttcaagccaagggtcctccactgttgctgtttgaggagcctatatgatgatagatggtgcttgcagaatgatttgatccggggtgctagtgagagccgtccttggtggtgaccctgatgggcatgcctcgcttcagccgcacggttgggaagttgacgatgtggtcctcctcggccacccacctgaagctggtgaccaagtgatggagaaagatggaagcttccagcctggccagatccaggcccgggcacagcctctgcccaccaccaaaaggagtgaagctgctggtgctcgtgtccttctccttccacctccatggattgaacctgtagggctcatcgtagagcttgtcatcgaggtggaccgatcggaagtacacgaacacgcaccaacctttgggaatgaggtggcccttcacctcgacatcccgtaccgccttgcgcatgatcccattgatgatgttgcccatccgcagcgtctccgttatcacatgttgtgtgaatgacaatgacatgtagtctgtccactgtaaggcctcgcccatgtcggtttttcgcctcttcagctgcatgttctcctcctccagttgctgcagagccagagggcactcgctgagatacttgatggcgagcgtgatgagcaccggcacagagtcctcggcggggatcatcaggtcgatcatgttgtcggatatcagctcgtcggtgagctcgtcgctgccgccgccgcttatgagcacgtcgatggcgtcgcgcggcgcccgcggcccctcgccgccgtcggggacggccctccgccgcctcctcttctcctgtatgatgccctgtatcagcttcg

SEQ ID NO: 12230 - DNA, 765 bp, Setaria italica
  misc_feature (732)..(765): n is a, c, g, or t
  Peptide Sequence Number=SeqID_78204
ggtgcttgtgctgccatggtcatcgaaggctccaagaccagccatgccaagtccagcggatgcggttctggctgcggcagcggttgcggaggtggcggctgcggtgcgttattcaactccagcactgcggccggccaggccaaatccggcggctgtggctctggctgtggcagcggtggctgcggcgccatggtcactgaaggctccaagagcagccaggccaagtccggaggctgtggctccggctgtggtggtggatgtggcaatggcatcatgttcaacgcgagcaccaaggccggcggcgagggcctctccatgtcaggcggctgcggttcaggatgtggtggaggttgtggcggcggcggttgcggtgccttgttcaatgcatgatccaaagctgctggccggagattgagcctgccgggcggtggtgctcggtggttgggtggctagccgccggcgatggctttggtagctcttccgtcggctcatatccggagtgtgaactcccaaaggatggataacgataggcagcatcatggcatatatgtcggtgtgcgttgagaattgaggtgtgtcttgagcttgtaagataaataatcatgtcgtgtggataataaaaacaatggatcggctgccactcggttgccgcggtgtttgtgcgaacgaaacaagctcggccttgtttagttacaccccaaattcaactttggcactatgcaaaaaaaaaannnnnnnnnnnnnnnnnnnnnnnnnnnnnnnnnn

SEQ ID NO: 12231 - DNA, 430 bp, Setaria italica
  Peptide Sequence Number=SeqID_78205
tcccgtaacctccagacccttcctcctcttctatgacaaaacccttgaagctaggaagttgtttggaactacatggctcttttgagcctttgctgcaaagcggtccttatcttctttgggcagtgcatttttcttggtcttctcattttgcttcgcaaccattctatcctgcccatttttagatacattggcctccacctcattccagggctgctttccattatttagatatttgctttctctattttcagcaataatgttcaggtccctcatgtccatacagtcataccttgtagcttcctgcggcaatgcttcaggttcactatttctgttcatttgagatgctataggtgcagccttggtgtccataggaggttggaacaaaatttgtgttgtcttatccttacaaacttctgcgcatgcattggca

SEQ ID NO: 12232 - DNA, 513 bp, Setaria italica
  Peptide Sequence Number=SeqID_78206
tcaggcggagcggaggccgataaaataacggaattccaccatggtggccatggcggtagcggtggcgttctggtggtggggttcgtcgtcggcgtcctctccctggccatcgccgaggggcagcactcctctgggccatccgcaccctcaccaccaccaccacccgcccctccaattcctcctccaattccagcgacgacacatctccggctccgcctcctcctcctctcggggacctcaagcgacagggtttcctgtggattctagagcaagaaaagatgcccgccaaagccagccaccacccatcaaatgatgcccaaagccacggggggatcaaagacaagaagaccgtcgtggaggttttccctgtgaagatgttggctaaacttgaaggccactcgctcaccttgtctgcacctgatgatgcttctcagcagaccaccaccatccacctgctggattctacaattgttgctgtctctgcatcaaatctaccctcgcgtaaatgggcca

SEQ ID NO: 12233 - DNA, 355 bp, Setaria italica
  Peptide Sequence Number=SeqID_78207
gatctcaagagcggcaaggccattgctgtcaaacggctttacagtcagtataaccacagcctccgtgagtttgagacagaactggagacgattggtagcattcgacacaggaatctcgtcagccttcatggcttctcgctaaaattctcagttaacctcataatttcttcataggtatgggaagccatgtccatttgaaggactactagctttggtggtccttgcactggcttgtcagatcctttctcaggtggcagtggcttgcttgcattatcttaggcttcatcatactactctgcattatgaagcctaagataatgcaagcaacatttctcggacagcggttgctcagagt

SEQ ID NO: 12234 - DNA, 2838 bp, Setaria italica
  Peptide Sequence Number=SeqID_78208
ctctgtcacctgatatgtgccaactgactggcctgtggtactttgatgtaaggggaaacaatctcacaggaaccattccagagggcatagggaactgtactagctttgagattctggatatttcatacaaccaaatctctggagaaataccttacaacataggataccttcaagtagccacactgtcacttcaaggaaatagactgactggaagaattccagaagtgattggcctcatgcaggctcttgctgtcctagacctgagcgagaatgacctggtagggccgattcctcctatacttggcaacctatcctacactggcaaactctatttacatggcaacaaacttactgggcacataccaccagaactggggaacatgagtaaactcagctacctgcagctgaatgataatgaactaactggcaccattccagctgagcttggcaagctcacagaattatttgagttaaatcttgccaacaacaatcttgagggtcatattcctgcaaacatcagttcctgcagtgcactgaacaaattcaatgtgtatggcaatagactgaatggctctatccctggtggtttccagaagttggagagcttgacatacttgaacctttcttcaaacaatttaaaaggccagattccctctgaacttggtcacatagtcaacttggacacactggatctgtcctacaatgatttttctggaccagttcctcccactatcggtgatctcgagcatcttcttgaattgaatttgagtaaaaaccatcttattggatctgtgccagctgaatttggaaacttgagaagcgtccaagtaatcgacatatccagcaacaacttgtccggttatctccctgaagaacttggacagctgcagaaccttgatagcttgattcttaacaacaacaatttagtgggggagatccctgctcagctggctaactgcttcagcttaattaccttgaatttgtcatacaacaacttttctggacacgtcccatcggcaaagaacttctcaaaatttccaatggatagctttgaaggtaatcctatgctctatgtgtactgccaagactccagctgtggacattctcatggaacaaaagtcaacatttctcggacagcggttgcttgcattatcttaggcttcatcatactactctgcattatgctgctggcaatctacaaaacaaacaagccactgccacctgagaaaggatctgacaagccagtgcaaggaccaccaaagctagtagtccttcaaatggacatggcttcccatacctatgaagaaattatgaggttaactgagaattttagcgagaaatacatcattggttatggcgcatcaagtactgtgtacaaatgtgatctcaagagcggcaaggccattgctgtcaaacggctttacagtcagtataaccacagcctccgtgagtttgagacagaactggagacgattggtagcattcgacacaggaatctcgtcagccttcatggcttctcactctctcctcatggaaacctgctcttctacgattacatggaaaatggttccctgtgggaccttcttcatggtccatcaaagaaggtgaagcttgattgggacacaaggctgaagatcgcggtgggtgctgcgcaaggactggcctatcttcaccatgactgcaaccctcgcatagtccacagggatgtcaagtcctcaaacatcctgctcgacgagaactttgaagcgcacctctctgatttcggcatcgccaaatgtgtcccagctgccaagtcccatgcctccacctacgtgctaggaaccatcggctacattgatccagagtacgcccggacgtcaaggctgaatgagaaatctgatgtctacagctttggcatcgtccttctggagctgctcactgggaaaaaggccgtcgacaatgaatccaatttgcatcaattgatacttgcaaaggctgatgacaacacggtgatggaggctgtggactcggaggtgtcagtgacgtgcacggacatgaacctggtccggaaggccttccagctcgccctgctgtgcaccaagcggcacccggccgaccgtccgaccatgcacgaggtggcgagggtgctgctttcccttctgccggcacccgccgtgaagcctcccacgacgaagggggcggccggcgactacacccgcttcctggcgacgacgacggccgacatgaagcacgacgtgtccgtcgacatcggcgacaacagctcctcggacgagcagtggttcgtgcggttcggcgaggtcatatccaagcacacaatgtcatgatccccccttctccctccctctctctctaactccagagttcccaaatttttctcccaagtagagatccaagtaagaaggtagcaaaagcatagtagcacagtgcaggaaggaaataggtgtaggattcgcagtagatgatgatgtccattgttcttcttgatgttgttttggaaggagatgatgtggtgctggtagggaagggattgccgtggtggttcagggtgtaatcacgacacgagccgagggggggtatggatctgtcagacagaggtgtcccgtgagcgccatgaatccgaggcattcatgtgctgggggcgattcagagctaggccatggagctttctcggatcctgggaaaacgcattgaattgaaccatgtatcctgcattggacaagccgggctgttgtaaatgaaatgcatcaccttttttgactggtatcagccgctgtagtcgaggtcgctgtcgtccgccctcggcgcggcgagcttctggggcaggcagcccagacgggg

SEQ ID NO: 12235 - DNA, 549 bp, Setaria italica
  Peptide Sequence Number=SeqID_78209
ggtcggtcggtcgtcggtcgggtagttggtaggtagttcctatcgggcggcggcgggagcgggatgagcgcgggctggcggcggggcgggtgtgggagttcgagcgggatctggtggcgggggcggtgatggggggcggcggtgcacacggtggtggcgccgatcgagcgcgtcaagctgctgctgcagacgcaggacggcaacgccgcgctgctgggcagggcgcgcaggttccgggggttcgccgactgcgtcgcgcgcaccgtccgggacgagggggtgctctcgctctggcgcggcaacggcaccgccgtcatccggtactacccctccgtcgccctcaacttctcgctcaaggatctgtacaggagcatattgaaagatgccggaacctcagcagacaataagtttgcttctatcgctcttaccaatttctttgctggggctgctgccggatgtactaccctggtcctcatatatccgctcgatattgctcatactcgtcttgctgcggatattggccggacagacacccgccagttcagaggc

SEQ ID NO: 12236 - DNA, 2054 bp, Setaria italica
  misc_feature (2035)..(2054): n is a, c, g, or t
  Peptide Sequence Number=SeqID_78210
ttagacaaacaagaatgaagaatttggtagggaatttcgctttctagagataaatgtttaccatgccaccacaaatggcaaaagaatgagaataaagggatcatgtgtcttgtcatagagagcactagatactagcaagtacccctgaataatgaatggtgttttgtgtgcatatattcttgcacttttagactaattgtatatgtgaacttggagtaatcatttttttctctcaaggatccagaaccatgagcagacttttgactattgattcttggttggtattatgctaatattgttatgttgtcataccttgttgggctgacctacaatgcatgcttggttctggattccatcaaaattgtttaactgataaaaaaagatctagggatctactcgtgggttcattggatattgatttgttgttgtttctcttgacatatattttaacggtgtcaaattataaactaatcgtgcataatagtttgttacaaaagcttggttgctagagattagaactgtcgaacagttttcacacaagatgacaaaaggcaatgtttaaagaacagttattgtcttgaatgaataatagagtcccggatgtagtttctggagcatctatgggcatggtattgttgacactggttttggaagatagcagacattgtagattcataatgtcatctttctgtacttattacaatttgtaacgtgtttttggaaggtgtgccatgttgcgatgcgaacactaattgattttgtgagcattaccgacaatgaagtgaagtccatagtatacatactatcagtgttttaccaagtctgtaaccaaaccaatagtttttctttaccaatacataaatgcatctgctgttctttaccttcaaaagttttgaaaagccttcagttagaacttggaagttaatgtggttaggaccctaaatgatgcgccatatccaggcaaaataactaagtctcagagaccagctgaacttgcactgtataggggcattgcctctcataggcctgtctttaagatatttttgcatcaaccttttgcagctagcatgctacatgttccttgtacatgagtaccaacgttcaattttcttaattaaccaatagtatgagtaaaactagaaggatattctcagaacttagatggttatttctgatccattagcattattcttgcaggatctgtacaggagcatattgaaagatgccggaacctcagcagacaataagtttgcttctatcgctcttaccaatttctttgctggggctgctgccggatgtactaccctggtcctcatatatccgctcgatattgctcatactcgtcttgctgcggatattggccggacagacacccgccagttcagaggcattcgccatttcatccaaaccgtatacaagaaaaatggcatcagaggcatctacaggggattaccagcatcgctccatgggatggtcgtccaccggggcctgtactttggcggctttgacactgccaaggatgttctggtgcctctggagtcccccttgtggcagcgctgggttgcagcgcaggccgtaacgtccatggcagggcttatctcctacccactggacaccgtgcggcggaggatgatgatgcagtcggggatggaggtacagatgtacagcagcaccctcgactgctggaggaagatatacaggctggagagtgttaggtcgttctaccgcggggcgctgtctaacatgtttaggagcactggtgcggctgccatactcgttttatatgatgaggtcaagaagttcatggataggggtaggttgtaacagctatagaggggttctttacggatttttggattcaacatggggggatgggattaggccaaaggtacagggagcagcagctcgagcattttgtaattggatgctggtttcctacttcttactaaccagtttgatgcaactgagcctcatggttctaaacaatgtagcttgttcatttcaccttgtggtagatcttcttctcttttattannnnnnnnnnnnnnnnnnnn

SEQ ID NO: 12237 - DNA, 320 bp, Setaria italica
  Peptide Sequence Number=SeqID_78211
aggattctctgcaaccttcaggccaacatcataaggcaaaggtgcaggtggtgcctcggtaagtgtcaagagtggatgtatcaagatttgtgtcaactgcaactatagcagaagttggagatgctccatcaaaggctgaagacaagggttcatgctcctcaggattttgtcgatgctggataaggcaaaggaaagttaatttaacagaatgaaagttaggtgcaaacacaaagctagtgctgagtcagcttatgatttaatcatgttcttttctcccctttttgcataaagaagcgaccatcacataagctatactacag

SEQ ID NO: 12238 - DNA, 239 bp, Setaria italica
  Peptide Sequence Number=SeqID_78212
tagatgaattatcaccacaggtgaaaacctccccagactccgtaaggaaggcagcatgattgtgagaggcagagatgttgataacacgggaaagtgatgggaaggaaaccctactgaatgccgcacactgtgtagtatctgggccatgacctagcacaccttgggcatgaatacattcgtgtgggtcttgaattcaaccactaggtgctgcaatagctatatcttccatactcttctgg

SEQ ID NO: 12239 - DNA, 785 bp, Setaria italica
  Peptide Sequence Number=SeqID_78213
cattcatgtagttcgtgtgtctgctggagatgagcatgctgtggcgcgtggacgaagttcatcatgctgatcaccgtgtccaaggcagaaattagtgcaagatccaaaggaatgaactgttccatcttctgttacagcaaatgtgtagcttgcaccagctgctatctgcaccacctgagtggggccttcaaataattcaataatctttggagtggccctgtctatggtgtcaccatgaccaagttggccgtgtgtgttacttccacacgtatatacttggccatcccttgtaagaatcacagtaaaacttagaccagtagcgacctgcttgcatgaaacccctttaagtgcttctacttgcgttggtcgaaatattgtcctccccacttcaccatgaccacagcataatgatgaattatcaccacaggtgaaaacctccccagactccgtaaggaaggcagcatgattgtgagaggcagagatgttgataacacgggaaagtgatgggaaggaaaccctactgaatgccgcacactgtgtagtatctgggccatgacctagcacaccacacaagctggacccacaagaatagacagaagagtcatggaccaaaagtgtgtgatatcttcctgtggctacttgcatgctgcccgatgaggtctggactgtgcctgacgactgctcgacggactgcaggaacctgagcaccttcttccagccttccccggcacctctccagcagctcccctctcgccgcgggccccatggccgcgaacgccgcccgc

SEQ ID NO: 12240 - DNA, 1111 bp, Setaria italica
  Peptide Sequence Number=SeqID_78214
ctcaacactgataggacacagaccaagaaaaatggaagcaaaaacaatacacacaccaatattttttatacagaggaaaaatggtgggttaattattcaatacatcacacattactaaactatatgcttcttcagctacacaacactgtcctccaccttgatcttcttctgttcaccccaaatactcacaaatcacaaagtataaaatacacttgccgagaagaataccttataaatacaacatatgcaggcaacagcgtccaaaatggcggttgtgggtcttgaattcaaccactaggtgctgcaatagctatatcttccatactcttctggaacattatctcagtaggtttcaagcacacacgaatgtattcatgcccaagttgtgctcgctcattgtcgccaaacccaaatacaatgcctttatttgtcacggcaacagtgtgatacagtccagtacttatttgggagacgtaatgatcccgcaggctctcgagaacgcggggcttcattactttgtcggatgatcctcggtcaggaaatcctaaactcccaaagcccatccatccaaacgcataaacagagccctcatcagtgagaacaaaggtctttctcttccttgcgcatacctgcacagcaacttggttcttcagactgctgatcaattctgggctagttttatcattctcatcaccatgacctaaggctccacagtatcctctgccccatgtataaacgtgtcccagagcatcgagagccacagcatgctcatctccagcagacacacgaactacatgaatgttcctcctcttaaatgattgaatggcgcgtggacgaagttcatcatgctgatcaccgtgtccaaggcagaaattagtgcaagatccaaaggaatgaactgttccatcttctgttacagcaaatgtgtagcttgcaccagctgctatctgcaccacctgagtggggccttcaaataattcaataatctttggagtggccctgtctatggtgtcaccatgaccaagttggccgtgtgtgttacttccacacgtatatacttggccatcccttgtaagaatcacagtaaaacttagaccagtagcgacctgct

SEQ ID NO: 12241 - DNA, 1079 bp, Setaria italica
  Peptide Sequence Number=SeqID_78215
gttataaaaggcgctacccatctctatccaagctcccattccattccattcccccattcagatccgtccctccctcttctcttctctcctcttctacctacaggctacaggctccagcctacagccgccgcagctgcagggctctcgtggtaagcttggttggttgaagatgctggccatcttccagaaacaggtggcgcacgcgccgcaggagctcaacagcccccggagcggcggcgagtgcaagccaaggaaccccgacgagatcctcagggacttccacgccacgcaccccgccaacgccttctccacctccttcgggggcgggggccggcgctcgcctgcgtcggcggctcctgccccgcctccggcggctaccagcggatgttctgcggcctcgacgacatctactgcgtcttcctcggcaggctcgacaacctcagcggcctcatccgccagtacggcctctgcaacaagtccaccaacgaggcgctcctcgtcatcgaggcgtaccgcaccctccgcgaccgcgggccctaccccgccgaccaggtcgtcaaggacctcgccggatccttcgcgttcgtcgtcttcgacaacaagtccggcgccgtcttcgcagccctggtacgcttgctttgctttgctttgctgctgcactcgtcctgccactcgcgaatggcaactgacgacagggactaaccaaattcaccggcggcagagcaccgacggcggcgtgccgctctactggggcatcgcggcggacggctccgtcgtgatctgcgaggaccgggacatcgtcaagcgcggctgcggcaagtcgtacgcgcccttccccgtggggtgcatgttccacagcgagggcggcctcaagagcttcgagcaccccatgaaccggctcaaggccatgccccgggtcgacagcgagggcgtcatgtgcggcgccaccttcaaggtcgataccttcaccaagattaactccatgccacgcgtcggaagcgccaccaactgggccgcctgggacgaaggcatgggcatctagatcatattcagagacactgctcttctgctcaccaacc

SEQ ID NO: 12242 - DNA, 553 bp, Setaria italica
  Peptide Sequence Number=SeqID_78216
cttcgacgacctctccgtgacgctcgacgtctccccgtcgctccgggcgcacctcgtccgtggctgcccctacgtcaccgtcgtcaccacggcggggcccgtcgacgtctccgtcgcgtccgtccacgccttcatcgaggtggccccctgcgacgacgacggcaccaagtggcgcctccggatgaacagcggccagacgttcctcctgtacgcgtcggcgccgatccgcctcgagcaggccggcaccacgcagctctcggcgcccaggttcgccggcgccatccgggtcgcctacctccccgacgcgtccatggagccggtcctcgaccgccacagcggctgcttcccgaccgccggggacgccgcgctgaaccgggcgttctgcgttgactacgcctggcgcaaggaggggcccggcgagctgctgatgctcgcgcacccgctccacctccggcttctctccgacgactgcgccgtccgggtgctcgacgacttccggtaccggagcatcgacggcgacctggtgggctggtcggcgacgcgtggtccctcc

SEQ ID NO: 12243 - DNA, 389 bp, Setaria italica
  Peptide Sequence Number=SeqID_78217
tttaatttctttattttggttaaacctttccgttaaattcttgtactatgttggacctttctaattgccaattccatggccctatcccaccatttgctcaatggccgaaaattcagatggttgacctgtcaggtaacaacttaaatggttcattaccttcagatggctacctttctctacacaacctaactgaagttactcttggtaacaactcgataagtggtgtgatacctgcatctctattttctcatccttctttgaagtatttagatctctcacaaaacaatttcactggaaattttctattgtatcctactgtatcttctagtttcagatggatcgatcttagtttaacaattacaggacctcttccaaaacttctgtcgaag

SEQ ID NO: 12244 - DNA, 408 bp, Setaria italica
  Peptide Sequence Number=SeqID_78218
cttgtggagctccgattcgatggtctccgcgatcttgacctcctcaagttgaggggaggcaacggcctcactcactctttcaacagaatcaagatcgaaggtccatgagggcgcggtgattgagaagcgtgcgccggagacacagcggtccacggtccacagaggtgatcttggtatctgaaccccagtagcctatggtggtggggtggtagtagggcctcttgcttgcaatcactggctgcaggcttgattaggacgagtagagaacgcgattctaataaccgtacccgagattgttatccttcctaattaacctagctagtatcgttgtactttcgcgcttatatggcatgggatctgtcacgtttccacccatggaagctaccagcttggagtgctactatgtat

SEQ ID NO: 12245 - DNA, 261 bp, Setaria italica
  Peptide Sequence Number=SeqID_78219
ggcgtggcccaatggttcaccaatcaccactctctcttctccccgctcgaggttcgacgacatggaccggcaaccggcgctcaccaagctcggcttcgccgtcctgggctgcaactctgtgctcgccgtctacaactcctggggccacccggactccgtcgccttcgtgctcggcgccgacgccgcactcgcgctgctcttcctctgcctctgtcagttcgagcgggaccgaggcggcgccggcgccgcgggagaagggtg

SEQ ID NO: 12246 - DNA, 892 bp, Setaria italica
  Peptide Sequence Number=SeqID_78220
ttgtcgcagccggccattattcacagggatatcaaagcaagcaatatcttacttgatgatgaatttgaggccaaggtagctgattttggactggccaagtttgcgcctgagggaatgacacatgtgagcacaagggttgctggaacactgggttatgtggccccagagtatgcactgtatggccaattgactgagaagagtgatgtctatagctttggggttgtacttcttgagcttctgagtggaaagagggcgttcatttctctcagcgagggccagagctttgtgctcactgattgggcttggtctttggtgaggagggggaagacagtggaggtgatccaagaaggaatgattgagcctggtccaactgaggttatggagaagtatgtccttgtcggtgcactctgcacacatccccagctgcacgcaagaccaacaatggagcaggcactgaagatacttgaggctgattctgcaccaagtccgttaattattccggagaggccaatccctgttgttgcaaacctggctgagattgagaggtcagccagcagcagtggctcaggtcagctgttcagcccctctggtttccgatcttttattcatgcaaatgaggacgctgctctggcgtctccaaatgaaacatgactgtagcccattagtgaaaggtattgctagaattcactgcaggaaactgttggattacatactccaggcaactgttgtatatagcaattttagttttgctcccacacaggaaaagtaaggttcttgtgtgacagttgaattcattgaaacatttttagtgatgtttttccattcctgtatatttagctttcaacctgcagtaactgtttatccggattctggatatggaggttaacaaatt

SEQ ID NO: 12247 - DNA, 474 bp, Setaria italica
  Peptide Sequence Number=SeqID_78221
tttttttgtctagcagctcatatgctcccactactggaattttaaatttctttgatatcacacagtacggggaggaactaactactaggtagctagagaaaagacatctacgataagcatcgaaagaggaaaaataaagaaagaataatcaaacagaaataaaaaaggtgttctttctggccattgatttcaccggagaaatcaggccaggaaacgtgtcaccccaacagggaaattttgaacccttcgctttccctcttcgatcttaccagccccggctggcctggcctgctctgttcatcccgcacccgcacggccgcctcacacctgtttcttggcctcggcctcctcgtcctgtccgtcgccgcagctgtcgatgccggcctgctccttcccttccttggggctctccaacgcccgcttctcctcctcttcctcctcgttctcgccgccggcctccttccccggagcccg

SEQ ID NO: 12248 - DNA, 1187 bp, Setaria italica
  Peptide Sequence Number=SeqID_78222
tagtcttttcttgtcggcttagagccacagctcaaccgagtgctgctccagtcgctccagtagaaaacatagtgccattgcagaaaacaacacctccagtaacaggtaggataccaagtagcagtgcaggcagacaacacagtggtgccacaggcagatttcaaggtggaaatgcaactcttagggacaagaagacgtcattgtccaaaaagaaagaagctttgctcaaatatgaacttttgacagacttgcagaaccaattgactgctgtgctgttaaagcaatgccgtaccgttgccattaaagaagcagattcatcatatgtggaatttcaaaatccagaggctaacatgagtgtacaagaaggtgccactattgcaagtccatcagccccttcagaggcaacgaaggtttttgtcaatgaaaagtcaataccagcaggagccacagaaagtgaacttgggcaaaagaggaagagaaaccctatcattgttacacctgcatggtgttatagtgaagcatcgacagaaaccgtgcggaatgaacaaaattctagttcaaatagtgacactgcaagaaatttcaatatttggaaaggacatgctaatccactgttctcacatagagataataagaaaaatatattgttctgtcttgagggacgtgaaactggtgccagttggtctcaagcttcttcttgtggaggttatgctggacgaaattctgaaagatggactccatttcttgaaggatggaattcacctgcagtccaatttgaagggcctgcagtacctcttgtgagaaaaaattacctgtcttggtgtccaacttcatgtgcttatacatcaagtgctccttctgctcagccccatgacaggcaaggtgtccgcaaagttcttgatgtaaaatttcatccagaagggttgcctcagcttgtttctagctctaatgaggcacccaacgagttattgcttttcaatcttctttctggaagggcaattcagctcagaggccacaataccaagatccagtctgtcgggtttgcagtcaaaggagcaagtatcgtatcttgtgcttctaatttattgaaggtatgggactgcattacagggtcttgcctctatacgctgggtggtgataaccaaaattcagtggggcatactcaaaaaattagtgctatggcagtg

SEQ ID NO: 12249 - DNA, 499 bp, Setaria italica
  Peptide Sequence Number=SeqID_78223
tttttttttttttaagaaaagaaagaacaactttattcggtgaattgttggcatgtcgtgcatggacaagagacgccacacataaacgaaaaaccacactcgattatacatatcatgacaagacaagtacagaacaaccggcaaaaagggtaagagcttattattggaacatctcggtaaactagctaatcggcgacctcgactgccttcgatctctaagcccggctagcctgctggtcgtgcccgttcttcttccccccgaacatgaggtacccgaggccgccgacgacgatgaggccgccggctgccaacgtcgtcgggctgtagcgcttcagcgggttcgaaggatgcgacgatgccgatgacgcggtcttgagcgggtcgtcggccatggccgcccaagccttcatcttctccggccacatgacggattggcgatgctcctcccagatggttatctccactacgatgtaggaagctctctgttttgttgcttctg

SEQ ID NO: 12250 - DNA, 2476 bp, Setaria italica
  Peptide Sequence Number=SeqID_78224
gaaagaacaccccccatcatcaccgacaaatcgaaagaaatgcatgagagcagctggttgcgctattgcactgatagtgctggcgttctttgcatatgcttcttggagatatttccatgtattcctctctgaaggaaactctgaatactatgtggttcttgattgtggcagcacaggtacaagggtgtatgtctatgaatggcacatcaatcataatgatgcaaatggatttcctattgttttgaaacctttagggaatgctcctaagaagaaatctggtaaattaactcgactataccagcgaatggagactgaacctggattgagcaagcttgttcacaatgaagctggattgaagaaggcactagagcccctccttcaaatggctgagaagcagatccctagaagagcacacaagcacactccactttttctatatgctacagctggtgtccgcaagctacctagtgcagactcagagtggctcctggataaggcctgggatgttctgaaaaattcatcatttttatgtagtagggacagagttaagatcatcacaggcatggatgaagcttattatgggtggatagctcttaatcatcacatgaacatgcttggcacctcagcatctaaaatgacatatggttcgcttgatttaggtggatcatcattacaagttacatttgagactgataaaacagtgcaggatgagacaagcattagtctgaggattggttctgttgatcaccatcttagtgcttattctcttactggttatggattaaatgatgcatttgacaagtccgtggcacatctagtgaaaaagttgggaggagtggctaacaatggcaaagttcaagtcaaacacccttgtctacagactggatacaaagaagattatgtctgttcttactgccacccactaaaacaagatggaagtcctagtgttggtgagaagacaactggcaaagagaagcagggagtacctgtcgaactggttggagcacctcagtggaatgaatgcagtgctcttgcaaaagtaacagttaatctttcagagtggtccagtgcaagtccaggacttgattgtagccttcatccttgtgctcttgcttctaactttccccaaccacatgggaagttttttgctatgtctggcttctttgtttgtttttaaattttttaatttgactgccgatgccactctggttgatgttctaaaagaggtcaggaattttgtgaaaaccatggaaagttgcaaagagtagtgttcctccacagccatttatagaccagtactgcttcagggctccttatattgcatcactactgagagagggattgcagattaaagataatcaggtgataatcggctctggcagtattacttggactcttggggttgctttgtgggaggcaggtcaagcattgtctacacgaatcgatattcaaggataccgaatactgcaccgggagataaacccgaatattctcatagtgttgtttctggtttcaattgtgttggtcatatgtgccatattatgcgtcagcaattcaatcccaagatcattccgcaagtcttatctgccactttataggcacaattctgctgggagttctgttcttggtatggggtcgcctttcagatttcagttatggagtcccatcaattcaggcgatggaagaacaaagacacccctgagccctactgtagctgggtcagatccccatccgttcggtatgagccatggattaggaggcagtagtgttcagcttatggagtcctctaggcaatccttgggcgtctatcacagctattctgttgggagcttaggtcagatgcagttctccagtggagtgaggaaccctagccgaggtcagactacacttcaaagccggcggtcacaatcaagagaagatctcagttcttcattagctgatattcatgttccaaaggtgtagcatttgcatcacagaatgacatgactagaatgagatcctatatgccataacaaactctgtaaataatagctccagagttcagactgcttgatttcttctctaatcagaagtcaattttgtcggtacactgacacttaagtgaggtttaggattcatataaatgttaaacttatgacttggtgtctatcctggacatgatacatccattcatcccattgtatgtgctagagaacatagcataaaggtgaagttttagtagtgtaccagaagatatgtttatgccgttcacaggaatggttggccgtgggctggaacctgcaagtctgtagatcaattcttctgcaatcaggcgggcaatacttccttcaaatgtgtttttaatatgaaacataataaagatgcatgtggcttcatgtattgttgttgtaccctcttgtaatcttattgtgagccttatctcctggacaccatttagtgtggcaccttgtgatatcaaattgaaatttggaattaa

SEQ ID NO: 12251 - DNA, 277 bp, Setaria italica
  Peptide Sequence Number=SeqID_78225
cccgcgctcctccacatccacacttctcccgccattgtaggccccatcttcgtcatcattctccagctccgaccagttcaccccgtcatcctcctccacatccatcgctccatcagctacaggcacatcactgtcgtcgtcatccccaatcacaaagcggcgaccagaggtgcgttgctggggaggcctcggggcctggtagtcgacatcatcatcagcgaggtctaagtcttcgccttcctcggagatgtcaatggcagcagttaccaaccggcga

SEQ ID NO: 12252 - DNA, 521 bp, Setaria italica
  Peptide Sequence Number=SeqID_78226
cagccacaaaatcttggaccaccaatgcctatgcagtttaggccagtggttccttcgcaacagcctcctcagttcatgccaccaccagcgcagcagtttcggcctgttggtcagcctatgccgggagctaacattggcatgccagggcaaatgccacattttccacaacctggacagcatttgtctcattcaagtcaggttccacctgcatcacaaggggttcctatggcatatcagccagctagaccaatgtcatcagcacctatgcagccgcagcaacaagctgtgtatcctgggggccatatgcctaccatgggcgcccctatgcagcccccatcctatacttatcaaccaacttcgattcctcctgtagtgcaaccctggggacagagtgtgcctcatgtgactcctctagtgcagcctggacaccagccggtgccagcaacagctactttgccttcagtcaactcgtctgaacctagctcttcagattggcaagaacacactgcggctgaggggaa

SEQ ID NO: 12253 - DNA, 473 bp, Setaria italica
  Peptide Sequence Number=SeqID_78227
agaagcgcaggttgcccatgcccatccatcaggttcagcgcaacatatgtgattagaagtccagaaccataggccaccattgaccacaaaaaataaccagactgaaggctcttcttcgcaacaaaatcgtatcttagtgcgaaagcaactagcagcccaggaagaaggatatcaccaaagccaatgatgctgtatccaccccatggatcaaacattcgtggaatttttagcaacatgggcacaccatcctcgtcagtcttatcaccgcgtgcaacctatcagaagaaaccagtatgtacaaccacaaaatcaagaaactatcaccaccaaatattagaatgccctttcacaatacttaccacaatcatcacactctcatgaaaccacctcttggagacaaacacccagaagatgtcatacaggaaggcacagctgagaagaaccgaacccaccttgaggttgggtactctgac

SEQ ID NO: 12254 - DNA, 1133 bp, Setaria italica
  Peptide Sequence Number=SeqID_78228
gaagctcctgaaggatggccatgaaggcctattgaatgttgaggctgggggttctactggcatggtagacatcaatgtggcatcagcgataatgtttgtggtggttgcgtcatgcttcttaataatgctttacaaacgcaatgcaaaatggggaaactgccagagtaagatgtgaaacagctccaatgaatggtactttcacaaaagattctgcagcaggtttaaaccatcttgataacagagccaccaagcatgtttgcagaccctctacaccaccgatgcagaagataaccaccagaagctccaaaaaccaatgagacatcagcctgtagagcgttatcaagaagcatgatgcgatcacaacaaacagtattgccgatgccatgttgatatctaccgtaccactagaacctccagcctcaaggtttggtggaatttcatggccatccttcagaagcttctcttgttcaatatctgcttctcgggcactccatgctgaccaatatgatgcacaaagaatggtaccaactgccataagccatagaaacacttctgcagtatcaaccaggggacgatctggagagtacagctgcactaagacttcaccactcgagaggagactttgtaatttagtgcctgcatcttttggcagaagaaccgcaggtataccgatatctagatctgtttcattgcgctcacataccatcttgtataactcatgcttatcgttgatgattataatggcagaagcaccagcagattcagcaaccttagcctttgtagtgaacttacagttccccctctccactaataaaatatctccagcaaccttctctttgggaggggtgcagcaatcagaaggatctgctaacgtgagtcttgttcggtttgcgtgcttctccttggagacgattttgggaccaaagcgagcaccaacaccaacaaactcgtcgccctctttgccgttgacccagctttgcacttttaccaggatgaaatcgttgttgcatccggggatcttgggtgcctcgtcgtcgtggtggacgatatcaccgccggccgcggcctccgccagcgccgacaggagcagcagcgccaggaccggcgcggcggccatctatccctgggctcta

SEQ ID NO: 12255 - DNA, 691 bp, Setaria italica
  Peptide Sequence Number=SeqID_78229
tttttttttttctacggtaaatcatttattacatagtttttctatgtatctagacatggtgtatagcaaaagctatatatttagaaaagctaaaacgacctacaatttgggcataagcaacgatacatacatatacatacatcagtaaagtgtctccatcaaattaatacaactttctcgaccatgcatatatttagtcactacagtagttaccataattagcaggaaccaacttactcggaatatgcataattagtttgggcttgccggcagcagcggcagatgcatatgcgtgcacactctgtctggctctcccttcacccacaggttccgcagttcccctctcttccacccaagcgcgatcagtgttccgagtgtgaagggcacgatgtacagaagcgcaggttgcccatgcccatccatcaggttcagcgcaacatatgtgattagaagtccagaaccataggccaccattgaccacaaaaaataaccagactgaaggctcttcttcgcaacaaaatcgtatcttagtgcgaaagcaactagcagcccaggaagaaggatatcaccaaagccaatgatgctgtatccaccccatggatcaaacattcgtggaatttttagcaacatgggcacaccatcctcgtcagtcttatcaccgcgtgcaaccacaatcatcacactctcatga

SEQ ID NO: 12256 - DNA, 2074 bp, Setaria italica
  Peptide Sequence Number=SeqID_78230
ttgatcaacaaacaagtttgcaaaccgtgcgtaaattgagatccacacgcactcagacataatcgtcaggcacatcacatacagttcctgcttgctgggaaataccgagctataagctcctacgcgttccccgcatcttttatacatacatcagagctttttactacatatatacactacctactatacattatacaacgtggatcgcaatatctcaggggtcgcatcctatttaggttacattaaaaatcagccgagtcctcccacgacgtcacacaccatcacccaagaaaaacgtacgtaagggccatcttagtgggcgtttagccgtaagccttatttatcacgacgagcttactggatcagccgagtccttcggggatggatgtgtatgcgtacacgccctctctggctgtcctcttgtccacaggtttctgagttcacctctcttcaggcccagcgccaagaaggtaccgatcgtgaaaggcacaatataaagaagagctggctggccatggccatccataaggttcaaggcaacatatgtaattaggagaccagaaccatatgccaccattgaccacaaaaagtagccggattgcaaggtcttcttggcagcccaatcataccttaatgcaaaagcaatcaacagcccaggaagaaggatatcgccaaagcctatgatactgtatccaccccatggatcaaacatccgtggaatctttaacagcatgggtacaccatcctcgtcagtcttatcaccgcgtgcaaccacaatcatcacactctcatggaacaacatcttggagataaacacccagaagatgtcatataagaaggcacaactcaggaggacagaacccaccttgaggttaggtactctgacaatttggatgactgtaactatcagtgcgataccaagaatatcttgcccaatccaagcatagcgccaacggcgatagacagcccatagaacagcaaatacaatgcaaaatggacaaactgccagtgtaagatatgaaacagctccaatgaatggtactttcacaaaggattctgcagcaggtttaaaccatcttgataacagtgccaccaagcatgtttgcagaccctctacaccaccgatgcagaagataactaccagaagctccacaaaccagtgagacatcagcctgtagagcgttatcaagaagcatgatgcgatcacaacaaacagtattgccgatgccatgttgatatctaccgtaccagtagaacctccagcctcaacattcaataggccttcatggccatccttcagaagcttctcttgttcaatatctgcttctctagcactccatgcggaccagtatgaagcaccaaggactgtacccacagccataagccatagaaatacctctgcagtgtcgactacgggacggtctggagagtacagctgcacagaaactgcgttaccgcttgtaagaagtgtgtgtaaagcagaacctgcgtcttttggcaggagaactgcaggtatatgtatgtcaagatccgtctcgttcttttcacagaccatcttgtacagttcgtggacatggtttatgattactatggcagaagcaccggcagcttcagcaaactttgctttctttgtgaatttgcacttgcccctttgaactagaagaacatctccagaaaccttgtgttttggaggagagcagcagtcaatagggtctgcgagcgtgagcttagttcggtttgcgtgcttctccttggagacgattttgggaccaaagcgagcaccaacaccaacaaactcgtcgccctctttgccgttgacccagctttgcacttttaccaggatgaaatcgttgttgcatccggggatcttgggtgcctcgtcgtcctggtggacgatgtccccggcggcggcgacgcccgcgagcgccgccagcaggagcagaaccgccggcgagctgcgggccatcagaggagaggggaggagattggatttggattgcgcgcggcggggatctagccctctgttacaaggcctcgctttttcctccgctttcgtcgtttgtttcagtttcag

SEQ ID NO: 12257 - DNA, 247 bp, Setaria italica
  Peptide Sequence Number=SeqID_78231
tcccggtggaacccggagcacgtctccttcaagctcctcggcaccaagcccggcggcgcgccgatctgccacctcatgccgtacgggcacatcatctgggccaagaacgagaagcgctcgccggcttaaggagcggagcaccattctgccgtagtatttctgatcgatgccgtatctattttatgtgttgttgttcatgccacctagtctgtctgctcttgtacctctgcagttcgtggtcagtact

SEQ ID NO: 12258 - DNA, 1020 bp, Setaria italica
  misc_feature (34)..(34): n is a, c, g, or t
  Peptide Sequence Number=SeqID_78232
tttggtctagttcttctttttagttttttttttntttttttttttaacttttaatctctgtttattactcaggagtatccgaactcagattcttctgcaagaattatatgtacaaactgcaaacgtacaatctgagcagcagagcaggtgaaacttgttgttgtgcttaatagatagatggaaatgcagacatggatcccaaatgatggcactagtttctgcattgttttgacgccgcggaaattagttcctcgtgcagaagtgcacgaacgcggcaacgagcagaacagccttgatcttgacgctccaggggatgccgtagctccccttgccggcgagcccccgcacgaacggccagaagcagagtgccagccagccgcagcacacgaactcccctacgccggggccaccaccggctggcggcacgcctcccgcggccgcggcgccggcgaccgccctccacgccccgacggcgatcgcgacgagggtcaggatcgtgagcgccgtcggcgggacgaacaccggcgacgagtcgaaggtgaacctccccgggtcggcgccggcggcgtcaccgccgtcggccgcgccgccctgctccttgcgggtgacctcgaacaccgtctcggagaggcccatggtcttgagcaccacggtgaggaacgcgagcagccaggcggaggacgacacgatccgctgcatccggtggttgttccaccaggcgcgcgccgacagccggcactccatgtactccgcgacgctgtgcacgttcagggtcaggaacagggccaatgggatgacgaaccccggctctgatgccttcggcaagaaggatttgtttgcgaggaggcagtaaggtcccagcagtgcgtagcatagctcgaaaggcgccctgaccggccacacgtagaagactaggtaagcgaggcattgccggaactcgagatgcttggaggtacaggcaaggatcgggttgttccggctgaggatgatctccagcaggcccgtcgcccatctcttgta

SEQ ID NO: 12259 - DNA, 645 bp, Setaria italica
  Peptide Sequence Number=SeqID_78233
cagcaacaatggcggtgtactcgtcgaagctagcgtgcctggccttcgtggcggtcgccgtcgccgtcctcgccgccacgccatgcgcggcgcagaactcgccgcaggactacgtggacccgcacaacgcggcgcggtccgacgtcggcgtcggccccgtcacctgggacgacacggtggcggcgtacgcgcagagctacgcggcgcagcggcagggcgactgcgcgctggtgcactcgggcgggccctacggcgagaacatcttctggggctccgccggcgccgactggtcggcggcggacgcggtggggtcgtgggtgtcggagaagcagtggtacgaccacggcagcaacagctgctcggcgccggagggccagtcgtgcggccactacacgcaggtggtgtggcgcgactccaccgccgtcgggtgcgcccgcgtcgtctgcgacaacgacggcggcgtcttcatcacctgcaactacaacccgccgggcaacgtcgtcggacagagcccgtactagtagacgactgccgtctctatgaatacatgcatgtataatgaataaattatgtcaactgcatatatatggtgatgcatacaagtcaataataaaatcatgagatttttagacaaaaaaaaaaaaa

SEQ ID NO: 12260 - DNA, 314 bp, Setaria italica
  Peptide Sequence Number=SeqID_78234
gttccggggactggaggcggcgctgggcaccacgttcagctccgagccgctggcgccgccgccgcagcctatgatcctcgtcatcagcggacctagcggtgtcggcaaggacgccgtcatcaagaggctccaagaggagagggaagggatgcatttcgttgtgaccgcgacaagcagggcgatgcggccaggtgaagttgacgggaaagactattacttcatcactaaggaggagttcctcacgatgattgagagggatgagttgcttgagtacgctcttgtttatggggagtacaaagggatccccaagtcaa

SEQ ID NO: 12261 - DNA, 181 bp, Setaria italica
  Peptide Sequence Number=SeqID_78235
caattgaggcgaaaaacatcagtaataaatctgtaattcacagatgagatgcttcttgttttgcaagcagcaattgatctccaacaagagatacgcacttcgtgtaattattgactgaacttggttttctcaaaaccccgttgatcggtaacctaaagaaaaattggctcgagaaaacgcg

SEQ ID NO: 12262 - DNA, 203 bp, Setaria italica
  Peptide Sequence Number=SeqID_78236
tggaagtgagcaagctcttctccagcttggagtcgaggccagcagcttagctgcctgcttgaagttcctgctggttgctgccaatgcattcatcctgctcgatgaaatctcccttcagaatcgcacctgttcgagaaaccaaagatatatttttcttttatcttcccaaggcacaacaaaatatagctactgaggagaggcca

SEQ ID NO: 12263 - DNA, 562 bp, Setaria italica
  Peptide Sequence Number=SeqID_78237
caatcattatgactgctaaacacacgatgttactgcaacctagataaattccaaaggattgttcttggaaaaaatgatttgataacctttgcagaaatcttcttagtaccttacaattttaattcggaaacatcattttcagtacacatacatgtccagaattgcaggatagatagaaacttacaacaggctttcctgtcaccacagcaggtgagtaaccatggaactttgagtactcatcaagtatccatgccattgtctgtgagttggtgcccatatctggtgctggaacatcagtatggatgccaatcaagtcatggattttctgagtaaaaactcgggttaagccgctcaagctcagaaatgctcagttccccaggactgcatcctattccacctttagctcctccatacggtatgttggccacggctgttttccatgtcattagttgtgccaaggcattgacctcatcaggatcaacctcattggttggttattcttgtatttcctaccctttctataggccccctagcattgtcatgttgaaccctaaaaccaaca

SEQ ID NO: 12264 - DNA, 213 bp, Setaria italica
  Peptide Sequence Number=SeqID_78238
ggagctctgtgttcaccttctcttcatcccacatgaacccctgaatgttctgaacccattcgaagtaactgactgtgacaccgccggagtttgcgagtatgtctggcaggatgagaacgcctttctttgaaaggatctcgtctgcctcagggtctgtggggtgattggcctgagacacgcaacagaggataggcaaggcacacaggggatagg

SEQ ID NO: 12265 - DNA, 788 bp, Setaria italica
  Peptide Sequence Number=SeqID_78239
ccataatacacaaaaaagtggctcccagagacccaaggctcctccataaacctcactgactccaacaggttaaacaccctccaggtaaactgaatcacgctgtttttttcctctgaagcttttcagtagtttgagaagctcgtatgtacgcgcatggtgacccagccggaggcacagctccaaaggggtcaatccatcttgggttttcaggtttctatcagcaccctttattaaaagtagcttcacaatgtctgtcctctgtgtttgtacagcaagatgcaaaggtgtccatccataatcatctggacgattgatgtcaacattgtacaacaaaagagtctttatggtctgactgcatgctgcttggacagcataatgcattagggttgcaccatctttatcttggatgaatggatttgctgaattccttaaaaggtagttgataatagcagccttctttgaaagaattgctttgtgaattgctggcaaaccgtccttatcgagcgcgtttatgtccacattatgttttaaaagactatccaatagatagaaatccccagatgcagcaagggtgtgaagcggaggccatttactctacaaggaatagatacaaggctgcattacaccgaaaactaaacttgaactaacagaggtcatggttctcatgactcaaaacgtagctgctaccacatgttactaatgacaataactgaatttctctgaacagggatcgcttacagaagcagcggcgtccagatcaggcactcgcttgttcagaagaaccttct

SEQ ID NO: 12266 - DNA, 241 bp, Setaria italica
  Peptide Sequence Number=SeqID_78240
tctgtatccaagataacaggagtatttgtcctgccttttcaactttggatccaatgaagattgttaagtaacttgactgagataaaaatatcagaagcatactgaatcacgcagtgacatatgctttcatgctgcgagggaagtttcggtttagtgatgatgtctatgttgtccaattgcaggaatggtgacactgtatcaaaagaaaagaatagccctttataccttgtacaagcacaag

SEQ ID NO: 12267 - DNA, 359 bp, Setaria italica
  Peptide Sequence Number=SeqID_78241
cgggcggggaggccatcggggcccgtttgggcggcggcggcagcggagccatcttgggcgccgccgccggggcctgcgccgtggcggcgacggcgaagagggcgacgaggagcgcgacgagggtggcggcgacgcgggcggccattcttggttacgcagcaaagctccttttgctggagcttcaacgatataaaatcaggcgagggtggcggtgcgatgtggtgggctgctgatgtgattatggatggaatgagaaaaatagcaatcctaaaaagaacaaaaagaacaagaaaggtgcagaaaagaaaaccactgtttctgctgaccagaagagtacatcaaaggctgaacagaagagg

SEQ ID NO: 12268 - DNA, 1412 bp, Setaria italica
  misc_feature (1350)..(1412): n is a, c, g, or t
  Peptide Sequence Number=SeqID_78242
acgactagaaagaaagaaaagcagaggaggagaagaagaaggctgaggagaaggagaggaaaaggaggaggagaagaggaagaaggagcgggccatggcatatcaggagcccgattgggcgagggtggaggaagaggaagggttgtatgatgacgaggaggaagaggagatgaaggccaagaggaaggaggagctgtactgtgtggcgtgtaataagaagttcaaatcggataagcagtggaagaaccacgagcagtcgaagaagcatagggataagatcgcagagctgaggatggcgtttaaggaggaggaggaatctttgaaggaggcagaggaggagggggaaggtgatttggatgaagttgatgtggggtttgattttaagcctatgcaggagtcggatgatgagagtgcattttcagatgccgcagaagagttggctgaagacttggaggaaggcttggaggtgcgtgataaagaggatggtgataaggtttttgatagtgcagagcaggaggttggttcttatgatgaggcgagtgttttggaggctatgctgtcaagccgcaagaacaggaagggtggttatgtggctcctacagaaaaaacttcatcaggtgctgctgaggaggaggaggatgatgacagaagttctgaagttaataatactaaaaggaaaggacgcaggagacgggcagcgaagaaggaacaagatgaaggtacttatgctgataatgagaggcatggtaaaagtgaggttcagcctgaggaatctggcaatggtaatggtgctgatgataagatggaagggccatcctcttctaatgaaggcagtgcttcagcaagcaaaggagatgagcagaatgggaaaaatagcaatcctaaaaagaacaaaaagaacaagaaaggtgcagaaaagaaaaccactgtttctgctgaccagaagagtacatcaaaggctgaacagaagagtaaggggaagaagcaaaaggaggtctcaaaagcacctagtaatgattgtgaaacctgtggaggaactttcgaatcaaggaacaagctgttctctcacttggaagaaacaggccatgcgatgctgaagacgcggcagaaaaatcgttgatgagggaatttagttgaactctcgaacattttgtcacttgttgattctgctaactagcacataacagcatgattctcttatttatggcccaattttgatctgtagtggaccggaattttccttgccgtctgtggtggggagatgttttagttacaatgcctttgcggtacagagctagaaaggaaagtttgatgattataataacattatctgagcggatttatgaaccnnnnnnnnnnnnnnnnnnnnnnnnnnnnnnnnnnnnnnnnnnnnnnnnnnnnnnnnnnnnnnn

SEQ ID NO: 12269 - DNA, 4288 bp, Setaria italica
  Peptide Sequence Number=SeqID_78243
taaacttgaagaaaatcatataaatgccgagcatgggacagagaataatgaaattgattatggcatagcgcgttctgataaggaaatacagaaccatgtgcctgctgaggtcgagggaagctccaagatatatgcggatgatggagcacctgcagttgaccagcctggtgatggatatgtaatgatgccgcaaacaggggagcagtttcctgacagtggaaatggcctgagcagtaatgaagagtctgctagtctaggaaatgttgttcatggtgctagatactgccttccacctcttgataaaggcggttttcaagttgctgatcttgtctggggtaaagtaaaaagtcatccttggtggcctggtgaaatttttgatccatcagatgcatctgaattggggctaaagcaccagaaaaaggacagccacttggtagcttattttggtgacaatacttttgcgtggtgcgatgaatcccagttgaagcctttcgtaacaaattattcacaaatggagaaacagagcagttcagatgcctttgttgggtcagttaataatgctcttgaagaactctcaaggcggatactgtcaggtatgagctgctcttgtttgccagaagagcttgctgataatggcatgtcctatacggttgataatgctgggcttaaggatggagttacttgctctgcagttaatcggcctgagatcttaaactgctttagtccagaaaagcttcttcattatattaaggagttagctctatttcctggccaaggaggtgatctgttggagttagtgatagcatgttctcaacttacttctttctatcgatctaagggatgccctgaacttgcatcatttcaaactggtgatgcgtgggttgaggatgggctggatggcacggacacttcagccactcagaatgtagtggcagaggaagttgttattaatgaagtacctcctactcaagataagcccaaaagaggcagggggagacctcgtaaacaaaaacctggagatggccaggtggtgatggagaaaagggacctgtctaatcgggccaatgatgctagccatgacgattttgatgattttgacaacttacaaaacaagaagaaaagaaactttgactcatttgaagatttagagaaggcatcagctccaactggtggtaaatcttttaagattggcgagtgtattcggcgagctgcaagccagctgacaggatcttcatccattgtgaaggctcagaatgaaccaacaggctataagaatgctgctgaagctgagaatggggaatttgacatctcaagcgatgatgctgttgatgaacttactgtggagaagcgagcaaaaaggagacgcttgcacaggaaccacactgcagaccccaaggaattactgtcacagctatgcttggttgcaacagagccaatgaatggatatagtttctcagcaatgctaatcagttacttcaatgattacagaaactatattgtttctactaccactgaagcaagcattgttgaaaaaggtgcatcaaggagggggagaaagagaaaagaagttttaccttctcctgaggtagagacaacagaccatatgcaagactcatactggtccggattgagcttgcataatcatccaatccatgacctcagaaaggaaagtcccactacaaggccaagacgtaggcggagatcctcgagatatgcatatgtaccttcatcagaacttggagattcggttcctaaaaaacagatacaagtgatagaaaggtcaatcatccatgtcgatgagaagatggttgatgagttgaagcccagtgcacttgttttgagctttggcaggtcagcttctattccttcagagctggatctcgttaagatgttcagtcgctatgggccactgaaagaaatggagacagaagtagacaaggacacaaatactgttaaagttgtcttcaagaaacgtgcagatgctgaaagggcttttagtgctgctggcaagtacggcacttttggaccttctcttcgaagcttccgtcttgtgaatatgccattttctctaaaggcattatcagcgaataatcctgtgaaacaccctgaacatcatggtgcggagattcctggttcgagtaagtccgaaactcctaatgatgccatggaagttgatctggtgcacaaaacagagaaagtagaagtgggagaacagtcggttgaacaagtggaggctgtgaagcaaacatctcaagtggaagctgcaaatgctgcatttgccaatcaagttgacatggttgagaaaactggaaagattgatgccgagctaattggtcatgttaatcaaattggaacaactgcacaagctgcatctgtagctgaaggttcatctgagcaagttggcaatgttgagcaagcttacacgcagaaggaagcgtcaattggtggtctacctgacattactcagtctggagctgtgactggtgcatcaattggaggcatggttgatgaaatacagttgcatgagactccaaatcaagcatcaatggctgatacagcaaatacattccaagtggaatctgctccagaggcacaaactttacattctgatgctacaataaaagagtcacctctagatgtttcagataatatgcaaatggatgttgcagctgaagccccaaagcagagtcacatctctggagataatactgtatctgaagcaatcactgaagcaccaggtactgcacaagtttgtactgaggtggatactgccaatgaagttccagaagagctcatggtatctcctgcgttacaaagtcaaaccgcaggtgaaaaactggtggaacaagatgcaactgagcaacatgtgggatctgaaggttcaaagctcgaagctgaaacatttgctggagaacctgctgtacaaggtgtagtcaagcaagtagaagttgaagtggaatccaaaactaccgtcgaagtatcaggtgaacaagtctacagtattgagcaaactgttcaattggaagctgtaactgaagcatcaggtggacaacttgaggtgggaagacaaactccaggagatgaatctatggctgatgcaactaccgagcactctacaatcatggttgaggaaactgtggaggcaaaagcagtaccattcaaggaagatatagaagataatgctgctgccgtgggagtagctgaggaaactgctgaaggtgaaaccaaggaggaagcaccagacaatgggaaaatgggaaataaagctgctgctgacagactagctggggagacaagagaaggtgaaattacagtggaggcaccagatgagaaagcagaaactaaagctattgctgaaccaataactagggagacagctgaagctataggtgaagaaccagctgaagaagctagaacatctgaggaaattgtagaggatgttaagacactggatgataaaactacatcagctgagaaacttgtagaggatgccacggttgtgacagagcaagatgagagaactactacagtcaagaagactgttgaggatgccaaggttgagcaaccaaatgagaaggctactacagctgagacgactatggagaatgccgtggctgagccaccaaatacaaatacctcagaagctgagaaaactgtggagggtgccacacttaaatcaccagatgagaaaggtacagcagcagagaagaaaatagaggataccacgatcgaggcacaagatgtacaagcaggtgcgagtgagtaagccagctagcatatgttgcattcctttcagtttctgttgatatcaacgtaggctgctcaactgattctctcatctaggcaatgtggtctgtatagaaaaatgggaacccactttagcatcaaaatgctattaggtattagtaactagggcatctacatctttgccccttttcgtatgaacttcatccagttgtattggacgacacacatgtgtcagtttgtcataaacggggtttcttcctatacgtctgttcagcgcaaggagaatcagcagactgagtgaagaccttttgaatcagacaggggaaaccatgttcgttcctatgtttcacggtcaggcttgggagtccttgggcattctactggaatccgatgattcttgtaccttttgtcatttgtaacctaactgtgttctggaaccctttttcgtatcacttagaatttcttaggggaatattgtctgctcactgattgatcatcgaatttcagtaaccttttttgaaacggtaaaaaaaaaaaaaaa

SEQ ID NO: 12270 - DNA, 564 bp, Setaria italica
  Peptide Sequence Number=SeqID_78244
acccgccacaacataagacattcgcatgcaattgcagcgtctccaatctgggtgcagaatctaaatagtgagccagcagcagaagtctagcgtggttatttggacccctgtgaggaccagactggtcgatcttccatcatttgtgtatgcacgtttagcaccttcgctgtggaaatacagggaattccagtgatggcatgactcaatgctctattattgtctcggtcaaataatgccttgtgaaacatgagggttacctcctctagtgttgggcgaccatgaagcactataggaattacatcaccttggtactcgaaatgagaaagatcaggaacatgaaactcaaccatctggacacatatattggaacgaattagcaaatgattaagtttatcgagttggtgtggtatattcagatcagttacaccggagcaggtgatgagctccaagtcctcaagactagaacaatttaatagcaagcctggaagatctccaattatatgaacacagtgcaaatgaagcttcttgagtctcataaagccacaaataaccaagtgtggctct

SEQ ID NO: 12271 - DNA, 1347 bp, Setaria italica
  Peptide Sequence Number=SeqID_78245
ttttttttttttttttttacttaaaaagtacaactatatccttaattttaacatttgtgaaattccaatttaatacatagcacctattgggaaacaaaatcaattttctcaacaacatacacagtgtgtatgttgttgagatgagatcagagaaccagttccaacgttgccataatcttaacgcggacataaatttattcccacacgaacaaaacatacagttcagagcaatacattgctaataaacatgacccaaacactgtcgaggggcctctacaacagtgatcactttaccatagcgttgcgatacacgacgaacccaatcacgaatcttgtactcaggtatgtatatgttcaatgagttcttgccgtatggcgtcaccaatggttggatggtcacattctcaagcgcagtgccattttccagaatgccacacagcagctcgacctgaggccggtaagcaatggaacccactcatgtagaccgtcttgaggcgatcaaggcggcacgtacggaaggaggcttcctcaccatgccagcagtggctaccacccgccacaacataagacattcgcatgcaattgcagcgtctccaatctgggtgcagaatctaaatagtgagccagcagcagaagtctagcgtggttatttggacccctgtgaggaccagactggtcgatcttccatcatttgtgtatgcacgtttagcaccttcgctcctctagtgttgggcgaccatgaagcactataggaattacatcaccttggtactcgaaatgagaaagatcaggaacatgaaactcaaccatctggacacatatattggaacgaattagcaaatgattaagtttatcgagttggtgtggtatattcagatcagttacaccggagcaggtgatgagctccaagtcctcaagactagaacaatttaatagcaagcctggaagatctccaattatatgaacacagtgcaaatgaagcttcttgagtctcataaagccacaaataaccaagtgtggctctatagaaacattggtgagaaacaaggattggataaaagggccatcttgagcatctaaagcctcaagagggaagcgataaacatttctggttggtcctacattattcctcttcggccacaggttcatatcaataatcttggcctttgatgcagttgcaaagcgaatccacctatcaatatgatctgaggagttgtcccgaaggctgcacctgatgctgaacttattgagccctattccaccgtgctgctgaataatagaatttactgtctcgatgaacactgcgctttctattttgatactatcatcattagtggactggtcgtt

SEQ ID NO: 12272 - DNA, 295 bp, Setaria italica
  Peptide Sequence Number=SeqID_78246
ccgtggcgagcccctggaagtcgcacgcctcgtccgcctggtccttcatctggaagaaagcgttgaaggcgtaggacgcgttgccgttgctgtccatgccgccgcacgtagagccgtaccccagcgcggtgcagtcggcgaaggtgcacgcgaagttgatgttgtccgcgagcttgtccatgttgggcgactccgtgttgacgacgcaccacgtccggggcaggtactccaccccctgcgccggcaccagcatcgcgttctgcccctgccccgacaggtccatcgggtacttggg

SEQ ID NO: 12273 - DNA, 1198 bp, Setaria italica
  Peptide Sequence Number=SeqID_78247
tactacgtcggcgttcagcgggaccgtcgccttgatggtgtcgccgagcccggcctcgtccagcgcgttctggatgttctgcagcgccgggaacgtcaccttgtcgaacgtgttgttgtacgccgccaggaacggctcgttgcccacggccacgtacttgatggtgacgccgccgtcgaagttgtaccgggagacgttgtgccggacccactccttggcggtgtcgtagtcggtgatcctgtcgagcaggacattggggatggccaccatgacctcgatgccggtgccggcgagcgcgctgagcgtgctctggtcggcgtcgaacagcttcaccttcttgatgccgttgtccttgagcatctgcaccacgatcttgggcggcagctggtgcgtggcctgcgtgccccagttcatccccagcgcctccaccctcgcgacgccggaccacgacgccgccgccgccattgccgccagcaagcagagccacggacgcagcgcggctagattctccatccggctcccccggcgcgctgatcggagcctggcaagatctctaccgtcaactcccagcgaccaatcgatcggagctggagagacaaacaccaggcctcctggtcacctggatgcaatggcttgggaccggactgcaatcggagtaaggaagcttcaagatttatagctccgaagcccaaacaaagaaagctttaaatttctggcgtgaagagatgcaagaccaatcagaatcgatcaagaagaaggggggcttctataaacaggacggcgagacgccgctccaaggaaacggcgatggaagaagcgaaggctgcacacgaaacacggtttccctccagctcgatgtttcccacccgatccgtgtgacagaaacacgggaaaagaagaaccaaataaggaagatgggactggctagttggacgccggccgcaattaagacgcgggcggatgatgagaaccgaggtgacagggacggatcggaaaagcgaaggaacttttgaattgaggggggagagaggacagcagaggatacagatacacgggaccgaaatgatccggagcagagatcaggatcccgggaccgcgccaccgccgatcggtgggaaggagctatcggctatccctcctctcctcctcgccgagacgcggtgataagcccggagcgagcgagagagcggatgtgacg

SEQ ID NO: 12274 - DNA, 1498 bp, Setaria italica
  Peptide Sequence Number=SeqID_78248
tttggtgccaaacgaaccatctcaaatcagtatacatcctgaacctgaagtatacatgtatatctccagtacaacacttcctaccaattatttttcaccaaaattaaaccaacaaacgaacgaactataatctgcaagcgcgccctgccaaaaccccaaaaccaaaaccaaccaaagatcaacaataactaaacctgcctatctaaaccaagcacgcacgccctcccctaatgcagcaggatcgtcagctgcgccaagaacagcagcacggcggcagcggcggccacgccgatcggccgccggtgacccgccgccgccgaggtggtggcgatctgtatggtgaagttgcaggtgttggtggaggggtccgtctgtgtgggcctggcgagcccctggaagtcgcacgcctcgtccgcctggtccttcatctggaagaaagcgttgaaggcgtaggacgcgttgccgttgctgtccatgccgccgcacgtagagccgtaccccagcgccgtgcagtcggcgaacgtgcacgcgtaatcgatgttggcgccgagcttgctcaggtccttggcgttggggttcagcgcgcaccacgtcttgggcaggtacttgatccccttcgccggcacaagcatcgtgttccggccctgcccggcgaggtccatcgggtacttgggctggccgtcgtagcggaggatgccccagtgccgctcgaagttgcccggcgccacgctcttcaggtcctcgtcgactagcccgaacaggtacacctcgatgtactggttcggccgcgccggcgtgccggcgttcgccgccaggcgcctcagcagcccggcgtagaaccgctgcgcgtaggagaccttggcgtgcttgtcgccgtcggtgggccagccgacctcgccgacgacgacgggcatgtcgccgtgcccgacggccctgagcgcggccaccagcgtgtcgaagttggcgtcgaacacgttggtgtactgcacgccgttgtcgaggacaggcgtcgcgccgccgtcgaagaaggcgaagtccacggggaagttgtcgttgaggaacaggctgatgaacgggtagatgttcaccgtgaagggcgcgctgtggttgctcaggaactgcacgatgtccgtcatgaggtccgcgatgtcgggccgccaccgccccgccgacggcaccgggttgtccgtcggggacatgtacacgtcggcgttcagcgggaccgtcgccttgatggtgtcgccgagcccggcctcgtccagcgcgttctggatgttctgcagcgccgggaacgtcaccttgtcgaacgtgttgttgtacgccgccaggaacggctcgttgcccacggccacgtacctgcaatgcaacactattagctttagccaccgaccgcagacacgtcgcggcggcgcggccgccgcggcaccacggacgagccatgaatgagcaggagaagagaaactgctcagagcagtagcctctcacttgatggtgaccg

SEQ ID NO: 12275 - DNA, 294 bp, Setaria italica
  Peptide Sequence Number=SeqID_78249
tttgttaaacttactttggttcttcttgtcatgaccctgccgtgctgcttggaagaacaccacaggggaacacctgcctccacatctcctccatccatggccacgccgggttctgcatggatgcactggccctgaaccggtctctcctctctgctgtcaacaaagacggggagacgccatttctaaccgcagtgacaagtggccgtaccagcatagcttcttttcttctcaagcactgctgtgatctgaaactgagagaggcaatcttgaagcaagacaagcttgggtataatg

SEQ ID NO: 12276 - DNA, 557 bp, Setaria italica
  misc_feature (528)..(557): n is a, c, g, or t
  Peptide Sequence Number=SeqID_78250
cggcgcagctgctcgagcacccgttcctcgcctccgccggcggctgcgaagccaccaagggcgaatgggtgtcgcccaagagcacgctggacgctgcattctgggagtccgacagcgacgacgaggaccacgacgtgtcgtcgcagagcaccgccgagaggatcggggcgttggcctgccccgcttcggccttgccggactgggactccgacgagggctggatcgatgtgctctccacgccaaccgaagcgtccgaggcagcgaccgcagcggacgccgtggaggccacttgcctcgacggcggtgtcgggagcgaagaggaagcgagcgcggaggccgtgccccacgacattgatgcggacagcggcgccggcgcccacaatgtaggagaagctgactcttcagctgagcacgagaggcgtcatccgtgtgtgaattcaggctgtgatgatgacgatgtcccatgtaaattacttcgcgacacaaacaaattaactaaattgtaaaattttagtcttttcgtccctnnnnnnnnnnnnnnnnnnnnnnnnnnnnnn

SEQ ID NO: 12277 - DNA, 262 bp, Setaria italica
  Peptide Sequence Number=SeqID_78251
gccagaacaaattacgagttccctttgatcaatcctcctcctcacgcgacaaagagcatcgccggcgatggcggcggcagaagcgaccacaacggcgacgaccagccggttcgcggcggcgtgcggcgcgctcagccagttcgtcagggcggccgaggccgagagggagcgcggcggcgcgtggcatcccgccgtgccggtgcggccactccccctcatgccgggcgccgacgtcgacgaagagcccaaggctgggcccgcg

SEQ ID NO: 12278 - DNA, 1020 bp, Setaria italica
  Peptide Sequence Number=SeqID_78252
cccaagaagcggcggcggcggcgccgccggagaggccctcttcggctttcgttttgagaagcctccaggactacaccgtcggggccatccccaccctcttctacgtccccgacttcatctcccagtccgagcagtcgcagctcctccaccacatttaccaagcgcccgcgcccaagtggaaatccctcaagaaccggaggctgcagaactggggaggagtggtacatgagaaggggctcctgccgcaggctttaccttcatggctaacaaggataaccgacagaatctggcagtggactggtttatttccttctgcgatcaatcatgtgctgataaacgagtatcatcctaatcaagggatcatgccacaccaagatggtcctgcctactaccctgttgttgctatcatatctcttgcttcgcctgttgtgatagatttcacaccccataaaaggcttaaagagcaggagcatactgatccacagaacatacagaccgatgagttgctggggccttctatgatggagagcaatggctctggctcacatgaatgcggaaccccaaatgaatctgatcctgcatcttcgtcacttatgctgatgccctgcagcctgttgatatttaaagatcaggcttatacagactacctgcatggcatacaagataatgagctgcataatctagacaaggtcgcgaatttgtcgcggtgccaagagttgaggcatctaaattcggactccatccaagggaccatggatgaacagcatggcaccttccgcaggactgccacaagagtctcgctaacatgtcggttggtactgaaagttcacaagaatctattcaaaatctagaaattctgattagacttgttttagaatagtacaccatcatgcccttgtaagatacagagacatgttatgggagttgtttggcaatcaattcttttttccccttttttgtaagaaacgattgcttcattcattaaagtcgatcggattacaatcgtttgagtaaaaaaaa

SEQ ID NO: 12279 - DNA, 308 bp, Setaria italica
  misc_feature (77)..(77): n is a, c, g, or t
  Peptide Sequence Number=SeqID_78253
ggtgaagcttcatctatgaatggagctgccagacttataaatgaagcttcaccaaccaccaacctaacatgccggtnactatagttggtgttggtgaagcttcatttataagtctgtcatctatgaatggagctgccagacttataaatgaagcttcaccaacaccaactaacatgcggcatatagtaattgaccagaaatcaaaagagacatgccttttttcatcgttgtcttaggttacatctcctataactttgtcatcggtgcttattcctactggggccccaaggcgggcaaacagatctaca

SEQ ID NO: 12280 - DNA, 480 bp, Setaria italica
  Peptide Sequence Number=SeqID_78254
ttcattagttcattccaaatagaactgtgtgcacatgtgacttcattaggactgcaggatgttagcttgcagctcacttcgaaaggaaaaaacaaaacaaaaaacaacttttgttatgaaaataacaaactgcatttcgactgctatattgtcaaggattaggtattgtattttcttaccttgaaagcattaggaattgtagcccatatcttgtcaaggatgatacctcctgatagagttccaaggattccacacactatagttattccaccaaacataagatctgcactcgcttgataaaaaaattcaatgagaaaggttacagtgaacagagaatgtactcagtcgtgatattgtgaaatagagtattaatctagatcagtgctaaactggacttaaattgtttatcttacgaactatttcagatggttataaaagccaatctagttcaattcatcataaaattagatctgcagctca

SEQ ID NO: 12281 - DNA, 573 bp, Setaria italica
  Peptide Sequence Number=SeqID_78255
accaaaaaatacatcaaatttgtccactgagctagcatgtagaccggtgtctgacatttggatatggagcaaagcaccttttgataaaataagataaaaatcgaaattagctacacaatgacaagagaatatgagtcaccacagatccacgctaacgaaatcaaagcataaaggtatgcagtctgctaacttcattagttcattccaaatagaactgtgtgcacatgtgacttcattaggactgcaggatgttagcttgcagctcacttcggaaggaaaaacaaaacaaaaacacttttgttatgaaaataacaaactgcatttcgactgctatattgtcaaggattaggtattgtattttcttaccttgaaagcattaggaattgtagcccatatcttgtcaaggatgatacctcctgatagagttccaaggattccacacactatagttattccaccaaacataagatctgcactcgcctccgaggagagacgggaggaggtggtggaagggcggtgccccttctggtgcggcaacgcgccatggccgtccctctcctcccccgcgccgcc

SEQ ID NO: 12282 - DNA, 693 bp, Setaria italica
  Peptide Sequence Number=SeqID_78256
aatatgagtcaccacagatccacgctaacgaaatcaaagcataaaggtatgcagtctgctaacttcattagttcattccaaatagaactgtgtgcacatgtgacttcattaggactgcaggatgttagcttgcagctcacttgaaagcattaggaattgtagcccatatcttgtcaaggatgatacctcctgatagagttccaaggattccacacactatagttattccaccaaacataagatctgcactcgcttgataaaaaattcaatgagaaaggttacagtgaacagagaatgtactcagtcgtgatattgtgaaatagagtattaatctagatcagtgctaaactggacttaaattgtttatcttacgaactatttcagatggttataaaagccaatctagttcaattcatcataaaattagatctgcagctcagaattgtttgttttacaaagatgaacagaagcacaagaagatcagaatccagaagaatttcagtatgtaaagaacaaccggctccaatggagactattcttctatgttgtaccaaaaagcaaaattgcaacaaaaaaactgttattgtccaatgggaggataaaaattgacacaaggcacatgcttatctgatcttgaacctcaggattaagcatctggccgtattctttgttctgttctaagcaaatcctggt

SEQ ID NO: 12283 - DNA, 567 bp, Setaria italica
  Peptide Sequence Number=SeqID_78257
ggagccattccagatcaatccaggtcaatacttttttgttcttgaacatttgtattcaacagagcaatttcaccaatacaatacatcaaatttgtccactgagctagcagtaggccggtgtctgacatttggatatggagcaagcacctttttatattttataaaataagacaaaattgaaattagctacacaatgacaacagcatatgagtcaccgcaaatccatgttaacgaaatggaagcataaaggtatgcagtctgctaacttcattagttcattccaaatagaactgtgcgcacatctcacttcattaggactgcagaatgttagcttgcagctcacttgaaagcattaggaattgtagcccctatcttgtcaaggatgatacctcctgatagagttccaaggattccacacactatagttattccaccaaacataagatctgcactcgcctccgaggagagacgggaggaggtggtggaagggcggtgccccttctggtgcggcaacgcgccatggccgtccctctctcccccgcgccgccagagctctccccgccccgt

SEQ ID NO: 12284 - DNA, 2161 bp, Setaria italica
  Peptide Sequence Number=SeqID_78258
agaataacaattaaaaaggtaccaagaaaaagtactaagtaagcacatgtacatatagctccaatgatcactttaaatatctaaaacatttagttatacctgcttgaacaactgagataaatcatcatattgcattgaaatacattacataaaggcaataaacattaaaacaaatcaatatttgacaattgcaaaaaaaaatgtctagaagtgctttttttttttgtaacgcaaaccaaacgggcctatcatatgtacagggtatagccaactgacgtgcaaatttacatttcgcatgtttgctagcacatggtaaataatccgactaagatcaccctccaaaaagaaaagggttatgacccgcacttgcacggattttagtcagatgtccgtgccccctcgttgtcatcaagcagtggcctgagatttgacctctcggcggcaggaacagcatcctcgctctcttccttgaaccgatccacgctggggacgaatatgccaataaaccagaacacagctgcaatgaaaaggatggatgtcaatataagagccgtggacctccagttattgattttgtcctgaagaagcccaacaagaggtgaagaaggcacatcaccaaatatatggattgaaacagtggatacagccattgccaatggccgcaaatgtggcttcacagtatgaaggcatacaaaatttactggtgcctgagttgcaaaaaccaaaatctccccaattgcaaagaagaatatgaatccatataggctcttgaaacaaaaggcgccaaagcagaatattgcccctagaaatgttgcgctagagagaagcttgaaagcattaggaattgtagcccctatcttgtcaaggatgatacctcctgatagagttccaaggattccacatactatagttattccaccaaacataagatctgcgctcgccatattgtagatctgtttgcccgccttggggccccagtaggaataagcaccgatgacaaagttataggagatgtaacctaagacaacgatgaaaaaaggcatctcttgtagtagttctttcatatctttgccgaaacgaccaatttcagtcatgagactctggccaaacctggagaaggataacttttgtgggacctttcctgcaagatcatcgattccaccaggcataacacgctttgtcccattattatttatctgatcttgaacctcaggattaagcatctggccgtattcttttgttctgttctgagaaaatcctttcagctctagtggctttatcacaaagcctagaataacaaaaggaatcatcaaaattgactctccccagaaagcagcacgccagttcagtattttcccaaccagtccaccataaacatagcctaatgctattccagttggtatgcacatgtagaacatagcaagccatcctgttttctgagctactggtgcattgtcatctatgaatggagctgccagacttataaatgaagcttcaccaacaccaactaacatgcggcatatagtaattgaccagaaatcaaaagagaccccacaaccagctgttgcgatagtccatactaacaagccaacaccaataagcctgaaaggattatgtctttttgccagggaagcaaatatcagtgaagccaccaacaatccaaccataaatgctgaggacagcacaccatcttcagcattactaagattaaagtctccctgaattcctgagcctgaggtgcacgtgccaccagaacaatttttgcggctaccattgacaccattacttgctattgctcctcgatcaacatagtttagcatgttgataatgcagaacatgacaagtaatctcttaggcgtgaaccaggaaggcttgtccccgccctggtcgctggtgctcgcggccaggcccgtctcgacgtcccgcaccacggtgaccgccatggcctccacgcctgctgctgctgctggcgccgcctccttcttagcctccaccgaagccgccgccgccgccgccgccggtgcctcccgcttggagtgctcctggtcgccctccgccacaggggtcaccgaacccggcgcagcagggagggggttggaggcggactcgacgtgggatcccgcaactggcaccacgacccgggcggcgttcgtcgttcgct

SEQ ID NO: 12285 - DNA, 302 bp, Setaria italica
  Peptide Sequence Number=SeqID_78259
cgtgtttcctcaatgaggtgatcagttagctgcacgaatgagcgtgttgtgacttgtgttcatgtgcttttgtcctcttagccatttatattagaacaggcattgtaagagggtgtttagtgatcttgtgtggcaatgttgtattattcttaataagcatagcacaaacgtggtcctggattatctctaggtgaaatgctgatccatttgagctcttcagctagcaagattcttatttgggtgaagatgaccacccaaagaatcatatgtttacacctgtagtagggtagtatggtctacgg

SEQ ID NO: 12286 - DNA, 479 bp, Setaria italica
  Peptide Sequence Number=SeqID_78260
tttaaagaaaataaaggaaaaataaaggaacaaaccaaattaagaattaacgacggaaatggtacattatgttgaattcatatcagcaacaatgcacatgaatagactagagaaggaggatcacatatataaggcgttcgagtattttgataaggatcacagtgggcacataacagttgatgagttggaggaagctctgaagaagtatgatatgggtgatgaggcaacaattaaagaaattattgctgaagtggatacagatcatgtgagtaactccaaagaaatgcccaaaataatctcacttgttgtttccactccaatcatatgatacattgtcattgtttcaaagatgttggataattgatcttggagtctttaaaggaggttttattaaagaaacagtagtatttttatggaataaagtaacaaaataaataagccattgacagcaccttaagtcctagacagtgattcaggaa

SEQ ID NO: 12287 - DNA, 289 bp, Setaria italica
  Peptide Sequence Number=SeqID_78261
gtgggattaaaagaaatgtttaaatcccttgatactgacaacagtgggactattaccctggaggaattaagaactggtttaccaaagctaggcaccaaaatctctgaatcagaaataagacagctgatggaggcggtacgttcttttcttgtagacccatagcattgaatcttaaaaacgtcagtagtgcacaaaaaggttgtactagatgcgcttatatctgaaaaaggaaagagatgaaagataccatactaaatttagtcagtatggcgacttgtatgaaattgaa

SEQ ID NO: 12288 - DNA, 1204 bp, Setaria italica
  misc_feature (6)..(6): n is a, c, g, or t
  misc_feature (1133)..(1204): n is a, c, g, or t
  Peptide Sequence Number=SeqID_78262
gatgcngttttgcgtggtcacattgatttctcttctgatccttggccttcaatatctaatggtgcaaaggattggttaaaaagatgctgaggcaagacccgaaagagcgcttgactgctgctgaaattttgaaccatccatggattagagaggatggagaggcaccagataagccacttgacattacagtcatcagtagaatgaaacagttcagggcaatgaacaagctcaagaaagttgcattgaagattgttgccgagaactttattcggtattgtaagtagtatttattgggtccttcttaagtaaattgttttagatccctggatgcggataacagtgggacaattactcttgaagagctaagatctggtttaccaaaacttggcactaaaatttctgaatcagaaatcagacagttgatggaggcggctgatgttgatggaaatggcaccattgattacgcggaattcatatcagcaacaatgcacatgaatagactagagaaggaggatcacatatataaggcgttcgagtattttgataaggatcacagtgggcacataacagttgatgagttggaggaagctctgaagaagtatgatatgggtgatgaggcaacaattaaagaaattattgctgaagtggatacagatcatgatgggagaatcgactaccaagagtttgttgccatgatgaagaataacagccccgagattgttccaaatcgacggcgcatgttttaatgctctcctacatttgatgtgaaaacggcttctcagaaattttccacggtctttgtaactgttgaggagaccatttcctactcggaagtggaagctagtcaggtgtctatgctgatattccatgcttggacaggggatggctctccactcgtgtgcccttcgatatggatggttggtggtcctttctggtgcctccttgttctaccatctcattttacaattttgccatgtatcgatccataatgaggtgtgccttctggtcaaagtttcatgcccctggaacttttatatgtaagaaaagggctagtaaaacagtttcaaatgatcatatcaggcaaaagtaatgaaatgccatctcatcttgtggtttttaccacttgatcaaannnnnnnnnnnnnnnnnnnnnnnnnnnnnnnnnnnnnnnnnnnnnnnnnnnnnnnnnnnnnnnnnnnnnnnn

SEQ ID NO: 12289 - DNA, 2051 bp, Setaria italica
  Peptide Sequence Number=SeqID_78263
cggcggccccgtcggcggacgcgggggtggcgggccgcgtgctggggcgtcccatggaggacgtgcgcgcgacctacaccttcgggcgcgagctcggccggggccagttcggagtcacctacctcgtcacgcaccgggagaccggccagcgcttcgcctgtaagtccatcgccacgcgcaagctcgtccaccgcgacgacatcgaggacgtgcgccgggaggtccagatcatgcaccacctcacgggccaccgcaacatcgtcgagctccgcggcgcctacgaggaccgccactcggtcaacctcgtcatggagctctgcgagggaggggagctcttcgaccggatcatcgccaggggccactacaccgagcgcgcagccgccgcgctctgccgcgagatcgtcgccgtcgtccacagctgccactccatgggggtcttccaccgggatctcaagcccgagaacttcctcttcctcaacgacaaggaggactcgccgctcaaggccacggacttcggcctatccgtattcttcaagcccggtgagcagttcagggatcttgttgggagtgcgtattatgtcgccccagaggtgctgaaacggcgatatggagctgaagcagacatatggagtgccggagttatcctttacatcctgctatctggcgttcctcctttctgggctgagaatgaggatggcatatttgatgctgttttgcaaggccatattgatttcgcgactgatccctggccttcaatatcaaatagtgcaaaagacttggtcaagaaaatgctacggcaagacccaaaggagcggcttactgctgctgaaattttgaaccatccatggattagagaggatggagaagccccggataagccacttgacattacagtcatcagtagaatgaaacagttcagggcaatgaacaagctcaagaaagttgcattgaagattgttgccgagaacttatcggatgaagagattatgggcctcaaagaaatgtttagatccctggatgcggataacagtgggacaattactcttgaagagctaagatctggtttaccaaaacttggcactaaaatttctgaatcagaaatcagacagttgatggaggcggctgatgttgatggaaatggcaccattgattacgcggagttcatatcagccactatgcacttgaatagattggagaaggaagaccacatactcaaagcttttgaatattttgataaggaccacagcggatacataacagtagatgagttggaggaagctttgaagaagtatgatatgggagatgataaaacaataaaagaaatcattgctgaagtggatacagatcatgatggaagaattaattaccaggagtttgttgccatgatgaggaacaacagccctgagattgttccgaaccggaggcgcatgttctaactgcagtctacaatttcgatggatgctttttgggaatattttgcccttagacatcttctcctggactcattttcttctgggaaaagccattaagactccatttgagatccatatctctgcagcccggaccagtttgtaccagaatggggtgcatgatatggctacttcaatatagatgctttgatcatcatctgactctgggtggcagtgcttcttctcatgcataatgcctttgaggttgttcagctgctttgatctgcatctttccccaccttccattctagcgtgtttcctcaatgaggtgatcagttagctgcacgaatgagcgtgttgtgacttgtgttcatgtgcttttgtcctcttagccatttatattagaacaggcattgtaagagggtgtttagtgatcttgtgtggcaatgttgtattattcttaataagcatagcacaacgtgtggattactaggtgaagatgctctcctacatttgatgtgaaaacggcttctcagaaattttccacggtctttgtaactgttgaggagaccatttcctactcggaagtggaagctagtcaggtgtctatgctgatattccatgcttggacaggggatggct

SEQ ID NO: 12290 - DNA, 710 bp, Setaria italica
  Peptide Sequence Number=SeqID_78264
tgctttggcatattctatgctaggtctgatgagcgtgaaatgccatgagaagttcaaaaactgcatgaggaaagtgaaaaaggcgggcaaggttggcttctctgtgaaatgcccgtatgagatggctatggcaacaatgactcaaggaatggacatggccatcatgctcagccagttgggcagccacaagcttgaactctagcattcgtgcagcttcgccctcagggcaggttgcatcttgattctcactgaaatacacatatcacttgacgtcttgattgaagattagaatttactactacttgatgtgccgtagcttattgtttcattggaggaacgcatagcttattgtttcatttggtctgcctaattgttctttgctttgtttagccgcttgaatattttggattcccaagcaggaaacatgtaggtagtatgtttcaacagctgactatatattggagaaagaaatattgttgatgctagctggtcaacagctcgagtaggaaaacaggagttacattgttgttactctgcactattactgtgcttaacttgtaaattgtagagggagtttatggccatggtgaattggtgatgatacacatggtcttattaattggaggtgtaaataaatgatggctttgcctcaaagctgaggtgagctactcagggcctgtttgtgcttaattcagtttgccagttgtatt

SEQ ID NO: 12291 - DNA, 1514 bp, Setaria italica
  Peptide Sequence Number=SeqID_78265
attattgcagcttgaggtgtctcactagcatcagtgcacgtcaatgtgcagagattccgggttagcttgtcattggggccaggcttgcggccaacgcagctaaaaatgagctcggcaagtgcatcagcagctttatcttgaagtacttcctcctgttctctttttatggcagccattaaaggtaaaatgactgggttcaacttgctaggcaaacctgacatccagactacagcagaagcaactaaagaacaaaccgtcacatgcaaattattctgaacacatttcaagtagcctgatgtagataatagaccttgttttgctgattctatgttatttaggacagttttttcactttctgaatgaagatccgattcagatggtaacaaaagctttgatgcaaagttgatagcatcatctacactcagcatatcaacattaaggtttacgccgctaatacaatctttgaaagcagcacaggaatcaattgagtggatcaaattattagcttcattgcgcatctttgtgtatgtccttgaaagttcagaatatggaagcacagagtcttttgtaggtaatgctggatcagaacaggtcaataagtccagcagccactctttcacggaagataagaaagctagcaatgcacccactgatacaggatctctgcccctcagatctttaaaccaagaaacaataaccattgaagccacctgtctttgaactcctgagagagacatgagatcatttgctagcggacttagaacaacttgccatgagtctacaggcaacttagaggcaaaaagcccaagggccattgatgtaagaactcgtgtatgagtaacagatttgtcagaatcagcaccaacaattatcttagaaacacttgtgggaacatcaaaatgtctttcatgggaagtactttcccctgtagaaccaaacgagatcattcttgtgtactcatgctctagcccagcagatctgatctttgcagcagctcttgaacgacttcctcggggaagggcaactggtaaaaacattttggtagaatccaatgctgagccaaatggagtggtagcaagttgtacccagttactaaaatatagcttcgcagcagattcaaggtccttctcagggcactgaagtacaagtttccaagcccgttcagaagactgaagaatctcatcatttgactccaaaagtaggttctggaagacaacctgcagtgcatcacctaatattgatgtcggccagaatttagatggggtagttccagataaactcccagtgttgccaacttcaagaagcttctccagtgtgcgtatggcagaacgccgaactgaagtaatactatgtctcataaagggccacagccggggcatcagtgtggctagaccataagggttctcactagaagtcaatttgtcttcttgctcagcagtctgagttgctctgtttagatcaaattctcccctttaagtaaaattaaactaaaaaaatttaaacttaaaacccta

SEQ ID NO: 12292 - DNA, 482 bp, Setaria italica
  Peptide Sequence Number=SeqID_78266
atgatgtatctgtttaggtctcgtgtcagctagtaatacaagttggaatacaacacggcaatgtagcaacatttgggtgagtacagacaggtcggccactgatccttcttagtttggttgatacaatacaacaagcgtgctctccgatacatgagctcattttcacttcccttcttctatatctgttctcccaactatattagatgtcttctgcgaagtgaattaaaaatatgtcgcaataaaagagatgaaaatcctgggagaaccacaaacactcttcttgctgcttgggtctcaaacaacttgcctcgctcaggagatcatgacgcccactttccttgcgaagtcgtcatcatcatcctccaagtcgtcgtcgtcgtcttggtactcctggtactcattatcctcctcagcgttgacgtcagctgcctcgtagtcatagtcttctgctgctgcctctacatcctggtgctcggttgtct

SEQ ID NO: 12293 - DNA, 1356 bp, Setaria italica
  Peptide Sequence Number=SeqID_78267
accaacttcgctaactaccccaagggcgagctcgcggtgtccatgatcgaggacttcctcggccacggcatcttcaactccgatggggaacagtggctgtggcagcgcaaggccgccagctacgagttcggcaagcgctccctcaggaacttgatcgtcgacgccgtccgcttcgaggtcgtcgagcggcttcttcccctgctcgaccgggcgcgccaagacggccggacgctggacgtgcaggacgtgctggagcgcttcgcgttcgacaacatctgccgcgtggcgttcggcgaggacccggcgtgcctcgccgaggagaacatggcggcgccgcagagcgccgagttcatgcgcgccttcaacgacgcgcagaacgccatcatggcccggttcatgtcgccgctcaagtcgctgtggcgcctcaagaggcttctcaacatggagcccgaaaggcggatgcgcgaggcgctctgcaccatccacggctacgccgacaggatcgtccgcgagcgcagggagcgaggcgacgccgggctggcgtccagggacgacttcctgtcgcgcttcgccgcgagcggcgagcacagcgacgagagcctccgggacgtggtcaccaacttcctcctcgccgggcgcgacacgacatcgtcggcgctgacatggttcttctggctggtctccggccgccccgacgtggaggacaggatcgtgcgcgagatccgcgcggtgcgcgcgttgtctagccacgggagcacgcatccgtcgccgacgttcagcttcgacgagctgcgcgacatgcactacctccacgccgccgtcaccgagtccatgcggctgtacccgccggtggccatgaacacgcactgctgccagcaggacgacttcctgccggacggcacgttcgtcgggagagggtggctgatgacctactctgcgtacgcgatggcgcgggtggaggacgtctggggcaaggactgcgaggagttcaggccggagcggtggctcggcgaggacggcgcgttccggccggagagcccgttcaggtacccggtcttccacgccgggccgcggatgtgcctcggcaaggagatggcctacatccagatgaaatccatcgtcgcgtgcgtgttcgagaggttcagcttccggttcgtcggcggcgaggagcggccggggctcgtgctctcgctgacgctgcggatggaaggcggcttgccaatggaggtgatcgagaggaagagttcggtaatctaggctggacctgtctgctttgtcgctagcagtatatgtctactttgatcagttgattgtatatcgacttgattatacaaccagtgattttccaactaaaaa

SEQ ID NO: 12294 - DNA, 237 bp, Setaria italica
  Peptide Sequence Number=SeqID_78268
tttactatctgtttgatcctttcctggaatgctacacaaagattagacttggtcatgctacctgaagcaattgcaatagttatggcacctactgacacaacaagaaaacatggtatatttcacctcacggatccaggtggtgtgggtgtgatccatgattgtcaagagagaggtttccatccacataaggcacctctagatggctcgccaatctatgagcagtgctcccacgtctac

SEQ ID NO: 12295 - DNA, 388 bp, Setaria italica
  Peptide Sequence Number=SeqID_78269
cttgtttgtttcttttatggtggttcctgtaaaattttggtcctgtgatttttcttctctacctgttcttgtggctggttctggttgcctggacaacaaaattctttagtgccagatcagaaggggagattggtcctcaacacatgctagctctttattttcagagtatcagagtgggttatttcggataagcctcatgcatgataaggtgctaaccactaatggtcaagataacattgtcgaaaggggaatctggaaaaaaatcaagtccaaaacgggcattgcaaggcacacggcgacaggatttgtgaagtagctactcatacacaggcagtgtatgcaggtacttcaatctctgctggaatgaaaggttcaagcaaagctatgg

SEQ ID NO: 12296 - DNA, 390 bp, Setaria italica
  Peptide Sequence Number=SeqID_78270
ccgtctgattctgccgccacgccaattccgtccgctgccaagcctggccgcctccgggagccccaagtcctccgccccgtggtttgtgtaaagatttcaggttggccaatagcgtggatgtggatggtgcgacagaggggacgatagcaggttggccatgcggcgagccgccggacatcagcatgccacacgacaccgaagagctccatcagccttgagagtccacggccatttgtaggtagcgctgatggagcactgcaaaattccttccatgtcgggagacaagtgccgtcattaccgattgtccaatctgatagatttatgaatctgccttatccaagtgaagaaacactagctagacactccatattaggacctaatggtcttcat

SEQ ID NO: 12297 - DNA, 224 bp, Setaria italica
  Peptide Sequence Number=SeqID_78271
ccacgcctcgccacctccgggagcccatgtcctctaccccgtcggtttgtgtaaagatttcaggttggccaatagcgtggatgtggatggtgcggcagaggggacgatagcaggttggccacgcggtcagccgccggacatcaacatgccacacgacgccggagagctccatcagccttgcgagtccacgggtaagttccttccgctcaatgtatcttcttatt

SEQ ID NO: 12298 - DNA, 165 bp, Setaria italica
  Peptide Sequence Number=SeqID_78272
cgggccaccgctgcccagtgccgcagccccgcgcgggggacggcatcgcggtcgcggaggtggcagcggacgccgctgctgcgccaagccggcgtccgcgctcgcctcgaccgcgccctcactcccctcgcccaactcggtgtgggtcgtgcagggcctgctcct

SEQ ID NO: 12299 - DNA, 345 bp, Setaria italica
  Peptide Sequence Number=SeqID_78273
tttattctatagttctctatttgcaaattcattacttaataatgatctaattggctgtgtcccgagtaaaagtccagtgcctttcttaggaaaaactagatgttgttccttttttatattcgttggaaactcagtatgtagatttggttcgcctctacataaacaaggatgtattatctgcaggcatctaacacagtttaccaagaaggggttttagaccccattgagcttcaagtttgtggagcatcacaagacaccagcatttacctttatctcatcacatgacgaaagtgtctggaacttggatggagagatttttcagggtcgtgtgaggtctcagtccaa

SEQ ID NO: 12300 - DNA, 335 bp, Setaria italica
  Peptide Sequence Number=SeqID_78274
tacttttgttttccttgttccttgacagaaaatgttagtgaatatgaatggagaatcatataccaacaatgatactaatttgagctcttgtttgtttctttttatggtggttcctgtaaaattttggtcctgtgattttcttctctacctgttcttgtggctggttctggttgcctggacaacaaaattctttagtgccagatcagaaggggagattggtcctcaacacatgctagctctttattttcagagtatcagagtgggttatttcggataagcctcatgcatgataaggtgctaaccactaatggtcaagataacattgtcgaaagggg

SEQ ID NO: 12301 - DNA, 219 bp, Setaria italica
  Peptide Sequence Number=SeqID_78275
actagtagaatttttacttactactaacctgttcttgtggctggttctggttgcctggacaacaaaattctttagtgccagatcagaaggagtatcagagtgggttatttcggataagcctcatgcatgataaggtgctaaccactaatggtcaagataacattgtcgaaaggggaatctggaaaaaatcaagtccaaaacgggcattgcaaggcacac

SEQ ID NO: 12302 - DNA, 294 bp, Setaria italica
  Peptide Sequence Number=SeqID_78276
cgagttcttctcccgcagcaatatcttgattagcaggaagacaataaggaagtgtccaacgctcggttgcagatcttccgaagcttaaacagttgtaggcagcagagcggtttagcatagtttttttctagagctccgagtgcaggggtaggatctcttcatgcaaccaatagggattgtgatatacgacttacaagcaggcattaggcacagtggcacaccatagatgttgattttagtcgtcgtaccatcatgcttaactgattgtttgttagacgcagcctgaattgcttt

SEQ ID NO: 12303 - DNA, 313 bp, Setaria italica
  Peptide Sequence Number=SeqID_78277
atcattattcttatcaggtcatgctacctgaagcaattgcaatagttgtgtcagtaggtgccataacaagaaaacatggtatatttcacctcacggatccaggtggtatgggtgtgatccatgattgtcaagagagaggtttccatccacataaggcacctctagatggctcgccaatctatgagcagtgctcccacgtctacatggacactgatataaagtttgatatgattgatctccgagaacgatgacaaagctcaacttcatttggtatatttggagtctatacttctggcagctatttgttgaactg

SEQ ID NO: 12304 - DNA, 629 bp, Setaria italica
  Peptide Sequence Number=SeqID_78278
aattcattacttaataatgatctaattggctgtgtcccgagtaaagtccagtgcctttcttaggaaaaactagatgttgttccttttttatattcgttggaaactcagtatgtagatttggttcgcctctacataaacaaggatgtattatctgcaggcatctaacacagtttaccaagaagggtttagacccattgagcttcaagtttgtggagcatcacaaggtagatatacttttctcccgtttaatcccttgtggttgaatttaacagagctttccatcatctgcagacaccagcatttacctttatctcatcacatgacgaaagtgtctggaacttggatggagagatttttcaggcgtgtgaggtctcagtccaagcttgccggggtcttgtcaacctctttgcttctggcccagaagtgtagtaatgccgctcgtaagttccttgttgcatgaaggaagatccgccaagagttcatatttttatgtagagaggtgtctttatttaactcttgtatgttgtacactctttatttgtatttatagagaattagaatactttacccatagatatactgtggtgtggaaactacagcccattttttcccaacattgtcaaaaaaaa

SEQ ID NO: 12305 - DNA, 458 bp, Setaria italica
  Peptide Sequence Number=SeqID_78279
aaaaacaaaaggttaatagtgacagatagagcagggcatgcatacgacacgctagcatcattatcagatatagaactcaaggcacttgaaggtgttgttgcagtgggtggtgatggtctatttaatgaagttctgaacgggatacttagttcaaggcacaaggcttcttatcctccaactcccgaggggtttggatattttgggagcaatggaaactgtaaagaacaggcaaagaatgggctaaactgtagtatgcccataccagattctgtgaataccatgtttccagggaattcaagtaaatgtgatgaccatgaacctcttctttcaacttcacaacctacaggactagagataccatcatcaaattctagtaaagaaccatgcattggagataaggatcatttagtctccttcccaaatgactggttcaggcttggcataattccttctggctc

SEQ ID NO: 12306 - DNA, 534 bp, Setaria italica
  Peptide Sequence Number=SeqID_78280
ctggagcacaaccactacgatttcgtcaaaagagacctcgcaaaataatctgccgaacaaattgctttgtatgcaaggaggcttcaacatctggacaaaattcagaggatgagattgcagacagctccagaacaatatgcaagaacccaaagtgggtctggtccgaaggacgtttcctcagcgttggtgcagctgtcatttcatgccgtaatgaaagagcacctgatggcctggtagctgatgcacacctctcggatggttttcttcatcttcttctcatcagagactgccctcttcccctttacttgtggtgagtgaaatgttactgtcttgctgagcccatgatgcaacttcttccagacttcagagtacttttgattggaatttgtaaatctgtttctcggcaaaagataaaaacaataaaaaactatttcatcagaacttatttaattgcatttgaattggaacttgaaacctttttgtatctgttgtctgtatgcatgggtgaatcttaaggcaccagagaatgtcaaa

SEQ ID NO: 12307 - DNA, 580 bp, Setaria italica
  Peptide Sequence Number=SeqID_78281
tttccctttccgttcaagttacattggaatatgctgttcaggttgagacctacacattgtcaaaagccaacaatttggttatgaatgtacgaataggtgcgatcgggtcgcttttcttggatcttctatcaggaagtggaatgttcaccaaacaggagatcgacgagatagttgagattggttatcttaatgggcttttcgtgcttgcacgttcaattggtctgattgggcacactttcgaccagaagaggctcaagcagccactctaccgtcatccatgggaggatgtcctctacaccaagtgagatagaatcattctttgcgccggaattattatcatcacctagggcttccatctgtctgtacacttcataaagttgagcacaattgcataaaagtttaaagttgtgattgatggtgaaactaggagaggaagaaaacatcactagtcagcactagtctgtgtgtttatactttatgtgaagctgcaaattcaagtctcaggtcctgattttttgtcctgtcatgaaacaacaattaaaagtatcctctccaatatcatatgacctaatggttcatg

SEQ ID NO: 12308 - DNA, 500 bp, Setaria italica
  Peptide Sequence Number=SeqID_78282
tacaaagaatggatgcggacacctacgcgtcggcatccgcagggagatggtggaaggtggggttggtgacggcggcgacgagaagaaaatggactcagcgtccggcggattctcgccatttttgtccacgcgacgtgccttgcttggagggcggaccgtcaacatcatcttcttttctggcggcacaacccatcctccatggctggtccttcggcggccatccaaatccttcccatcttcacttatttttgttgtccctgcaggttcgcgaattcgcgaaatagcgccggcgaggaggcccctttatccctttaggcaagcaaagcctttgggagcaactaggaaagccttacccctcttgccagatcagaaggggagattggtccctcaacacatgctagctctttattttcagagtatcagagtgggttatttcggataagcctcatgcatgataaggtgctaaccactaatggtcaagataacattgtcgaaagggg

SEQ ID NO: 12309 - DNA, 715 bp, Setaria italica
  Peptide Sequence Number=SeqID_78283
tcgtgagttaatcatcatagcaagtggttgcaatttgatttctatcctcctgtccttggcttgatgaccaagtgttcgacgaaatgcccatgtaatcactttgttctatgagtaatcatttttattctgttgcatctgcacaagtgcaactgggccatccatcttcccattgaaaattgatgcaagttgagatgcaatggcagcttttgcaacatcgatgccccctgtattgtgccctcaagatcaaaaaatcctcagttttgagtatttctcaaatgtgctgtgaacactcacaatctatttggttaattgctcaagagaagtcccatatcatttttagaatgtaacactgtatgacgtcgttgtggaattgccatcctaggactctcatttcattttagagcgtagtaatgtatgatgtcatcattagactacattaaaactttagcctgtaatatggtgaagcattctaagaagaagtgatgaagaattcgtactttcatattctaatgtgctgtacttatgatgtaatttttcatcccttttcttcttcagccatttgtaggtagcgttgatggagcactgcaaaaatccttccatgtcgggagacaagtgccatcattaccgagtgtccaatctgacaggcggattcagaaatacctcccatgtcacgatccatcccacggtcggatgcagatcaaatccttgggtgctg

SEQ ID NO: 12310 - DNA, 465 bp, Setaria italica
  Peptide Sequence Number=SeqID_78284
aaagattggtgatactgctggaaccattgacaacataattcagtgcaagctttacaggcctggctccgtcggttttgtgtctaaatcgggtggcatgtcaaacgagatgtacaacaccattgccagagtgacagatggtatttatgaaggaattgcaattggaggggatgttttccctggatcaactctatcagatcacattctgcgttttaataacataccgcaggttaaaatgatggtagttcttgggctgcagctttcggacttgcttggcatagataggtgagatgatgacaagggagttcagagggatggtggaggaaccaagccagctggaggttgtgtgtgtggaggtcaggaagagagtagcagaatgggagtcattctactagctacagctgagcaagagggtgacattgatttccagttctcgatggatatgttaggagaatacaatgatttaat

SEQ ID NO: 12311 - DNA, 472 bp, Setaria italica
  Peptide Sequence Number=SeqID_78285
tgaggcaacattcaatgaagttatcatattcaattgctttgttcttgcccccggtccttgtcaaatttagacacaagcaggtctagcacggttggcgagacagaatatcccagactgagaagagcatcacgcagttcagatgagtcaatcttaccacttcgatcaccatcaaacctttcaaatattcctctccaattctgaagactgtaaaatacagaagtaaactccttgggtccgatcttgcggacgttggtgttggtgaagaggtacatgaggaggtggacggtgcggaggctgaagctctggttatagcctgagagcgcggcctgcagctccttatcatcgatcatcccgcttccgtcgcggtccgccgactggaagcaggccaccacgttggggtcggtcccgggctggaacgcggacggcaccagcgacgcgaacgggctcccgtacccgcccgcgcccccgtacg

SEQ ID NO: 12312 - DNA, 942 bp, Setaria italica
  Peptide Sequence Number=SeqID_78286
ccaattccgtccgctgccacgcctcgccacctccgggagccccatgtcctctaccccgtggtttgtgtaaagatttcaggttggccaatagcgtggatgtggatggtgcggcagaggggacgatagcaggttggccacgcggtcagccgccggacatcaacatgccacacgacgccggagagctccatcagccttgcgagtccacggccatttgtaggtagcgctgatggagcactgcaaaaatccttccatgtcgggagacaagtgccatcattaccgagtgtccaatctgataggcggattcagaaacaatatgtatgccttttggtcatatttatgtctgcaatatgttcctattctgtttcacttggcttaactataatgtggtcatttagttattttctaatgtaacatttagacaccacttatgtaaaactgtaaagggagaattagctgacatgttagttatgtgacaaagacaatgtaattgcttgatgattgttaagcaaaaaggtaggcttacagggaacacatggtactaatgcatgtcaataacttgttgtgcaagtacttaagttcattttctcttatttatgtttacagttttgcagcaaattccccttcaaaaagtgttgcagaaatttttggaaaacaacactacaactaacatcaaatttcgttttcagttactaaatctgacaattttttttcgtccaccagcctcccatgtcgcgatccatcccgcggtcggatgcagatcaaatccttgggtgctgaccgagggatcaccacgcgcggccatagcaatcaacatcagcagttcttgacgaagaccacgacgtacagccctaagcgacgcctggtccatgacgccaaccgagttgcgccctctgacattgtctgagtcagctgcaagtgcagagtcttactctgaacccatgt

SEQ ID NO: 12313 - DNA, 635 bp, Setaria italica
  Peptide Sequence Number=SeqID_78287
tgtcgtctattgttccctacttaacccattgcaacaactggtttctgaaccttcccttgtttcaagggttagtgggacatgcgctcgtctattcaaatcggaagtgcagtttggccatgctggtgcaaagagtggtggcgagttggaatcagcccaagctaagaatgaggcactaagggaagctggtgcaattgtgcctacttcatatgaagctctggaaagtgctattaaggagacatttgagaaactggttgaggatggaaagatttctcctgtggctgaaattacacctccccccattcccgaggacctcaaaactgcaatcaagagtgggaaggtccgggctcctacccacatcatctccactatctctgatgacagaggcgaggagccatgttatgctggtgtacctatgtctacaattattgaacagggttatggagttggcgatgttatctctcttttgtggttcaagcgtagcctgcctcgctattgcactcagtttattgagatatgcatcatgctttgcgctgaccatggtccctgtgtatccggtgctcataactctatagttactgctcgggatacacagggaccatggtcagcgcaaagcatgatgcatatctcaataaact

SEQ ID NO: 12314 - DNA, 1790 bp, Setaria italica
  Peptide Sequence Number=SeqID_78288
tttgttgaacaaacacataagtgctatatataagatgcggcattttctgaggctaaccatacacacccacaggcatcccagcaagcacattcaccggttttattttctgtcaagagtacaattttatgattcgcaacgcagcaaccatcaaaattccagaatttaaactcagctaagaacaactctgcacataaccatttttacacaactggcatgctctgaagtctgaactgtggagtacactgccactaggcgatgaggaaagggagcacggtgagcatgaaagcctcgtaagtaaacgtcgcagacccggagtatgcggtgtccttctccttgaacttctcagtcagtcccttaacagtgagacagcatctgcagaggtaaaagaaagaaaaggtgaaatagttaggattgtggcactgggcaaactgaaagcatattggatgtattcactctttccagtattaaacatcaaaatcatcgtgtatcagaaaatatggctgaaactttggaggatagttgatgaacaaaccagttattagtttgaccttttgcagcttgttagttaagacaagtttaattcaaaatatggagagaaaaaaactgttccaccatgataaatttcataggcgctatcagtgggttatggacatccacgacaacagcactgtatgattcattagactatccataacagaaaaatctgaaaacaaaaaaattggcaaacagtgaagaaataaagacgaattaacttgaaggaaggcccttactcaatgaagttatcatattcaattgctctgctcttgcccccagtcttgtcaaatttagacacaagcaggtctagcacagttggagagacagaatatcccagactgagaagagcatcacgcagttctgaggagtcaatctttccacttcgatcacggtcaaacctttcaaatattccctgaacgatacagtgaaatattagtatgtgatactaagcattactttattacatcaaccgattggtttgcttatatagcacagaagtaaaggttaaagaaaaggagcaataagttgcagaacatcttactctccaattctgaagactataaaacacagaagtaaattccttgggtcctgaaaagatggaaaacgaaaattagcatttgaaatacttaggaaagtaagaggtacaggagatacgagggaaatggtgaaactactatatgcatgtctcatgcttgtaggggaaaaaggagaaagaaacacaaactatgccagactgtcctagttgttagagcgaatgggtagagagtgacatgaccagtaggcagtaccacttcatagttcatactgcaaagaagttccatggttgcaataagactgctaacaagaacttcatgttacttgcagcatgtactcatgacttgaactcgacatttcttagcaaaagaataataaaaacaacatagaaaatgacaaagaagcacaacttagtgctgatctttggagttgagacaagaacgtgacaacccatgacttgatctctacattttagagcaaaggaaaacagaaacaacatacgaaactcttgcaaaagtgatttagcttgtgaagttagtattttcaacttatatagaatccttaacaaacagaatcggaatctaaagtacatgcatcacagagaagtgatatgccagagcagaatcacttcatagttcatacactacaaaaagaaaagtcccatggtttcaataagattagtaattggaatttcctgtttattatacttagtgctgtactgc

SEQ ID NO: 12315 - DNA, 1252 bp, Setaria italica
  Peptide Sequence Number=SeqID_78289
tacttactttacaaacttcaacaacctacaggactagagataccatcatcaagtatgttcctgtttacatgttgtgcatatgttttatggaaagttcttgtgtaagtattctggtggtttcttgttgcagattctagtaaagaaccatgcattggagataaggatcatttagtctccttcccaaatgactggttcaggcttggcataattccttctggctcaactgatgctattgttctcagcacaactggggagcgagatcctgtgacctctgctctgcttattattctcggcagaaggatgtcacttgatatagctcaagtagtcagatggaaaagtagcccaacagctgaggtcttgcctactgtacgctatgccgcttcatttgcaggatatggcttttatggagaagttatcagggagagcgaaaactaccggtggatgggtcctgcacgttatgacttttctggaacaatggtctttctgaagcataggtcgtatgaggcaaaggttgcttttcttgagtctccaaacactgattcacttacagaatcagctgaggatgatgtaactggagcacaaccactacgatttcgtcaaaagagacctcgcaaaataatctgccgaacaaattgctttgtatgcaaggaggcttcaacatctggacaaaattcagaggatgagattgcagacagctccagaacaatatgcaagaacccaaagtgggtctggtccgaaggacgtttcctcagcgttggtgcagctgtcatttcatgccgtaatgaaagagcacctgatggcctggtagctgatgcacacctctcggatggttttcttcatcttcttctcatcagagactgccctcttcccctttacttgtggcatctaacacagtttaccaagaagggtttagacccattgagcttcaagtttgtggagcatcacaagacaccagcatttacctttatctcatcacatgacgaaagtgtctggaacttggatggagagatttttcaggcgtgtgaggtctcagtccaagcttgccggggtcttgtcaacctctttgcttctggcccagaagtgtagtaatgccgctcgtaagttccttgttgcatgaaggaagatccgccaagagttcatatttttatgtagagaggtgtctttatttaactcttgtatgttgtacactctttatttgtatttatagagaattagaatactttacccatagatatactgtggtgtggaaact

SEQ ID NO: 12316 - DNA, 1236 bp, Setaria italica
  Peptide Sequence Number=SeqID_78290
cgacaatgttatcttgaccattagtggttagcaccttatcatgcatgaggcttatccgaaataacccactctgatactctgaaataaagagctagcatgtagttgagggacccaatctccctgccacgaagaatggaattattaactattttccaaaggtgaagtatgtctgcgagcccaatatgttgcagtacaggatgaataggcctatctccatcgtgatgctggaaagtgtatattagctatcgatggagataggcctattcatcctgtactgcaacatattgggctcgcagacatacttcacctttggaaaatagttaataattccattcttcgtggcagggagattggtcctcaacacatgctagctctttattttcagagtatcagagtgggttatttcggataagcctcatgcatgataaggtgctaaccactaatggtcaagataacattgtcgaaaggggaatctggaaaaaatcaagtccaaaacgggcattgcaaggcacacggcacagatttgtgaagtagctactcatacacaggcattgctagcttctgtatgattttccttttgaattgttgttctgatgagggaaagactaacttgtggttagcacattcattctttattcaggcagtgtatgcaggtacttcaatctctgctggaatgaaaggttcaagcaaagctatggccagcaatgaataagcctcccatgttgggagtccattccgccatcagctgcagaaggctcgggtgccaaccgagggatcaccacgcgcggccgtagcaatcaacatcggcagtcctcaacgaagaccacgccgtacagccctaggcgacgcttggtccatgacacgaaccggacgtggcattggctcaactctgacagtttttagcaggatggacaatgtcgtgcgccctctgacgttgtcaagtcagctgcaaatgcagagtcttactctgaacccatgcttcgactatgtccaataacctatccatttcgggctttccagatatataagaaaattcatttgtccgacgcaatttagaatgaaacaattattatagaaatagcagtatgttctgttggtgacaccgttcaccagtttatgtttctcggaattgcattgcgaagtattggtgcatctcatatgttgcggactgccatacgacagtaacatgatcaagtgtgcaatttatatttgtctactaagaaaaaaaaaaaaaaa

SEQ ID NO: 12317 - DNA, 862 bp, Setaria italica
  Peptide Sequence Number=SeqID_78291
ttgggggaaaggtagctttttttgtaactccagcatgctatatgcacaggtgaaaatggtattacagaatgtgacggtttttgtttggcaaatggcaacacagcaatactttgccatttctatctttttcaatactgaactgagtattcattacctcttggtgtaagctggtttttgtaaggcaacactaagttactttgtttcctgtccttgacagaaaatgttagtgaatatgaatggagaatcatataccaacaatgatactaatttgagctcttgtttgtttctttttatggtggttcctgtaaaattttggtcctgtgatttttcttctctacctgttcttgtggctggttctggttgcctggacaacaaaattctttagtgccagatcagaagggtatgccattttctagcccatttcttatagttatttctatcttgtgctgcctgctaggcctataatgcctacaattatcatgaactgctctgtttcataattgtgggagaatgaaacatgtcagtgcttcagagtttctaagagcattaattcatcgtgatgctggaaagtgtatattagctatcgatggagataggcctattcatcctgtactgcaacatattgggctcgcagacatacttcacctttggaaaatagttaataattccattcttcgtggcagggagattggtcctcaacacatgctagctctttattttcagagtatcagagtgggttatttcggataagcctcatgcatgataaggtgctaaccactaatggtcaagataacattgtcgaaaggggaatctggaaaaaatcaagtccaaaacgggcattgcaaggcacacaggggatagg

SEQ ID NO: 12318 - DNA, 1775 bp, Setaria italica
  Peptide Sequence Number=SeqID_78292
gctcctcggcgcagccacggtggggctgccgcgggccaccgctgcccagtgccgcagccccgcacggggatggcatcgcggtcgtggaggtggcagcggacgccgctgccgcaccaggccggcgtccgcgctcgcctccaccacgccctcactcccctcgcccaactcggtgtgggtcgtgcagggcctgctcctccctaactctgcctcgcctcctcctcctccgacgtgcttgcgggcaccggcatcgccgtcactgtcgaggtccccgacatgctgttccagccccgcgcctcctcaaccaaggccgctgccgcctgattcggccaccacgccaatttcgtccgctgccacgccttgccgccttcaagagccccaagtcctccgccccgtggtttgtgtaaagatttcaggttggccaatagcgtggatgtggatggtgcggcagaggggacgatagcaggttggccacgcggtcagccgccggacatcagcatgccacacgatgctggagagctccatcagccttgcgagtccacggccatttgtaggtagcgttgatggagcactgcaaaaatccttccatgtcgggagacaagtgccatcattaccgagtgtccaatctgataggcggattcagaaatacctcccatgtcacgatccatcccacggtcggatgcagatcaaatccttgggtgctgaccgagggatcaccacgcgcggccatggcaatcaacatcagcagttctcgacgaagaccacgacgtacaaccctaagcgatgtctggtccatgacgccaaccgagttgcgccctctgacattgtcgagttagctgcaagtgcagagtcttacaatgaacccatgcttcaactatctccaataacctatccatttcgggctttccagatatataagaaaattcatttgtcagacacaatttagaatgaaacaattattatagaaatagataagtgaaatctgttttagtctcatcagcatgttccgttgagtgtcaccgttcaccagtttaagtgttttctcggaattgcattgcgaagttttggtgcatctcgtatgttgcggactgccatacaacagtaacatggtcgagtgcaatttacatttgtctactgacataattgcttgccagtaagatgagaatgctatttatttatgatttgtactgtccgtagcaacgcacgggcatgatcctatattattaaagcatttttgtagatagatttagcgttctcctcctcctgttgcacttgcagggaagaaagctagctgggtgcctgatctgctcctggtgcttgccggcaggaagaaggaagagctactggtaggtggttgctgctgctgtcttggtggacagaagaacagagcagaaggtgtgctggtgattcgagctgttgcttgctcatttatggaggaagaaaaataaagaagctagctattgtggattgcttgctcggtggagaaaggaagacaggaatgatggttgaacaggggagcacttcttgctggattgggtttggtgaggctgcgtcagcatccagagatttgtcattttgtttgcttgaaattgttgatgaatccaaggtgaactctcgggattagttgccaataacaaatgatcagatataaggtaaccaagagatttcatcggcgcgtctccacttacctgtacctcagatttagagtaagctacctgcagcttctgctcaaggtcatgcaccttcttctcaagttcaacgctcttgctttacttttt

SEQ ID NO: 12319 - DNA, 1468 bp, Setaria italica
  Peptide Sequence Number=SeqID_78293
attctctagaaaaacaacttttgaggcaagtcagcaacattaaagaagagtatgaggatctttatgtcgaaagcactatcagagatgaaatttaccaaactgttacaagaaaattggttgatagtcataggaacatcttggaagatactgctcaaaattttcatgcaaagctgtcctcacttgaagctgcactctcagaaaaggacaaggcgttgtctttatctaatgaagaaaaccagaagttaaaggaaaattgtcaatactagaaaaagaagcatttcgtccaaaataatcagcaagatctagagctaaccaagcaagagagtgaggaaatggtactccgtgacattgagatggagactcatgtggcgccacaaagaccatatgagatttctgatcaggatatgccgtatgaggagctcattaacctgaatcagactttagagattgcctcaaccaccttaaaagaagttgaaacaaaaaaaattggattatagtgatatcctaggtaaaagagagcaagaaaagcagctagactgcattatggtatcaatcatggatttgtcaaaagaatttgtggagattgaacataaaatgtcagaagatataaaaggaaatgacaaaaagacagaaaatctgaatgatcgatgcaaccatatggtacaacaggccatcgtactgacaaagaaaggtctatggtacaagcaaatgcttgacacaagacgttctgagctccgaaaagctgaatctgaggtcgatattttgggaaataaggtcaatgcactcttaagccttgttcaaaagatatatgtaactcttgagcactactctcctgtttttcagcatcatcctgtgctattggatgctttcttgaagacatgcaagcttgttgcaggcataagaagcagacaaaaagaggaatcagaagacacaacataacttggaacagctataaaattaaggtccagtattagttgagagtagcttaagggccagtggaggtattgatttcattgaggaacagcatacagtcacaagactatgagatcgatccatggctaaattggctctgcaaatctgcagccacaaagaagttgatgtggtccattggactgaattttgaaaccttaggctgtactttcactgctcactccgcagacgatttggtagattcacgtccttgatggtgtatataggaagtgatacacatcctaatgtataaattatgatagttcacaatctgcgagggtgatagcgtttttgtcagaagcctgtatagtaatgattttgcttgtatacaagccatagtcatattgtaagcattcactacttcaagatatctttactagattataaatcttataaattttgtagccctggtttgtactaataatcttatgagcatgtacagaatattcttatgtactacatgtgttcactttcaaggaatcaaatctttgcagggaaa

SEQ ID NO: 12320 - DNA, 3229 bp, Setaria italica
  Peptide Sequence Number=SeqID_78294
atatgggtagaaaatgcaagcatcgagctcagcatggtactactttttgtaaaaagcaccgcctccggacaaacttggatgcaatgcaccctgaaaatctgttgggttcatctgaggtaccccatatgagggaagaatatccgaataagtgggtagaagaagtttctaagtcacaaacaatgtacagcgtagactctgaaacagataagaatgtccaggctgctatgcaagtgaaattgatgcccactgtggctacagagatctcaggtgaaaaagcttgtgcaacggagaaaattgatctgtgcactgcgtcaacttccatcacaaatactgatgatgttcctctttgtattggaattcgctctcatgacagtattgttgagtgccaagattatgccaagcgacatactctttactgtgagaagcaccttccaaagtttcttaaacgtgccaggaatggaaagagtcgacttgtttctaaagatgtcttcgtcaatcttctgaagggttgcacatcaaggaaagataaaatttgtttacaccaagcttgtgaatttctttattggttcttgagaaacaacctttctcatcaacgcaccggtcttggtagtgaccatatgccccagatactggttgaagcgtctaaaaatccagatgttggacagtttttgttgaagttgatatctactgagagagagaaattggaaaatctctggggctttggtacaaatagatctaagcaaatctattctgaaaacaaagaaggatctgcggtgttgttgcatgaagagggagctaatctttcatccggtccgaagtgcaaaatttgtactcatgagttctctgatgaccaagctcttggattacattggacatctgcccacaaaaaggaatcccggtggctgttcagaggttattcttgtgctgtatgcatggaatcgtttaccaacaagaaagttcttgaaagacatgtgcaggatgttcatggggctcaatacctccagtattcaattctcattcgatgtatgtcatgcaacagcaatttttttgaacacagatctgttgtacccacacatagtttctgatcatgcccaacagttcaggcttcttgatgtccctcaacgacctaacggtcgatctgttcaacaaacagaagggacaagtggtatgctcctttatgataatcacaacgttgagaaggatgatggctcacagaagttcgcctgcagattatgcgggctcagatttgatcttctaccagatcttggccgccaccatcaagtcgctcatatggactcaagtgctgtgggcaacattccaccgggatgtggaaagtatcagcttaaccgtggtcgacattactattctgctttcaagaaaagtttacggccaacaagtacattaaagaagagtagtagctctggaattgagaaaagtttcaagtttcaaagctccggcctatctatggtaagatcacaaacagttgaatctgaaacagccagcctaggcaagttaccagatttccaatgctcagatgtcgcagaaactttgttttccaagattcaaaagacaagaccccatccaagcaaccttgatattttatctgttgcccgttctgtatgctgtaagacaaatcttcttgctgcattggaagttaaatatggatctctacctgagaacatatttgtgaaagctgcgaagctatgtagtgacaatggcatccaaattgattggcatcacgaggagttcgtttgccctaaaggttgcaagtctagatataattcaaatgctttgcctcctatacagctcatgtcagctgattttccagaagctccttctgtgattgatcctccaaatattgatgaaatgtgggacatggatgaatatcattatgttcttgattcaaagcactttgtatggaagcttaaaaaggagagagttgttctctgtgaagatgtaagctttggcagggaggaagttccaattgtctgtgtcattgatgtcgatgcaaaagattctttcagtacgaagcctgaagaacttctgccacatggcagttctgtgccgtggcaaggtttgcactatatcacaaagcgtgtgatggattcatctcttgttgattcagagaactctatgcctgggtgtgcatgttctcatactgaatgtttccctgagaaatgtgatcacgtgagtctctttgacggtgtgtacgataacctggtggatatccatgggacaccaatgcatggcagatttgcatatgatgaagatagtaaaattattttacaggaagggtatccaatatatgagtgcaattcatcatgtacttgcaactcatcctgccagaataaagtattgcagaaagggctgcttgttaagttggaactcttcagaactgagaataagggctgggctattagagctgctgaacctattccacagggcacctttgtctgcgagtatgttggtgaagtcgtaaagaccgatgaggccatgaagactgcagaaaggatgtcaagtagtgagtgcagttacttgtttgacattgcttctcagattgatagggaaagagttcagactgtagggactgtcaaatacatgattgatgccacaagatctggaaatgtgtcccgctttattaatcacagctgttccccaaatctcagtacccgtttggttttggtggagagcaaagattgccagcttgctcacattggcttgtttgctaatcaagatattgctgcgggagaagaactcgcatatgattaccgacaaaagcttgtaccaggcgatggctgcccctgccattgtggatccaagaattgccgaggccgtgtctattgatatttgcaggaagacaataaggaagtgtccaacgctcggttgcagatcttccgaagcttaaacagttgtaggcagcagagcggtttagcatagtttttttctagagctccgagtgcaggggtaggatctcttcatgcaaccaatagggattgtgatatacgacttacaagcaggcattaggcacagtggcacaccatagatgttgattttagtcgtcgtaccatcatgcttaactgattgtttgttagacgcagcctgaaatgaaagcaattcaggctgctattgcgtgtaggtgagattctttatcattgtaaaataccttcattcaaattttactgctcatgagcaccatcatcgaagtgagttaaaccggttatcccaaaaa

SEQ ID NO: 12321 - DNA, 2201 bp, Setaria italica
  Peptide Sequence Number=SeqID_78295
ttagacaagggacctgctcctcccaactccgcctctcctcctcctcctccgacgtgcttgcgggcaccggcatcgccgtcactgtcgaggtccccaacgcgctgttccagcccctcgcctcctcaaccaaggccgccgccgcctgattctgccaccacgccaattccatccgctgccacgccttgccgcctccgagagccccaagtcctccgccccgtggtttgtgtaaagatttcaggttggccaatagtgtggatgtggatggtgcggcagaggggacgatagcaggttggccacgcggtcagccgccggacatcagcatgccacacgatgccggagagctccatcagccttgcgagtccacgggtaagttccttccgctcaatctgtcttcttattgattgctttgttgctttcccttctgtgttgtttgctcttggtacgtgagttaatcatcatagcaagtggttgcaatttgatttctatcctcctgtccttggcttgatgaccaagtgttcgacgaaatgcccatgtaatcactttgttctatgagtaatcatttttattctgttgcatctgcacaagtgtatggattttcaagaaaataaatgatgtcgttgtgatgtgttataaaatctctaaaaactctaagttgttattacttgcattgatttaattaatggtcagtgtttggcttattcttcattttacgatgaatgtactggtatattgggggcaatatcctggctgtcgtgttggtaagacaaccagtcaacttgaagccaaatatacatgatttagtgttgatgaatggtctaacagtctgcagttacagtatcattagcaatatagacaattttcagataaagttctttgaaatttctgtagtactattttagaaagtgacattgcctttcaattgtttccttgtgcaaaatgtttcatcttgacattgatggtgatgatgacaacgacgaagaagaagatctggatatgagggatcccacacctgagccagatgagctcgatgaagagattgtttagtctgatcttgagcttgaaggagacattgagtttaatgcccattcaattccagcaacccatgcacattgttaccattttttttaaccacaaagtgctgatcccactgtatgtctgtacataatatggagtcatcaattatttttgctgacggttaatgctcattggtctttgcaacacaactgtggagcgagatcctgtgacctctgctctgcttattattctcagcagaaggatgtcacttgatatagctcagtaatcagatggaaaagtagcccaacagctgaggtcttgcctactgtccgctatgccgcttcatttgcaggatatggtttttatggagaggttatcagggagagcgaaaactaccggtagatgggtcctgcacattatgagttttctggaacaatggtctttctgaagcagcataggtcgtatgaggcaaaggttgcttttcttgagtctccaaacactaattcacttacagaatcagctgaggatgatgtaactggagcacaaccactacgatttagtcaaaagagacctcgcaaaataatctgccgaacaaattgctttgtatgcaaggaggcttcaacatctggacaaaattcagaagatgagattgcagacagctccataacaatatgcgagaacccaaagtgggtctggtccgaaggacgtttcctcagcgttggcgcagagaacttccaatgatacgtgaggcctgcttgcgtgtcctggtcatgtgcacaatctttctcaagaaagctgcagctttcggacttgcttggcatagataggtgagatgatgacaagggagttcagagggatggtggaggaaccaagccagctggaggttgtgtgtgtggaggtcaggaagagagtagcagaatgggagtcattctctgctacagctgagcaagagggtgacattgatttccagttctcgatggatatgttaggagaatacaatgatttaatgcgatcgccaagattcaatggctcaggtttcaacgggtcgcctagatgcatgtgacctggtgtcgtcgtttttacttctctggcctccttaattgctatgccatgttggattcctgcttacttggcaccttaatctatacatatatacatatacctacctatatatctttattttttaa

SEQ ID NO: 12322 - DNA, 2424 bp, Setaria italica
  Peptide Sequence Number=SeqID_78296
ccaacgcgcgctacaagcagaaggtaaacattatccttgcatcattatcccattgtaaagagaccatcatcttacatgaggtcagcaaatattataataccatgatgaagctttgcaattttgcagtacccatacttataggttttggctaatacaggacatccttttactattgaaacttaccgacttgctgaaatagcatggtgcatttgctagcttgcaacatttttctcttgcattgaatcgtctgagctttccaggtcacagaagagagggataaagttgcttgagcagaagctgcaggtagcttactctaaatctgaggaacaggtaagtggagacgcgtcgatgaaatctcttggttaccttatatctgatcatttgttattggcaactaatcccgagagttcaccttggattcatcaacaattttaagcaaacaaaatgacaaatctctgggtgctgacgcggcctcaccaaacccaatccagcaagaagtgctcccctgttcaaccatcattcctgtcttcttttctccaccgagccagcaatccacaatagctagcttctttatttttcttcctccataaatgggcaagcaacagctcgaatcaccagcacaccttctgctctgttcttctgtccaccaagacagcagcagcaaccacctaccagtagctcttccttcttcctgccggcaagcaccaggagcagatcaggcacccagctagctttcttccctgcaagtgcagcagcaggaggagaacgctaaatctgtctcaaaaaaccccaagatccatttgttataaagatgtatgcatgcttcagcttatcggggctcctcactcatgaacatggtgagcatctcgcacctcggccaagaccatgcacccgcctggtcaccttgctgcacctgtgggatgtccaacaccatctcgcacctctcgattgatgcagcatggcgttccacacgaggccaccgttgaggtcctccaactcactgctgcaggatctgcaccacaaggacgctgggctgatggagattgggttgtgggcgggcgggcacgacgcggaggaggatgctggggatgacgccacgagaggtgtggcgggcactacgctgccaccgcagctgatgctgaggccggcggtgtggatgcgtgcaggcgaccggcggccccctccctccgagccgcgccccgctccgaactcgcacttcacgccggcgcacgcggtgtcgcaccaccactcgtcgtccgccgccgccgacggcgaaggccaccgcacgcctgcacgcatccacaccgccggcctcagcatcagctgcggtggcagcgtagtgcccgccacacctctcgtggcgtcatccccagcatcctcctctgcgtcgtgcccgcccgcccacaacccaatctccatcagcccagcgtccttgtggtgcagatcctgcagcagtgagttggaggacctcaacggtggcctcgtgtggaacgccatgctgcatcaatcgagaggtgcgagatggtgttggacatcccacaggtgcagcaaggtgaccaggcgggtgcatggtcttggccgagatttagcgttctcctcctgctgctgcacttgcagggaagaaagctagctgggtgcctgatctgctcctggtgcttgccggcaggaagaaggaagagctactggtaggtggttgctgctgctgtcttggtggacagaagaacagagcagaaggtgtgctggtgattcgagctgttgcttgcccatttatggaggaagaaaaataaagaagctagctattgtggattgctggctcggtggagaaaagaagacaggaatgatggttgaacaggggagcacttcttgctggattgggtttggtgaggccgcgtcagcacccagagatttgtcattttgtttgcttaaaattgttgatgaatccaaggtgaactctcgggattagttgccaataacaaatgatcagatataaggtaaccaagagatttcatcgacgcgtctccacttacctgttcctcagatttagagtaagctacctgcagcttctgctcaaggtcatgcaccttcttctcaagttcaacgctcttgcttactttttgtgtcaacttattgaactctgtggtaatctcagcaactttatccctctcttctgtgacctggaaagctcagacgattcaatgcaagagaaaaatgttgcaagctagcaaatgcaccatgctatttcagcaagtcggtaagtttcaatagtaaaaggatgtcctgtattagccaaaacctataagtatgggtactgcaaaattgcaaagcttcatcatggtattataatatttgctgacctcatgtaagatgatggtctctttacaatgggattaattgtattgtctaaggtattaattgttttaaaaa

SEQ ID NO: 12323 - DNA, 4466 bp, Setaria italica
  Peptide Sequence Number=SeqID_78297
aaaatgtaatatttctcgctcaagcaactcaggtgtataacagaagccctgaactggttgaatttgtacattataacaaaacttacaccctccatatgagcacggtataggcttcatgtgttttgaatccatgcacttctgatctttacagagaagaaatttacatgaaaaacttgctgacggcaaaaccagttgcacgcagttggccttttgcatgcgaagggtaggaatgaacaaaaatcaaattcctagcccccttacccaaaaaatgaaaattaaggcaaaactcaacaacaggagaaaataattaaaaaaaagacttccaagatctccgactcctccctaaaagtcgtcgatcgattcccaccaagaccaaggccaccaattctttcaaacttttgcctgactataagcactttcagctacgaattagtaaccgagtttaacactgaaagcaatactcgcagtgggatttcccatgggcatcaacagacttccagaatcacaaactgagcactagtaccgcttcccgagaaacacgccaatgagtatggagagcagggcaactcccaggatgaacttgaatgccatgatgccagaaggttcttgcacttcttgctggattgggtttggtgaggccgtgtcagcaccctgagatttgtcattttgtttgctcgaaattgttgatgaatccaaggtgaactctcgggatctcaactgcacagcaccctttgcctgttcctcagatttagagtaagctacctgcagcttctgctcaaggtcctgcaccttcttctccagttcaacgctcttgccttactttttgtgtcaacttattgaactctgtggtaatctcagcaagtttatccctctcttctgtgaccttctgcttgtagtgcgcgtcggctgactgtaacttctgtgcaagagcttcgatttgtttctccaagtcgttggcgtactgacgttgagcttccagctcatccagtgaatgatttttatccgcttcccattgaaccgcccttgaagaaacttgttcctccttttgcttgtaatggatctcagcttcttggagctgttgtttaagagctgatacttgcagttcaagctccgaagcacgctgctgttcagcttccagttggtcctctgaatacttcctatacgcatcccactttatctctctcactgaagcttgttcttcctgatttgctatggtatggtaggcaccatccagttcctttctaatttccagcaactgttgttccaactcatctttctcatgctgtaagtttgcatgttcctgcatcttggctgttagtgcttcatccttttcagttgtttccacctgcatggtctctatctcctccatgtattttgtctctgataatgtaatctgtcgcctccagctttgatatgtgcgattctttttctgacttgtctacattcattttctcctccaaattggctattgcttcctcaaggtctttctttgtagtttcatatttatcgttcaacgtctgcttctcttccagtgtattttggtatttgctcttcagttcttcgagctcttccatggtagaagatacctgaaaaatgttctggatttctaattctgctttgcgctcgatcattccatctagcgttttacgcagtgaatgaatctcttcagatgccccctccttttctgctactgcagcagcaagtgcaagttgtaattcgttcaacttgttctgatgtacttctaactccccattcaaactactatttgcttgagccaagctttccttctccacaaggaaatgctcaaccttgctttgtgtctcctcaagttgttcctccaggatctttatcttctgtgaagctccatcaaattgaaccttatggttttcttcagcggcaacagctacagttgcctgctcctcgtaatatcccaactcaatttcaagggcgtccagcttcttactcaattctttaatttcaccttctttctgtgctatcgtctcaagagcttcatggagccgagcttcaatttcttcattctttgattcagctgcagaatggagctccaagctccttgagtgcacctccgtgaggtgtgagattgtcctctcatgaacagctagcttctctgcagcttcttccttctcagcatgagtagagctaaatcgttcctgtagctcatcaaacatggccagcttggtatccacttcctcttttaatgccttgttcgcaacagccagcttttcattctcagcttcgagcaaagccagcttctccgtcaactctgtaacttcatcttctttctgtgctaccttttcaagaacttcacgcagttgactctcaatttctgcattcctcgattcagctacagattggaggctccaagcctcttgaatgctcttctatcaaatgttctagttttctttcatgagaagccaacttctctgcaacctcttctttctcggaatttatagaactacacttctcctgaagctcatcaaccatgaccagcttagcattgatctcttgtttcaaggcttcatttacatgtgtcaaactttcgatctcagactcgagggcaaccagtttttcattcaagtttttcgcctcagcctctttctgttctgctgccccaagagcatcacgcagttgagcttctatctctgcattccttgattcagctgcagagtggagctctatgcctctactgtgcacctcagtcaaatgttctactgtcctttcatgctcagctagcttcgcagcaacttcttccttttcagcctgagtagaattaagctgttcctgaacttcgtgaagcaatgccagcttagcatcaagttcctctttcagggcctgatttgttccactcagcattgcaagctcagctaatgcctgttccgcctttgactcagcatcggagaccttggtcttgagttcttcaatggtggcatcatgagtagaaatctctgattcaaaggcttcgagctccaccttcatggattccacctcttcagtggctgcagttgctcttgattgataagatgttgcttgttcctcagctaacttcagcttttcagagagttgctggcactctatgtccttctgagctaggttgtctgctgattgttggagcttcatctctgtatcttcaagtaaagactgatacagagcttccaagtctattttcttggaagttgcatgttccagtgccctccctttgtgctccagctgctcttctgcagatttaagcttctcaagcactgagctttctctaaaacccagagactgcagttcattttccacctcttccattttaccacgggcagattctaattcatcctgtaaagtttggacctgcttctctgcttccaaatgctttatggttgttttctttgacagctcttcaaacgtttccttttcttcgttaacttgagccaacttctctgacaactcagcctccgtttgctttgcttctgctaatgaagtctcgagtttagttgatttctccttgtaggcttcaagctccccaaaaagctcatcaatcttcacacggtaattactgcattctgttgtagcagctttaagctcttcatcaagatctatgccagtcttctcagaagatgctaactttgactctaactcgctaagctgcagcttcagactctgttctgaagcagttaattcctgaatttgagcttcaagctctgaaaccctctgcattgtggtctcggcagctgttttggatgcagtgtgcaggtcattaagggatcgtagatttagctccagttcttctttgtgcgattgtgcttctgagagaagtgatcttgttttgctatgatcatcactggcctcgtttaactgggactccagttgactgtacatgtcattcttagtggagagttgcaggctcagatcagctatggtgttatcatggtgttccttttcttctctcaatttcaccagctcttgttgtagatccagcacctttgattcttggctctgcaaactctcttcaaaagattgcttttccttcaagttttcttgaagtttagcttcatactctgccattagttcttcaattttcttcttttcttcagttatttgggtcaatgactccataagctccttctctttctcgcttgctgcttccaccacagcttcaagactagctgcttttgtctgataagcttctagatcatcggaaagttgtgaagccttgcttctgtattgttcaagttcttcttcaacccccttgagcttttcatgtgtgctattcagctcctgctccagctcctgtgtccgggagtatgcaccttcagcatcagtctttgatgtgtgaagcaaatcttccagctcaaggcttctttgccgaactgaatgagcttgttcttgatgctctgagcatttatcggtcagctccttgacttcttgttcaagtagctgatttttagatactgaggaatcta

SEQ ID NO: 12324 - DNA, 2574 bp, Setaria italica
  Peptide Sequence Number=SeqID_78298
aaatccctctgctcccggcccagctctgctccgcccgcccccgagcgacgcaccactgatctcccggcgacaccccgccctccccctccggccgcgcctcgcttcgcctccccacgcttcggaaggtgaagtaaagtaaatcatggcgacaggccaacttttctcgaaaactacccaagcattattctacaattacaagcaacttcccatccaacggatgcttgattttgacttcctctgtgggagagaaacaccttctgttgctggaataatcaatcctggttctgatggttttcagaaacttttctttggtcaagaggaaattgctattccagttcatcctacagttgaagctgcctgcaatgcccacccaacagccgatgtatttatcaactttgcatccttccggagtgctgctgcttcttcaatgtcagctttgaagcaaccaacgataagagttgtagctattattgctgagggtgttcctgaatcagatgcaaagcagctaattagttttgcacgtgctaataacaaggtcatcattggacctgcaacagttggaggaattcaagctggtgctttcaagattggtgatactgctggaaccattgacaacataattcagtgcaagctttacaggcctggctccgtcggttttgtgtctaaatcgggtggcatgtcaaacgagatgtacaacaccattgccagagtgacagatggtatttatgaaggaattgcaattggaggggatgttttccctggatcaactctatcagatcacattctgcgttttaataacataccgcaggttaaaatgatggtagttcttggggaacttggtggaaaagatgagtattcacttgtcgaagccttgaaacaagggaaggttcagaaaccagttgttgcatgggttagtgggacatgcgctcgtctattcaaatcggaagtgcagtttggccatgctggtgcaaagagtggtggcgagttggaatcagcccaagctaagaatgaggcactaagggaagctggtgcaattgtgcctacttcatatgaagctctggaaagtgctattaaggagacatttgagaaactggttgaggatggaaagatttctcctgtggctgaaattacacctccccccattcccgaggacctcaaaactgcaatcaagagtgggaaggtccgggctcctacccacatcatctccactatctctgatgacagaggcgaggagccatgttatgctggtgtacctatgtctacaattattgaacagggttatggagttggcgatgttatctctcttttgtggttcaagcgtagcctgcctcgctattgcactcagtttattgagatatgcatcatgctttgcgctgaccatggtcccctgtgtatccggtgctcataactctatagttactgctcgggctggaaaggaccttgtttccagcttggtgtctggattattgacaattggtccccgtttcggtggagcaattgatgatgcagcccgatacttcaaagatgcatgtgataggggtctcacaccttacgagtttgttgaaggcatgaaaaagaagggaatccgtgtccctgggatcggtcacaggatcaagagcagggacaacagggataagcgtgtgcagcttctacaaactcgtaaggtgtgagacccctatcacatgcatctttgaagtatcgggctggaaaggaccttgtttccagcttggtgtctggattattgacaattggtccccgtttcggtggagcaattgatgatgcagcccgatacttcaaagatgcatgtgataggggtctcacaccttacgagtttgttgaaggcatgaaaaagaagggaatccgtgtccctgggatcggtcacaggatcaagagcagggacaacagggataagcgtgtgcagcttctacaaaaatatgctcacacacatttcccttccgtcaagtacatggaatatgctgttcaggttgagacctacacattgtcaaaagccaacaatttggttatgaatgtcgatggtgcgatcgggtcgcttttcttggatcttctatcaggaagtggaatgttcaccaaacaggagatcgacgagatagttgagattggttatcttaatgggcttttcgtgcttgcacgttcaattggtctgattgggcacactttcgaccagaagaggctcaagcagccactctaccgtcatccatgggaggatgtcctctacaccaagtgagatagaatcattctttgcgccggaattattatcatcacctagggcttccatctgtctgtacacttcataaagttgagcacaattgcataaaagtttaaagttgtgattgatggtgaaactaggagaggaagaaaacatcactagtcagcactagtctgtgtgttttatacttttatgtgaagctgcaaattcaagtctcaggtcctgatttttgtcctgccatgaaccattaggtcatatgatattggagaggatacttttaattgttgtttcatgacccggtctcagaaaagaagttttcccttaaaatgatgtctcttttgtagctg

SEQ ID NO: 12325 - DNA, 2654 bp, Setaria italica
  misc_feature (2562)..(2562): n is a, c, g, or t
  misc_feature (2579)..(2579): n is a, c, g, or t
  misc_feature (2595)..(2595): n is a, c, g, or t
  misc_feature (2609)..(2609): n is a, c, g, or t
  misc_feature (2621)..(2621): n is a, c, g, or t
  misc_feature (2630)..(2630): n is a, c, g, or t
  misc_feature (2639)..(2639): n is a, c, g, or t
  misc_feature (2646)..(2646): n is a, c, g, or t
  misc_feature (2651)..(2651): n is a, c, g, or t
  Peptide Sequence Number=SeqID_78299
gtgcggagttgcagtagaggtcaggactccggtggtggacggaggcgcgcagatggaatgaggaattgggctctgctccgccgccagcctgccgccgcgccgtcccgccgccccggccgatccctgcggctatcccccacacccccttctccacgggcaccttaccctcgcatggcgtgatccaatgatagcaacaagagcgcgccttcccctctccctgacggcgtcgtcccaccccgcacggcgcgcgctccaagaagaggaggaagctaagccatgtcccccaacctggacagcgccatcaagagccaggtgccggcgctgctcctgaggcgcctcttcggcgcgtccaggcgggatgaggcgaagcagctgtcgcgctccccgtccacggcgccggtggggaggcggcgggtgtacgtgcagacggagaccggctgtgtgctcggcatggacctggaccgcggggacaacgcgcacaccgtcaagcgccggctgcagctcgcgctcaacgtgcccaccggcgagacctcgctcacgttcggtgaccgcgtcctggagaacgacctctcctccatacggtcggactcgccgctgctgctcaccaggaacagcatcaaccggagctgctccaccccatgcctctgccccgtctccaaggacttcgagcaaaaggattgcagtggcctggttgagatgctcgggtgttccagcagctgtgatcgggtgaagcgccttgtcgaggacgtggtgaccgctatcaggagcgggggtggatccagtccccatcagcagcggccttggtggctcatactacttcaggaatgtcattggtgacagggttgccattgtgaaaccgacggacgaggagccttttgcaccaaataatcccaagggttttgtcgggagggcgcttggtcagccaggactgaagaaatctgtgcgagtaggagagacgggattcagggaggttgcagcatacctgttggaccatgacaactttgccaatgttcctgccactgctctggtgaagataacacactccattttcaacataaattgtccggtaaatggggggaatccgtctccaactcatgaccagaagcagcaagttaacagcaagattgcttcattccagcagttcattgcccatgacttcgatgccagtgaccatggcacatcaagcttccctgttgctgctgttcataggatcgggatactagatatccgaattttcaacactgacaggcatgctggtaatgtgctggtgaggaagcttaatggtggcacaggtcgcttcggttgccagacagagctgttcccaattgatcacggcatgtgcttgccagagaacttggaggacccttacttcgagtggatacattgggcacaggcatcgattccgttttctgaggaagagctcgagtatatcagaaatcttgatccaggaaaggatgtgatgatgctgcgcagagaacttccaatgatacgtgaggcctgcttgcgtgtcctggtcctgtgcacaatctttctcaagaaagctgcagctttcggactttgcttggcagagataggtgagatgatgacaagggagttcagagggatggaggaggaaccaagccagctggaggttgtgtgtatggaggccaggaagagagtagcagaatgggagccattctctgctacagctgagcaagagggtgacattgatttccagttctcgatggatatgttaggagaatacaatgatttaatgcgatcgccaagattcaatggctcaggtttcaaggggtctagttacagaagccctctgtctaagctcgtcgaaagcgttgaagagggcaatgatggccatgaagatcaaaatgaatctgatcgagtcttttacaccggatggaatacacccaattttcctagcaaagctacaaaaagtgccatgaacaggagtgcggatgaacaacttcaatcaagtatgtgttttgtcaggctatcggatatgagtgccgatgagtggaatgtcttccttgaaaagttccaggaactgctcaaagaagcactgcaggagcgcgcaagggcagcagcaggtcaaaggatgaagcagcggctgggcacttcatgcaagttttgagtcgggcaatagcacatcagagaaggaaaaatatgtactgctacttgtactgcttgcttatggagtgggtacaggatgaagatttcatcatttgagtcaccttcaaccttgtgctacgatctaggttgcaactgttatgtccatcaggtagataggaccacaaggatatgtagtgatgggtgtgaagaactgctgtgcatgttcattagctatgtttgagaaggaaaatgcttaataataaatgcttgtcagcctgtgtatactgggttgatgttaaatactccagttttagtgtgcaatttcttagtcgttgctgaaaattctttgtagtttgtgatgtgacctgtgagcagtgtaaatattgcactttatgtaaataatcaataatgcttacgtggtgttgaatatcttaggaaaaaaaaaaaaaaaaaaanaaaaaaaaaaaaaaaanaaaaaaaaaaaaaaanaaaaaaaaaaaaanaaaaaaaaaaanaaaaaaaanaaaaaaaanaaaaaanaaaanaaa

SEQ ID NO: 12326 - DNA, 715 bp, Setaria italica
  Peptide Sequence Number=SeqID_78300
accatggtgaacatctggaagcgcaacacggacacccagggcgttctggtcaacacgttctactcgttggagagccgagccctgcaggcgttcagggatcccctgtgcgtccccggcgaggtgctgcctccggtctactccgtcgggccgttggttggcaagggcggggcggacaaggaggaggccgagaggcacgagtgcgtcgcatggcttgacgcacagccggagcgcagcgtcgtgttcctctgctgggggagcaaaggctcgctgtcggaggaacagatcaaggagatcgctgctggcctggagaagtccgggcaacgtttcctgtgggtcgtgcgcacgccggccggcaccgacgaccccaaaagatacctggagaaacgccccgagccagacctcgacgcgctcctgccagaggggttcttggagcggaccaagggccgtggcttcgtcgtcaagtcgtgggcaccgcaggtggacgtcctcatgcacccagctaccggcgctttcgtgacccactgcgggtggaactcgacgctggaggccatcgtagcgggcgtgcctatgctgtgctggccgctgggcgcggagcagaagatgaacaaggtgctcatggtcgacgagagcatgagcatcggggtggagctggaggggtacaatacaggcttcgtcaaggcagaggagattgaggcgaaggtgaagctggtgttgg

SEQ ID NO: 12327 - DNA, 638 bp, Setaria italica
  Peptide Sequence Number=SeqID_78301
ccccgcccaccaaatctcgcccatggtttcctcttccgtctcctcggaggaggccagccccgcgcggcggcgcgagaagaggcgaatgctctgcggcgtggcggcctcaccgggtcccggagccacggctgcggcctcgctggatcactgcccatcaagaagttgcgaggaaggctttgacagagctacaactaaatgtggaatctggcatccaggtgaatcacagagacctgaaattgatgatgcccctatcttcactccaactgaagaggaatttaaggatgcaatcgggtacattgctagcattcgtccacaagcagaaaaatatggaatatgtcgtattattccaccatcttcttggagacctccgtgccctctgaaggagaagagtttctgggaatctacagagttcaatacccgagttcaacaggttgacaagcttcaaaacagggagcccataaagaaacaaacacagcctcgaattcagaggaaaagaaagagaagaaagagacttcgatttgggatgacccacaggcgtcctagttctagggtggactccgaagacaagtttggctttcaatctggttctgatttcacattagaggagtttcagaaatattcctgcttgtagtagcagg

SEQ ID NO: 12328 - DNA, 449 bp, Setaria italica
  Peptide Sequence Number=SeqID_78302
gccggcttcccgtcaccgtcgtagttgagggagctccatatctccgcgaccacgaagctcggcccggcgccgtcgacgtacgccttggcgacggccgcggagtagcccttggcgaagtcgaggcgccagccgccgaacccgacgtcggccgtcagccagcggagccagtcggtgagctcccgccgcacgcgcgggttgaggtgatcgatgtcgggcgcggcgccgaagtccttgccggtgtcgcggttgccgcgcccgttggagtacgccgtgtcgtcgctgcagatcatgtcggcgtcccagttgaggcggcgcccctcggggtcgccgccctcgaagacgcagtacacgccgcgggcgtcctgcttgtcggcgcaccggtggttgatgacgacgtccgccacggcctggatgcccctgccccggaacgcggcgatcagggaacggag

SEQ ID NO: 12329 - DNA, 800 bp, Setaria italica
  Peptide Sequence Number=SeqID_78303
tttttttgcaaagcataactccagagcaataattccgatgtagcgaaaacacaagcatacaacctaggtatccaatggtctgcggcatcttatatgtatgccaggtgaagcacattaccaattaactacaatgtagacctaagatagacatgaaccatggatcaaatagacagggcgattccacaacaagaactactgagatttgagatattaggtccaagttcatcagaagggtaacaatgcaacattctttcacatagcgtgcaggggaaagaggttacattgtagggaaatttgtcatgcaagagagccgacagcaagggaactatagagctcagcgcggcccccggccccgaccacgcccacgaccacggccgcgaccacgtcccaaaggcttccctgtagttggcttcttaggcttgactctaggggtttcttccaccagcaacgtttccaggtttaagctgtcaggaagaatgtaatagcgaatgttgtttcctcgcacactgaggtggtcaagggttacaggattcttccctttcagtgtaagcttcactgtcttcagatgagtattcatacttatgtcaacaccggtgatggtgccgtggaccaccgtgccgttcttgagctcgatggtgaccgtctcgttgttcagcttcatcaagaacctgacgagcttcatcttcgcggtcctggcggagggagtcggcggagggaggaggaggcggcggagctccagcgtggacgtaggaaggactgacctttagactagttaggacttacgggaacgaagtaaaaca

SEQ ID NO: 12330 - DNA, 487 bp, Setaria italica
  misc_feature (430)..(487): n is a, c, g, or t
  Peptide Sequence Number=SeqID_78304
tcttttttgttgtattatggaattggttcgagttttagataggacatagtttagctccggaactggaagcactgaggaaacaagtatatagttgagccatgagaatgggattctaaacctttccctaggtcagtgtcctactattattagaggtgagccactgatatgagacaaaatgaagataatgaatgctaaatatctgttataagatttgcaagtgttcttagaatggcactgccttctccttttagtccattgaagcttctcaacttggggtgggccaggaatttgaactagatttccggcccaccaacgtgcaatgggtcaggattgcactgtccacaggcccttgctggagattcgttgcacatttttttcagtagttactctgatatgcaaagaagcaggagttgtactcctttttaacccnnnnnnnnnnnnnnnnnnnnnnnnnnnnnnnnnnnnnnnnnnnnnnnnnnnnnnnnnn

SEQ ID NO: 12331 - DNA, 513 bp, Setaria italica
  Peptide Sequence Number=SeqID_78305
gctgactcgctatgaagacaagggaaatacttttggaagagaacaaggctaatctactgccctggtgagagaactagctttgctacaagatgctaggcattccgttccttcaccttgatgttctgaagagctgactgcctagagtcacagttggggtgcgtcctgtcatgactgtcgtcaagctgatctcctgctcccgaatccggtgtatttcagcctccaccaggctcatcgacggacgctgctcactcattgggttcacgcaccacgatgccaagcgcagcaattctttcatgctttcagaggtgaaactactggtcattctgttgtctgcaattgcagagatatcacttgattcctggaagttctgcacctgcatatcgaggtacaaagtgagcaggcctatacttcagtgcagatatgatgattaagaggagtaaatgatgccactatagtagggagaaattggtgagcagtgttggaatatacccattgaatgatgttttgatcaga

SEQ ID NO: 12332 - DNA, 1605 bp, Setaria italica
  Peptide Sequence Number=SeqID_78306
tttttttttttttttttttgttcctgttttgccaccacccacccaatcttattattattcaacaaaagaaatgtcattcttcctaaaacctttgcaggagaaaaaagggaagaacgaaaagaaaccaccagggtaagaaaaaaaaaggtaagccttgcagctgtccttttttgtacacttgagatgcagctgactcgctatgaagacaagggaaatcttttggaagagaacaaggctaatctactgccctggtgagagaactagctttgctacaagatgctaggcattccgttccttcaccttgatgttctgaagagctgactgcctagagtcacagttggggtgcgtcctgtcatgactgtcgtcaagctgatctcctgctcccgaatccggtgtatttcagcctccaccaggctcatcgacggacgctgctcactcattgggttcacgcaccacgatgccaagcgcagcaattctttcatgctttcagaggtgaaactactggtcattctgttgtctgcaattgcagagatatcacttgattcctggaagttctgcacccattgaatgatgttttgatcagacacggctctccgtccgctcaccaactccacaaggaacacaccaaaactgtaaacatcgctttgtatggaaaagttcaagttcatggattccctcattcgaggatcaacaaatggatcattaggtgttctggaagatagtcctgtaacaccgagtcgatcaagcaagcctggaatcccagtatccgcaacttttggtatgaaatcctcatccacaagtacattagaagttttgaagttcatatggatcgcagggggcgtcagcgaatgcaggtggctcaggcctttagcagctccatgagctatagaaagtctatgcttgaattctagccttacacctggagcgtggctgtaaccatgcaaatgtgttgagacactgccattggggatatactcataaacaagcatctgcacaacattctcctggcagtaccccaaaagttttacaaggttccgatgctggagagatgataggtaattaacctcttgaacgaattcctggctaggaggagcatgccgtcttttaacagctacaatcgtgccatcctggagcaaacccttgtatacctctccaaacattccctgtccaataagatttgcattgctgaaattccttgtagccaaatttagttcctccaaagtcagacatcttgctccctgcaactctggtagagcttgacctgatgagccactttctgaagagtctgaagttcttctgcgatactgcaggcaaagtacaattacaactgtgacaatacatagtagtgtcaagcctcctacagcacctcctagagctgctgcaagaagtcctgacatctattactggatatcctcccagaatagggcaataatctttgtagccgcagtgatgaagtctgcagatcggaaacctgcagatcgcccaggcctcgtggcatcattcccgtccaagcgcagcaccagcatcaaatgctgaatccattctgcagacagcaaaacttgttccaccgattctttgtacttcttgtccccgttctttttttct

SEQ ID NO: 12333 - DNA, 1256 bp, Setaria italica
  misc_feature (1)..(48): n is a, c, g, or t
  Peptide Sequence Number=SeqID_78307
nnnnnnnnnnnnnnnnnnnnnnnnnnnnnnnnnnnnnnnnnnnnnnnntttatttttttttaaaatttgaatgaacccagaagttccatattgctggcagtatgatgtgcttattaacaagcaccaacaggaaatgaagtctttacattataaatctattgaaatatatgaggccacaagagaacaaaagaattgtaggctcaaaactagcatcgcataaaacccaacattgtatgttgctatactgtacagatctcaactcgatatctatgaaacgtatgtgtctattgtatatgacttggtgaaacaccaggcgcatatatgtggtgtgaaactgtaaacctagcggcggtttgttcgaagcgacataaaatgtgcagcaaacgaatcgtagtccgttggaagcttggggtgaacatgtgcaggtggggttttgggggtgctttctttcagagttcctgctgaggtttctgtgtctcccacatttcctggaacagaggttctactcatctcagcttcttgcgacttccctctagccaccatcggagattcgacattctcatctttaggtgaagagcgttgtactgcaaccctagggtacacaggtgcaaccctcctttgttcagtacttgagttgttcaattgaggagcttttgtgtcctttggcaagctcacggtttcatcagcatatcgtgctccagttcggacatgaccatctctctttgtgtctgatgttacatcccgtgttctgcgtgattgtatctgcactccagactgctttggctgagtagtctgctgttgctccagttcatcttcactgtcatctgtatcaaagtaatttctagccatccttgatctcatttcccggcgtgctcctgtacctggtttttcattataaagctcttgattggaattcacacgttcggaactcttagttgtgggaggacttggattaacagattgttcatatagtttctcatcagcatctgaatcaaagaaatttcttgccatggttgatcttgcttccccacgtgatttttcattataaagctcttgattggaattcacacgatcagaactcttagtggtgagaggacttggactaacagattgttcatatagtttctcattatcatctgaatcgaagaaatttcttgccacggttgatcttgcttccccacgtgttccaacaatttgattcctgtcataaagttcactattgtaatttccacctgaagaagtcctggttgagagtg

SEQ ID NO: 12334 - DNA, 609 bp, Setaria italica
  Peptide Sequence Number=SeqID_78308
ccgcgtcgttcgagcaagggaggaggcaagtggaggtctcttatgacccacaagcaaagtttaaccagatagcggatcaaattgacaaggatgcagggatgacacgtctcaacctattctcaccttgcaaaattaatgtgttcttgaggataacggggaagagaccagatgggtttcatgacctggcttctctgtttcatgtcataagtttgggtgatacaatcaaattctcattgtcaccaagtaggagcagagatcgcctgtcaaccaatgtcccaggtgtaccagttgatgaaagcaatttgatcatcaaggcgctcaacctttaccggcagaaaactgggactgataactttttttgggtactgttaattatgcaaaccctcgtcttgagaaattgctcattcttttgccattaatgtacttaaaattttattgaaatttaactgttaagttgggtattaagtttaatgtcatttacatctgaatgtagatacatcttgataagaaggtcccaactggtgctggtcttggtggtggaagcagtaatgctgtctaacttgtctaacttaattgggtactttagttactttaaaccttaagttttta

SEQ ID NO: 12335 - DNA, 1473 bp, Setaria italica
  misc_feature (1392)..(1473): n is a, c, g, or t
  Peptide Sequence Number=SeqID_78309
gcggcgagccccggctcgagcgccgggggctgccggggtggccagcctgagggtcgccgcgtcgttcgagcaagggaggaggcaagtggagggaaatcaagaaaatctgttgcagttttcttattattgcgagttatgacggtgtatgttttaggtctcttatgacccacaagcaaagtttaaccagatagcggatcaaattgacaaggatgcagggatgacacgtctcaacctattctcaccttgcaaaattaatgtgttcttgaggataacggggaagagaccagatgggtttcatgacctggcttctctgtttcatgtcataagtttgggtgatacaatcaaattctcattgtcaccaagtaggagcagagatcgcctgtcaaccaatgtcccaggtgtaccagttgatgaaagcaatttgatcatcaaggcgctcaacctttaccggcagaaaactgggactgataactttttttggatacatcttgataagaaggtcccaactggtgctggtcttggtggtggaagcagtaatgctgcaactgcactatgggctgctaaccagtttgctggctgcatagcttcagaaaaggatcttcaagagtggtctggtgagattggatcagatatcccctttttcttttcacgaggagcagcatattgtaccggtagaggagagattgtcgaagatatcccaaatcccttgctggagaatttaccactggttcttataaagccacctgaagcatgctcaactgctgaagtttacaagagattcaggttggaacaagctagcaaagctgatcctttgaccttgctcaaagaaataactcaaaacgggatatcacaagatgtctgtgttaatgacctagagcctccagcttttgaggtgctaccatcacttaagaggttgaagaaacgaattattgcagctagcagggatgattacaatgctgtttttatgtcaggaagtggaagcacaattgttggaattggttctccagatccacctgcgttcgtatatgatgatgatgactataaggatgttttcgtgtcagaggcttgcttcctcactcgcgatgagaacgagtggtacagggaacccatctcgtccaaagccgcgttcagcaaagacgacttaccagcctcagttattgattgaattgtgatagactctggttctgcatttgatctcaattttgtgggctgtacaggtgagccgaaaataaaacagagacaaaacagattgtttactgtgtgttaggaaaaagaattcacaagatcaccttgttcataagacaatctgatcccatgaaatgggtatcattttttcagtatagtaaccatgagttctgtcaacagacagttaaaccaaaaaaaaaaaaaaannnnnnnnnnnnnnnnnnnnnnnnnnnnnnnnnnnnnnnnnnnnnnnnnnnnnnnnnnnnnnnnnnnnnnnnnnnnnnnnnn

SEQ ID NO: 12336 - DNA, 437 bp, Setaria italica
  Peptide Sequence Number=SeqID_78310
gttatttatttcccatcacattcccctcttccttccttcccacttcctactcccaccacacacctcattccccaatcccatcatggtggtgtgtagagagacatagaggagcttgcagcaacctctgagaggtggaagaaggcatgggagaggagaaagagaaggttgtgatggagatcctggaagacgatgagaagagatcttcggagaactctgtaccatctgcagttctggacctcaacgagggcttcggcgaagggagcgatggaggggaagtcggcgaggatgctgacgacgacgatgtggaggaggaggaggactatgaaggcggtagcacaagtgaagttgcaggagcgggttcaagcaacagcagcagcaaccacaattccgggagcaacatggatcatgacatgaatagcggcagtaagggggaaggc

SEQ ID NO: 12337 - DNA, 392 bp, Setaria italica
  Peptide Sequence Number=SeqID_78311
accttgtcatccatttcatccatcaaaggaacttgtctgtccaattcctcattcatgtcagatgaaatggatgacaaggtggatagagccaatgcagatttgaagaataccaacgtgagactgaaggagactgttcttcagctgagatccagtcgcaacttttgcatcgatatcatccttctatgtgtcattcttggtattgctgcctacctttacaatgtgctaaaaaagtgaggcggaatcctttcgttattacagttctacttatcagttcttggagtgacgagttgcggcgtgcgcatgagccatttgtgttgtcttttgtctgtattattatggtgtccagcttgaaccttagctaggctttgttgaagtgagcacagcgtgtgtgc

SEQ ID NO: 12338 - DNA, 1293 bp, Setaria italica
  Peptide Sequence Number=SeqID_78312
cggttcgctcgccgttcgggttattcctcgcctcgctccgcttccttcctccgcagccctcgtctcgaattcgcttgctggggcagaaatcggggcgcgaggatgaccgtgatcgacatccttacccgggttgacgcgatctgccagaagtacgacaagtacgatgtcgacaagctcaacggcaccaacgtcgccggcgacgaccccttcgcccgcctctacgcctccgtagacgccgacatcaaccaatgcgtcgagaaagcggagaccgcgaagcaagagaagaaccgggctgcggtggtggcgctgaacgccgagatccggcgcaccaaggccaagctcctcgaggaggacctgccaaagctgcagcgcctcgccgtgaagaaggtgaaagggctcacaaaagaagaaatcgcaacccgtagtgatctggttgccgccttacctgacagaatacaatcaatcccagatggtagttctactgccacaaagaaaaatggaacctggggagcctcaggatctcgaactggaggagccataaagtttgactctactgctgatgggaactttgacgatgagtactttaaggggacagaagaatcgaaccagttccgtcgggagtatgagatgcgcagaatgaaacaggatgaaggtttggacgttattggtgaagggctggaaactctgaaaaacatggcatctgacatgaatgaggaattggacagacaagttcctttgatggatgaaatggatgacaaggtggatagagccaatgcagatttgaagaataccaacgtgagactgaaggagactgttcttcagctgagatccagtcgcaacttttgcatcgatatcatccttctatgtgtcattcttggtattgctgcctacctttacaatgtgctaaaaaagtgaggcggaatcctttcgttattacagttctacttatcagttcttggagtgacgagttgcggcgtgcgcatgagccatttgtgttgtcttttgtctgtattattatggtgtccagcttgaaccttagctaggctttgttgaagtgagcacagcgtgtgtgcgggcactggagtcaggagacatatctgctgtataagagtacgcggcatcattctgtgtgaaacatgtaaaccctgcccttgtatattccgtcatgtcttccatcggtatcttcatatttatcctgaaaaaaaaaaaaccccaaaaacccaaaaaacccaaaaacccaaaaacccaaaaaccaaaaccaaaccaaaccaacacacacacgacgacgacgac

SEQ ID NO: 12339 - DNA, 321 bp, Setaria italica
  Peptide Sequence Number=SeqID_78313
cgccgcttcactcgttgcgctgctgctcaccgtgctcatcatacctctgctctccttccttctgatcgccgccaagaggtcttcttctcgcctgcaacgcggcgatggacggaggctgcctccgtccccgcccggcggcctgccgctcctcggccacctccacctactgggccgcctgccgcaccgggcgctgggatcgatggcggcatcgtgcggcccggtgatgctcctgcgcctcgggcaggtgcccaccgtggtggcgtcctcggcggccgccgcggaggaggccatgaagacccgcgacctcgccttcgccagccg

SEQ ID NO: 12340 - DNA, 699 bp, Setaria italica
  Peptide Sequence Number=SeqID_78314
ctgtaacctgcgcggcacatctcgagctggcacatcaagcgtctctgtatattcaaaccggcgccgccgcttcccacgcccaggcgatgaaatggtagaatcaggttggccagcaggtgcagccttacaaacggggcatgcagcaacacatacgcggataaacgattccggaataccgtagaatttggcccccacagtccacgactgcttgatgcggtcgacggtgtccttgaacgcgaggtggcggagcaggtcggggtcggcgtgcgcctccgagactatgtccctccacatgccgacgtgggagacgcgctgcgcggcgttggtcttgaagtggaggtggcgcccgtcggccgacgcggcgagcttgtcctggatgcgcttccacgcggtgaggtaggcggtgtcctcgttccggtccttccacacggcccgccacgaggcgagcacggagagcgacgtggcggcgcggacctcgtcggaggaggcggggcggcctgcgaggatgcagcgcagcatgagcccgtacgaggcggcgctgaaggtgtagaactgcgaggagatgtgcggcgccgggtcgatggccggcagcagcgcgaagggcgcggaggcgcccaccaggctagggttccggccggggatttggatcagcgcctcgtcgtcggcgtcggcgtggaggaggtagctgcaggggctagg

SEQ ID NO: 12341 - DNA, 327 bp, Setaria italica
  misc_feature (287)..(287): n is a, c, g, or t
  Peptide Sequence Number=SeqID_78315
tcccagatctgcaactttatgcgccaaccatcaagctcaattgttcttactttgaagtcaatcccgtgggtggttataaagctagtggtgaaggagtgatctgagaactgtaaaaggagacaagtttttccaacacctacacaatgattactttaagttgattaggtcatttgtctcgaagattagaaacatagagcagtgtagtatttttttaggacaaacagagtagtgcgtgtgaatccattaacaagcaacagaataattacatatgataggccaaaaaaccncagcaaggaacattataaagaagctacaggctacagcgat

SEQ ID NO: 12342 - DNA, 944 bp, Setaria italica
  Peptide Sequence Number=SeqID_78316
tttttttttttttgttgtcaaacgaactgtgacaattcagcaagtattttcagaaccagcaggataaaattatgtctatacattgattagaaatgaaatggtctcataatagatctgcagttttgcacacgccagaacattgactaagaccatttgcatttctaccagagttacaactaacatcgttcacggtgaaacacagaaatctgaacccaagcaattgcgattaaacgatagaagaggcacaaagatgagaaaagggtaaattacaagcattgtatcaccattaccttatcctccgtgtgacaacgtaaaccactcacgatccacagcaagctgacttctgttgcgtcgaagtgtcaccaccaccctcaggtctgttgatagtgatcgtggtgctctcccaaaactctggctgctttgtattagtttccacgaacctttgcgtgacatctcttgctattgaaaagaaaacctgattcacgttcaggttggtctttgcactcgtttcaaaaaacttgatgccatactcgtcagcaagagcctgccctttagaagttggtacagcccgtttgctttcatccatgtctgctttgttgcctatcaaaattttgttcacattgtcggaagcatgttgctcagtgttcctaatccagtttcttatattattgaatgatgactcgtcagtaacatcatacacaagcaaaatgcccattgcattcctgtagtaggcagttgtaatagttcgaaaacgttcttggccagcagtatcccagatctgcaactttatgcgccaaccatcaagctcaattgttcttactttgaagtcaatcccgtgggtggttataaagctagtggtgaaggagtgatctgagaactgtaaaaggagacaagtcttcccaaccttgctgtcgccgatgaggagcagctttggtacgttagta

SEQ ID NO: 12343 - DNA, 369 bp, Setaria italica
  Peptide Sequence Number=SeqID_78317
tcttattaattcatcctagcagtggtagtttcctagtggcatcaactttgtcattattcatgttactgtttctttttgactagaatgaacttggttaagctaccaaaggcttcacttatttgttttaagttttaactgtagtgtttgcaaatatttactgtgtttgcttaatggtatcatcattgttctaactgtagtgtttgcatagatcctgtttatcattcttggtgacttttttagtagttattcctttaccctttcctattgtgagccaccttctggggagattttcacaatgactgtgcttcccctgttctttttgttttacatgatgcatgaacacgaaatatgcttggccttgagttgtac

SEQ ID NO: 12344 - DNA, 783 bp, Setaria italica
  Peptide Sequence Number=SeqID_78318
cgtcagcagcatcgtcggagggtactgcccgccccagcacacgcggcgacgggggtcgtcgtcacccttctcctcccacggccgccgcacgttgtggagaggagagtacttgataagccaatggaattcttcctcgttctccgagcatccaaagtcgcaggtccaagcacggcctatggtgaacttgtggaaccgaagcatgtccatcacccccacatgagccagagcacacccgaacagatcaggccgctgattcaggcaggcggctaccaggagccccccgttgctgccgccctcgatgcacagcctcgtcgggttggtgtaccccgcggcgacgaggaactcgccggcggcgatgaagtcgtcgaagcagttctgcttgttcgccagcgacccggccctgtgccagccctcgccgtactcgccgccgcccctgatgttggcgacgcacgtcacgaacccgaggttcctcatgaggacgacgcgggtcacgctgaactgcggcgtcatgctcatgccgaagccgccgtagccgaacagcagcgccgggtgtgatccgttgaggttcaggttcttcttggagacgatgaacatcgcgatcttggtaccgtccttacttggatagaacacctgctttgcttcaaactcgttgcgatcaaagccagggactgaaatctctctgtacacgctcatctccgggacttcagtgctgacatcgcacctatagatgattcccggggtaaggaagctcgcgaacttcgattgaactactttctagtaatt

SEQ ID NO: 12345 - DNA, 618 bp, Setaria italica
  misc_feature (1)..(29): n is a, c, g, or t
  Peptide Sequence Number=SeqID_78319
nnnnnnnnnnnnnnnnnnnnnnnnnnnnntttttttttctacaaccgcaaccggaccaggtaccaaaattaacccaattgactgcacaaactccacaactccagatctccaccagatgaattcgtccagattgtcagattggatacaccaatttacaatttacacatgggcacggaaaggatttaagtctacgaacccaacacagagacgcacgggcgtagataggtaggtagggagcacaccagaacaccacggcggatcggcgacgcatccggcggtcaggcgacgtagacgtagtcgtcggggtcgtcgtggcggtgggggtcgacggagcagatgacgtagatggcgtagaggacgccggggaggtaaccgaggatggtgagcaggacgctgatccagaactccaaggagcagcagccgtggcggaggcagacgccgaggggcgggagcaggacggagcacaggagctccaggcaccggcagcagcacgagcacaggcccatctcgttccccttctcttcctcctcggatcctcgcgcgctgctctgctcggtcgcttcgggaacaaggggaaggggaacggctggatatttcttcccgtcgagcggaaggaac

SEQ ID NO: 12346 - DNA, 495 bp, Setaria italica
  Peptide Sequence Number=SeqID_78320
gtgaacacagtactgaaggaagacgggtctgggggttcgtataatgggtccatatgatttgaagaatctaaagggacgccaaccgcgccatcttggtgtgggggagggaacttttcactcttgcttttagcatttgcatgagtgacgaaccttcttttctgtaaaaagaaacgaataagcacaagtcagcaatactgcacattatgtttaggatagtatgggctgcctttttggtcttttggaccgtggctgataaaaaccagaggacctatcctgagaaataaagttagtctacttggatgtaggatataatttaaaatgcagagtttaagtgaaagggctgagactgagcaagtggttgcaccacctcagaacattgaacaactctatcctaagtttatcttattaacctctagagaaaccatgtcatagaaacaaaattgtaccagaagtataagttcattcaacatacatcaatatttacttgaagttcag

SEQ ID NO: 12347 - DNA, 1111 bp, Setaria italica
  Peptide Sequence Number=SeqID_78321
ttttttttttcttattgaaactaccggtcgaaaatttccattgatttgctgagaaccgatgattatataaggtaacagagtgttacaatgtaatggggtgtaccaaaatgctagagacctaaagcttccactcaaatgaatctaacatcaaacgcagctgcttcatgagcaggaaagagaacctaatgtacagaagtacctactgcaactccctcctcagcctatacaacgatgtccaaaaaaatcctcacaacaagtaaccaacaaactaattatcgttgcatgccttgtttgaaaaactgtgtgcaggtaccaccacggggtgtttctccatgttgaagtctctttatcaacgaatatcgatccttaggatcttaccgagcacgggcagtggctggttgcttcgatgagcgtgacttgtgcttccgcttttggtttgccactgcagcaggatcagccaatggcccagaccaagtaggcacagctcctttctcgtaagtgaacacagtactgaaggaagacgggtctgggggttcgtataatgggtccatatgatttgaagaatctaaagggacgccaaccgcgccatcttggtgtgggggagggaacttttcactcttgcttttagcatttgcatgagtgacgaaccttcttttatcaatatttacttgaagttcagcatttgcctctggagctggaactgccttaggtcgatcacgtgttcttgtcttcttggatccatcaccattagctctaccagcagcagctcttaaacgtctggcttcttcgtctcttcgttttgcatctatttctttgcttggagggtattttgggagacttgacggttcacatgcgaaaggttcagttgtaaagaaatcacttcttaatgcagccgtcgctgttaaccgatcagctggatcaattgcaagtagtgtctcaatcaactgcagtgctgattgcggaaaatctttaaatgtctctcttattcgccttttgtatggctgctgaggcttaaatattgttgcgtgaggcagcttcgacttttccaatattcttctgttggggagccacataacttaaaaattttatgcagctgttccacctctgttcg

SEQ ID NO: 12348 - DNA, 1402 bp, Setaria italica
  misc_feature (1345)..(1402): n is a, c, g, or t
  Peptide Sequence Number=SeqID_78322
caccagcactaccagccgcggcaccagcaccaccaccaaggcgaggatgatggggtcgccgccgcggcgggggaggataaggaggggcctgcgggcgcggggcatcaccggctaaacgacgccgatgcccgcaaggtcgtcaaacaggtggagttctacttcagtgatatcaatctggccacaactgaacatctgatgaagttcatcactaatgatccagatggatttgtgccaatatctgtagttgcaaattttaggaaaattcgggagatagtttctgacagatccttgttggttgctgcattacgcacatcatcagagctggttgtttcggaggatgggaaaaaggttaaacgcttaaggcccttcaacaccgaagaagttcagtcacgcatcgttgttgctgaaaatttacctgatcaaaagtatcaggctcttatgaagattttctcggatgttgggagtgtgaaatctatacgtacctgctacccacaggatggtggtgcagctgctgctagcaaaacatcaaggattgagatgctttttgctaataagctgcatgcttttgtggagtatggggctgttgaagatgctgaaaaagcggttgcattcagtgctgagggaaagtggagagatggtggcattagagttcgctcgctgcttgcttgtctgaagcacggattgggtcagggaaggaagggtggagatgagtatgctgtggatgaagatggccctgacacaactggccacccacatgactatgggacagaggatactacccagatctctgaagcacatcttgatcatcaggctgaagatggctcacatgacaagggtggaatgaggcaagggagagggcgaggccgtggaggcagaggccgcggtcgtggccagtactatggccacagccgagatgcccaccatccgattggcactcctccatcggatcacccagctgtcccaaagccgcccccaggcccccgcatgccggatggaacgagagggtttaccatgggccgagggaagccgctcaacccttccccagatgctgccccaaccacagatgctgcctagtggttgagtccatgcctgtggcggcctgttgccgccctgctcatcgtcagtcatgcaaacagatgacggtgatcctttgctcaggttctaaaaccgattgccatggcgtgttggttcattttgatgtgacatctaaaagagagaaaaaaaggatatggctggtactgtggtacatgcgtgtatactaacaccggaagtctaaacatgtgtactgtgatatgtagttcttaaagtaaaaaaatcatacttgaaccaaaaaaaggaaaagttnnnnnnnnnnnnnnnnnnnnnnnnnnnnnnnnnnnnnnnnnnnnnnnnnnnnnnnnnn

SEQ ID NO: 12349 - DNA, 328 bp, Setaria italica
  Peptide Sequence Number=SeqID_78323
ggcgtcatagcaattgcagactagtgcagctagtaatcgtagacactcagttacacacaagataatttcatacatcaaactacatcacacatcaactgatcaactcagaattatgcaaagaacattctagcaagcaaaaacctactgcatatctgaacagattgaaggaaatgtaattatctggcacccaaatttagtagcactcagtcagctacgacttaattgtgtgagaacagagagtattcagatcatatatccaggcaacaaacctaattcattgctttaaattgcataatgaagaaaaacttaaacaaaaggcatcaccagt

SEQ ID NO: 12350 - DNA, 252 bp, Setaria italica
  Peptide Sequence Number=SeqID_78324
cctattccctgtgcgccttgttgatgaacaggttcgggaaaccgtcatcgaagctccgccagttgatggactggagctcgatggcgtcagagctggcggcaatcttgagggcgagctcctcgcattcggagcagtagaagaggtgtatgtgcttcttcggcttctgcttggcggcggcggcggcggtggcgacttccatctcgtgccggcgggtctccgcggcggcggccgggacaggggaatcccagaaag

SEQ ID NO: 12351 - DNA, 300 bp, Setaria italica
  Peptide Sequence Number=SeqID_78325
cctttactctaacttggaccggtaacactggtggtatgtcggtaaatagcctagcatcgccattcagcttcacacgatcctgtattgctacatccttggttccatttacactagttttggactcctatgttttgtcctttttgttgtatagggagccgttaacagctgaagagccgttgtggttgatcaaacattcagaccattgtgcagttggaaccaataaccaccgcacaatggcgtgattgttgtaggtagccttttgtaaagaaaaaggtaaaatcgataaaaaaaaaaaaaaaa

SEQ ID NO: 12352 - DNA, 464 bp, Setaria italica
  Peptide Sequence Number=SeqID_78326
ttttttttttgacaaattattcgatttttaccttttttctttacaaaggctacctacaacaatcacgccattgtgcggtggttattggttccaactgcacaatggtctgaatgtttgatcaaccacaacggctcttcagctgttaacggctccctatacaacaaaaaggacaaaacataggcgtcctcagggaatctacaatacacgccgaagtcataccaatctagtagaggtgaagtttctcaaattttgctgtgagcggggatcatctaaatccatcatgttttttatgttttcagtcaacaattccatcgtcagcagcagttgccagctcccggactttgacagcaaatgcccatcagaaactggcatgctctccacttctctatgcatcaagcttctccaatcaaaagaaatggtcaagcttttgctctcacttgtccagcttttatttccttcttcct

SEQ ID NO: 12353 - DNA, 2336 bp, Setaria italica
  Peptide Sequence Number=SeqID_78327
ttctttacgttccgttaagtttctattacctaattcttagttagtaggttgtaagttttctcaaattttgctgtgagcggggatcatctaaatccatcatgttttttatgttttcagtcaacaattccatcgtcagcagcagttgccagctcccggactttgacagcaaatgcccatcagaaactggcatgctctccacttctctatgcatcaagcttctccaatcaaaagaaatggtcaagcttttgctctcacttgtccagctttcttcctctcctgaaccatgatgtccgaacaacttgtcggatgtgtcgctcatgcttctgtaacagttcatcgaccttgtgtgactgggataacaaggggcctgagtactcaaccttctcttcttgatcatggtcgcccttgaaactattttttgatgagacagtgcccccgagaaacatcgcgtttgagaagttctgagagtggtaagtgtcacaagaatcgaatgaatctggacgctctaactgtgaccacttcttcaggactgcacgctttgctacatcatgaggctcccggtcttggatcttggagttggtgcgagatattgatatggatacatctctgctaggtagctccctcaggccaacgttctctttagcttgggacttgcggtcctgatcagcctcaccaggaaattggcctcttgaactagatctggtccgtgatctagcaaaagagcgatcctcctgtggtcttttggcccatgcaaaaccgccagatgaagaaacactcaatggtcctgagaaagggacttcctctcgtgtgtcgttcttaaaatgccgagacctttctctaacttggaccggtaacactggtggtatgtcggtaaatagcctagcatcgccattcagcttcacacgatcctgtattgctacatccttggttccatttacactagttttggactcctctttgttacttatttgcttagggactgcactaggttctcttgctactctgctgagccttgaggacttcttggatgcttctgtcccgtgccctctgctactggcttttctcctgagcgcatcttctcgtaactttgcgtccatctctttgttgggtgcatatttaggcaagctcgaaggatcacatgcataaggttttgtcctgaaaaactcagatgaaagagcacctgctgcagtaccacgcttgtagggctcaaccgacagaagagtttctagtaaactcaatgcatttcctggtacctctttaaaaacatctcgaagagtactaggatatggatgatgcggtttaaatattgttgcatgaggcaacttcgacttcttccaataatcatctgcaggggaaccacatagcttaaaaatcttgtgcagttgttccacctcggttcttccttgcaatataggtttcccacggaacatctcagcaaatacacacccaacactccacaaatcaacagctgcatcatagtgagttgaacctagtagcagttcaggtggtcggtaccacagtgtaacaacacggctggtcagaggatggtttttgctgggatcaaagtaattagcaagaccaaaatcagcaatctttagaaccccttcgttattcacgagcagatttgcacccttgatatcacgatgaactacacgacgtgaatggcaatgctccagccctgacagtaactggttcatgtagcacttgagctgtgcatcagtgaatttgatgtccggggaggagcaaagtccagcaagatcgtgctccatgtattcaaaaactagataaaggctgcatgataaccgagaagtaatcaagccttccagtttcatgacatttggatgatcaagcctccttaatatttgtatctcccttgccatgaatctaacactctctggctcaaaattgtcaaatcgcaccttcttaagggcaacaatctttcccgtctcaagttcccgtgccctgaatacactgcatataagtgccttgcccaaccttctgcagcttctcgaaggagtcggccttgagcgggatccacccctggatggcctccccggcgacggcgctgagccacggtggccacccggccgccacctgctccccctccaggctcttccgcaggctccgcagccggaagctccgggacgcggccggcacgacgactgcagccttctcgggctcctccgcctcgtccttgaccttctccgacctcctcgccgcgtacgacgagctgcgcagggaagacacgaccgccgcgggcaccggcaacggcaccggagccgcggactcatgggcgcgcggctggctccggtccctgatcgcgccggacaagtcgg

SEQ ID NO: 12354 - DNA, 316 bp, Setaria italica
  Peptide Sequence Number=SeqID_78328
gtcgtctaccctcataactacggattcatcccccggtcgctctgcgaggtggaccgggtccctctactcgtccgtcgtctaccctcataactacggattcatcccccggtccgctctgcgaggacaacgaccccatggacgtcctcgtcctcatgcaggtgactcatcactctcaggctttatttcagtaggattattagccccaaagctcaattgattgtgctctgcattatccacctgttttattctaacaacgggatgcagttgttagaataaaacaggtggataatgcagagcacaatcaattgagctttgg

SEQ ID NO: 12355 - DNA, 271 bp, Setaria italica
  Peptide Sequence Number=SeqID_78329
ccggtcgccgcgcacccatggcacgatctcgagatcggtgagtccccgtcgtcaccctccctccccaatcttcctagttgaccggatagttgccagatagatacgcgaggcgtgacagaaatctttaatcgcgctatcagctgactgaccgtgcatgcgtgcctgcaggtcctgaagctccggccgtcttcaacgtggtcgtggagatcaccaaggggagcaaggtgaagtacgagctggacaagaaggacggggctcatcaaggtggacc

SEQ ID NO: 12356 - DNA, 1122 bp, Setaria italica
  Peptide Sequence Number=SeqID_78330
acagaaatctttaatcgcgcgatcagctgactgaccgtgcatgcgtgcctgcaggtcctgaagctccggccgtcttcaacgtggtaagtacctggatcccatttctcccccaatccaaagttgcaatcactacggagcgtgaatgtttgatccggtgcgcgttcttggagcaggtcgtggagatcaccaaggggagcaaggtgaagtacgagctggacaagaagacggggctcatcaaggtggaccgggtcctctactcgtccgtcgtctaccctcataactacggattcatcccccggtcgctctgcgaggacaacgaccccatggacgtcctcgtcctcatgcaggtgactcatcactctcaggctttatttcagtaggattattagccccaaagctcaattgattgtgctctgcattatccacctgttttattctaacaactgcatcccgttggcaaccaggaaccagttcttcccggcgccttcctccgggccagggccatcggcctcatgcctatgatagatcaggcaggcgaatacatgaatcatttccatctagctctgtgcaattcgattttcagctgcaagtatttgccccaatctcacggtatgctgtcattcccaaaatgttggaacagggtgagaaggacgacaagatcatagccgtctgcgccgacgatcccgagtaccgccactacaacgacatcagcgagctctcccctcaccgcctccaggagattcgacgcttcttcgaagactgtatgattgccgtctcactaatccatataaacacgtctctgctgttgcacactctctagtcccttcaactttgtggtttcttgcccaaatctttcagacaagaagaacgagaacaaggatgtggccgtcgacgacttccttcctgctgcagctgcccgcgaagccatccagtactccatggatctgtacggacagtacattatgcagaccttgaggcggtagagcgtgccccttttttctctccctaccagatcttatgcgatctgaagcaaaagcaccaaatcatcagaacatttgggatctgatgaacagcatgcggcaactcatgtgactttgctgttcatcagatcccaaatgttct

SEQ ID NO: 12357 - DNA, 250 bp, Setaria italica
  Peptide Sequence Number=SeqID_78331
cgaacgcatctcacaagtcccaaccaggccgccgccgccgccgcccaccttctcttcatccggaatccggcctccgtcgcccatctagaccccagccgctgccgccgcttcacccggaaggtcggaaccccagcttccgccgacgttctcttcccccagactcccggccccagccaccgcggtcgagccgggacaccgtcggcacgcccttcacccaatgctccgtcgcctccctctagttcatccgacg

SEQ ID NO: 12358 - DNA, 597 bp, Setaria italica
  Peptide Sequence Number=SeqID_78332
tagtaaggtaattagttaattttttacgacggaatgaacattctaacaagcacatgcataacagcagtttaataaggtactggcgtctgtaaccgcactgcgactagcaatggcgagcacctgatgcaagaccttgacgccggcccggtgcgcctcttcgacccgttctctcgggaactcccccagtacacctgcagaacggcgagcttctcctccaggacgaccctcaggttctcctcgtgcgggaacgccagtataataggcaccgaacggcctcgacgtcaggctcctcgtcttccgaatcagctctctgacgcgatccggcgcgggccagtcggggaggcggaggagaccgatggcgcccgcgttggcgacggcggcggcgagctccgggcccgagatgtccggcccgagcggagcctgcacgatgccgtagtcaaaccccaggatgcccctccacccggacgccatctggcagcgcagagcgcacttcacagtcgacagccgtggatccagccgctgccgccgccgcgtgtatgaagctccctcccttgtattgtatttggttatttgttcggttcttagttcggttcgtta

SEQ ID NO: 12359 - DNA, 1377 bp, Setaria italica
  Peptide Sequence Number=SeqID_78333
gtatgagctttcacatagacttgaagggtcatacaaaaataatccagggagtatttcatcactaggattttggcagacagaatacctaggtgtctcatttattttcatcggttattatttacaaatagcacacaaacaaaactcggtaatcccagttgttctgattggtgactggtgactactaactacttacaaatacttcatgctccctggtagatgtagcttgcagttcaggaagattttacttcaaatcagaaagcttttctctgatgacatcctttgcttcaacgaccagccttttgacaacatcgccagctggtatgacctccgtgattagcccaacaccctgacctgcatacatggccatgctctcgatatctcctgttgctgtggcgtttggaacagtaccggcaaaccgacgaatatccttgtgcacgccgtggatgatagagtggcctatgatgggttgactttcttctgtttcctggtctgagagattactttgagacagcgtagaagggtgtttccaggacacgttgtggagcatcaggccatctagcacgtccgaacacatttgtatagtctgtgtgactcacctcaattagcttttgcttataaataggatgtgcaaagctttcctcagtagccacgaaccttgttcctaaacaaacgccctgagcaccaagtgccaaagcagcaacatagccacgcccatctacgattcccccagcagcaataactggaatgccagagtctgaaacaagatctactactcttggcaacagtggaaacagtccttcctgaccaattacatgaccccctgcttctcggccctgaataattattccatctacaccggcttctttagctttcgctgcctcctcaagattgccaacctgatgcaagaccttgacgccggcccggtgcgcctcttcgacccgttctctcgggaactcaccccagtacacctgcagaacggcgagcttctcctccagcacgaccctcaggttctcatcgtacgggaacggcagcacaatggccgccccaaacggcctcgacgtcaggctcctcgtcttccgtatcagctccctcacgtactcgggcgcagggaaatcgggcaggcggataaggccgatggcgccggcgtttgcgacggcggcggcgagctcggggccggagatgtcggggcctagcggcgcctgcacaatgccgtagtcgaagccaaggatgcccctccacccggaccccatctactggcgagctcggagctcacagctcccgatcaccgatggccgctagaaccaggctgctagatgatttggatgcggcggccgcggcgagtgggttgggggagggtttgtcaggaaatggtgttcg

SEQ ID NO: 12360 - DNA, 503 bp, Setaria italica
  Peptide Sequence Number=SeqID_78334
tctatcgtaaatcacacattccagatgtaccaggttatcaagagaaattttatttcaacccgggtgacactggctttaaggctttcaaaaccaagtatgcaacaataggtgttggtaagttatttgtgttctgcagtgatactagtgcttattcactgtacgttcagtagcactaatagtaattaatgtgacataatctcactcataagtaatgccatcatttgtaaacttgtagggatctgctgggatcagtggtttccggagtgtgcaagagcaatggtgcttcagggggctgaaatacttttctatccgactgcaattggatctgaaccccaggatggtaacctggattcccgtgaacattggaagcgtgtcatgcaaggccatgctggtgccaatttggtactatttgttgttttatatagttcataatgcactaccaacttcatcgcggagtcatgaagatgtttctttgtttgctattcctctaagtgatactggtg

SEQ ID NO: 12361 - DNA, 425 bp, Setaria italica
  Peptide Sequence Number=SeqID_78335
tccacccatggcgcccgacacggggacggtggcggctgcggcggcgatcgacgaggcctacgagttctccgcgccgagattcttcgacttcatcaacgaggagacggaggaggccgtccgcgccgccgagagctggttcgaggccgcccagagccacgctccctccccattcaaccccaggatcaaggagtcgagggcggaggccaaggtcgcgatcctctgcgatctagcggaagccgaggagccggctctgaaggaggagcccgtggagggggtagcaggaagcgccgccaaccacggagcagatgctatcgaggggagtacgcaggagaagaaggacccgtcattcggatctctatctgaaggcaatcctggtgggacgtgtgccaatgctgggaaccaccatgaggaggaaagtgctccac

SEQ ID NO: 12362 - DNA, 420 bp, Setaria italica
  Peptide Sequence Number=SeqID_78336
agctttgtcaagatccttatccttccatgcagctgtaccatacgcaaaccagccatctggaaccaaagagtttaatgacaatgcagattcccataggattttggatgtattgaagtcattcctgttgtacgcactgcgagccagagaacgcatagctcgggcagatttattatttgacacttacaatgcctttttataatgatcatcattatttgtaacatcaccaagtgaacaccataaccttgggtcatttggtgtaacagagagtcgagcatttatcagactaactgcatcagccactttacctaataatctatagcaatatattaaattatcccacaattcaagatctttaaagatatccagcgcttctccaactataccgcaactgataataagttcaccgtattctttcctcaa

SEQ ID NO: 12363 - DNA, 2378 bp, Setaria italica
  Peptide Sequence Number=SeqID_78337
tttttttttttaaacctaaacacgagccaacgaggaaacgataacatagaagggcattagtaaataagaaatacacaagctacattggtacagaactgctactccaaaattgcaggtccgcagcttttgcaagaacataagctacaacgattacaacacgatacacttccataacaacaaaaaagattttgaaaggcgcaaaatcaatgacagcttcatattacactgggtccctgtgttgccatactcttgatgttgaaagcaaaattttcttaccctagcttaattaaagattgccagctaggcatgacatcaggaacgcacggtcggatctgacagcgtgaccttggttcaccagcgagatctgctgtagggaagcccaaatagaaatttggtattcccttatcatatcaagtatccaaaaacctggataagcctaggctgtagcagcaatcagattttttatttcctcaagacagttatcaagagctttgtactcctcggtgtctgagaaatccactgcctgtttcaaggtgcttttaaggtgcatctcggctgttaataactcccgtcggcttccagatgaggaagaaatttccatgtacaccttgcaaagctgcagagaagcttgagcatattttgtgaacttcttttcatcatgccaaagtcctgaaccctgaagagatcgaacttgttttagcaaagcttcagaacatgccaacaggttacccttggtcttgtgccatctcgcatacaaaccccatacgtccgcattgctgcctccacttcgcacaatctgctgaaggatatcaccaataatatctaacaattgattggattgtcttgtctctttatttgcgccgtctgatgcttcgtgagaatcaacaaagtgtggaggttgttcttcaagcagtgccatcaccttgtccaatatatcaacgttgaagcgtttgtttgaggataaatttaacacagtttttgaagcttcaagtgtcagtcgaacatttcctgtgtccaaagcaactttactgtaattttcccaaatttcccagctattcctcttgaactttacagcttccctgaatgcttggactgctgcttgactttttcccctaatcatgtgcaggcaggctatgttgttccatgcttctccattctcaggatctatctgtacagcacgactaaacgcatccacagctttgtcaagatccttatccttccatgcagctgtaccatacgcaaaccagccatctggaaccaaagagtttaatgacaatgcagattcccataggattttggatgtattgaagtcattcctgttgtacgcactgcgagccagagaacgcataaccttgggtcatttggtgtaacagagagtcgagcatttatcagactaactgcatcagccactttacctaataatctatagcaatatattaaattatcccacaattcaagatctttaaagatatccagcgcttctccaactataccgcaactgatcaaaagttcaccgtattctttcctcaatgcaggtagagttggcatatgaaccccaaaaaccattttaactctctgtgcggtcacagggaattcttttccaacatcttcaaccaaattctgcatcattagcagtgccctctgctttgttcgactgcgggttgactcccatctaatacgcagtatatcacataagctcctgaccacaaagtaagattcgccctgagaatcgattgactctatgtatggtgccatctcccacccagacatttcatcgcttcgactccttcggctcacgtgcaagcattgtgcaagtacagcagcctgctggatagccgatagtgatatatttgcactgggacctgttgtatttgcactggcagaattactcccatcatgcaccagtctgggtgtccttagtatgtcacagaactcatcactttcaacaggaacagaaccccttgcattttttaaagctgaattgtcattctgagctaatgtgagttctgtagcttgtccttcatcagatcctgatttattggtcttcgcaacaagcaccatttgagactttgcatccacctgatgtattgttcgaaagccaagaatccctgtaagggagaggtgtaagccacatgcttcttgtgcgctgtccagatgcaaccttgaagcatcaacacgaccatatttgtattccgcgattccagcctctaagaaagaagctgaaacaaaataagagccttctccatcacacaatatgggatcccagtaggtagaaaccttttccagttcaccaaaatgacccagcatcttgttcttgtacacttgaacttgatcatacaaagacgacgacaactcatctaaaaatgttctgctaggaa

SEQ ID NO: 12364 - DNA, 700 bp, Setaria italica
  Peptide Sequence Number=SeqID_78338
cggcggcgcttcgatagcgggaggcggtgcccccccgatccatcccggcggcggatcctgtacaacgggaggggcggcgtcccaatctcgattccgaatcggcgattcaattgtggcctcgccgtgccgccccattgaagttagggccgtctcttgcgcagctcgccccaaaaccgctgccaccacagcccccgtctccgtcgtcccttctctagcccacaccgagagataatgagcggcagaccctgcagctgcatgattgagagcagaggtgctagccgtggcttggattgcccatgggggagatggattgggaggagctggtgctgttgtcgctcggataggaggatcagcggaggagatggcgtgctttggttggagctgcagctaaagtcgatggagagagaggtgatgtcatggtggtgaatggtcacgttggcgcttgagtattttggagatagagttagcgtgctggtggtggtggtatagggctagctggatgtctgatctgctcctggtgcttgtcggcaggaagaagggagagctattgattgctgctgcggtcttggtggagagaacaacagagaggaggaggtgtgttcatgatttgaactgttgcttgccctatttggaggaagaaaagaagaaactagctattggtgattgcttgctcggtggaggcaggagggagaaggagagg

SEQ ID NO: 12365 - DNA, 230 bp, Setaria italica
  Peptide Sequence Number=SeqID_78339
atctcttttcgggctctgagatgacggttgagatatgctcaagttcagatctacatcagcgccttcagttgcaacttcggtcagcagctccccatcatatgtgcttggctcgaagttcgtcacggcctctctaccattgcatttgatcgcggccttgtcataagccttcttgccgaggaactgccccatgcgcgcctcccagcggccgcacttgtgcagggtgacgcctc

SEQ ID NO: 12366 - DNA, 315 bp, Setaria italica
  Peptide Sequence Number=SeqID_78340
tgaggacggccgccagttctagagggagtatcaatctttgttctttttcaattcggagccctcaaatgatccatggtggagttgcagaccgagggagttcttatctcttttcgggctctgagatgacggttgagatatgctcaagttcagatctacatcagcgccttcagttgcaacttcggtcagcagctccccatcatatgtgcttggctcgaagttcgtcacggcctctctaccattgcatttgatcgcgacgttccttgtcataagccttcttgccgaggaactgccccatgcgcgcctcccagcggccgc

SEQ ID NO: 12367 - DNA, 380 bp, Setaria italica
  Peptide Sequence Number=SeqID_78341
tcatgtcgtcttcgtagtcactgagattgaagtttatgtccgcgtcgacgccgcggaacgttgatcgccgctcgatcgtacgcccttgcagcagcatgggcagtgtcaaatccacctaagtacacttgcttgccgcaatcccagatatgggactcccagcggccggtgcggcggtagaaggtgacgccgcggtactgcgagctccgggagcgcgggccacggcggctcttcttggctgcctggggctgcacgggcggcggcgaccggcggcgtggcgtgcgggtgagggtgcggcaggatcctgatgtccggctgcgggcgcggcggctcggcggcgcggaagaagccgaggtcggcccaatgctgcggcggcgggccgg

SEQ ID NO: 12368 - DNA, 252 bp, Setaria italica
  Peptide Sequence Number=SeqID_78342
ggccggcacttgtgcagggttgacgcctctgtacttggagctgccccgccgagaacccggtgctctgccgtcgcaggacgtgcacgaactcctccttggacaggctcttcatctgcttcatgtcgtcttcgtagtcactgagattgaagtttatgtccgcgtcgacgccgcggaacttgatcgccgctcgatcgtacgcccttgcagcagcatgggcagtgtcaaatccacctaagtacacttgcttgccgc

SEQ ID NO: 12369 - DNA, 315 bp, Setaria italica
  Peptide Sequence Number=SeqID_78343
aagccttcttgccgaggaactgccccatgcgcgcctcccagcggccgcacttgtgcagggtgacgcctctgtacttggagctgccccgcgagaacccggtgctctgccgtcgcaggacgtgcacgaactcctccttggacaggctcttcatctgcttcatgtcgtcttcgtagtcactgagattgaagtttatgtccgcgtcgacgccgcggaacttgatcgccgctcgatcgtacgcccttgcagcagcatgggcagtgtcaaatccacctaagtacacttgcttgccgcaatcccagatatgggactcccagc

SEQ ID NO: 12370 - DNA, 277 bp, Setaria italica
  Peptide Sequence Number=SeqID_78344
tatgtgcttggctcgaagttcgtcacggcctctctaccattgcatttgatcgcggccttgtcataagccttcttgccgaggaactgccccatgcgcgcctcccagcggccgcacttgtgcagggtgacgcctctgtacttggagctgccccgcgagaacccggtgctctgccgtcgcaggacgtgcacgaactcctccttggacaggctcttcatctgcttcatgtcgtcttcgtagtcactgagattgaagtttatgtccgcgtcgacgccgcgga

SEQ ID NO: 12371 - DNA, 253 bp, Setaria italica
  Peptide Sequence Number=SeqID_78345
ccgagaacccggtgctctgccgtcgcaggacgtgcacgaactcctccttggacaggctcttcatctgcttcatgtcgtcttcgtagtcactgagattgaagtttatgtccgcgtcgacgccgcggaacttgatcgccgctcgatcgtacgcccttgcagcagcatgggcagtgtcaaatccacctaagtacacttgcttgccgcaatcccagatatgggactcccagcggccggtgcggcggtagaaggtgac

SEQ ID NO: 12372 - DNA, 240 bp, Setaria italica
  Peptide Sequence Number=SeqID_78346
ctcgggctctgagatgacggttgagatatgctcaagttcagatctacatcagcgccttcagttgcaacttcggtcagcagctccccatcatatgtgcttggctcgaagttcgtcacggcctctctaccattgcatttgatcgcggccttgtcataagccttcttgccgaggaactgccccatgcgcgcctcccagcggccgcacttgtgcagggtgacgcctctgcacaagtgcggccgc

SEQ ID NO: 12373 - DNA, 408 bp, Setaria italica
  Peptide Sequence Number=SeqID_78347
gcttcatgtcgtcttcgtagtcactgagattgaagtttatgtccgcgtcgacgccgcggaacttgatcgccgctcgatcgtacgcccttgcagcagcatgggcagtgtcaaatccacctaagtacacttgcttgccgcaatcccagatatgggactcccagcggccggtgcggcggtagaaggtgacgccgcggtactgcgagctccgggagcgcgggccacggcggctcttcttggctgcctggggctgcacgggcggcggcgccggcggcgtggcgtgcgggtgagggtgcggcaggatcctgatgtccggctgcgggcgcggcggctcggcggcgcggaagaagccgaggtcggcccaatgctgcggcggcgggccggcgacggccgggaacagctcccgggtga

SEQ ID NO: 12374 - DNA, 650 bp, Setaria italica
  Peptide Sequence Number=SeqID_78348
tgcaacttcggtcagcagctccccatcatatgtgcttggctcgaagttcgtcacggcctctctaccattgcatttgatcgcggccttgtcataagcccttgcagcctctacttcgctgtcgaatagcccaagatatatgtacctgcacccaagcatggtgttccaaccgatgaggacttaggaattccctatccaccttccctttttttctcttaatttctttttgttgaaacagccattaagctacatgcatatctaacctatactactactgaactataaacaacgaaatcatgggagttcatctgctaggaactcatgactctagcatgaggctaacataggaaaatcacaaggattcacagcaaagcaaaatcctgaaaatttgatgattcagggtgtgaagtgttctcacttcttgccgaggaactgccccatgcgcgcctcccagcggccgcacttgtgcagggtgacgcctctgtacttggagctgccccgcgagaacccggtgctctgccgtcgcaggacgtgcacgaactcctccttggacaggctcttcatctgcttcatgtcgtcttcgtagtcactgagattgtaagttttatgttccgtcgttcgtacgtccgtcggtaactttgttattcgttctt

SEQ ID NO: 12375 - DNA, 1108 bp, Setaria italica
  Peptide Sequence Number=SeqID_78349
cagctgtcgtggcggtattggagaatcctgatgatgctgcagcggacgatgacgacgacgagaagagcggcaatggcagggtggggaggaggggctgtcattttccatgcccagctgggaacaccacttcctgtgcccccctctggcctcctgttaatatcccttgatgcaccctcattatttgtaaagaaggggtgagattgagcaggccagattggtggatgctcggtcataagagggaaccgatgaggacggcccgccagttcagagggagtatcaatctgcatcagaagcaaaagatttttcagttgaattatggatacctgcatatttgtccacgctctatatataattccttaaacaattcattttggtagggaaaaaaatgttctgctcagctgtcatgatcactctgaaaagagaaacttgttactacgcgataaaataatttgcctacttccgacttgagagggcagtcaaatgtaaacaggacaacagctgtagaaataggatctccgacgtaaactattaaaaagacttgatccacaagaggcatagtagtcacgtcactagcatggtgagagcgaaacttgggttattttacgcatggtgcatcaggtagccactagaattcgacaagaaaattttactgcttttgatacttgtcaaaggagagcctgagcacttgcctttgttcttttcaattcggagccctcaaatgatccatggtggagttgcagaccgagggagttcttatctcttttcgggctctgagatgacggttgagatatgctcaagttcagatctacatcagcgccttcagttgcaacttcggtcagcagctccccatcatatgtgcttggctcgaagttcgtcacggcctctctaccattgcatttgatcgcggccttgtcataagccctgaattttgtaacgaaaagaagagagagaagaatcgagtcggtactcaaccctttggaaatcaaaagacaaaggaaaaaactctttttttttttgcatcaatggtgaatccaagatgaacaaccttgcagcctctacttcgctgtcgaatagcccaagatatatgtacttcttgccgaggaactgc

SEQ ID NO: 12376 - DNA, 865 bp, Setaria italica
  Peptide Sequence Number=SeqID_78350
tttttgttaaagagagaagcatttcacgtgggcagtatgagaatacagttgaatccaatccactacaagaaaccaccccggcgcaaaccgaaaaagttgcaacgcccagagggggaaaaaatagccagcttcccggcaaatttacagcgtggcttcttggtttttcagcggtgatgatggctcgacgacgacggcgggtcgaaccggggggaggcagatggggtggcgggggcagctgtcgtggcggtattggagaatcctgatgatgctgcagcggacgatgacgacgacgagaagagcggcaatggcagggtgggaggaggggctgtcattttccatgcccagctgggaacaccacttcctgtgcccccctctggcctcctgttaatatcccttgatgcaccctgcataatgcaacaacagtttgttcatcatgcttacatcctaatatgggatggattgagcttccaaaaaaacttgatgcaggatggatgaattcaggaacaaattgaacagttaaatcctaatgctttctgatggaagcctgttccaaattagtctttccatcagttcagttggacagaaagccgagcttcaaacgtcaagctcaaactttccgtccaatagtatcggaaaacgacacatgtgaacctgaccttaaagttttggagctgaaaggttccacggttcaatttgaccaaactctggagttgaatagtaaaaacatgcttgtttgaaacaaacggcaaatttagtacttctgttctataataattgcattaaacatggtaattcataagttgtttttttttgtttcccacggaaagtttgaataatagtcacacttctataactggcaatacat

SEQ ID NO: 12377 - DNA, 1363 bp, Setaria italica
  Peptide Sequence Number=SeqID_78351
ttttttccacaagtagtgggcatgcagggctttatgattattgatacctatacttctgttaacagtttcagaaatgattctctacacaatattgtataaatcgatctcagatgttgaagttagtcaatctcaggtgtgtaaagagagaagcatttcacgtgggcagtatgagaatacagttgaatccaatccactacaagaaaccaccccggcgcaaaaccgaaaaagttgcaacgcccagagggggaaaaaatgccagcttcccggcaaatttacagcgtggcttcttggtttttcagcggtgatgatggctcgacgacgacggcgggtcgaaccggggggaggcagatggggtgggcgggggcagctgtcgtggcggtattggagaatcctgatgatgctgcagcggacgatgacgacgacgagaagagcggcaatggcagggtgggaggaggggctgtcattttccatgcccagctgggaacaccacttcctgtgcccccctctggcctcctgttaatatcccttgatgcaccctcattatttgtaaagaaggggtgagattgagcaggccagattggtggatgctcggtcataagagggaaccgatgaggacggcccgccagttcagagggagtatcaatctttgttcttttcaattcggagccctcaaatgatccatggtggagttgcagaccgagggagttcttatctcttttcgggctctgagatgacggttgagatatgctcaagttcagatctacatcagcgccttcagttgcaacttcggtcagcagctccccatcatatgtgcttggctcgaagttcgtcacggcctctctaccattgcatttgatcgcggccttgtcataagcccttgcagcctctacttcgctgtcgaatagcccaagatatatgtacttcttgccgaggaactgccccatgcgcgcctcccagcggccgcacttgtgcagggtgacgcctctgtacttggagctgccccgcgagaacccggtgctctgccgtcgcaggacgtgcacgaactcctccttggacaggctcttcatctgcttcatgtcgtcttcgtagtcactgagattgaagtttatgtccgcgtcgacgccgcggaacttgatcgccgctcgatcgtacgcccttgcagcagcatgggcagtgtcaaatccacctaagtacacttgcttgccgcaatccctgcatttccgagcaacaagaagacgagacgtttgtgttagaagagaagcgattggttggtacctgaaaggacaaggtgagcttgcagatgattggtgtactgaccagatatgggactccagcggccggtgcggcggtagaaggtgacgcc

SEQ ID NO: 12378 - DNA, 376 bp, Setaria italica
  Peptide Sequence Number=SeqID_78352
cagcaacaggggcctcacggcgcggcgccgtcgccgtcgccggcgcccgcgcaggggcagcaggggtacctgcacctgctccggtacacgccgtcgccgctgccgaggtgggaggcgacgccgcggcggcacgagtacttctccggggagtaccggagctactacccgacgccggtgcgcgagggcatctaccgcatcgccacggacgccaacaggctcaccaccatcttcagcgaggagaatcccaacgcctgcacgatcgtctgagagagcgacgcgacggggagagggaataaaccgtttccattcgtgcgatcgctttcctctcttttcttcggctcttggctgattatcggtgcaggaatcgtgggccaag

SEQ ID NO: 12379 - DNA, 453 bp, Setaria italica
  misc_feature (437)..(437): n is a, c, g, or t
  Peptide Sequence Number=SeqID_78353
gtggtcgtgccagcctttactccccacagcgagaagtgccggctcacgtttcattctgctgctctaactgaagctctaaatcatttgctccctcactgagtgtgatgcttcagctgtgggttgttccaaaaacttgctaaggtatcatgattttctgctgtctaaattccgtatgccggttataccttatttgtgttggtttcatttatttctcttgttgatacgaagtgtagagatagtgacacatttgcctaagctcttatatctgagtagtgcattgcaatggcgtgagctataccgaggttcaaaataaccaaaacaagtatgttatcctgtccgtgaggcgctgacaggtaaggccagctttactagctcctttcatttgagcaagatattgcttttgtcgatgttcattattgtattctgaactggcaagntacttgcttacctatt

SEQ ID NO: 12380 - DNA, 301 bp, Setaria italica
  Peptide Sequence Number=SeqID_78354
ccaccgggcgtccccgccgttatgccgccgggcgccgtgcgcccgccgcccatgtacgcgccgccccagccgggcgcctacatgccgcagccaggcgctgctgtcccccatcccggaatgcgttatcccgcaccgtatcctatggttcgtccaggctttgttccacgtccaatgcctccacctggtgttgtgccaattcagcggccaccaataattcctgggatccgtggtgttcctcctttggtagccccagctgccaggccacctgctccaactgttacgccggctgaataaaccaccg

SEQ ID NO: 12381 - DNA, 645 bp, Setaria italica
  Peptide Sequence Number=SeqID_78355
gagatgcagtgttgaggatctctagtgggtttggggagaattgagaggatttaggatttgtgcgtcggacgtggcggtggtcgtgccagcctttactccccacagcgagaagtgccggctcacgtttcattctgctgctctaactgaagctctaaatcatttgctccctcactgagtgtgtttctttatgtacttagatgcttcagctgtgggttgttccaaaaacttgctaaggtatcatgattttctgctgtctaaattccgtatgccggttataccttatttgtgttggtttcatttatttctcttgttgatacgaagtgtagagatagtgacacatttgcctaagctcttatatctgagtagtgcattgcaatggcgtgagctataccgagtttcaaaataaccaaaacaagtatgttatcctgtccgtgaggcgctgacaggtaaggccagctttactagctcctttcatttgagcaagatattgcttttgtcgatgttcattattgtattctgaactggcaagatacttgcttacctattcagttagctcttatttgctgatgccattgggtaccttcagtgtttccagatgtctatattctttgtattcctatatgtcttcagatgtttagtttgtgc

SEQ ID NO: 12382 - DNA, 1648 bp, Setaria italica
  Peptide Sequence Number=SeqID_78356
tagttaagtaactaatttagtactaattggtcgttgtagcttattaccgtatttacctaaaattaacctaaaactaagtatgttatcctgtccgtgaggcgctgacaggtaaggccagctttactagctcctttcatttgagcaagatattgcttttgtcgatgttcattattgtattctgaactggcaagatacttgcttacctattcagttagctcttatttgctgatgccattgggtaccttcagtgtttccagatgtctatattctttgattccatatgtcttcagatgtttagtttgtgcactatgtgttccaaggtttaatttgtgcactatctgttcagaggattaatttgtctacttattgttttacttcatgggttgttactaatgtggttgcatagatgtctcttttgtctctctctgcaggaatgcgttatcccgcaccgtatcctatggttcgtccaggctttgttccacgtccaatgcctccacctggtgttgtgccaattcagcggccaccaataattcctgggatccgtggtgttcctcctttggtagccccagctgccaggccacctgctccaactgttacgccggctgataaaccaccgacagcagtttacgttggcaagattgctccaacagtagacaatgatttccttctttcacttcttcggctttgtggatctgtcaagagttggaagcgtgcccaagatccaagtaatggaaaacctaaaggttttgggttttgtgaatttgaatctgctgagggcatccttcgtgcaacacggcttctcaacaaactgagcattgatggtcaggagttggtgattaatattaacgatgccaccaaggagtacctgaagaaacatgttgaggaaaagaagagggcacaagataaggcgaaagaaacagaagatggaggtggggatggcactacagctgttgctgaaactgaatcatcaaagcctgttcctgatgaatcagataaggcgacaagagattctgtagataaggacagtgaagagaacactaagaaatttggaattgttactgatgaagactccgaggctgataaggacgttgcagaaaaaataagcagtatgatagaagagtggttaaagactagacccccgccccccccaccaccaccaccagttcaaccatcagcagatagttctggtgtagatatcacgaaaactgattctgatgataagaatgatgctgacactgataaaagggcagctaatgaaactgaaagatcagaaactggctctcctgataggaggaaggataaagaacgtgataaggacaaacgggacaaagatcttgaaaggtatgaacgtgaccgtgagcgtgaaagagttaggagggacagagaaagggatagagagaaggattataagcatagagaagcagaaaagcatttcagggatcgcctcaaggagtgggaatctagggagagagagaaagaatatcagcgacagaatgaaaaggaaaaggagaaagatagagaacgtgaccgcagaagggagatcctgaggcaggaagatgagagtgatgaagaggataataggaaaaggaagcgaaggagtagtagcacacttgaagagaggaaaaggaggaggcaacgtgaaaaggag

SEQ ID NO: 12383 - DNA, 2238 bp, Setaria italica
  misc_feature (2215)..(2238): n is a, c, g, or t
  Peptide Sequence Number=SeqID_78357
tagtaggtatttaattttgttcttactttatttgtttttactttctattgctcagttactaatgtggttgcatagatgtctcttttgtctctctctgcaggaatgcgttatcccgcaccgtatcctatggttcgtccaggctttgttccacgtccaatgcctccacctggtgttgtgccaattcagcggccaccaataattcctgggatccgtggtgttcctcctttggtagccccagctgccaggccacctgctccaactgttacgccggctgataaaccaccgacagcagtttacgttggcaagattgctccaacagtagacaatgatttccttctttcacttcttcggctttgtggatctgtcaagagttggaagcgtgcccaagatccaagtaatggaaaacctaaaggttttgggttttgtgaatttgaatctgctgagggcatccttcgtgcaacacggcttctcaacaaactgagcattgatggtcaggagttggtgattaatattaacgatgccaccaaggagtacctgaagtaacctgttgatgacaaaaagggcagctaatgaaactgaaagatcagaaactggctctcctgataggaggaaggataaagaacgtgataaggacaaacgggacaaagatcttgaaaggtatgaacgtgaccgtgagcgtgaaagagttaggagggacagagaaagggatagagagaaggattataagcatagagaagcagaaaagcatttcagggatcgcctcaaggagtgggaatctagggagagagagaaagaatatcagcgacagaatgaaaaggaaaaggagaaagatagagaacgtgaccgcagaagggagatcctgaggcaggaagatgagagtgatgaagaggataataggaaaaggaagcgaaggagtagtagcacacttgaagagaggaaaaggaggaggcaacgtgaaaaggaggaagatatggctgataaagtaagagaggaagaggaaattgcggaagcaaggaggcgagctgtagagttgcaacggcaggcagatgaagcagctgcagcagcggccgcagctgctgaagagtctgctacacttatggaggttgatggtgatgatgaaaaggaaacaattgcacaaaacaagccagctgttgtggaagttgataacattgcaagctttgctaatggtgctggtgttggtgatggacttcgcaaagaaagtatcagtgatgaaacaagcatggcaccaggtcaaatcccagataccaagcaaaacagcaacgccccagcaaagaaactgggttttggtctggttggttctggtaaaaggacatctgttccatcagtttttgctgaagaggatgacgagaataatgttgataaaaccataagacctctagtgcctatcgattactccaatgaggaattacaagctgtgcaggccaattcttctgctgggccaaatgttgcagcagctgctgagtttgccaagcgcatctcagtttcaaattcgaaggaagagaagagtgaaaccgataaggataggaataggagatccagtgaagctcgtgttaatgatgaacggagggaaaaagtgcatgatcgagagaaagagaagcccaagtcagagaacaagaagattttggatgcaaaacaattaattgacatgatcccaaggacaaaggaagagcttttcgcctatgatataaactgggcgatatatgacaagcatgagttgcacgagagaatgaggccttggatttcaaaaaagatcatcgaatttcttggtgaggaggaatcaactttggtggattacattgtatcttgcacaaaagaccacgtccaggcagaaaagatgctggagctcctacagtcaattttggatgttgaggcagagatgtttgtcctcaagatgtggaggatgcttatatttgagataaagaaagtcgaatcaggactatcaggaagagcaaaggcatgaagctaagtctgtcaccttgtatgatcttttctgatttacgtcactcatcaactatgatctcacttgtaagctcatactgtactacaagcaaaaaaaccatttttagtgagactgaattgatggtttctattattttcctcttctgatgtagaaatgtatacgagaagccgagcactgatgagatactttgcgtaattatatttttggatagatcaattgcatttgtgatggacnnnnnnnnnnnnnnnnnnnnnnnn

SEQ ID NO: 12384 - DNA, 1414 bp, Setaria italica
  Peptide Sequence Number=SeqID_78358
ccggctcggcggctgccaattcgacccctcctcttcctcaactcgctcgtccctccaacccgggggcgctgaggcccacctccacacgacgtgcaccggccgccgcccgcctcggcgccgtctctaccaggtggggagcatgtcgagcgcggtggtgaacgggctggccggcgccggcggtggcattatcgcgcagatcatcacctaccctctccaaaccgtgaacacccggcagcagacggagaggtcagcgaagaagaggaaggccgggagcggcgcaaacgacacctcgaccctcttccagatgctccagcttatccaaacggaagggtggggtggattgtacagcggcctcaagccctctctcatcggcactgctgcatcgcagggaatttattactacttctaccagattcttaagaacaaagttgaagatgtggcagctgctcgtggtaagaagggccttggggatggtactgttgggatgctctcttggcttggtattgcagctgttgctgggtcaatcaatgttcttcttaccaatccaatatgggttcttgtgacacgtatgcagacacatacgcaagcagaaaggaagatcttggagtctaagaaggaccttttactgaaagaaatatctagggctaattccttggaggtttcaattctgaaggataggttggttaaactggagtctgaaaaacctcatccatatggtacatttcaagcgatccgggaggtttattgcgagtctggcataaggggatattggaaaggacttgttccaacattaatcatggtatgtaacccatcgattcagtttatgatatatgaaactttggcaaagcgtctccagtcaaagcgctctggaaagcaactacctaaaaggaacctcactgctatggaggtgttcttgttgggtgcaatagcaaaactgggagctactgttgtcacttatccattgctagtcgtcaagtctaggttgcaagcaaaacaagaaattggcaggaatgtgatgtccagatacacaggtacaatagatgcaataataaagatggtccgttacgaaggattgcatgggttttacaaaggaatgggtaccaagattgtacaaagtgtctttgccgcctcagttctctttatggtaaaagaggagttggtgaagttagcagcgcttttagttgccaggagtaggactatgcttattactaagcccaagaagcgataggtgttgccatgaccatttttttttgcctcaacttgtaatgtatataggattccattatctacatcctatttaaaaacataaaaaattctttactactccctccgttccaaattgtaggtcgttttaacttttctaaattcatagatattattatgcacctagacatgtactatagatgtataataa

SEQ ID NO: 12385 - DNA, 540 bp, Setaria italica
  Peptide Sequence Number=SeqID_78359
taaagaaacaaagaaatagacagatccgggaggtttattgcgagtctggcataaggggatattggaaaggacttgttccaacattaatcatggttagttatttgtttttgaaatgtcacacccaaagttcattggttacatatggagttccacagctaccaaaatgcgtaaaatttcaggtatgtaacccatcgattcagtttatgatatatgaaactttggcaaagcgtctccagtcaaagcgctctggaaagcaactacctaaaaggaacctcactgctatggaggtacagactttcagattagatcctgtaatattcttgtctttatgaaacgatggaggtgcctggctttgtgaaactgtgactgttttgactctcttattgcctcaactatttatccccactcctagaaacttattttcgatgatgttatagtgttacattacatattttcacgcaaatgaggcattattaccttcagagttcagactaactgtggcaactgtgtagtgccttttaatgggattgcgacaatcgg

SEQ ID NO: 12386 - DNA, 295 bp, Setaria italica
  Peptide Sequence Number=SeqID_78360
ccactcgccgccacctccctccgatcctcgcctccgcgtcagcctctgcggtcgcgaaacctagcccggacccgaagcccgccgcggcggcgggcggcgcgaagccgctgcccctcctcatctcgctcgccgccggcctcgccgtccgcttcctcgtgccgcgccccgccgaggtgaccccacaggcgtggcagctcctctccatcttcctctccaccatcgcggggctcgtcctcggcccgctgcccgtcggcgcgtgggcgttcctcggcctcaccgccaccgtcgccacgcg

SEQ ID NO: 12387 - DNA, 589 bp, Setaria italica
  Peptide Sequence Number=SeqID_78361
gttagtcttgtagccccctcgccgcgtcgatcgcgattcccagccgcgtcggccagtccagcggcgccggggccatggcaacgccgccgccgccgccggcagggcgcagccaccggtcgaggctgccgttctccatgtactcgtacaccagcagcttggtgtcgtcgctcgagatgtagcagaggaggctcacgatgttggtgtggcggatgtcgccgaggatcctcacctccgagtcgaactccttgccagccttctcctcggtcttgcccctgctccagagcttcttcaccgccaccacggcgccgccgcggagcgggacgcggtacaccttgccggagccgccgctgccgatgacgttctcctcaccgagcttggtgaggatgtcgctctcggtgaagtcgaccttgcggaacggcgtcaccttccacgtcatcaggtccctctcgcgcgtcttccgccggatgacgaagcacccgacggcgccgatgagcaggacgccggcgaccaccgagaacaagatgatcaggccggttgtcatctggttgcggtcgtggtaagggcacgccggaatgtccatgttcaggct

SEQ ID NO: 12388 - DNA, 1110 bp, Setaria italica
  Peptide Sequence Number=SeqID_78362
aatgtgcaggcatgcaaggacatgagtgcgcttaaaatttgattgcggcctcacacagcctttcaaagaaactctacatcagttacacctacaaaactcactgctatcgatgaggaacagaataagttacatcccagtttgactgacgggaagacggactgccacatcctgcctgcatcacgaggatggcattttgagataagtcaaatctatggctgctgggtagggcgataaccagatcctaagtaatttgggtagctgctggaagcagacggccctgatccacctgagtaacctgcatatccgcttgtgcctggcagcgctcctgggccaccgtacgcaactttatagtgacttgaattgtatgatgctgccactgaccctggggtgtactgaaatggttttggggcactgaatggttcaccataggaagaaaatgcccctgtgtcatatgtagcagctggtggagtgtaatggtactggtcggcagctccatatctatcaggaagaggggccattggtgctggagcacgggagggcattggtgctggagcacgctgccagttactggccggaaatggaggtctgcgagcagctgaaccaacaggaccagcaggtctccgaggaaatgaagtgccagggcctcgaggcttctttgagtaagcacgcccagcatcagatgatggccttttctcactcttaggcttcagctcagaaacacgcttttggagaggtccaagtgaatactccttctgaagcttatactcttcgatgcactttatcacggccctcaaagcaagtagctccttggtctttgggtcatcctttgaagcagccgcagtggcatccccattattgtcaaatgaatcttttaattcatccacatatgtctttaacagaggtgcaggtggaaaagtatccgaaagcccaaaagcttgtatgaaatgaactgcatcaatttgcctgtgcctgttaaccaactcttcaatgatacctggtattctctcattaagaccaagagagcgacaagtcacagcagtctgcttgcgacgagagacagcaactacgatcttgcatagttcatcttcgtcaagcaccgaatcaacatta

SEQ ID NO: 12389 - DNA, 1424 bp, Setaria italica
  misc_feature (36)..(36): n is a, c, g, or t
  Peptide Sequence Number=SeqID_78363
gtcaatagaaccatcttaaagcaccaatttcacgcngaaaatcaatgctttgcacaaacagtaatggaactttagttccctagatggttgtggggcttagcggcaatgaactgcagcaccctagcaaattaagggatgagaacaccttgtggcgttctgggtggataccaacctggtattctctcattaagaccaagagagcgacaagtcacagcagtctgcttgcgacgagagacagcaactacgatcttgcatagttcatcttcgtcaagcaccgaatcaacattaaaagtagtaagaagctgcaggaatgcctgtgcttccaatgaatggccattagaagcatctaggtcaacctcagctaacttactcttccactcttcggcaattgccttggcttgctccttaatttcagagctccaaggatcattgccacctggctccttcgtccctagtgcaggtgctatagcttccattaaaacaatacagctcctgcgctggacctgaagggcgttttgtttattcccaggcgaattggtttggtctggtgggaagaaaccctccagggaatcaagcacaaagcgggcagggtcagttgcacatcttagtgcaacggaaagttcatcacgaaggctaggaagttttttacaattttctgaaaggaatttcagaaggcctttggtgtccatctgctcacatagttccttcaatacaggacgtggcttaacctcaacaagtgaagcttcagatggctcagctgacccactagcaggggtattctcctctgaagcacgagatgcattgtttccattgattgaggtacttacctttttgtctttgcttccattggcatcaagtatatcagcaagctccaccttatatttttggcgcacctctgctacagaagagacagcagcgtccttaagctcctgaagctggttcaaggaagcacgctcttttgcagaaacattagcctctttctctgcaatcagcctactagcttcagttttcttttcttctaatgccttctgcttctcttccagttcatcaaatttgcttctgtatgacttatcaacattgaggaaatattctttgatatctccccagttcatgccattctgcaactgcagagatgcttcagtgtgggatttcaacttgccaaatacttcagcaagctgttccagcaaagacattgtagactcagaaccaccagaattgttcagagtagcttccgtggccattttgcaacaaaaccaacgattgcctgcaggcgtcgcccgcgccgtagacggaggaaggggaggccgctgaagccctcgccggtcgcgccgcccagccctccaccgctcgccgtcgcccgcgtgccgctgctagggttagccggtacggagatgcggagcctcgacgagtccttcgtacgtagt

SEQ ID NO: 12390 - DNA, 285 bp, Setaria italica
  Peptide Sequence Number=SeqID_78364
tcggactccggcagcgaggggaactctctgtgcggcgaggagaacgggaccggggcggccacgccggacgacgcgtccacggtgtccggcggcaccgtgcggtcgcgcccggagagcagcgacggcaagaagacgccggtcaggaaggcggacggcaaggtgccacccagacaaacagggtctcggcagaaggtgaaaccggcgagcgcggtgaagccaccgacgacggcaaggaaaacgctaggcttgaagcccgaggttccagcgcagcggccgacgtccggg

SEQ ID NO: 12391 - DNA, 624 bp, Setaria italica
  misc_feature (614)..(614): n is a, c, g, or t
  Peptide Sequence Number=SeqID_78365
ccttgacaactcctggaacagagctatggtatgtgtagatttactgagcatgtatgatgaaatcactagtctttatgggccaaagtcgtagttgaaatatgtcttagtagattatacactaggaccctactgaaatttcttttcctctatgaccagtgtaagtttggtgattctaaattaacccaaaagtaaacctataagttttggtctgttaagcaccttgttgatggcattttgcttcatctatgtgccacttggagaagttatatcagaacattacgcattagcaactagggaagtgtcctcatggtatctaacaaatttaggaacgaataagcttgttcttgttcccatgatgtctgttttaactaacggtctccctcacttatgacaccgcatgcccaatttgtcaagtccttcatgtttatttttaatggtcttatcatacctcagttttggactttatgcacaaattgtcattattatcttctggtagttctagcaatttcaatactaagtcctcatgccttgcgcagattgtgaatggacctcgtgctgtagaatctccaaatgacaagtttgaagtattctatattgattatggacaaccaagnggtggttccc

SEQ ID NO: 12392 - DNA, 501 bp, Setaria italica
  Peptide Sequence Number=SeqID_78366
aataaaaagtagacccactctagaggatgatttggtcaggaagcagcagagtatttaagtgaatgtttgctcagtagctcgaagcaataccgggcaatgattgaagaccgtgatacttctgggggaaaatcaaaaggcaaggaactggaaatgttctcattgttactcttgttgatgcagagacagaaagcagcataaatgctaccatgcttgaggaagggcttgcccgattgaaagaagcaagaggtgggacactaggggagaggaaaacggcgtctccagaacctggagcagttccaggagaaagcaaagaaggaacggctgcggatctggcagtatggagatgttgaatctgatgaggacgaacaggctccagctgcaaggaagcccggaggccgtcggtagagactgggcgtaagctatgaagttttggacaccccgagtgtgatactctgccgggagttatagatgagaaacttttgcctcactaagtaccctgct

SEQ ID NO: 12393 - DNA, 1001 bp, Setaria italica
  Peptide Sequence Number=SeqID_78367
actttaattttgagctagtcttttggtgtactgcatagcatggcatttagtttgttttgaaatattgaatcgtttaagctaacacaagcaatgttcatttgacccttgaatggaaacaagagacatcatatattagttatctgcatttcatttgtgatttgccagctaaatctagggcatcacacctgcaaactgttgttgaatgcattcattcctactttgccttttgttaggacatacaactacttgctacaaacttttgctcatgtttggtagaacattcctactttatgatggtagacagctgcttggaaactagtccagatgctgcgcaaaatgccaatggacatatgttcattcctaactactcagagcaaagaaacacatgttcatttcctgacagacaatgggatcaatttcttgcaaagctatgtgaaaagctgtattatggccaggccagaaatatatgttcatttctaacattacctactctgcctgtatcttcaggaagggcttgcccgacttgaaagaagcaagaggtgggacactagggagaggaaaacggctctccagaacctggagcagttccaggagaaagcaaagaaggaacggctgcggatctggcagtatggagatgttgaatctgatgaggacgaacaggctccagctgcaaggaagcccggaggccgtcggtagagactgggcgtaagctatgaagttttggacaccccgagtgtgatactctgccgggagttatagatgaaaaacctagagtgagcgggtaccttatttattcggttagagcagggtacttagtgaggcaaaagtttctcattttgagcacttctgatggcaggttattccgttttgacatcgtaaggttaaggttacagatacattgttttttccctgaacttaataaggttgtgtctgttcgctgcggttctttgtagacaaaagtataatgttgagaattgcagtgaattaaaattcaggattgc

SEQ ID NO: 12394 - DNA, 3511 bp, Setaria italica
  Peptide Sequence Number=SeqID_78368
atttcgccactcgctacaccccaaaaacctcacgcgctcccgttcttctgcccctcgcctcgtcgccgcgccggcgagaggggcgctcatccccccgtgcccgtgtaccgacgccgccggagcggaggcaacccgcgccttatccggtcgccccagatctgcctcttcttctcgccgcgtcgggggcggatcccgccgaggccagggtgtaagctgctatcatggcgaccaacacaggagcctcaggatggttgaggggtaaggtgaaggctgtgacatctggggattgtctactcatcatgggaagcacaaaggctgagatcccacccgagaagtccatcaccctgtcctaccttatggcaccaagactggctcgccgtggtggagtggatgagccctttgcatgggaaagcagagagtttctgagaaagctttgcattgggaaggaggtcacattcagagtggattatacagctcctaatattggacgcgaatttggcactgtttatcttggtgacaagaatgttgcatactcagtagtgtctgctggatgggcgagggtaaaggagcaaggccccaaggggggtgaacaaaatccataccttactgagctgctgaggttggaggaagttgccaagcagcagggtgttggtcgttggagcaaggaacctggtgctgctgaagagtcaatacgagatcttccgccatctgcaattggtgaagcaagtggttttgatgcaaagggttttgcggttgcaaataaaggcaagagtttggaggccattgttgaacaagttcgcgatggcagcaccattcgtgtgtacttgctccctagtttccagtttgtgcagatatatgttgctggagtacaggctccatccatggggaggcgctcatcggcacctactgttgttgctgaaacggatggtactgctaatggtgcaaacggtgaagattctgagggagcacctgctcaactgactacagcacaaagacttgctgcatctgcagcttctgctgaaattccaccagataggtttggaagagaagccaagcacttcacagagactagagttctcaacagagatgtgcgtattgtggtggaaggcacagacagctttagtaatataattggctctgtgtactaccctgacggagagactgcaaaggacttggccctcgagcttgtcgaaaatggtcttgcaaagtatgttgagtggagtgctaacatagacttagaatgttgaagtcaaaataaagctgaagaacgccgaacttaaggctaaaaaggatcagttgagaatctggacaggctttaagccaccggtgacaaactcaaagcccatccatgaccagaaatttactggaaaagtggtagaggttgtgagtggagattgcattattgtagctgatgatgctgctccatatggcagtccttcagccgaacgtcggattaatctctcaagcattagagctcctaagatgggcaatgctcgtagggatgagaagcctgacaattttgctcgtgaagctaaggagttcttgcgcacgaggttgattggcaagcaagtggctgttgaaatggaatactctcgaaggatcagcactgtggatggacagaatgctgctcccacagccaatgcagctgataccagagttttagattatggttcagtttttctgggttcaccttcacaggctgatggagaagacgtatcttctgctccgagctctgccagccaacctggagttaatattgctgaacttttgctctcaagaggctttgctaggatatctaaacacagggattatgaggaaaggtcacactactatgatgctttgttagcagctgaatcacgggctgagaaagcaaagaaaggagtgcattctcaaaaagaatctcctgtgatgcacataacagatttaacaacagtatctgcgaagaaggccaaagatttccttcccttcttgcagaggaacagaaggcattctgccattgttgaatatgtttttagcggccatcgatttaaactaacaattccaaaggagacttgcagtattgccttctcattatctggtgttcggtgtcctggtaaaggcgagccatactcagatgaagctattgccttgatgaggagaagaatactacaacgtgatgtggagatagaggttgaagcagttgatagaacaggaacattcataggttcattgtgggagtccaagaccaacatgggctctgtacttttggaagctgggctggccaagctgagttcatttggcttggataggatctcagatgcttatgtcctaacgagagctgagcagtcggcaaagcaacaaaaacttaagatatgggagaactatgttgagggtgaacaagctaccaacggatccacacctgaatctaaacaaaaggaaattctcaaggttgttgtcacggaagttcttggtggtggcaagttttatgttcagacagttggtgaccagagagtggcttcaattcaacagcagcttgcatctttaaaacttaaagatgcgccagtcattggtgcttttaatcctgtgaagggagaaattgtgctcgcacaatttagccttgacaactcctggaacagagctatgattgtgaatggacctcgtgctgtagaatctccaaatgacaagtttgaagtattctatattgattatggcaaccaagaggtggttccctacagtcgattacggcctgtggacccatcagtttcctcgtctcctgctcttactcagttatgcagccttgctttcataaaagtgcccactctagaggatgattttggtcaggaagcagcagagtatttaagtgaatgtttgctcagtagctcgaagcaataccgggcaatgattgaagaccgtgatacttctgggggaaaatcaaaaggacaaggaactggaaatgttctcattgttactcttgttgatgcagagacagaaagcagcataaatgctaccatgcttgaggaaggggcttgcccgacttgaaagaagcaagaggtgggacactagggagaggaaaacggctctccagaacctggagcagttccaggagaaagcaaagaaggaacggctgcggatctggcagtatggagatgttgaatctgatgaggacgaacaggctccagctgcaaggaagcccggaggccgtcggtagagactgggcgtaagctatgaagttttggacaccccgagtgtgatactctgccgggagttatagatgaaaaacctagagtgagcgggtaccttatttattcggttagagcagggtacttagtgaggcaaaagtttctcattttgagcacttctgatggcaggttattccgttttgacatcgtaaggttaaaggttacagatacattgttttttccctgaacttaataaggttgtgtctgttcgctgcggttctttgtagacaaaagtataatgttgagaattgcagtgaattaaaattcaggattgctaagttaaaaaaaaaaaa

SEQ ID NO: 12395 - DNA, 1777 bp, Setaria italica
  Peptide Sequence Number=SeqID_78369
caatttttatccttcaactgttctggagacaggccatgacattttgttcttctgggttgcacggatggtcatgatgggaattgagtttacaggatcagtaccattttcttatgtctatcttcatggtcttatccgggactctgagggtcgcaaaatgtcgaagacattgggaaatgtcattgaccccctagataccatcaaagattatgggactgatgctttgagatttacactatctttgggcactgcaggccaggatctcaatctttctacagaaaggttgacatcaaataaggctttcacgaacaagctttggaatgcaggcaaatttttgttacagaatttgcctgatagaagtgatgtctcggcatgggacttcttgttagcaaataagttcgacacagaagcatcacttcagaaactgccattgccagaatgctgggtggttacaggactacacgaactcattgataaggtcagcacaagctatgacaagtttttctttggagatgctgctagagaaatatatgatttcttctggggggattttgcagattggtatattgaagctagtaaaacacgtctctaccactcaggtgacaagttagcggctgctacagcacaaagtgttctgctgtacgtgtttgaaaacatactgaagctactgcatcccttcatgccattcgtcactgaagaattatggcaggcatttccgtacagaaagcaagcacttatggttgctccctggcctaccactgaccttcctaaggatttgaggtccatcaaaaggtttcagaatcttcaatcattgataagaggaatcagaaatgttcgagcagaatacgctgttgagccagctaaacggatatcagcttctgttgttgctacggcagatgtcctggattatgtatcgaaggagaagcaggtcctggctttactttcgaagcttgacgttcagaatgtgcattttactgaatcagcaccaggtgacgcaaaccagtcggttcacattgttgctgatgagggtttggaagcctatctacctttggctgacatggttgatgtgtctgaagaggttaagcggctctccaagcgcctcactaagatgcagtcagagtatgatgctctcatggctcgcctcaactcccaaagctttgtagaaaaggcccctgaagaaattgtccgtggagttcgggaaaaagcatctgaggcagaggagaagatctctcttactaaaactcggctcgcatttctgcaatcaactgtctccagttaactacagtaatttatggtggcaattgctaccggaatgccattttgatcgacgatggacaaaactggttgttaatagtacttgcggttaaaggatctcagtcacagattaccaacaagggcagtcatggtcactggtccagattgtgcagctatttggtccagcagcagcttgcagaaatacttgccaatcctatctgttgtgcccctaaaaacttgcagcatatgattctttttttttttgaatgctcttactgcatttttcttacgagcttgggcgtgacgacgggctagttgcattcttcttgtgacttcagttccttctcggaatgcccttagtcgaggtaaattttgcccggttgtaatgtaatcttatgtttcatcctgactttttttttttgtccacttgcatatattaatccataagttttgccaaacttctacgcatatttgtaccgagttacatatttcgatatagataattttgtaaagaatagaaaaaaaa

SEQ ID NO: 12396 - DNA, 754 bp, Setaria italica
  Peptide Sequence Number=SeqID_78370
ttttttttttattaagaaaaaactatatcctgcatacttactggcaaaactgttttgctaacagatgttttcagctacaactacaatgatgcgtggatacatggagaaaaatttcgaacattcttaagacagaaggtgacctacaccgtgttgcataagacatcaaaaaattagagttgctaggacaatggacatggagcaaacaagagcagagagaaaggtgatgttagatacaaatcctatgcgtacttcatctccacatggtatccgccatgcagctttctccacaggtgcagcttcgagattcttaagcacccacaaacaggaatcggaatcggtttccttttttctgtagcgtaggaacagatctgggctaccaaactcaactgttgcatacccactggcatcaagaggcgggtatctagcatggagaggcaggtctattacaatgttacagtttgttaaagtgcttggcctgagatcaaaatgaatctcgacggctgaccggttggatagagctgagggtagttcaaggttggtgtctccaaaaacagcaacatcaaggaaaactttgcgctcaacaaaatgctgtagctcaaatgggtcagcaaaccccatcgggagctttcaactatcaccagacaggcatcatagccattaaggaaattaaccatagcatctgacaggcataaatttcacagaatagttctgggtcttacctaaacttctaacttgtttgtctattaccctactt

SEQ ID NO: 12397 - DNA, 538 bp, Setaria italica
  Peptide Sequence Number=SeqID_78371
ttgttctttttcttaacttattctacctagtactaggtctattcatagccattaaggaaattaaccatagcatcttgacaggcactaaatttcacagaatagactaaatgacggtgagaaccttcaccaaccagttgccgctgcagttctgagagtgtaggcacttcaacatcatcagtaagtccttcgcacaattcatcagagtcagacatttcagctaagccacgatggtgagcgtggtcagtcaaggtgtggagatatgcatcgccaatgtacgtcctagagcagggcatacaattgatggatttctggcttctacctgcctgctcaagcggcaacgatgcggcggcagcggcgaagatccaagcggcggcgagcaagcgcggccctcccgccaccgccataggaacaggaggaggagaaggcggcgcgacgagttcggggggcagacagatcagagaagtggggcgcagccctctcgccggtgccgtggaggtggagcgtctccccgcgcggggtggtggcgcggatctcgtcg

SEQ ID NO: 12398 - DNA, 267 bp, Setaria italica
  Peptide Sequence Number=SeqID_78372
accggacgtgcctccagtacaatcggctggtggacgggtactggtccccggcgacggagatgtcgacgtacctgcgggtggtgtcctcggacaacgacagcaacccgttcacggggatgacggacatgatccagacggtgtgcccggtgcggctggcgctaccggtgccgccgaagcaggcgaagacgacgatccggaacgtggccatcatcacggcgctgttcgcggcggttctcgcacgcggagctgaaggcggcgacgaaggaa

SEQ ID NO: 12399 - DNA, 2797 bp, Setaria italica
  Peptide Sequence Number=SeqID_78373
gttgtcttcgtcggttaatcgccattgatttccaatccacaccagatcgcggaggagaagagggggcagtcctggctgctgctcgattcgcagcgcagggactctcctctcctccgactagcccagcccagcggctcctgcgcgggcaccggccatggcgtccctccccttcctctgcctcatcctgctcgtcccggtcctcgctgccgcgcagcggatgccctctttctccgccaacgacacggcctggcgccccgccgacagcaaccgcaccctcgtctcgccgcaaggggacttcgccgccgggttcgtggcggcgagctccgctccgcccgctccgcccagttaccgcttcgccgtctgggtcgtcggcgccaactccaccgacagggccgtcatctggtacgcccacaaatccgccgactcctcccccatcgatgccgtcgtggccgacggcacctccgcgctcgccgtcgacgcttcgggccggctcgcctggactgccggcgggaacaacaccgccatctggtcccctgccatgaattcctccacgggcacggcggttctgcagctcaacgactcggggagtctcgtctacggcgcggcctggtcgagcttctccgagccaatcaacacgctcatggcggggcaggccataccagggggaggcagcgccaacaggacgctccagtccgccaacggccgctacacgctcgtcaagtccgccacgctgcagtacggcaacctgatgtacgccaacatcagcggcggcggctccctgctcaacctcaccaacgacggcaagctcctcctgagcggcgggaacgggcagctcatcgcctcggaccaaggcaccagcgaaacgggtgcggcggctcacgctcgacgacgacggcaacctgcggctctacagcctgctgcccaagacccggcggtggaacgtggtgtggcagctcgtgcaggagctctgcaccatccggggcacctgcaatgccagcaggatctgcgtccccgtcggcgccgacagcgtcagctgcgtctgcccgccggggtaccgcaacgctaccgcggacggcccctgcgcgccgaagcagaactacaccggcaggggcaacgacgacaagttcgtccggatggacttcatctccttctccggcggcgcgctcaacacgctgtcggactctggcccctggatgaagaagcagacgccgcagaacctcgcggaatgcgagagaatctgccggcaggacgcgggctgcgtggcgttcgggtacaaattcggcggcgaccggacgtgcctccagtacaatcggctggtggacgggtactggtccccggcgacggagatgtcgacgtacctgcgggtggtgtcctcggacaacgacagcaacccgttcacggggatgacggacatgatccagacggtgtgcccggtgcggctggcgctaccggtgccgccgaagcaggcgaagacgacgatccggaacgtggccatcatcacggcgctgttcgcggtggagctcctggccggggtgctgtcgttctgggcgttcctgcgcaagtactcgcagtaccgggagatggcgcggacgctggggctggagtacctccccgccggcgggccccggcggttctcgcacgcggagctgaaggcggcgacgaaggacttctccgacgtggtggggcgcggggcgtacgggacggtgtaccgcggcgagctccccgaccggcgcgccgtggcggtgaagcagctgcacagcgtgggcggcggcgaggcggagttctgggcggaggtgaccatcatcgcccggatgcaccacctcaacctggtccgcatgtgggggttctgcgccgaccgggaccagcggatgctcgtctacgagtacgtgcccaacggctcgctcgacaagtacctcttcgctggtggcggcggcggcgctgctgctgccggagaggagaacgacaactcctcctcgtcggagcaacagcagcagcagccattgcttgacctccacacccgctaccgcatcgccctgggcgtggcccgcgccatcgcgtacctccacgaggagtgcctggagtgggtgctccactgcgacatcaagccggagaacatcctgctggaggacgacttctgccccaaggtgtccgacttcgggctgtccaagctgacgagcaagcgcgacaaggtgaccatgtcccggatccggggcacccgcgggtacatggcccccgagtgggtcatccaccgggagcccatcacggccaaggccgacgtctacagcttcggcatggtgctgctcgagatcgtctccggccgccgcaactacgggttccggcaggagtcggtgggcagcgaggactggtacttccccaagtgggcgtacgagaaggtctacgtggagcgccgcatcgacgacatcctcgacccgcgcatcgccgcctcctacgacgacgccgccagcgtcgccaccgtcgagcgcatggtcaagaccgccatgtggtgcctgcaggaccgcgccgagatgaggccctccatggggaaggtggccaagatgctcgaggggtccgtcgagatcaccgaccccgtcaagcccaccatcttctgcgtccaggacgactagtcgatcagctggccattccaggcagatgtgaatgtgaattcccctgctgttcgtttatagaaattaccactactagttactgcgtactactgcagcaactgcagatcgagttcccctgttgggggctttttaagaaaaaggatgttccccctgatggaatggaagaaagaaat

SEQ ID NO: 12400 - DNA, 587 bp, Setaria italica
  Peptide Sequence Number=SeqID_78374
tggcatctgaattggtgagcgacatcactgttcgtattgggactacaaagttttaccttcacaagtttccactcttgtccaagtgtgctcgctttcaaaagttgatcccaaccactggtgatgaaaatattgacatacaaatccatgacattcctggtggtgcaaaggcttttgagatctgtgccaagttttgctatggcatgatagtcacactcaatgcctacaatgtgattgctgcacgctgtgctgcagagtacttggagatgaatgagactgttgacaagggcaatctgatctacaagattgatgtcttcctcagctcaagcatatttcggagctggaaagactctattattgttcttgggacaacaaaggctcatttgccttgggcagaggatcttaagttggttagccactgcattgattctgttgcttcaaaagcctctattgacgtttcaaaggtcgaatggtcatacacgtacaatcgaaagaagctcccaactgagagtggcaatgattctccctggaatggagtcaaacagcagcagttagttccaaaggattggtgggttgaagatctgactgat

SEQ ID NO: 12401 - DNA, 2029 bp, Setaria italica
  Peptide Sequence Number=SeqID_78375
tttagttttttagagcagagttcttgaacgacgggatcacatattcacactgttcccaacactagtgtttattcattacacggttatttgttcagtttatgcttgaatccaatctaccagaatgattatcagcagaatttcgacaagggagccacatgctcagatggtgaagttaaagattctgctcaggcagctcacaggcaaaagttgcagatcatgactgaaccacagggaagcaaattacagaatcctaaagaatggaaacactcctaaaatgctggcgtgcacacagaagaacatacaccgaacaaatgctgacaaacaagcgacaagatcaactgacaagaagcaaacttccctaagagaaccatggtcttagttgtcgaccacgagcttccgcctcttgtagtttaccatcaccttgcccttgatgccgacaaccatagcattccagtcattctccgggaacggggagaccagctcgaactcaaagttcctcagcaggtgtgtccagatcgccttgatctgcaggtaggcgaagggctcgccgaggcaaccgtgcctgccaccaccaaaggagatgtaggagaaggcgcctgcagccttgtcctcctccctgccaggaccgaaccggtcagggtcgtatgagtctgggttcttgtagatgtggggcagcctgttggcgaaggacggtgatgtcgccacaatgtggcccttggggatgtcgtactctttgccttccttagttgtcacggtgaagtcattgtgcgactggcggagcaacatgattagcggtgggtggagacggagagcctccttgatgcaccggtagaggacatccatctctgccaagatgtcatgatcaatcttgttcccatgccgcttcataacctccttctgctcctctacagcctctgcaaagaactgcttgaaccgaaggaggtaggctccagtccacgtcgaggtgatagagctggtgtgctgtccggcaaaaagtgccgcaataagtagcccggttacctcactctcagtggtggagcgtccgttcttgtacttggaatcaataaagcactgcaacatgtcttcttcagactgtccggaggccttgcgggacttaatgatggttgcaaagatttctgccaaacgtgcccgtgccctgtcccggcgcttatgtgcagggattgggaggtagggaaagatgacactgatgggccgcatcccattgtcaaggtcatggaagagagcagatacatcatcaaagagcttctctcgaacctcccttcccagcaagcatcgactagctgtcagtatgatgaggtgctccaactcatacttcaaatccacagtaccactgtctccccactttgagaagtactcctcagcctcagcaaccatctgatcgacgtagctgcggagcttgttggcccgcagggcctcggtgaagaaccggaactgctcctgcctgacggagtagtcaacatcaaacacgacccctggcccgaatgtgggcacgttgaacctgtacacctcctgctggctcatctcggcctcgttgcccttgaagaagtgcgcggacacctcgggcccgatgaggaaggtgatcctgcggctgaggatggggacggtgaagacgctgccgaggcgggcatactgctcccggatcatcgggatggggccccgcatgaacttgatgagcccgccgacgaccggcgcccccgggatggtgggcgggaggcgcttaccccgggagcgggcacccagcaggagcttgacgaaggcgatggtggccagcagcagcgccgcgccggcgatgagccgctgctggctgtccgcgagatccatcatcttcctccttcgatctgcgccgcccgtcgaagcagggccggggaggacggatgggggaaggcggctgcgcgtgcggggagtgtggagcggagggacggaagacggggtttatataggtgccagtgcccgagagagggagcggggcgggagggggggttccgactttccgaggttgggggagggg

SEQ ID NO: 12402 - DNA, 297 bp, Setaria italica
  Peptide Sequence Number=SeqID_78376
gccaggtggtcaaggcgtgctacaacgtctacctcgggagcgccagcggcgggaaccagctctgcgccaagctcgccatcgcgcaggtgctggccatcgtgttcgcgcgcgttgaggccgatgacatggacgtgcgcgtgcgcaccgtctccgccgcggacatgatggacctctccgaccgcagcctcaacgactccagcgtcgtgcaggcggcgcaggcgttcataaacgaggccatggaggggagcgacgtgccggaggaggcaccccctgtggatgcagtgccaatcgaagggg

SEQ ID NO: 12403 - DNA, 341 bp, Setaria italica
  Peptide Sequence Number=SeqID_78377
ggctcccggcccacaacgctgctcccttcgttaggacccggccggacctccgctcactagagcgatggcggagatcgccggcgacgaggtcccagcgcctcctcctcctgccccctcaacctccggcgaaacctccggaggacagtctacttctaatcccacatctacaggcagcaggaatccgccgtcgcgcacgacgaagcccggcgtgaagcgcctagtcctcaccgcctccgtcctcctctccttcctcctcggactgcccttcctgctgaaatccaccgagatccaccgctcgccgctgccttccgacgcaatcaccgccctcgcccaccgcctcc

SEQ ID NO: 12404 - DNA, 412 bp, Setaria italica
  Peptide Sequence Number=SeqID_78378
agtaacacatggatcattttattcctgaatcatgcatcagttccattgtctatttaattaaatagactgttttggaagttccaacaaatcccatcagttccacttttaccaatactgggttgatgtggaagaacgtatagtgtaccacccataagcaaagcaacagcttcaatggcatcactcaaatttcaatcttggtatatctttgtaatcaagacatattggattgactaactgaataatttttagcaatcagtccattttttccctcaaacatgcaagacagctgcatatcgttatattaagaataaaaagggataagaaaccttgcaaactcacacgcacacgctcaggaactataggttacagactcgctgataacaaaaaagaaaaaaccaacctcgaactaacg

SEQ ID NO: 12405 - DNA, 940 bp, Setaria italica
  Peptide Sequence Number=SeqID_78379
cggagaaaagattgtgtgaagctctgagaagggggagattcaaatatgcatatgtcatgtccacctttagaaataagacaatccagcactagcacacctacaacacactgttaacgctctgtttcaaccatcccaaaacactgcagggctagcgcagcagacagaagtccatcgacccattataccagctcaatgtaatccacttaatgaatcagtcgttttcccagatctggcgtcggtccaagccttggctattgtgcgcttcatatcctcgtcgccttcctcatacatgttcttcattaagtccataattccagacattgggtccttctccttgtccatgcttggcttgaacttgtcttccttgaaatacaggtctaaccagttgcctttagaagctttgcaaagggtaacaacaacctttgtaggcttcaccacaaccttacatttctcaggaacaatttccttgttcagctttggtatggcacaccgataatttttgcctttaacatcatgaaactttatatccactgacattggcttaaaaacagtctccaccttctcttgctcgactccctccaggaatacataaatcctgatcttctcgttgtcctgatcccagctgaacgaccccaacgtgacgtagttcaaaccaggacgcgcaggcgcagaaagcgccgcctgcggctcaggcgctggtgcagttgccttcgctaacttggcttcaacgatgcggatctcgttggcgaggagggactggacgcgggggcgtttggctaggccttccagctgcctcagctcgtccagctccagccgcagctcctccgccgacatctccggagcgctctcggttcttccgggcgttctcgctgcctcccgtctcttcggtgcggtgtggtctatgggcagatggtggagacggttgcttgtttctgccggc

SEQ ID NO: 12406 - DNA, 729 bp, Setaria italica
  Peptide Sequence Number=SeqID_78380
ctcatttacttatgaggcggtagctaattttactgaaaaatagaaacatttgaacttaaaaattggtggtaatcttcagtcagataatgtttaagaggtgttgcattttcaatagtctcagtcaaaagctcatccctttaaatgtcatccgagttcaaagttcacatcaaagtatgaaatgtcattgagttggtaaccaagtgctcaaatcagcgtcgccttcttgcctggagataactgcatttgaaagcttaagattgagggcttacaaaatattctacagtacatttcaccatatgggcagagtttcagaagcactaggcttattcataggagagcagagcttcattcagattgtgtcttcagattatttcacggaatagattggcagtaccaaccaacaaatgggcactaaaagggatatatatagagttacaagttacaactaacaagaagaatgtttttttgaaagttagaagcagagtactcaaactaagccgagaacacggtagagtagatcgagtactaccggacagcaaacatcgttgtaggctctgttttagttttggatcatccagcaggctgcaagatattgtgctgaaatttatataccacaggttcaagaatagcgagactaacaggttgcagacggacgccactaccaacttcagtaaaaagaaaaagcagaacaagttgcaaagatgcttaggagccaacaggctcatccag

SEQ ID NO: 12407 - DNA, 255 bp, Setaria italica
  Peptide Sequence Number=SeqID_78381
ctccctctctccccccagctcacctcagttgttcctgctcctgttcggcggcctgcggggatgggcatgggggcttcgtcccctccgccgccatggcggcgtcaccacctctgctccgagttcctcgtcctcttcctccttctatggggtacttctgaggcaaatgaagaagttgccgcattgccaccaagaggttggaactcatatgattctttttcttggacagtggatgaaagtgcatacctgcaaaatgct

SEQ ID NO: 12408 - DNA, 270 bp, Setaria italica
  Peptide Sequence Number=SeqID_78382
gcgaatttggacttcaaatgggtgaacaccatcgctcatgacgacagtgtgcaatgatcgatacctgtagcaagcaaatcagtgcgtgctctttcaagcaaaaatcaatgaacaaactgaattttttagtctaggcatacccatttaattttggacgtgaaatgtaatccttgaatcttccagtgacttgaggccacaatttatgaacaacactaagtgctctatagcaatcttcttccttctcaaccacgaggcgcagaccatgtatat

SEQ ID NO: 12409 - DNA, 643 bp, Setaria italica
  Peptide Sequence Number=SeqID_78383
ccaagccttcattctctcaacacgagtttatgtttgcacctctttatctttgtaacagaaactattgcctctaattgtccgtcttttatatatccaactgacgttcataatacacaacatgcgcaagaagaataaaaccatagaagccatataagcattaccagagaatctcaatgtcaatatcagcttccatttatcttttccataggtatgctggcattaattcctcgttagaaagtacatacattcaccattaactgcaaaggtgaacacaaagatttctaattgcttcttggctgtttggattgttcagaacatatgatgcagtctttccagtgctttggcatgtcagatttaattgatttccaagctgtgaagacatgcaagagttgtttggtgttttgcagctccactttgaagtaggcacacagctcaaataatggcaccaagaacagtgttgactagcatcgaacccttgaaaaagcaacaccaagccaacagtgaacccagaaattaatatcactgtagcaataacaaaaagtatgatttgatatatcttgaacttccgttagttacgccatcggatatccaagaggagaattctttggttaatatatccaaactgcggtcgcattagcaacac

SEQ ID NO: 12410 - DNA, 1353 bp, Setaria italica
  Peptide Sequence Number=SeqID_78384
ctccacccaaccagcattcagctccaccgccgcaaatgtcgatcgcggtggcgccggaggtcgcagccgccctcgcgcgcggcggcgctgtagtcgccctcgagtccaccatcatctgccacggtatgccgtaccccaagaatctccagaccgccttcgaggtggaggccgtcgtcagggacgccggtgctatccctgccaccatagccatcctagatggagtcccacatgttggccttagcagtgagcaattaaagaggctggccattagtggaagacaatttcagaagacagctagaagggatattgcgcatgtggttgcatctggtggcaatggtgcaacgacagtttctgccactatgttctttgctcacaaggttggcataccaatttttgtaactgggggaataggaggcgtgcatagacatggcgaacaaactatggacatctcctcagacttgactgaacttggaaagactcctgtggctgttatatcagcgggcgtgaagtccattttagacatacctaggacacttgaatacctggaaactcaaggagtcactgttgctgcttacagaaccaatgaatttcctgctttcttcacggagattagtggatgccaggtgccatgtcgtgttgattctccagaagagtgcgccaaaataatacatgcaaacagtaacctacatctaggttctgggatccttattgcagtgccggttcccacgcagcatgcagcttcagggaacattatagaatctgcaatacagaaagctctaaaggaggcagaagaaaaaaggataacaggaaatgcgatcactcccttcatgcttgaaagagtaaaagaactaactggaggatcttccttggaagccaatatcgcacttgttaagaacaatgctcgtcttggtgcggaagttgctgttgccctttctaatcttcagcagagagaaagaaacaaaattgggagatcttcactgtagaggtgcccttgcggatagaggccctgccgccactcggttgtgtatacgccgagcatttaccagaatgggacatgcctacccggtggttcaaaactggatgatgtttctgatcacaggcttagctgctgcttcttggaagtgtactgatcgcggagaaattttataggctttcttgtgttggttgcgagatcttgtactagtgtaataagatgaagagctgagacaatgcgtgtgcaatactctccagagtgttctttgcttatgtgccggctgatgcatcctcaacatggtgggcaagggtcgttaggtcagctcccttctcttttgtactttcgtttctctctcagtgaaatgacatgcagctctcctg

SEQ ID NO: 12411 - DNA, 283 bp, Setaria italica
  Peptide Sequence Number=SeqID_78385
tcgtcttgccgttccccgacgccctccgcgcggcggcggctgcggctgccgtctccctctccctcctcaccggcaacgccgtgggcgctgttgtggaggcggcgcagcccaccgaggtgtgcagggatggggtcgcggcggtggtggaggaggtgagggccgaggcggtgacgaacgagcagctcgtggaggaggcgtgggaggtggtcaacgagagcttcctccccgacgccggaagccgcccgtggtcgccggagatgtggatgcaaaggaagcaggatta

SEQ ID NO: 12412 - DNA, 1161 bp, Setaria italica
  Peptide Sequence Number=SeqID_78386
attttgaacccaaacccctcccctcccctcggcctccccgaaacccccacttctctcgaacctagggttagggtttcgtcactcccgcccccgatttgaaccaattcgcctcgccccccgccgcgccatggccgccggccccctcgtggtggacttcccctccatgggagccgccctctgcttcaacagcctcgagtccctcctccgcgactccgcctcgggcttccttgccgccgtctccgccgccccggcccccggcgccgccgacctcaccaatttccaccgcgtcttctcccgggtcctcagcggctacccggacccgccgctcgaggccatctggttcttctccgcgctctccttccacgacagccccggcgacctccgctccctgctccagctcctctccgccttcaccgcctcctcgcccggtgccgccaagccgctcgcgctgctggcccccgtcatctccgagctcttccactccgacaagacgcgcagggagaccgaggccctcgtcgaggccgtgctcagctacatcagcatctgcagcagccgccccgccgcctccgctgatggggccagcgccgacgcagggagactgctgcctgcctttggggagctcgtcaaggtgtggagcgtgcgccactcgatggacagatgcccgttccaggtgctgttcccactcgctggagaggaggccaggcgagagctcatgaaggaaggctgcagcgttgagtaccttgctggggtggtggtggctgaggtgttcctgctcaggctctgcctcaaggtgcagaatggaacaggggtacctcgtgctgagctgcagaaggagctcaagatgtgggcagtcagctccatcccggtcttccagaacccagcatttcttcgggtcctgctgaacatgctcttgaactctccgctgcctgtttactcactactggtaagtttttctttactaatgactaatgagcaattgaggatgttatgtttgtagctgatgtcttagcaagctagtattatcatgatttgactacttattaagaaagttataagtactaattaagcattcaacaatacatatgtggtagttgtatggaccataagaaacaatgcaaatagcttagtaaactcatttcatgaattaagaaacatgagtca

SEQ ID NO: 12413 - DNA, 1454 bp, Setaria italica
  misc_feature (1431)..(1454): n is a, c, g, or t
  Peptide Sequence Number=SeqID_78387
tgaaggaaggctgcagcgttgagtaccttgctggggtggtggtggctgaggcgttcctgctcaggctctgcctcaaggtgcagaatggaacaggggtacctcgtgctgagctgcagaaggagctcaagatgtgggcagtcagctccatcccggtcttccagaaccagcatttcttcggggtcctgctgaacatgctcttgaactctccgctgcctgtttactcactactgagtgctgatgatgaaatcttggtgagagatgccatttatgatgctctgatcttggtggattattctttcattaacaatgtttctggagttgatcaagctgacctcttgcctatatatttgtcaagattgattatcactcttgatgcggttaatgatgccaggaggaaaggtgatcaagggagagcaatgtcgtttgtcaacgccttctcaatctcgaatgttcccaattacctcatcaagtgggctacttgtaaagctgtatttggtgcagtcagcaaaccaattgccaatactccccaagctcttctcaagtggcttgttgaccttgaagataaggggctcaaagtgtttggagataacagttcttggattaaggggaggcttatttatgatgaagtcaagaatggctttgggaacaggatgattcattcaggcgcagaccttttcttcattgataagcagagtggtgaggaggttatggacaccaccaaaggcagtgaggatgaagatgctgtggagatggagaccacaggtaatgcgtttatggctgctgctcagtcaatgaaggtggagactaatggcatacgaaagaggaagggctgcggaaatgaagatgcagcagctgtgaagtttgtgaagtacaaggtagaagacagctcggttaaagactacttcctgtcagcaaacaacggcatgagcagtggtagtgaagtggagaacccacagtccgatgatgagatggaagaatcagactgatgatgaaacgagatcacctgctaatgcttacttgggagagttgctttagagagtttcttggacaagtgcctcttcagagcctggaccatgttgtttcggatgccgcttcttaatgatgtcgtgcagtaccctgtttagtttcctgctcagtcatgatgggcgggagttggggtttctaggataataatcagcaacagagggtccgtctccggataggctttcggatatatagtagtaactgttagctgacctgagtacttgacatggcgcatgatgtgtgctatatgctatatcgtgttctttgctgtaaggctataagctatagagacttcaaaatgtagatttgcttcaagtacttctgtattagatgagtaaattaatgttatcccacggaaccagttggaactaatggaatcttgatgctttcctgtaaaaaaaaaaaaannnnnnnnnnnnnnnnnnnnnnnn

SEQ ID NO: 12414 - DNA, 335 bp, Setaria italica
  Peptide Sequence Number=SeqID_78388
atgaggaggctcttgtggtcgtcggcggggacgatggtgtcgtggtgcccagacgcgacggcgacgaggtccgcgccggagaaggaggggtcatcgcccgggccgatctcgaggtcaatctcctcgcccatgcctcgcaccatgaggtggtgatggtgctgccgctgcgcctgccgcagcaggttgatctcatccatcgcggagttcatgcacacactcgctgcaacatgccgtgaggcgagagctgggctaaactcgccgccggcgccggccggagaccgagaaaatccggttccgattggcgcgaccgaaatggggattttggcgcttagggg

SEQ ID NO: 12415 - DNA, 1870 bp, Setaria italica
  Peptide Sequence Number=SeqID_78389
attgatggcaatctgtattggtgctggatctctcctgtcttttatactagatgacgggttgcatgctatggatttcagtgctgttaaaaaacttctagacactctcagacatatatatacacatccttttcctccccttgttcatttgggaggcatgtttggtgtagtcaacgcttgtggtgcaggtgcaggggatcttactgggatgtgttcaaaacttatgacttcgcaaatcaaacatgaggagtcatctttggtgagaggtcctttattggtaagccctattggtgagactctttcaacatctatggtccatgaaatatatcttcttgctaaggatgctgaggataagaatatacaagataatgctgcatgggccatttcatttcttagaagcaggtggttgtcaaagaatctgattctttacaatgacaatggttctaatagaagttctggcgatcccagtcaagcttcaagtttttctgaacaaagcttagtttggaacttaagtcgctggttgaatgatcttaagcttgaaaagccttttgatatggtgccagtaagtacagttggaacagttttaagatgtctttctaaagctcctcgattgccaactacagactggggggttattgtacggcggtgcatgaaagttgaagtgcagattccttataagccaaccgatcagcaagatctaaagtttctaagggaagaatgcttacatttttctctagctcatgccactcacattagtccccttcttcagtttttggattatctgactgacatactcagattccgaagattagaaataaacgtgcagtctattttgctccaacatttgtcacacctaatgaagctcttctccgattcaagattggataaactatatgaggatttaactgaatacttgtattcccccacctcttcatacttgaattactcatgtgaacagaaaagcatgataagaatgtcgttctgggaaggcatttgcaagtgtttggtggatgttgtttctgaagaatctggtggtttctcattcactaaaaaatgcattgaatgcttgttgcctctcttgactctccacaatgatggtcaacctgaattcatggatgaatggtctgctgctctcacgtgtcttaccaatgcccagagcagttggctgggtgatatgctgcaggttcggaatgctgctttagtcactgaggaagaacatgttgacgtggcaaaaaagattatcatcagagcaagattgtgcgcgactggttgtggttcggtgcatgagctgggtaatataaagacgatgatattgtgtgcaagagctgatggtgtctggtggagtgtccttgttgagattgctgcagctataaactctgttgaaaacagtataaaaaggcagtggcttctggatgcattagagattggctgcgttacagctcatccctcaacggtgctacggtttgttggcttgctatgtgatagctgctgcatctatatgccacttctcgttgttaattcgagaaatgtactgagtgacttgcctgtcaccctgccttcctttctctccagcagcatttgggatgatttcagggacattgttgcagacaagctatggttgttgacttctcacatctacacttgggcagaacaattggcgcacggaaatgacctcactgggcacgatcatattcatagaagtgaaactgagatggctacttttctggccaatattctgcgttctacatgcattgcagtcgaagactacttgactgttgataggaagttgaagcttgcaaaccttgagtcactctgattgtagggagacgtgttttcactttattctttgaaatacgtgtgtatttctgtacag

SEQ ID NO: 12416 - DNA, 834 bp, Setaria italica
  Peptide Sequence Number=SeqID_78390
taaacctttttattatttagggggttatttggactaaggctatacttgagggtagtaaattggactttccctataataaacttgttttctgatacatacagtgttttggttttattactattatgaacatcttcttgccctttgaagtatatttgaaagatgcatatcttgataaatatatttagagaatgcataaatcttgtttatatgttgggatttcagattttttcctgatgatgtgtgcatagacatactgattgagaagctcgagtcctccagagaggtcatttcttctccatccttgggatggcttattcagcaatgccaacgctgctttataatcaacgctctaagacgatcattagtgaatgatgctaataattccaggcattcttttgagtacttcgacaaagaggaggcaatcgtagctcacttggatcgtggaatcgatgcctccatcaagatatcttctgattggccactttgttcgtatggtctgaagttaatttcactccgcaattcagggacccatcccacaaatatggcttcaagtctgctttccaagaccaaggaactggccaacggattggatctgcacattcgccaacatcttctaaggtttgtggatgccgttgaagagattcttattcgagagctgcggtctggttaggatcacaccctgcactcgcatgttacatcttgcaaccgtctagctctggggatggatcttcaacctcggctgacctttgtggttcatagtttcactattttgtacaaactaatttcattggataacatctagagctgattgttgggtgtcacgtgtcaagacac

SEQ ID NO: 12417 - DNA, 985 bp, Setaria italica
  Peptide Sequence Number=SeqID_78391
gggagagagagggggagagagagagagcgggtgcagccgaggcggccatggcggaggcgggagccctagccccggcgcaggtcccggaggaggcgcccctcgacgcggccgcgatcaggagccgggtggagcagctctctctgaagcggcggcggcggggagtggaggaggaggcggaggtagccgacgcggaggtagcgctgggtttggactccgcctaccaggtggctgaggaagggatggatgtgctggattcgagcactgccgcagtttcaattgatgatttggatgcatacctagaacggttgagaaaggaggtatccttggcagacgaagggaacaggaaggtatctgatgaaattggtgtcactgcagagacaacaaccaatgatatgattcggctggatgttgatagtgaagttttggagtctttgttgtcaaagcttgaatcaaagggtttcaaccattttgaagcaagccctgctccagggcagtcagactcaagctcaactgattcttgtagaaatcaaagcatttctgacaaggattgcatatacgaggttttggaacttgatcagcaaataggaaaaattaagatgaaccttaaaatgttacaaagtctacaaagtgttgatgaaatgtggcaacttaaatctatgttattgccatttgaagcaaaggtcttagactttaaagacaacagtctcaggatgttcctgaaggcacctacattgacctcaggctgtgtaatttatggacaaaaattggattgtgctattgattcgtttgtctcagaccatgagctgctgatagaagttgatgaaggaaatatggaaccaaagaacgtaaagatttttcctgatgatgtgtgcatagacatactgattgagaagctcgagtcctccagagaggtcatttcttctccatccttgggatggcttattcagcaatgccaacgctgctttataatcaacgctctaaaaaa

SEQ ID NO: 12418 - DNA, 315 bp, Setaria italica
  Peptide Sequence Number=SeqID_78392
tactaaaactttaccccttcgtccgttcccgtcctagcggaagaacagaggttgggggccgcaatggcagcggatccgagcttcgtcgtcgggattatagggaacgtgatctccatcctcgtcttcgcgtcgccgatcaagacgttccggcggatcgtgaggaacaggagcacggaggacttccggtggctgccgtacgtcaccaccctgctgagcacctcgctctggaccttctacggcctgctcaagcccggcggcctcctcgtcgtcaccgtcaacggcgccggcgccgcgctcgaggccgcctacgtcacg

SEQ ID NO: 12419 - DNA, 622 bp, Setaria italica
  Peptide Sequence Number=SeqID_78393
catgttcctgtatgcagcttccaggccgcgtgtgaatttctccccatcacagacaggtgacttcatcatcagctctcggaggctcattctcagttcttgcaaggcatttacatctgatgccaaatccaatgctaagctgacatactcatcctctgtttttggcaaccagtctcccaacccaactttgctgagtaggctaacaccaacattatgagcatgaactgcaccagccattgtaacacatggaacccccatgtacaaagattcacatgtagtggtagttccagcgtacggaaatgtatccagactgatgtccattaaggaatatgcttgcatgtgatcatggttcagatggatgagtggcaacaaatcaactcgcaatgactccaaacccaattcctctagtgttgataaaaatttctgtcttatactgtcacagcagaatggcttgcacttaacaacaagcctggagtttgggactgcacataatatttgggcccaaacttgcaataccttcggtgtaatctttgccagattgttaaaactcccaaaagtgacaaaaccatttgaaattgctggtgttggacaaacaggcccagcttccggggagggagtgtaacaa

SEQ ID NO: 12420 - DNA, 3048 bp, Setaria italica
  Peptide Sequence Number=SeqID_78394
tggtgatatggtgactgcctattgaaatttcctcggttaatcgactctagaagttgtttcactgtcatatttctactacatatacaaccagtgcctttgttcttttgtttctaaattaccataccatgaacctacaccgggggcaaagctctacaaatcaaactctataagcttttcccccgttgaattatctagcatttgctacaagtcacaggtcaccgcagattctcaaccgcctggcacatgcgtgctcttatatccattaccagtgtcgataaatcggagacacccggcgttggcaccccagcagcaagctcttaggcacagatatcacccacatcaattgcgcatctcaagctacagtagatcagtattggctcccatcaatggagcacattgtcttggtcattggctgcaatgaccgtttgcttcgaatttcgcagaagcaggtgaatcaggtgagctcacaccattggccattactgggggctgcttatctccctctacggttgcatttgctttctgtgctttcagatctgcgagcttctcggcagtcttgtccgagtcttgcttattggcaacaggatgttcctgtaacaattctaagcgcctgagagatggcacatctccatcacaatacctgtgccacatgttcctgtatgcagcttccaggccgcgtgtgaatttctccccatcacagacaggtgacttcatcatcagctctcggaggctcattctcagttcttgcaaggcatttacatctgatgccaaatccaatgctaagctgacatactcatcctctgttttggcaaccagtctccccaacccaactttgctgagtaggctaacaccaacattatgagcatgaactgcaccagccattgtaacacatggaacccccatgtacaaagattcacatgtagtggtagttccagcgtacggaaatgtatccagactgatgtccattaaggaatatgcttgcatgtgatcatggttcagatggatgagtggcaacaaatcaactcgcaatgacttctagtattggtattgtagttggtctaactaaattctaacttcgtctaattgtacttcctaaacccaattcctctagtgttgataaaaatttctgtcttatactgtcacagcagaatggcttgcacttaacaacaagcctggagtttgggactgcacataatatttgggcccaaacttgcaataccttcggtgtaatctttgccagattgttaaaactcccaaaagtgacaaaaccatttgaaattgctggtgttggacaaacaggcccagcttccggggagggagtgtaacaaagaaaactttcaggaaggtgcaccaactcttcaacatgcttttgttttgttccaggtggatcagccaatgagtctgtaattcggtaatcaattgttggcaaacctgttgtattagggtagccaatccaggtaacctgaataggagcaggtcggcatgccattgttcctaacttattatttgctgtatgaccagtaagctccacaagtatgtccactttatcctccctcaccaagctagcaaccctcttttcatcaataccgtatatatctctccacaatccaccctttttcaacaccttatccttgaatctaagtgtcttggcatctgccttcacaacaccagagtagacaaccaccttgcaatttgtgtagtcatgatgtgtaagcggagcttcaatgaagtaggacacagagtgagtaaagtaatcaggagacacgtagccaatgatcaatggacgatcagcaactttggagttatcccaactagtatgttgtggatacaatttcataaagcgtttcccccactccctgtgagcttcataaagcttgtcatctgatccctcatcaatatagttcattgcaagcaaacggttctgaccagcatttcgtgaatcaggatcgatctgaaggcatctctcatatgcctgtatggctaaagtaatacttccagcatctctgtaaagaacacctagattattatacgcttcggcgtatgtgggatttgcaattatggccttctcaatcatacttgcagcagcatccatcttaccctgaacagtatagacaactccaaggttatttagtgactgggagaaatttggcttaattgacagtgccatttgataacattcaacagctttgtcaaggttatccctatccttgtatataactcccaaattgttgcacgcttccgcacagcgaggattaaagtgcagagcaagctcgtaaaagacaatagccatctcaaaattcaacatttcaccatatgcaacgccaagattatacatggcatcagcatagtgccaattatagaacagagctttcttgtaatacgccacaccttgattgatgtcaccttcaatttttacctttgttcccaagtcagttagtgctattgccatattattcttagcaatctcaaagttgggggaaatagtcaagcacctctcataacaggcaattgctgcttcaagctcccccctattcttatagataactcccatgttgcagtaggcctcggcatacaatggtctctccaatgctgctttctcataacaagtaagagccatatcaaattgcatcatctctgaataaaccactccaaggttgtaataagcaggcgcatagtggttgtctacttccagagcttcacaatatttttgaattccctcctctgtattaccagcaagcttcaagctagttccaagatcagtcaacacaatagcaagaaattccgaggcaggtttgtaggaaggatctgctgtccgggccttttgatatgcctctgcagcttcaaccaagtgaccctcatctttgtagataatcccacaatgcgtgagagcacacgcgttttctggctcaattttcacagcctctgtgaagcactcaatggcctgccttggtaggctctgcgcctgaaggcaaatccttccaataggctcacattggtgccctccttctcaagcacaacgtgtacagctggatcgcatcagcgaactta

SEQ ID NO: 12421 - DNA, 1220 bp, Setaria italica
  Peptide Sequence Number=SeqID_78395
ggcgtctacacatcagcagcttgaccagtacctacccatgttcaacctaccatccaagatcctatgcagtgttgtcaatgtggaactacgggctgaagctgattcagatgaagtttatgctcaaattatgctgcaaccagaagctgatcaaagcgaactcaccagcccggaccctgaactacaagaacctgagaaatgcactgcacattccttctgcaagacactgacagcttcagatacgagcacccatggcggtttttctgttcttaggaggcatgctgaagaatgtcttcctcagctggacatgtctcagaatccaccttgccaagaactggttgccaaagatcttcatggcaccgaatggcatttccggcacatttttcgaggacaacccaagaggcatctccttactactggctggagtgtctttgttagctcaaaaagattggtcgctggtgatgcatttattttcatgagaggtgaaaatggtgagctaagggttggcgtaaggaggctcatgagacaagtaaataacatgccgtcatctgtcatatcaagccacagcatgcatcttggagtcttggcaacagcctcccatgccatctccactggaaccctcttttccgttttctacaaaccaagaactagccgctctgattttattgtgagcgtcaacaagtaccttgaagctaagaagcagaaaatatctgttggaatgaggtttaagatgagatttgaaggtgatgaagctcctgaaagaaggttcagtggaacaattgttgacatcgggagtttgccggcaatgtcaaaatctctgtgggcagattctgactggagatctctaaaggtccaatgggatgagccttcatctattcttcgtccagatagaatctcaccatgggaagtggaaccactggatgcagctaatccgcaatcccctcaacctccattaaggaataagcgtgcacgacccctggcttcaccttctatggttgcagaactgccttcaggctttggactctggaaatccccaacggattcagctcggactctctcattttcggaaccgcaacgtgctcgggagctatttccttcaattcctccatcagccttctcatcgtcatcaaacgtcagtttcaattcaaagaatgagccatccatgctaagcagtcagttctactggtctgcaagggatacaagagctgactcttgtgctgcta

SEQ ID NO: 12422 - DNA, 400 bp, Setaria italica
  Peptide Sequence Number=SeqID_78396
ctgctctattatctgcaatttaaaggccggaggtaccactctctggtaccgcccaccacagtttgttggcaatgatctgagaccagtttgccgccagtgagctgagtgagaccttaggcacgtgcgttggcaacgccggcgccggggagcacttcatcgactgcgttgaattttggtataccttgcagtgcgcctgttatacttggaccaaaaagcttactcaagcttactgtagtttatcagccaccgaacagtgtttttctcttacaacaaatcagtcgttttagcttttcagtcggcttataagtccagctgaataggccctatggttgaatctctatagttggttgatgtaaagtgttccttttccttgtgtttgatcaatggaatacacatgttg

SEQ ID NO: 12423 - DNA, 1427 bp, Setaria italica
  misc_feature (1329)..(1427): n is a, c, g, or t
  Peptide Sequence Number=SeqID_78397
gtctctccagcatattccgcatggcaaaaatcgagtagcagataatgctggacctccagtttttcttcagcatggtctttttcagggtggagacacgtggttcataaactccaatgaacagtcgcttggatatatccttgctgataatggttttgatgtttggattggaaatgtccgtggtacacgttggagtaaaggccattctactctctctgttcatgacaagcttttctgggattggagttggcaagaccttgctgaatatgaccttgtggcaatgctaagctatgtttatacagttacacagtctaaaattttttatgtgggacattcacagggaactattatgggtctggctgcatttacaaagcctgaaatagtaaaaatgattagctctgctgcacttctttgccccatttcttaccttgatcacgtcagtgctagttttgttcttagagcagttgccatgcatcttgaccagatgcttattactatgggtatccatcagttgaacttccgcagcgaaatgggtgtacaaatattagattctttgtgcgatgctgaaagtttggactgcaacagtatgttatcttcaataacaggtgaaaactgttgcttcaattcatcccggattgactattatttggagtatgaaccccatccatcgtcaacaaaaaatctgcgtcatcttttccagatgattaggaaaggcacatttgcacaatacgactacggatgggtggggaacctagggcgctatggccagctgcaccctcctccattcgatctaagcagcataccggaatcactgccaatatggatgggatatggaggtcttgatgcactggctgacatcacagatgttgagcacaccatcagagagttgaggtccacgccagaactgctgtacattggtgactatggccacattgatttcatcatgagcatgaaggcaaaagacgacgtttatgttgacttaatgaggtttctcagggcccagcagggaatgcacagtagctcttaggacgcacgcctttacatctttactcgatgacagtaagactatgtaaatatgtatatagggtagcctgtatcagcagcatgcccaaacgttcaattaaattgctcgtgtatgctgtggattgtactggttgctgtactgtgttctggctgggtacagtaggtgtactagtgtatgaagaaaatggagcaccatcaatttggcatttttgcgccaaatgtgtgcttgcattcgcaagcaaatcgatttgtaaatatgtaacgacgttgcaaaatctgtattatttggttgctcttagtttttaactnnnnnnnnnnnnnnnnnnnnnnnnnnnnnnnnnnnnnnnnnnnnnnnnnnnnnnnnnnnnnnnnnnnnnnnnnnnnnnnnnnnnnnnnnnnnnnnnnnn

SEQ ID NO: 12424 - DNA, 563 bp, Setaria italica
  Peptide Sequence Number=SeqID_78398
tagatgcatacaaacacccatgaacctagaaaagccaaaatgacataaaatttgggacggagggagtattaatgaaactttatacatcttgtaactgattactatataattatgccatagtagtgaataaattttttagtttgtatcagatgctatatgtaagatggctaacaagtctgtgttaatctcattaatatattgttatgaattcaagttatggctatgtagatacaggtcattctatgttagggtacagataatgctgaccttgtttgtttacaaatgaatagacatatttataaagagcttctgtaactatgctgaatgttcgcagctggtgttaagtttcatattagataaccactttctaaaatttaacatgttttctaaaatgtctgcccctcaattttgttcttgttaacattcttattatgtagtttatagaacaagtagtaaactgaatgtgattctatttttgtaactgttttttgcacgctgttctattgtcttccaactcttattgcaaacaaattctttccatcatctctttgtaccattgttta

SEQ ID NO: 12425 - DNA, 236 bp, Setaria italica
  Peptide Sequence Number=SeqID_78399
cactcaccggctcgccaccagacaggcggcggcgaagcagagcgccgccgagaaagtaggacgagtggcgcgatggcgttcgcgtccggggacggcggcggcggcgggccgcaggtgctgacggcgcggttcgtccggcaggtggtgttgggccgttggttcatggtgttcgcgtgcctgctcatcctgtcggcgtcgggggcgacgtacatcttcggcatctactccaaggtgct

SEQ ID NO: 12426 - DNA, 797 bp, Setaria italica
  Peptide Sequence Number=SeqID_78400
cgcgcggcgcttggggggcagaggaaccgtgcgcgccgagcagaacaagtgagcgcgctcgtcgccggacggcgagacgggcgaggggaggaggaggagatgagcgaggcggtcaggcgcgcgggcgccgacgagccgggccgcgccgcgccgcggctgaacgagaggatcctgtcgtccctgtcgcggaggtccgtggccgcgcacccatggcacgacctcgagatcggtcctgacgctcctgccgtgttcaacgttgtcgtggagatctcgaaagggagcaaggtcaagtacgaactcgacaagaaaactgggctcatcaaggtcgatcgcgtgctgtactcgtcggtggtgtacccgcacaactacggcttcatcccgcgaacgctttgcgaggacaacgacccgatggatgtgctggtcctcatgcaggaaccggttcttcctggctgctttcttcgagccagagcgatcgggctcatgcctatgatggatcagggagagaaggatgacaagatcatagctgtctgcaccgatgatcccgagtaccgccactacaatgacctcagcgaactgtcaccccaccgtgtccaggaaatccgacgattcttcgaagattataagaagaacgagaacaaggaggttgccgtggacgaggttcagccagcgagcactgcccgtgatgccatcaagtactccatggatctctatgcgcagtacatttacagagcttgcgacagtagtcttgacgcttgcttcaccacttacttcttgtacttaagtaagtaattagttaa

SEQ ID NO: 12427 - DNA, 414 bp, Setaria italica
  Peptide Sequence Number=SeqID_78401
gttggggctcgggtaggaggatgggtacggggaggagtaagggccgtacccgtggccgtaaagcgagggatgcgccggcggcgggtaggcgtggtgctgcggtgggggcgggtaggcctggagcgggccggagtggtactgctgcggcgcttggggcggcgcggcggcgtaccccgggaacgagggcgacggagcgaggtacggcgcgccctgctcggcggacgacggcagcggaggaggagggtactggtacccgtaaggatacgcctgcggctgctgcggcggcggcgggtacgggtggtggtacggcgggtagtgcggccggtggttgccgtgatccatcgccgcccggggcacctggttcctttgcctcgctcaacacggctcccgctttcgattgatctctcgctgttg

SEQ ID NO: 12428 - DNA, 1971 bp, Setaria italica
  Peptide Sequence Number=SeqID_78402
gcggcgccgccgactactcgcgcgacagcgtcgccatcggcgcgttctccgccatggagcagaacgtcctcgtatcctgctcggcggggaacgccgggcccggcagctccacgctctccaacgtggcgccctggatcaccaccgtcggcgccggcaccctcgaccgcgacttcccggcgtacgtcgcgctcggcaacggaaagaactacacgggcgtctccctctactccggcaaggccctcccgagcaccccgctccccatcatctacgcggccaacgcctccaactccaccgccgggaacctctgcatgccggggaccctcacgccggagaaggtggccgggaagatcgtcgtctgcgaccggggcgtgagcgcgcgcgtccagaagggcttcgtcgtccgcgacgccggcggcgccggcatggtgctctccaacacggccgccaacggccaggagctcgtcgccgacgcgcacctcctccccgccacgggcgtcggcgagagggaaggcgtggcgatcaagtcctacgtggcatccgacccgagtcccacggcgacgatcgtggtcgccgggacgcaggtgggcgtgcacccctcgccggtggtggcggcgttctcctcccgcgggcccaacatggtgacgccggagatcctcaagccggacatcatcgcccccggcgtcaacatcctggcggcgtggacgggcaaggccgggccgacgggactcgccgccgacacccgccgcgtgggcttcaacatcatctccggcacgtccatgtcgtgcccgcacgtcagcggcctggcggcgctgctccggagcgcgcacccggactggagccccgccgccgtgcgctccgcgctcatgaccaccgcctacgccacctactccggcgggtcgtcgccgctgctggacgcggcgacgggcgccaccgccacgccgttcgactacggcgccggccacgtggacccgtcgcgggcggtggacccggggctcgtgtacgacctgggcacccgcgactacgtggacttcctgtgcgcgctcaagtacagccccgccatgatcgccaccgtggcgcggagccgtgacttctcctgcgccgagaacaggacctactccgtgggcggcctcaactacccgtccttctccgtggccttctccacggcgaacggcgagggcggggagtcctcggcggcggccaccgtgacgcacacgcgcacgctcaccaacgtcggcggcgccggcacgtacaaggtgtcgacgtcggtggccggcgccgccgcccaaggcgtcaccgtggccgtggagccgacggagctggcgttcacgtcggcgggtgagaagaagagctacacggtgaggttcacgtcgaggtcgcagccgtcgggcacctccggcttcgggcggctcgtgtggtcggatggcaagcacagcgtggcaagcccgatagcgtttacgtggacctgatgggggcacggcgggtttttggcacctgacgaaacggtgtgcgtacgtgtatggcccagtgatggccctgcctcggtcggacgaagggctggaagtgtaaaattggaaggtttggagggggtgaaagacaggaaaaaagggggtgaaattggagggtttccttgttattgtgctacaaataaggccattaatcttggcaagattctagatagattgtgattttggagtgtgaaatattggtggcgatgggtggacgaggatgggggatggtgctcgattggaatggaattatttggagggcatggtcggacctggacctgatcgcgacgctgcaagtgcaagggcagcttcacaaggactgacttggacctctccctctctctcgtggcgtgcatcccctggatcgtggaaatggttgtgttccatgatgttgattgttactaacatcattatcgacaaagaatgtgataacccagcactgccactatgaaggtggaatgtgtac

SEQ ID NO: 12429 - DNA, 275 bp, Setaria italica
  Peptide Sequence Number=SeqID_78403
tccctgcgccggagtccgcggccgacttccacgcgctcctcgagcacgagctcaaccgcaacccgtgggccgactccgacgacgccccggtgctcttcgccacgctctacgagcttccacctgcagccggcggcgcggcgctgttcgtccggatccacacggtcgcgtgcgaccgctcggcggcgaacgcgctggcgagggagctcctggtgctgctgggcggtggtgggaaggagggggggcgcgcaccggaggacgcggcggcggaggcggcg

SEQ ID NO: 12430 - DNA, 296 bp, Setaria italica
  Peptide Sequence Number=SeqID_78404
ccgtgtcgtcaccccgggtctccctgagcacggacgcgatctccacgaccaccttgcgctcgacgtcgcggcgcagcatgagcatccagaagaaccagctgagcgcgacggacgacgtgtcgcgcccggcgagcacgaagttgagcgcgatccactggagcacgtcctccgggaacgccctcccgttgccgtcgcgcttcttcatgaacctggagagcaggtcgtccgacggcgtcgccttgcgcgccgcgatggcctccgtcatgtaccggtccacgatcgcgaggctctcgcgg

SEQ ID NO: 12431 - DNA, 483 bp, Setaria italica
  Peptide Sequence Number=SeqID_78405
gaaccagccccaaggagaggtgagccagatgtgactgttgcagtcgtcaacttccaatatggcatccattttggaagttgacgactgcaacagtcacacctttatccagtttgaaccagccccaaggagaggtgagccagatgtgacgcgaagaacaccggattatttcctttaagttatcgatgttacctattcccagcctatgctgtgacgatcgacgccagcatctgctggatcaagggccagccagaaataacaagcgaatgcgaaagtactatacaaaacctgaggtccccattggccaatgcaagagatgctgctatcctgaaagaaagcaggtgtgccatgtaaagccatgcctgagttttgaagcctttcaggtgatcgaagggccgtccacttcaactcttgccctcccttttaggcatatttttacaaattgatgttcagtcttttgaccaaattaccaaataagaacctact

SEQ ID NO: 12432 - DNA, 707 bp, Setaria italica
  Peptide Sequence Number=SeqID_78406
ttagaagaataggaatgatctgccaggggatgaagggagatcccagacacaatcttcagattcgaattggccctcccatttggatcacaaggtccagtccctttccctgactaaacaggaaaagaatttggattcttccctttattgtagggaggctggccattcattacaggctgctcagacattatggtctactggatctctatcaggtccaatacccaatggtttttattccattattccggaaaagagactcaaggagtgttttgacaccataccttctccggatgacctttattctcttggaatagaaggatttaaggctgagattatccttgtggacatagaaagagataaaaagatatctgctttaaagcagctatgcacagcgctggtaaaaggactgaattcaaatcctgctgccataataaaaaggttgcaggtttggtttctgacttctacaagcgaccaaacccgcatctcagtcctgcaagaacttcctcggaagatctttctcatttcttagaaaacaggggcgttcaattgctgttgcaatcttcaccatttctgaacaagcctttattgccatatgaggaatggtgcattgagttttcagagattactgttggcattcgtgtgggagtaggcaagtaatctttcctgttttctaatgtttgctatattttggaagcactgcatcatctgaa

SEQ ID NO: 12433 - DNA, 887 bp, Setaria italica
  Peptide Sequence Number=SeqID_78407
ccagagtatgcctgcatataatggtgcgaaggtttcctagaagcatttgcaatttaatgtgttatgtactttggcgaggatataagtatctgagttcgagcttttgtaacttctgcatgcagcctgtcaagagtccagtgacgatatgtggtgatatacatggacaattccatgatcttgtagagcttttccgaattggcggaaagtgtccagacaccaattacttatttatgggggattatgtggatcgtggctactattctctattccttatccagctgctagtagcactgaaagtgcgccacccacatcgaattacgatccttcgtggaaaccacgagagtcggcagatcacacaggtgtatggattctacgatgaatgcctacgaaagtgagtttatttagctgtttaaagttcaattactataattttaggtctagtatgttcctatgaattgtttcattacctgtacgagaagatttgtgcatattcttcttttcttaatcatagttctctgatagcttcagatttattttcatagtataatatatagaaatcccattttttctcacatacgcaaaatctctttggcatcatgtgccttttcttttgctgtattaataggcttctttaggatgctttatagagactccttggttcatgcaagttgattgtaagaatgattttttcctacaagtccacaacataatcctagcatgcagtttgttttactaactcttttgtttcaaaccaggtacggcaatgcaaatgtatggaagacatttacggatctttttgattattttcctctgacagctctggtggaatcagagattttctgccttcatggtggtttatctccatcaattgaaaatcttgatagcgt

SEQ ID NO: 12434 - DNA, 1762 bp, Setaria italica
  Peptide Sequence Number=SeqID_78408
aaaggaaaaataaaagaaaaaggaaatttaaaaggaactaagaagaattaataccttagtaggaacaataagaaagaagaataaaaaagatatactgctttaaagcagctatgcacagcgctggtaaaaggactgaattcaaatcctgctgccataataaaaaaggttgcaggtttggtttctgacttctacaagcgaccaaacccgcatctcagtcctgcaagaacttcctcggaagatctttctcatttcttagaaaacaggggcgttcaattgctgggacatatcagacatggatcttgcaggcccagagctatattatttaaagtccttgctgactctgttggtatagactctaaactgctggtgggcattccaaatgaagaaccccatggatatgacgattcgtccaaacatatgtctgttgtggtcatgctgaaatctgcggagtttctagttgacctgatgcgttttccaggacaattagttccattttcatccaaggctgtcatcacatcccatatatctgcagctggagagagtgattcagttgactatgattcctgtgattctcctcttgaaccgaatagtcccctatgtgctcaacggcaagagcaagatgacagcaacagatccttcaaagtcccctctctaagaaacatcatgctcaaatcaacaaattctatggagggtaaaatgagttcatcacatagtgatccaaatgttgccaatgccttctgcggtcgcagccggaagaaaattgtggatgaacatcaaagaactgcaagttcaagtccagagcatccattgtccagagttcgtgggcgctcaatgctgggtgacagacaatacggtaacagtgtagctgtgtcaaggtcagatggcgcatcaacatcaaatacacgtagagcacggagaagaagtataattattacccctgaaatcagtgatgatattgtgagagctgttcgagcaatgagtgaaagcatgagacaaaatcgcctttcaagggggcagaatgatggtagtcttggaccttcaaatgattcacataaacatgagactgctggtgactccaatgatgatgaagtgtctataagacgaccaagcgcactggagggtttgagaagacaaattaatagtcagaaagcagtgtcactaccttcatcaccccataggtcaagtatccttgcctctgacctcaggggcccatctgactttacagaagctgatctgatgtcaacttggaataaggtgttgcaatcttcaccatttctgaacaagcctttattgccatatgaggaatggtgcattgagttttcagagattactgttggcattcgtgtgggagtagggttcttcggagaagtcttccgtggcctctggaatggaacagacgtagctataaaagtattcctagagcaagatttgacaccagagaatatgaaagatttctgcaacgagatctcaatacttagccgagttcgacatcccaatgtcatactcttccttggtgcatgcatgaagcctcctcacttatccctagtcactgagtacatggaattgggctctttgtacagtttgattcattcaaaaatgcataaaattaagctccattggaagaggaggttaaagatgctccgtgatatctgtaggggcctcatgtgcatgcaccgactgaagattgttcaccgtgatctcaagagtgcaaattgccttgttaacaaatactggacagtcaagatatgtgactttgggctct

SEQ ID NO: 12435 - DNA, 1517 bp, Setaria italica
  Peptide Sequence Number=SeqID_78409
ctctctccacctctctctccgtctcttccccccgtctccgaatttctcccccactctgtcagtctcactccccgctctctctccctctcgcctcgccgccggcgacgagctcgagctcgagcttcttcctcgtctcgccgacggcggcggtgctatggagcctatgaacgttgacaacggcggctgcggtggcctcgacgcgcagatcgagcagcttatgcagtgccgcccgttggccgagcaggaggttaagtcactgtgcgagaaggccaaggagatattgatggaggaaagcaacgttcagcctgtcaagagtccagtgacgatatgtggtgatatacatggacaattccatgatcttgtagagcttttccgaattggcggaaagtgtccagacaccaattacttatttatgggggattatgtggatcgtggctactattctgttgagactgtcactctgctagtagcactgaaagtgcgccacccacatcgaattacgatccttcgtggaaaccacgagagtcggcagatcacacaggtgtatggattctacgatgaatgcctacgaaagtacggcaatgcaaatgtatggaagacatttacggatctttttgattattttcctctgacagctctggtggaatcagagattttctgccttcatggtggtttatctccatcaattgaaaatcttgatagcgtgcgtagcttagaccgtgtccaagaggttcctcacgagggacctatgtgtgatcttttatggtcagatccagacgaccgatgtggttggggcatatctcctcgtggtgctggctacacttttggacaggatatatcagagcagttcaatcacacgaacaatctcaaacttgtagctcgggctcatcaattagttatggagggatataactgggctcatgaacaaaaggttgtcaccatattcagtgctccaaactattgctaccgatgtggcaatatggcatccattttggaagttgacgactgcaacagtcacacctttatccagtttgaaccagccccaaggagaggtgagccagatgtgacgcgaagaacaccggattatttcctttaagttatcgatgttacctattcccagcctatgctgtgacgatcgacgccagcatctgctggatcaagggccagccagaaataacaagcgaatgcgaaagcactatacaaaacctgaggtccccattggccaatgcaagagatgctgctatcctgaaagaaagcaggtgtgccatgtaaagccatgcctgagttttgaagcctttcaggtgatcgaagggccgtccacttcaactcttgccctcccttttaggcatatttttacagaggcatggaattggcaaaagactgaacatcaatttgtacgtttgtagcgtaagcgtgtaccgataggcctgtactgatttgtatcatcattcatcaatggcaaggcacagttaaaccccttttcagtaatctaaaaaaggtaaaaaaaaaaaaaaaaa

SEQ ID NO: 12436 - DNA, 899 bp, Setaria italica
  Peptide Sequence Number=SeqID_78410
actaggttcctatttcaataaaagaaaaagaacttatattacattctgtagagtatgctaaatatgtttatgttgctttggactgcagtcatactcttccttggtgcatgcatgaagcctcctcacttatccctagtcactgagtacatggaattgggctctttgtacagtttgattcattcaaaaatgcataaaattaagctccattggaagaggaggttaaagatgctccgtgatatctgtaggggcctcatgtgcatgcaccgactgaagattgttcaccgtgatctcaagagtgcaaattgccttgttaacaaatactggacagtcaagatatgtgactttgggctctctcgaataatgtccgattcgtcaatggatgacaactcatctgcggggactccagagtggatggctcctgagctcattcgcaatgaaccattcacagaaaaatgtgacatcttcagctttggggttatcatgtgggagctttgcactcttagtagaccttgggaaggaataccacctgttcagatcgtttactctgttgcgaatgatggggcgagactggaaataccagatggacctcttggaagcttgatagcagattgctgggcagaaccggagaggcgtccaagctgccaagagatcctgacccgccttcttgattgcgagtatactctatgctgagattttgcgtctagtctgtatagcggttttaggcaccaaattgatccggcctatacatgaattttcatttcccgtttcacaccattttgacatcattgaggatgtaaatttgcaacatgtacaataaacaaacttttcataaccactttaaatgctacatataatgccctgaaattcaatattccttttcacaaaaaaaaaaaaaaaaa

SEQ ID NO: 12437 - DNA, 512 bp, Setaria italica
  Peptide Sequence Number=SeqID_78411
ccgtgaacctcgtcacgtacctcaccggcaccatgcacctccccagcgccgccgccgccaacgtcgtcaccgacttcatgggcacctccttcctcctctgcctcctcggtggcttcctcgcagactccttcctcggacgctacctcaccatcgccatcttcgccctcgtccaagctatcggcacggggctcctggcggtgtccacggaggtgcggcagctgcggccgccgccttgcggacccggcgcggcggggccgtgcgagcaggcgacggggctccagatgagcgtgctatatgtgtgcctctacctcatcgcgctcggcacaggcgggctcaagtccagcgtctcgggcttcggcaccgaccagttcgacgagcgcgacgcccgcgagcgcgccgccatgggcctcttcttcaaccgcttcttcttcttcatcagcgtcggcacgctcctcgccgtcaccatcctcgtttacgtccaggaccacgtcggccggagctgggcctacggc

SEQ ID NO: 12438 - DNA, 902 bp, Setaria italica
  Peptide Sequence Number=SeqID_78412
ttcgttgcgtggggtggtagcatcagaaggactgaagggttcaagatgagtaacagcctgaacgcgtcgaggttcccattttgtgctgtggtcatggcttctacgaaccagagaatcatgctattgcagcaggttgaagggcctaagtcacctgaagagatgataacaattcttcaacgggttgttgaagaatgtgctacatcactcgttgctgccaggattgaagctgaagagaggctaaataatcagcgtttacgtgaagagcaagatgctgcttacagagttgcacttgaagccgaccaggccagggaacgtgaaaggcaagaggaactggaaagacgtgaaagagaggctgcagaagctgagagaaaacgtaaagaggaagaggaagctctagcgagggcagcccaagaagcagctgaaaaggaagctgctcttgcaaggaggaggcaagagaaggccatggctcttggggctgaacctgagaaagggcctggtgttactcgggttctcataaggtttccgactggagaacgcaaagagcggagattccacagctccgccgcaatcacttccctctatgactacgtcgattctttggatctcttgaaagcagagaagtacagcctagtttcgaatttcccacgggtcacatacggtccagagaagcactccctgacactggaggaagcaggcttgcatccgcaggcgagcctgtttattgagatagaacaatgatgttgtaagttcagaaaactaaaactcgcaagtatagggtgctgctttttcgaatttgttcaaccacagttaaggattcccagatgtattaccccacaggtgcattgtttttttttgactcgttcattcaataaattcacctttaccaataaaaaaaaaaaaaa

SEQ ID NO: 12439 - DNA, 357 bp, Setaria italica
  misc_feature (60)..(60): n is a, c, g, or t
  Peptide Sequence Number=SeqID_78413
aactttgttccttcgtatccagcagcgtcttcaaagtactaatttcacttaacatgccanccttttcagcataaacaaagcttccttttcctgataactttctgcttggtgttttgccttttcattcgcttcaaccagcgccttcacagtagaatctgcatcacttatagttgcctgcgcttcttcaaacttggcaataagtgttgcagactcaaaagatttctgggccacaagaagttttgcctccgaaatctcaagctcgagtgcctctttttccttattccatgaaataagtgatgcatcatttccttgtatctttacctccagctctttcaatctagcttcgtagcatctttt

SEQ ID NO: 12440 - DNA, 1029 bp, Setaria italica
  misc_feature (1004)..(1029): n is a, c, g, or t
  Peptide Sequence Number=SeqID_78414
cgatggcgttcagccttgccgtcttcttgctcggcgcgcggacgtatcgtgccgaggaacccgtcggcgacggtcgattcctcgagaccgtgcgggcatgggccgcgagggtgttccggcgcaaggatgccactagcaccgaacggcttctggatcgacaacccgagaagggtaaaggacacgtcgtcaagctgctcccgatatggttgggtgccatagtctacgcggccgtcacttcgcaagtgtacactctgtttaccaaacagggcagcacgctggaccgccgcctcggcacgggccttgtcgtgccgcccgcggcgctccagtgcctggtcagcatcaccttcatcgccgtgctcccggtgtacgacaaggcctttgtgcccctggcgaggcgcgtcaccgggcaccccgccggcgtcaccacgctccagcgcatcggcgctggcatgtccatgtcctgcgtcgccatggtcgtcgcggcgctcgtcgaaggcaggcggctccgcgtggccacggacgcgggcatcgtggacaggccggacttggccgtgccgatgagcctgtgttgggtggttcctcagtacgttctgatgggcctggcgatggcgttggccgacgtcggcctggaggagttcttctacgaccagctgcccgacgccgtccgcagcgtcgggctcgcgctgtgcctgagcgccatgggcgcggggagctacgccagcggcgtgctcgtgtcggcggtcgactgggcgaccaggggcggcggggagagctggatctccgataacctcaaccgggcgcacctcgactacttctactggctcctggcggggcttgtcgctctggacgtggctgtgttcttgtatttttcaaagcgatttgtgtacaggagcaaaggtgagctgtgattagtagcacctttgtgagcagaaattatctgcttttgtgtaagatgtacatcaaaaggtaagcgcataaaaggagaaaaaagtgaaatttctttnnnnnnnnnnnnnnnnnnnnnnnnnn

SEQ ID NO: 12441 - DNA, 458 bp, Setaria italica
  Peptide Sequence Number=SeqID_78415
ttccttagttaaacttagggttaggttacgtcggtttcccgtaacggtataacccgtaaaagtaagttctaagttccgtttactcacctaccttattcacctttccctcctccgctcccgtcgctcgcctcgctttccgttcgccggccgtgccaccaaccaagctcatacacccagaccgactagtgaaacccactgatctgtttggggactaatcaaacttaacaagcaagtttcatgtctgatctcgacgtccagcttccatctgcttttgatccgtttgcggaggcaaatgctgaggactccagcgctggtgctggatcaaaggagtatgtgcatgtgcgcgttcagcagcgcaacggaagaaagagtctgacaactgttcagggcttgaagaaagagtacagctacaacaaaatcctttgatccagcaccagcgctggagtcctcagcatttg

SEQ ID NO: 12442 - DNA, 548 bp, Setaria italica
  Peptide Sequence Number=SeqID_78416
ctgatctcgacgtccagcttccatctgcttttggtatatactccctttttctgtcatttttgttgtaaccttttctcgttgaataacctacaggtataattgagttgtctcttaagttgtgatatgcattattaatggtggatatgtgccacttgcaacctactcttgagatggtactgataaatgcttttattaattactaatgaggctatatgcattcatgtcttactgggtctgatgaactttgttattttggttttcttccaatatagataagtttgcttttactcatttgtccagcctgagcacactctaaagacagaagttgataacttgatatcttttctatgtagatccgtttgcggaggcaaatgctgaggactccagcgctggtgctggatcaaaggagtatgtgcatgtgcgcgttcagcagcgcaacggaagaaagagtctgacaactgttcagggcttgaagaaagagtacagctacaacaaaatcctcaaggatctcaaaaaggagttctgctgcaatggtactgtagtacagg

SEQ ID NO: 12443 - DNA, 555 bp, Setaria italica
  Peptide Sequence Number=SeqID_78417
tttttttttttagtttacgtaaatgttcgaatagctgatttgcttatatttctcgatatccgaaacactattacatcagagcatctacgaaatcgattgatgaacggcaacccctctatgtgcccatgttaccctgtatgcacgttcgtgctgaatgcttaaagaactttgacagcactactgtatcaaacccctcaacatccaaacactgaatcggtgccttgtgcgtggcagggaaatccacataacaaggatatcagggttttgcccttcaagaacaacatcagctctggcaggtatcgattagtcttcttttttgctgtctgaatcttcaagagcctgcagcctttccacaagaggtgggtgggagtagtgatatgcagaataccatggatcggtgttcattgcagacaagttctcctcctgtagtttgacaagggccgctcggagctgaggggcatatccaaggttcttggcaaaggcgtcagcctgaaattcaaatgctctgctgacaaggtttaggcaaaagctcagaaggtgttggagaggtattat

SEQ ID NO: 12444 - DNA, 1644 bp, Setaria italica
  Peptide Sequence Number=SeqID_78418
tagttaattaatttagttactaattactaattactaaggtaagtaagtctttttgtccctttcaagaacaacatcagctctggcaggtatcgatttgccttgttacttgctgtctgaatcttcaagagcctgcagcctttccacaagaggtgggtgggagtagtgatatgcagaataccatggatcggtgttcattgcagacaagttctcctcctgtagtttgacaagggccgctcggagctgaggggcatatccaaggttcttggcaaaggcgtcagcctgaaattcaaatgctctgctgacaaggtttaggcaaaagctcagaaggtgttggagaggtattatggtgtgctggaaaatgatcaatccaattattattggctgatcctcgaaaccaaaactttcaaatagatctttggagttccttactagagtatatcctccaaattgcagaaacataagcagctggacagctataaaggaatagacagtatgattgagtttccagtgcccaagttcatgtgcaataacagaaactatctcatcctcgttactgcactgctgaattaacgtgtcatagagcactatgcgtttattcttgaaaaaaccgtacatgtaagcattactgtggcttgatctggtagacccatctaccacaaaaagctttttcaaaggaaacttgagggaagctgccaacttctctattttctcccggagtacaccttcaggaagaggagtgaacttgttgaacagaggagctatcacgatggggtatattgtcatcatcaggagagctaatacaaacataaaaccccagagatatatagctagataaggtcctccaatctgtactatgtagatgatagcagccacgattggtggtcccaatatcatggatagtaaaattcctttgaccatatccctaatgaagagccatatagtttgcttgttaaaaccatgtcgagcctctatgacaaaagttgaataaagagagaacggcaagtccgtaatctgtgaccagaccatggcaccagctaagaatgcaagggtgtgtattatctcattctcagcattcagaccaacatttgtaattagttctccagatttcttccaaaaccagggaagaactctatagtacagtattgtggtatccattaaaatagtcacagcctcatgaacaaaatggaagtggcttttgtcgaggctataatctctagaacgtttaaacttttcatcactaattactccgagcaagggttttggcaaagttggtaacttgagggctctgtgctgacggatgtcaagatatgtctcaaatatgtacatgagaatcataaagcacagcacggcctccaggtagggcagcgccattggagccgggcgaggcggggcggtgggggcgcttcggaaaccgagaggcggagctagggcgacggatcggggccgcgcgggagtggcgagtattatgaagcgggggaagcgtgacgcggtgcgggtacggatgctttgctcgattccgctgcccggagttggggaaggaaggaaggtataaatacggcgtccaggaggccgcgctcttctacgccggagttgggtggaaccggctgaagtccgcggcttcgcagcgaagcatgccgcgttggc

SEQ ID NO: 12445 - DNA, 359 bp, Setaria italica
  Peptide Sequence Number=SeqID_78419
tcgatctcttcagcagtgtctatccaatttccactttaactatgactggaatggaaccctcgacacctgtcaggtatttgtcatttccagtgatgaaggcaagtttatcagctgatttaaccattgccttctccaccatgaaagagggctctccactctcagtcttgcgccgcccgatgacggcagccagcgtgccctcttcgattacttcagcatcagtgaaagcaaaatcaatctatacgtcagtgagcagagcacagtttcagatgctgttcttcccgtgttataagaagaggtttacagctgatggttacaggcgtacagcactgcgcatactcacttgggttccttcctgatag

SEQ ID NO: 12446 - DNA, 849 bp, Setaria italica
  misc_feature (798)..(849): n is a, c, g, or t
  Peptide Sequence Number=SeqID_78420
cggcgcggaggtccctcgcggggccaaggacgggcgctggaagacctccatcatcttctaccgcgccatgacccgggacggcggcgccgcggggcccgcggggcagcaggggcaagagcacggcgacctgcccagggagctcctcggcgtcgcgctccacgagcgcccggggctctacttctccatcgtccgcctggcgaagctcgtcctccaggccgacgccacgttcccccaggtcatggagaagctccagtcatacaaggcccgcgtcgccctcaacttcgaggggtttcagtatcaactgggtgatttctgcctgaggataggaaaatgtgttcctaataattctgaagtactgagaggaatcatgatggaggtagagtattatcccctgtcttccatcgaaaaatccagggcaatcatggaagatttctttgacgtatggcaggaaacagttgcgaagaagtcattacctggtcatttcattcatgtagaatcaaacttttcagaaatatggtctttcagatcaatattctttccaacatactgcagttcagtatgcaacttgcctgcagcagctcatggctgtagtaaggggctagctctaaatatcaagatttagagaaaaaaacaccatgtataacttcttaggttgatcctggtagcattcacagtgcctggacgcatcttatgtaatgacatgcaaatgaggtttgtactttcatgtagtatcaaacttttcagaatatggtctttcagatcaatattcttttcaagatactgcagttcaagaaaacnnnnnnnnnnnnnnnnnnnnnnnnnnnnnnnnnnnnnnnnnnnnnnnnnnnn

SEQ ID NO: 12447 - DNA, 414 bp, Setaria italica
  misc_feature (410)..(410): n is a, c, g, or t
  Peptide Sequence Number=SeqID_78421
cttcagctcagactcagagtcacccagcgttcggctagctactgagctcgagcgtattcggatcgtgcacagccgcctgtcgcgctcaggtcgttctttggtgctctcgatcgtcgcctcggtcaccggccgcttcgagattccggccatcttcgccgcattatatatctctcgctcgctccgacgacgaggatgtcgagcaggaggtcccgcgcgtcggtctcggaggaggagatcaacgagctcatctcgaggctccagacgctgctccccagcgcgcgccgccgtggcggcagccaggcgtcgacgacgaagctgctcaaggagacgtgcagctacatcaagagcctgcaccgggaggtggacgacctgagcgaccgcctgtccgacctcatggccaccatggaccncaac

SEQ ID NO: 12448 - DNA, 978 bp, Setaria italica
  misc_feature (940)..(978): n is a, c, g, or t
  Peptide Sequence Number=SeqID_78422
tcactagctagcactagcagtcgcttgctgctgcccagttcttgtctacgtgctactgatcaacggagcttacaacctaattaaggcgcgcgtaagccatggcatccaaggccgtcctcttcttggccctcaacctcctcctattcacggtggccaacgcctgcggcagctgcccgaccccgacgcccccggtcgtgccgccgccgccgcccccttcttccccacccccatccagcggcaagtgcccggtgaacgcgctcaagttcggcgtgtgcgccaacgtggacggcctcgtcaaaggcgaggtcggtaaggtgcccgccgagccgtgctgcagcctcatcggcggcctcgccgacttcgaggccgccgtctgcctctgcacggccatcaaggccaacgtgctcggcgccgtcatcgacatccctatcaagctcagcgccctcatcaactactgtggcaagtgcgtgcccaaaggttacacctgcgcgtaaactccgcggctacacgctcgtgggtcgtagcctctcgcgtccgtagcgtaagcacgcacctgcatggcacacactgtttggtgtgaactctcttctgtgtctcatttgtgcaacttcggttctgcaacctagaaccgtttcggccaaatgcttgtcagtttgtgtgtgtattgtgtctctcttgacgaaattcctttctcgtttttgcatttgttcataagaggcatgcatctcctagcttgagctgaacaaggggagtgttgcttctagttttttatatttatgaatcatgtaatctgttgggaattatttatatatatcgtgtatgtaaaatcaagcacttgaagtactacttgtaatacttattccatttgttaattgttcccttctcttttggagggagaataaataaagccattttgttactctactaaaaaaaaaaaaannnnnnnnnnnnnnnnnnnnnnnnnnnnnnnnnnnnnnn

SEQ ID NO: 12449 - DNA, 620 bp, Setaria italica
  Peptide Sequence Number=SeqID_78423
accctgagtgcaatggcagtcttcttgtccctgaccagcaaatccacgtttcagcgaggctacctcgaaccatctaccagagtagcgaactggatcaaagttcttggcagtcatacccctcatcatcatccctgcgccaccgtcatctgaagggttatcaaacttcagaggaactgaagcactgtcgatggctgccagtgttgcaatctggcataagcccggctgggcaaaggtttctgcaggaatagcctgactaggtggagagatgaacacgagcgaagcagcaagacaagagattagctgcttggatactactccatatttgttcagtggcgtttcctcattcagagagcatctgacgattttctgcctggtggtgctacattttctcctggaagtgggagagcaggcggggagtgaggacgcgggggagcagcccagcaccacgagaaccatggctcccggctcccgcggcctcgcgcgctcgcctccaagtttcaggccgacgagaccgctttcgaaggcttctaggtagtcggtggattaggcagcggagtctcgctgtccatggtgtggcatggcagctcggagagggaagggctggctctgccgcaggcgga

SEQ ID NO: 12450 - DNA, 509 bp, Setaria italica
  Peptide Sequence Number=SeqID_78424
tcctatattagtattctaattctattcctagtagtcctactattggagtcactgaacttcacatgatccatccattcatgttcgttgctgtgagtatatgtagaaaatggggcttcaataatgatagttcaagacttcaaggcttcatagagtagcttaattagcagcagctatgctcatactatggaatatttcctcgaaatcaactcatattttgaggatccttttaaaccatctaggtataatgagagcatatagtaaccaccagcatcaggaactgatttactgcctgaacaaaaggcgatagtccttcagaactactttatagtcgatcgcagaattatcttaccacagcaactagcacccataagaataaccgcaaccaggctaaccgcgacggagttcttttaacaggccaaatggtgtattgacagacagactcccactaagacataacaagtctgagaactactccctccgtcccatgaagagtgcaattctagtttttc

SEQ ID NO: 12451 - DNA, 703 bp, Setaria italica
  Peptide Sequence Number=SeqID_78425
accagcatgagatttacaaccagccatagttttgagaactgtcagcattacaagatgcataccaccatctaaagtgggaagaagcaaagaaagacgccaaaaggcgtttagatttactccaaaccttcccccaagaatggcagacaccaaataggtaacctactaaccttgcagcaaatagcatgactgtcttgaatgcagtttgtttgcatttcagaatccgttgccatgcagcaaaagtagaaatccagataggatcaatcatccagagccacatggagtcactgaacttcacatgatccatccattcatgttcgttgctgtgagtatatgtagaaaatggggcttcaataatgatagttcaagacttcaaggcttcatagagtagcttaattagcagcagctatgctcatactatggaatatttcctcgaaatcaactcatattttgaggatccttttaaaccatctaggtataatgagagcatatagtaaccaccagcatcaggaactgatttactgcctgaacaaaaggcgatagtccttcagaactactttatagtcgatcgcagaattatcttaccacagcaactagcacccataagaataaccgcaaccagcctaaccgcgacggactgtcagcattacaagatgcataccaccatctaaagtgggaagaagcaaagaaagacgccaaaaggcgt

SEQ ID NO: 12452 - DNA, 551 bp, Setaria italica
  Peptide Sequence Number=SeqID_78426
acaagacaatacaaggaaactagaatctgtggtaagataattctgcgatagtccttcagaactactttatagtcgatcgcagaattatcttaccacagcaactagcacccataagaataaccgcaaccaggctaaccgcgacggagttcttttaacaggccaaatggtgtattgacagacagactcccactaagacataacaagtctgagaactactccctccgtcccatgaagagtgcaattctagtttttctaggacagattagtggtggcgtgaaaaggctaataccctcatttgttggccacatgcagtaagttttagcatgcaaatcaaatctgaccacttaattaggcaggtagttagatctattttctaggattgcactcttttgtgggacttttttcaaaagctaggattgcacttttcatgggatgaagtacttactattccactgctgctaagatatgtgtaaaactacttaatatcccgaaacctggcaaaatgcagataaaagcactgtgccaggtaaacttcaacagtaactttttgt

SEQ ID NO: 12453 - DNA, 1649 bp, Setaria italica
  misc_feature (22)..(22): n is a, c, g, or t
  Peptide Sequence Number=SeqID_78427
ttttcttttttaactttatttntttagttattaattgtagtagtcatatagtaaccaccagcatcaggaactgagtaactgctattccactgctgctaagatatgtgtaaaactacttaatatcccgaaacctggcaaaatgcagataaaagcactgtgccaggaaacttcaacagaactttgcttttgcagacacagttttgcaccgaccaccagaacctcaaagtgttcatttgatatgagcagacaaatgtaccaatgctaagcattcccgctagcatctgtagtcgcatcagccactattatgttaaaggacaatggctgccaccctgaagaatttggcacaaaccacttttttgtattgattatgatattcagaacctgaagaacttcaccaagggcaagattcttcaggcatgttttcttcaacatagcagcagcttgatacctagactgagaattctttatcgcagagtagccatgggcagaagatatgaaagtatgaacagaatctagagtttcttttgggtattttgcattatcatccattatattgacacatttccagagattttcattcttcccaagaaagaatgacattttccctaactttttcgtgacaacaacttgatgctgcatggcaacctgaagagccttcttgacatcaaaatttggtagattagcatccccataatgtatacaatctgctatattttgttctgttgggggaatcttctcagtcttcaatacttccaaagcacctaagatatatcttacaagaccttgagggtccaaagatggttgtggacatcccaggttggctccccagtgtccagtattttgcatgttgctaggcatgttaggttgagttggaggtctgtaactatgatcactgtaaccaggttgaaccatatgaggggcaccaggatggtttggatggtaattgacattcaaaccttggttattatgaattcctctagggtattcagaaatattcagccgactcatatcaggataattgattggtggtccatgataaggtgggccgccttgccaggattgcaacggtgcagtaggaataccattatacccagctggtgctggacatgagttgcttctatgtgaaattgatgattgaaaattgctagatccaccatgaggacgatgattcactggattctgtggtcttggttgctgagaggattggggtttctgatgctttggatgaccatggctattaacatctgaagcaccatttttagatgaagactcggttgacataccaggcttcttaccatgataaaagtcatgaggagcgctcttttgatgggaaagagcagattttacaggctttttggacagggaaaatggctgaacttttggtgtattcagctgatccacctgtgccccatcttgcgaatcagaactagataatgacgctgatgatggcgtgagagattgatttggttggctagcaatgcttcctttagaactatcaggtactccatcaactgagttttcctcagtccttgttggtttagatacattgtctgactgggtttttccgaggttgcctaactttatattgtttatctccctttccattaccacctttttgctgatcaaatggaatgttattcagcacttga

SEQ ID NO: 12454 - DNA, 480 bp, Setaria italica
  Peptide Sequence Number=SeqID_78428
gcaagttgtggaagtagaggaataaaacacaatacgaagatggaagcaatcagttcatacaatgcctagagtacaaaaagagagaccagcacgtgcagtagcgaacaatgcggccccaagacacagggcaacaccttccagactggttaagttatacaagcacctgactgttgaccagcgcaaggctatagaagatgtgaaatttggtgggttactgaagattgcatgctcacaaataccttcagatttcgcaaattggatcatggtgcaatgtttcgatcatgaaacatcgcaactcattttgcctggaagggggaggatctcattgacagcaggggctgtagctgaaaaatttggtttgccaaacaggggtgatccagtgaagtatgaacttgatgttgatgccatcaatttcattcatgagaagtatggcattgtccgggggacagcccaaaagattgaaacaattgttcaagggtc

SEQ ID NO: 12455 - DNA, 397 bp, Setaria italica
  Peptide Sequence Number=SeqID_78429
tcatctccagcgtgcttctacagtatattaactggctcagtcgttgtgtcaagatgttaatgttaaggtccttcaggtttcagatgtaggccctgcagttttagaagtaaaagagcagtttttccaccggaatggcatgcagacgacggtcagcagtattcagttgtatgaaagtagagcatcacaaaacataactactttttaaatgagctattcaatattttgttagtctaactctgacaaattaatgaaaatttaataggggtatttgcaaattttctactggtttattaatactactactattgctcgaatggcatttttggtagcatttttgctaatttctagttgcaagcttgccataacttccaaagcggtggcaaatttgcaattgccc

SEQ ID NO: 12456 - DNA, 300 bp, Setaria italica
  Peptide Sequence Number=SeqID_78430
ctctcgatctcgtctctctgtccactagccgtgagacggggggctaggaatccccggcatcggaaaagcgccggctaaagaaccgattttcccaagatttttgtccgccccgcgccgtccgtcgcaggatcggattctccggccatggctctcgccggcctccgccggcacgccggccagttcctcagcaccagcaatgagcttatggcggcgtcgctgtcgacggcgacctgcgcggaggagatgcagaaggcggaggggggcggtgccgcgacgacgcggtagcgctgcggctcaagg

SEQ ID NO: 12457 - DNA, 397 bp, Setaria italica
  Peptide Sequence Number=SeqID_78431
gccaatagcgtgattttacttgctttactaatcacgctttagcgatttagtctcctgctcttccttcccccacctcttcctccctccctgcctcgccgctccctttctcctcccctcccccccctgcccgcggcctctgtccgtccctgaatccgtggcggctcccgaggcgggcggcgcagcgcagcggctggtctcgaggggcgctgcctggtgagcggcgaggcgccggatctgcggcggcgatggaggcgtgattcgggcgggagggagaggcgaggcggggtgctggttttcccggcgtaggggatggctgcggcggcggaggctcggggagcggacttccccgtggggatgaaggtgctggtggtggacgacgacccgacgtgcctcgtcg

SEQ ID NO: 12458 - DNA, 1125 bp, Setaria italica
  Peptide Sequence Number=SeqID_78432
gttccagcctgccttgcaggccaaccctcacccatgcccacaggcatttccgcccatgaattcgtctcaggatcgaatgtctccccaccaacatcaacaaagaagggccaggaataaaggctttgaggaacatatagcttccctctgtatgaggtcattccagtagcaattggcttcagtaactcagctaagaaggcagtcggtagagcttgcgctttggagaatgtcatgtctggcacttctgcccaaaccccggttgccgggtcaaacacttcggcagattggagtggagttagcccatccttgcctttgctcacaccaccaacaacataaagcttgttgtttaacaggctagtcttgcaaaaggcacgcccagtgctcattgggctcacctcctgccatgaattgacaaagggatcatacctccacacacatttcatcgcgaaagctctagagaagccacccaaaacataaaggcagccatcaacggtgccaatggcacagccgcagaacggtatactgcctaacaaatccttgtgaccaaaccagcttctgataacatcggagatcctgatgccagcgctcaccagatcccccaatcccaacccggggactccactcctgcagtctcctctccgatgactgatcccaggcatgagtggcagcctctgccattggttgctaaccggatcaaaagcgtgccaaaccagcttctgatcgtctgccgttttcatcagaatgtacaaccactcttcagccacgccaagctccttccgaagacggtacagctccgcgccggtgatggcggtcttccagctccgggagaccatcttggccttcaggtaactcatcctcggcatcctcgcgaggatttgaagcgagatctcgtccgggagcccggggatgagccgcgggtggtcatggccagaaggaggaatcgacgatagccgcagcttcttcgtggattctggtcccggcgcttcgccgtgctcccgtggctggttcttgctggttggggagctcaagaacgcccccatttgaactcttgttggcaacttttatcattcagcgcaggggaaggaggagctggagcagcgcctatggtagtgtgttgagcattcccca

SEQ ID NO: 12459 - DNA, 450 bp, Setaria italica
  Peptide Sequence Number=SeqID_78433
acgtatcagccagaaatggaggagaccaaggaggtcacgttgaaagcaggcatcgaggggatgctcaccaggctgcagagggacagggagcgggcgcggccgccgccccgaccagaaggcagaagtgacaatggcgctttagcaggcaacagcggtgctcccagtcatacagcggctggtggcaggcatagccctaggacacctgagaatggaagtgttcatggatctcatcctcaaaatgggacgctagatggcaacaataccttacagagttcgagcaacgatacatggcaaacatggacccttggcaagagtgatttatctgattttgaagctgctgaggtcctaccaattgaaagcagaagattatctcggcatgatgaacaagacattgcattggcgcaaaatgactttcacagatcatctaatggtgtggctgtaagtgattat

SEQ ID NO: 12460 - DNA, 186 bp, Setaria italica
  Peptide Sequence Number=SeqID_78434
cttgtgtcgatcaggttttagtaaccaagttacatgagagctggagcaagctagaatatatacagttcatgccatgatgaccaaatgggaaacaaatctctgctctactccactccgcttacaaagcccctcgcccaccacctccctctctcctcgccccaggcgcatcaaatagctctccttctg

SEQ ID NO: 12461 - DNA, 474 bp, Setaria italica
  Peptide Sequence Number=SeqID_78435
aagacaatagacaacttaggaatagttagaaggtaagtacaaccgatagccagcataactctctctgtttgcgaagcaagctctctagtaggtgagaggatcaaagcctggacctcgcggacggcggtgtcgacgatctggcagacggtgagtgagatcatggatgtctttcccgtgccggactgggcctgcgcgatgacgtcgcggccgttgatgatggggaggactgcgcgctgctggatggcggagggcttctcgaatccgtagccgtagatgccgcggaggaggtcgtccttgatccccatctggtcgaagctgctgacgacctcgacccccggggaggtctcgaaggtgaggttgtcgtcgtccatgttgcgggcggcgccggggccgcggcgggaggtggtgggcgccgccatgggtggaaaccctagctggacggacggacaacggaggcggaggaggggaggttat

SEQ ID NO: 12462 - DNA, 2699 bp, Setaria italica
  misc_feature (1)..(30): n is a, c, g, or t
  Peptide Sequence Number=SeqID_78436
nnnnnnnnnnnnnnnnnnnnnnnnnnnnnncagtctcaagggctagtccaatctctgatagatgctcataagaaaatattcattacttatgaaatttaagttcattaaataaaatatccaagaaccagatgacgcaatcctttttttagttggcatcattcttttatagtgtaaattaggttcatgaatatatcctcgaagaacgaacagttatccagcttcagaaaaagaaatattcattatccttcatgctcaagttccaacaagaaaggtacattggaataatgtacacgatacaacaagttccaacggcgcttccactgaggaaacatagcaagccagattgcatggcactcagaaacatctgcgatgtgtatctaaagatgaacagcagtgatggtcatgcctttaaatcacacctgtaaaagacgattttcattttaaggaaattcgtttgtactgcctcatggtgtttgtgatagcttgctccactggcaatctttccatgcttgatgcaccatagaatccatggacccctttagtattgtttaagatgaactccgcctcttggggtccagatatgggacctccgtgacagagaataattatatcaggattaaccctaagtgctgcatccgcgatggcctgaacacgtacagtactgtcatctaaagtgacagctgtctttgccccaatagaacctgcagttgtcaaacccatatgtgccactatgatatgagctcctacttttgccatggcagcagcttcttctggattgaaagcatatggagtagtaaggaaacccatgttatgagcccttgaaatcatctccacttccaagctgtagcccattccagtttcctccaagttctgtctaaaattcccatcaaacagaccaactgttgggaagttttgtacaccacaaaatccaatggtttctagtttcttgagaaagtattccattctgcggaatggatcagtagcgcaaaccccagcaagaactggaactcctttaactacaggcaacacttcattggccatctcaagtacaatggcatttgcatcagcaaatggcaagagccctgccagtgagccccttccagccattcgaaaccttccagagttgtataccactataagatcaaccccaccagcttcttcgaactttgcagatatgcctgtgccagcaccagctccaataactggaataccctcactgatgtgttgctttagtttatttagtattgacaatgtcttctgcaatgtttctggtttcgcctctggaaaatccaccggaggtctccatacaatggaactatctgaacttttctgtcctgaacaggaatttttcattttcccatcttgctgaggttggactgtactacaggcctttacatccatactcaagaatgcatctaccaatgcatttgcaaattcaggatcatttatgtgataaggaagcagcttcacctctcggatgtcggttctctgtataagggtgtttaattcgcccaatagtgttgacgtagcttctggatcatagaatggcattcctggagcatctattgcagatatgcccttctggggaaggcaaacagtaacttgggatgaagatttgtttatcttatcagcaatgaacctagcaaatttcttgttctcttccacggtcgtccgcatcaatgaaacctgctcattatgaacatggatctttctgtcagcaaaagcaggaggaattgtatctcgagctccaaagttaaccatatccagggctccaacactaagaacaagagggatcttattatctataattgcatcaaacctggactcatcacaagccatgacaccgcctacaatatgatctgcaacttctgttgtcgttacatccagtacaccctgtatgaaaccacccctaactaattcttccattgctttgcctcctacaccagtggcatggaatacaagcgtctcatacccttcttcgttcagtctatccttgacagcatttacgcatggtgttgtaacaccaaacatagtaataccaatagttggctttgctgcagtttcatcagactcattggatgccgacaagattccatgtaccattccagcaaaagctgcagcagtattagacaatataacacggctgacactgtttattccgcatatgtcaacaactgaaggaaacaataccaagtcagatgttccaacataaggcgcggtgtgaccactagcaacagtagatacaataagcttaggcacaccaagtggcaatgatctcagagcaggagcaattagtgcagttcctccactgccccctaaaccaatagcacccaccagggtaccactgtcatactttttttcagaaagttctgaagagcctttgaaactagtgcaattgcttcgcttctgttatctggaaggttatgttgctcaacacccaaaagacatgaaagaactgtatttctcgggataaatgtgatgtctttaagatcctgtgctgttgtcttttcagttgtggagacatccactatgctcacttgaaccttggggtcagagccagaggcggcaagggcggagcggagtctggcggcaaggaacacgagctcctccagcttggtgtccgccgtcccgatgcagagcacctccatttcttctcagccgaagcggagcggagcgggtgagatctgcgggggcccgag

SEQ ID NO: 12463 - DNA, 332 bp, Setaria italica
  Peptide Sequence Number=SeqID_78437
ttatagacaattttttttactaagaaaatatatgagtaattctgaaactcaaagattagtagtccacaaatgataccagttggtggaagtgccttaaactcgctaaacccaaacccaagaataagcagacttgacacagttggaaggattaccatggtattgccatgacttgccacagcaactattccataattgtattgtagaagattcagaacattccattacacatggagttatcagaaggaaagtattaagctgcacataccagagggatctcagcaacttggaaaccaatgggtactgttaatttggcatcttcatcaaggattcct

SEQ ID NO: 12464 - DNA, 1481 bp, Setaria italica
  misc_feature (1)..(85): n is a, c, g, or t
  Peptide Sequence Number=SeqID_78438
nnnnnnnnnnnnnnnnnnnnnnnnnnnnnnnnnnnnnnnnnnnnnnnnnnnnnnnnnnnnnnnnnnnnnnnnnnnnnnnnnnnnnacaaatacgggcaatcctttcattagcaaaactgcgccaccaagtaagttctctcacatagcaaaacaaagtgctctatacattaacgtcaaaggcacggatcagccaacaatcaaacaaatacttgatctgctggttgattactattaaagcagctacttttagtaaagcaagccattctggtctgcataacagcacccatctgaactaataaaagtggcgactttgtatccaacatcgatcagataagctaacatagtaaagttagtggagagccgggttgggcgtccggaactgataaaaatgtggtgcagcttctgtaagccatgacggttcaatggcaataacattccgcatatagtgcttgtcagttgaaacgagagactggtagacaacccactttggattgaccctaaagagaactgaagatggatgaatgtaaacttcttgtgatgtcctaatcgttttgtacattccattttggctgtattcctccagatgacatgcattagcaaatgaaccggcaataatggcctttctaactgcctgcatatctctgtcacatgatttcagtggtattccaaaactcttcactatcctgagaagctgccccctaatgtcaacgattttcttcaatgcttggtaattcaaaagttcttgtaacaccattggctagattttccagactggtgaaatcctttgtagatattcaggaacgttacatgatctccctcagcagcagcaaatcgaagcttcgcttcatcaaattccttcttcactcccctcacagaaacccacacagattgaacagatagaaatgatgctatggtcaatatctcatcagagcatccaaaatcatttgctgacaagatcattttcgaaatcatggggtccagagggatctcagcaacttggaaaccaatgggtactgttaatttggcatcttcatcaaggattcctagggagaatagaacttcgagagcccgaatcattgcctctggagatggagaagctggccaatcaaagcccagaatgttgtctatgcctagggcttttaactgtattatgcaggagaccaggttggacctttgcatttctggaattccttctgactgcatttcattaagataatattcctctgtataaagcctaaagcacttcccaggtcgcactcttccagctctgcctgctcgttgtcttgcagaggccttggatattggtgcaacaactaaactctcgatgtcagaaatcggattataacacttctgcttggaaaatccactatcaacaacatacaccacaccctccaaagtcaatgatgtctcagcaatgttggttgataacacaactttccttttcccttttgaagtaggagcgaaaattgaagattctttga

SEQ ID NO: 12465 - DNA, 442 bp, Setaria italica
  Peptide Sequence Number=SeqID_78439
cagactaagattttcaacttctgcctgcaaagtagaaataccgttatctaagtcaacacctgaatcatccaggcccttccaacgtattctgttcttaagtgtcttctctattagtccaattccttcaaggacattggtaatgtcatatatgcgccgcttttgaacctctagtgtttctgcggcattatttaaatctaaaatgccatctggagcctgcttgagcaagttaatgaacttttttgtcagaagtcctaatgaactgtcatagcggcaagtgccagcaggtgttgctggattgagaggtgaaccaacatttgacgtaggcgtttgaggaccagctttattgttcttcgccttcgacttagaagttttaacagtttttccagagacaggagtgagcattggactgccagtaaatccagtgctggtaattatacattca

SEQ ID NO: 12466 - DNA, 990 bp, Setaria italica
  Peptide Sequence Number=SeqID_78440
tcactatttctaagggtgataaatcctagttgtcgtctcaccaactgttgcagctgttggactttctatttttcagttatggtttcactaaattaggcacatgtatagagatgggcattttgcaattgttgatggtggttattttgcactttacctccggaaaataaaattatttggctacagagtgtttcttatttatgcggttcctcttggattaggaatcacatgggccatcgctttcgttctcacagcaactggagtttatagctacaaaggttgtgatgcaaatattccggcctcaaacaatgtgtcagccttttgtcggaagcatgtattgaggatgaaatcttgccgtgttgacacttcgcatgccttaagatcttcaccttggttcagatttccatatccattgcaatggggcactccagtttttagttggaaaatgggccttgtgatgtgtgtcgtatcaattattgcttctgttgattctgttggttcctaccatgcatcatctttgtttgtggccacaaggccaccgacttctggagtcgttagcaggggtattggtgttgaaggtgtctctacaatattggctggcctttggggtacaggagttgggtcggcaacgataacagagaacgtacacacaattgctgtgactaaaatgggtagtcgaagagcagttggatttggtgctattttactgctattgctttctattgttggaaaagttggagccttcattgcttctattcctgatgttatggttgctgctctcctttgcttcatgtgggcaatgctatgtgcacttggcttgtccaatcttcgctacagtgcaaccggaagctccaggaacagtattatagttgggctgtctttgttcttgtccctatcagttccttcatacttccaacaatatggtgtacatcctagcacaaattcatcagtgccaacttactttcagccatacattgttgcatctcacggacc

SEQ ID NO: 12467 - DNA, 552 bp, Setaria italica
  Peptide Sequence Number=SeqID_78441
ggttgccgacccaactcctgtaccccaaaggccagccaatattgtagagacaccttcaacaccaatacccctgctaacgactccagaagttgggtcggcaacgataacagagaacgtacacacaattgctgtgactaaaatgggtagtcgaagagcagttggatttggtgctattttactgctattgctttctattgttggaaaagttggagccttcattgcttctattcctgatgttatggttgctgctctcctttgcttcatgtgggcaatgctatgtgcacttggcttgtccaatcttcgctacagtgcaaccggaagctccaggaacagtattatagttgggctgtctttgttcttgtccctatcagttccttcatacttccaacaatatggtgtacatcctagcacaaattcatcagtgccaacttactttcagccatacattgttgcatctcacggacctgttcacaccggatctggtggggtgaactatgtccttaacacgttactgtcactcaatatggtcattgcatttctggttgctctcat

SEQ ID NO: 12468 - DNA, 1024 bp, Setaria italica
  Peptide Sequence Number=SeqID_78442
taatcagattctacaggaaaatgtcctgcggaaagaacctcatccctgtcactacatttttcacctgtaggctctatttcattgagaggaggaatattgtctgtctgcaacatcctttccttagatatatattctcttgatgcatctacttccccaagatttctgtcagtagcttctactggttccaacccttcccttaaaggagaattatgctgtagttgcagatcatgcctagaggcttcttcagttgaatctgtagccagaatctgtgttttttcagtatatatggcatcatcaataaaatcttcaggaggtaccacgtcatctgcaaacctgctagtagttgattcttctgcaaccacaactttgccaccctccacaatgtcttccatttcagtcaatgcatgttgttctacacatgaactactgttgtcaggtagagaggaagtattaggggctggaagcacactaatccccactggttctgtatcagcactgaacacacaagacacaggtgcaagggtctctactgcatgagcttctgtctcctcttgagaaggtacaccttgaattactactggaaactcttggacatcagataagttcctggccatggcaggtgcttgctcagaatcttctttgtgtgagttgaggctagctggacaggcccctccttcaagcacaactatttgattatcctctgcaacatccttattaaaaggagttgatagaccatcgtttagtaaagagtgcatatcttcagcaatctcatcatcatatgattcatacggtagattattacgcatgcctgaatgttctggtgcaattccatcttgatgatcatggttgtcatgaggatccaaacctgttggggccatatcagcagcaatttcttcaggaacgataacattgtccttgtccatctctacatcattcaagcacataacatggttcttatctggccatgatgcaagtatgccaggtgaagcgtctgtatctagagatccaccttccaattctttct

SEQ ID NO: 12469 - DNA, 252 bp, Setaria italica
  Peptide Sequence Number=SeqID_78443
tacggatatctgctgcatttgcaagcatcttaaactatgatcgatgccttattccaactgggtcatccagataaacgcaacagatattttaacatgttatttttattacttaggagaaaatgtaagaccttttttactgatctagcagttgatttacctatgcaggtgaggttaaaaggaggccatcagacacccaaagggctgaagcagtttagcgtctgacactctgttcgatctccattagcatccgcc

SEQ ID NO: 12470 - DNA, 1046 bp, Setaria italica
  Peptide Sequence Number=SeqID_78444
tttttttttttttttagttgaacttgacaacatttattgacattattccagcctcctcagctcatttgaggagatgattcacaattcacatgtagtttgtattactatgaccaccacccaatgcaaagctgataaagagaaaacaaatgttacaaatcacctggtctatcgaattggatttgctctgctacatggctctgggatcggtcccgaacggccagatgtagaccatctcgtcccagccggtgctggcaagcagcccgtcgacaagcacgctcatgtcgattccggcgacgaactcggtgtggtggttgtacctggcgagcagcgcgtcctcggcgcggtagtcccacatgcagacggtcatgtcgtaggagcaggacatgagcatgccctggcggtgcggcgagaagcggacgcgcttgacagcgtagccgtgtccggcgagctgcgtgatgggcgcccgcggcgcgcgcacgtcccagacgcggatggatttgtcgacggaggcggtggcgaggatggacgggtcgtacttgtcccagtcgagcgagagcacctcgtggtcgtgcgcgggcaggatgagcgtgggcgccggatcgcgaacgtcccagacccgcgcggtgcggtcgccggaggcggaggcgaagacgtccgggtggcgcgcggaccaggcggcggcgtagacgcagtactcgtggccgcggaaggtgcggacggaggcctggcggtcgggggaccagagcttgagcgtgtcgtcccaggacgcggagatgaaggcgtcccggcggacggggttccagtcgaggccgtggacctcgcgcgcgtgctcccggaggaggcgcacggggttctgcgccggcgggagcgcggcgtcgaagaggcgcacggagccgtccccggacgcggcggcgcagagggactcgtgggactcggaccaggcgcagtcgaagagcgcgtcggaggtcgggaaggagaagacgggggccggggcggcgccgggacccgggccggcggcggcgaggtcgaggacgatgaggtggccg

SEQ ID NO: 12471 - DNA, 940 bp, Setaria italica
  Peptide Sequence Number=SeqID_78445
tactatttggtcaacacaatttgacatccatgacacaatccccacgctggtaagttgcccagccaagccaactagaatagcaaaccaagctaaggtgtcccatgcagacttctcattcaaacaatcctcccagttcagcactccaagcaggagaagaattgagagtccaatcattgcagcaacaacactcgatacgccaatagcttccccaaaaatccatagtgagactgcaagaatcattgtaccaatcatgacccattcatttcttgttactgggcccatgttctttagtttctgagcagctaatgctggggcatcaggagtgtcctttatttcagggggaaatattttgtataacaaataaggagtcactaaaagcccaacaattgctggcaaactagcaacctttaaccaagttacccatgggtttgcaatcttaacaccaagctcctctgctaacttcagacacagaaggttctgcgcagctgctgtcaagaagagagcactggagttgctagaagcctgtaactgcgattgcacaaggtaggagcccagcttctttgccgatgggtcgttcggcttgctgcccgacgcgagagacagcgacttgacgatgggaaggaaaacccctcctgcccttgccgtggtgctgggcatggccggcgcgatgaacgcctcgctgatggcaagcccgtaggacagacccagcgtgctgcgccccagccatttcacgaagtaggtggcgacgcggtcgccgaggccggtcttgacgaatccgcgcgcgaagaagaaggagatgacgatgagccagatgacctcgttggtgaaggccccgaacgcggcggtgaaggggagcgtgcgcgtggcgacggtggcggtgaggccgaggaacgcccacgcgccgacgggcagcgggccgaggacgagccccgcgcgacga

SEQ ID NO: 12472 - DNA, 445 bp, Setaria italica
  Peptide Sequence Number=SeqID_78446
tttccccgttttccctcggtgcgccgccgcccagcagacagcgccgcagccatgccgctccacctgctctcgtctcccgccgccgccgccaagctcgccgcgggcttgcgcgcggcccctctccgccgctgccacagcttcgccccggctccccaccacccggaccgcgtgtccctggcgacttccctgtcagccgccgccgcggcgcggtctgccgggccggccgtggtagcggcgcagaccaagctgggcgtgtcagggaagaaacaagtgttgatatcgttgtcggataaaacagacttggcttaccttggcaatggtcttcagggcttggggtactccatcatctccactggtggaacagcatccagcttggaagcagcaggagtcaatgtgacaaaagttgaagaaatcacacattttcctgaaatgcttgatggaagag

SEQ ID NO: 12473 - DNA, 436 bp, Setaria italica
  Peptide Sequence Number=SeqID_78447
ttagaataatcgaacatccataaaagtcaatgaaaattcccgtgcatgcaagaactttgatttatcatggaacgaagcaagtgcgacaactctgtcagatatgttagaataaaatttctttccttgaattcacccccagacaccagtaggatatttgtcgccaaaaatgttcttcaaaagtatcaacattcatgctacctggctaacttcaccatctcaggaaataatatcttttccatggatgtccataaatcgttcaaacgatcaaaaattatatcccttggcatgaatatgggtcttttcatattccagaaaatgttcatgccaacaaagttcccatcaaattcaaaaagtgcgcccccctgcataacctagagaaaaaaatcatgtggcaggcaacaaggattacactggaacagaataaaatgaccaggtg

SEQ ID NO: 12474 - DNA, 230 bp, Setaria italica
  Peptide Sequence Number=SeqID_78448
tggcatgcagatagtgttgctgttgttgcctagggatgcacgttaatcttcaacttcatcttcatccgtatcaccttggaagagaagttgtttggttggtagcctggctaggaagagaagttgtttggttgcctgcatctagtttgagaatctcatgcaagagactgttggttatgcgcacacacctcctatttgatgtgagaatacctccatcactcctacaaaaaaaa

SEQ ID NO: 12475 - DNA, 224 bp, Setaria italica
  Peptide Sequence Number=SeqID_78449
aaatttccatccaaatcaacaagggggcctccaatcacagccttagtggttttacacgtagtgtacccaagatcataattcgcatcgtctggcactttgtgggttggtatgaatttgtgggcatcaattactatgatatagaaacaggaaccccgtacctgtctttttctgaaatctgggaaattttggaaggaatgttggatgatttgaagacaaataaggcg

SEQ ID NO: 12476 - DNA, 659 bp, Setaria italica
  misc_feature (427)..(427): n is a, c, g, or t
  Peptide Sequence Number=SeqID_78450
ctcttcctagccaggataccgcatgcagattatcttagcaacagacatctgttcaaatattctattaagataatacaatgaaattgcaatccaatccagataaaacgagcttatggcatgcagatagtgttgctgttgttgcctagggatgcacgttaatcttcaacttcatcttcatccgtatcaccttggatcaggcaggcgatacccagctgccattcaatgatatatttcctcacgtcatatcaggtcagcaattttctaaacaagatatgtttattacataataatagtaagatcgatgagatgtatcaacatacatgatttgtggttcgatgtcatatcccacacgggccttatgaccaccaatcgtcgccttatttgtcttcaaatcatccaacattccttccaaaatttcccagattcngaaaaagacaggtacggggttcctgtttctatatcatagtaattgatgcccacaaattttccatccaaatcaacaagggggcctccaatcacagccttagtggttttacacgtagtgtacccaagatcataattcgcatcgtctggcactttgtgggttggtaatagaaatttaccccaacttagacaagaccaattaaataaaacctagaattacaaaagacaaacggaca

SEQ ID NO: 12477 - DNA, 1639 bp, Setaria italica
  Peptide Sequence Number=SeqID_78451
aattataatgctccaatttccctgcagtccgtttgttgtttggaagcaacacctcaatctgcaaacaatacagtgagacttaagcagtgtcttggacgaacgagaatcacagtaaaattaggagtaccaacccttaagctgctcacgatctcattagcgccatcaggatccctaaccaagctcgctgaggttagaataatcgaacatccataaaagtcaatgaaaattcccgtgcatgcaaagaactttgatttatcatggaacgaagcaagtgcgacaactctgtcagatatgttagaataaatttctttcttgaattcaccccagacaccagtaggatatttgtcgccaaaatgttcttcaaaagtatcaacattcatgctaccttcaggatgcgagcgaagttccacacttgtgcttctttttctatgctcgtagatgaaacattaatacgagtattaacccaaaagggatcagcatgagtagatagtgtaataatacaactgagcaaatgttccaactcaggaaatactacgaacaacgcaggagagctgcatgtcatttcattaagagagaaaaaaacacaatacaaagggccaaaaaaaccctccaaacaccccaccacacacacccttgaaaaacaaagaaaggtacagacgcgacacgcacaaaaaagaacggccaacgactagcctgccccaaattaaggaccaagaccaagcaacctgcaaaggagctcctggagagcagaagctccagccatacaccaaaggctggcaatcttttgcaagactacctccactactggcctctctccctcaaatgcacaatcatttctatgtttccataattcccatgcaactaggataatcagagaattgagaccactcttctgctcctggggcactcttttgacagccctagaccaccagttagagaaacgggtggtatccagttaaacaaaatcttgagaccatactcccttgtaatgttcatattttaatctcaacaaaatattctaacattttgaatcagacaaatatgttggcttcaatatttgatacacaggaatatggctactctactctacaatacagagcaactgtgacgtgcctagtacagctcatctgtttgatattatcttacgctagaggtaacaaagcatcaagtttttattaagggtaacaaatatgttggctttaatatttgatacacaggaatatggctactttacaatacagagcaacttttgacacatgccaagtacagctcacctatttgataatatcttacgctagaggtaccaaagcatcaagttattattaagagtaaacactaaaagctgcaactgcaaacatagataagaaaactggaaatatattggcacacctggctaacttcaccatctcaggaaataatatcttttccatggatgtccataaatcgttcaaacgatcaaaaattatatcccttggcatgaatatgggtcttttcatattccagaaaatgttcatgccaacaaagttcccatcaaattcaaaaagtgcgcccccctgcataacctcagagtattaacatgactattacataagatgtccagaatcttcagatcggtctgaagcagtaagtgtcccacttc

SEQ ID NO: 12478 - DNA, 1091 bp, Setaria italica
  Peptide Sequence Number=SeqID_78452
ccctgcagtccgtttgttgtttggaagcaacacctcaatccttaagctgctcacgatctcattagcgccatcaggatccctaaccaagctcgctgaggttagaataatcgaacatccataaagtcaatgaaaattcccgtgcatgcaaagaactttgatttatcatggaacgaagcaagtgcgacaactctgtcagatatgttagaataaatttctttcttgaattcaccccagacaccagtaggatatttgtcgccaaaatgttcttcaaaagtatcaacattcatgctacctggtggacgagacatcgtataatagttagtgggacagcaaggctgtaaaaatgcgcagcacatgataactcagcaagcattgactcatgaccgtgccccttgatggactgagataaccaaaagtgtaaacccaaactgtaccttgcttatcctggtgcaacaaggttgattagcactggcatgtgttaaatcgaagtgcagcatttaacaatcacttaaagttctctacataacaacttaacattaaaatgttatggcaacttgtgcaacaactaatgccatctctactcttcaaggagctgggatggtcatggtgtgctctatgcacactcaatccagatctttctggatggatttattaaggatgcgcatgtagcattttacagcatagtgttgtactatctgcgtatgtgtatatgtaggagccaattgatatgattatatgtatataaatttttagaccagagtaaaattacttttcaaaatcagaacctgatgtatacttattcatgatcgcaacgcacaggcattggctgaatcgctagtgcacaagtaatgttaacggattaactcttaacactataatataactgtagaagactaaactagctatatagaagtacaaatgtaaaggcttaatttgaaccactagaggaccttagaaacagtgatgagttgcacaattaaataacatttactgatcaatattgggtggttgtgtactcaccttcaggatgcgagcgaagttccacacttgtgcttctttttctatgctcgtagatgaaacattaatacgag

SEQ ID NO: 12479 - DNA, 2145 bp, Setaria italica
  Peptide Sequence Number=SeqID_78453
gatgatttaatacgtttgaattgagatttaacaacattgaggagtgatggaggtattctcacatcaaataggaggtgtgtgcgcataaccaacagtctcttgcatgagattctcaaactagatgcaggcaaccaaacaacttctcttcctagccaggctaccaaccaaacaacttctcttcctagccaggctaccaaccaaacaacttctcttcctagccaggctaccgcatgcagattatcttagcaacagacatctgttcaaatattctattaagataatacatgaaattgcaatccaatccagataaaacgagcttatggcatgcagatagtgttgctgttgttgcctagggatgcacgttaatcttcaacttcatcttcatccgtatcaccttggatcaggcaggcgatacccagatgatttgtggttcgatgtcatatcccacacgggccttatgaccaccaatcgtcgccttatttgtcttcaaatcatccaacattccttccaaaatttcccagatttcagaaaaagacaggtacggggttcctgtttctatatcatagtaattgatgcccacaaattttccatccaaatcaacaagggggcctccaatcacagccttagtggttttacacgtagtgtacccaagatcataattcgcatcgtctggcactttgtgggttggtatgaatttcccacttgcagccattaataaacctgattcaaagcaacggcccacagctaccaccgtttgattatatcgtaccacctcaggcatcggcagcttcccacgaccatcaacattgtaattcttgaccctgactagagcaacattgtattggaaattataatgctccaatttccctgcagtccgtttgttgtttggaagcaacacctcaatccttaagctgctcacgatctcattagcgccatcaggatccctaaccaagctcgctgaggttagaataatcgaacatccataaaagtcaatgaaaattcccgtgcatgcaaagaactttgatttatcatggaacgaagcaagtgcgacaactctgtcagatatgttagaataaatttctttcttgaattcaccccagacaccagtaggatatttgtcgccaaaatgttcttcaaaagtatcaacattcatgctaccttcaggatgcgagcgaagttccacacttgtgcttctttttctggctaacttcaccatctcaggaaataatatcttttccatggatgtccataaatcgttcaaacgatcaaaaattatatcccttggcatgaatatgggtcttttcatattccagaaaatgttcatgccaacaaagttcccatcaaattcaaaaagtgcgcccccctgcataacctcagataatttacatgtagagaacataagatgtccagaatcttcagatcggtctgaagcagtaagtgtcccacttctggccattaatttgccagagatgtcacgccctactgctacaaccttgctaccaggcatcaattcctttgcataactgagaggtacgcaataaacatcaaggacgggtgtgactttgacaacagcaattacatgatccaggtcatattcttccacagtccctatggcaacatgtccttcatggcgtactttaatctcaatgtcatggacatctctttcatcatctaaagctctaaccaaagctgctgatgtcacaaactttgtgaagttagactggcattctatagctatgccagaggatgcaaatagcacatattctccatgggacaaagcaattgagacgacacttctagacaactttgatgcaatttcatcactcagctcattccagaaacctggaatcgatgagtcggttgagaatcttgtgagatcatcagcacccctcttgcttggcagcatctttccagaactgcgctaggagcagtagtagtcgaatttgcggctgccgtttacggaggtcgccggaccgccgctgaatcgccgccggcgctcgtgcgtgctgcgtcgcgctttcgcgggcgtggtagagtgggggtggatcgtcgccagcggtccgcggctccggcgggcggcggcgcgatgcgtgcgctgtgcaggtcagctgcggggcgtcgggttgggacaggcggctagggctg

SEQ ID NO: 12480 - DNA, 273 bp, Setaria italica
  Peptide Sequence Number=SeqID_78454
gaaaaccaatcgccactaccaccaccatcactcctccctcccccaccccctctactgagcgaagccaccgctgctgccgcgagctcggctgcagcgccacctcctcttcctccgcccgtctctcctcttccccaccaccaagcggtgtctcccgtctcgttcgttgcggcgacctgctcacagtgccccgccggcagaatgaccaaagatgaggagttcaagctggtcaagatccagaaccatgtgctgaggtgaacatacactgcgacgggt

SEQ ID NO: 12481 - DNA, 479 bp, Setaria italica
  Peptide Sequence Number=SeqID_78455
gaatatgctcgcatgtcaggagaagggagcagtgatagaagtagagctagtcagaagcgacatagatcattatccgttactcaagaccagttcagcgatagatatgatccccaaaacacatattctgatggagttcccctgatagacaagctttgtgatgctactgaggaagcacaccatcgcagacatcatgaaagaaagcatggtcaccatcactgaaggataatagagattatttttgctttctatgtcaggcaatcaatctgagcaatggggctagttcacaaactacttatcaactgatacaagttagatcattttgttgtagaatgtgcactccctagctacttttgtaccattttgagaaatatatagtgctgtgttcaagaactaccttgacattatgtggaagccaagcatcatgccaactttgaacagtcaacaatctgttctagaactaccgtgactttatgaagaag

SEQ ID NO: 12482 - DNA, 1263 bp, Setaria italica
  misc_feature (1249)..(1249): n is a, c, g, or t
  Peptide Sequence Number=SeqID_78456
tacttaaccgtaggacaaagaaagtgaatcgaaaccctacagagatactaagagacataatcgatgagcatatggaggaaatcaaacaggcaggaggtattggttgtcttgtggaaggtcctgctgacatagcaccaaatgtgcttaagagcaactctcatggcagtacatatcaaggaagttatgatttttctagcagctcttctcatgataaggcagcattgggttctcggtcatctggttgtaacaagtcaccacgttctgattctttgggaagattttcatcaaggagccgtgacacaagagattcgtacaagacctcaagatatgaaactcatgggaagcgttatttatctgagaatgaaaataggtggggtgtaggatcagaaagtgaaatagatcaaagttatccttaccagcaagagaaccatagacgtcaaagaagctccaatgataatagaaattatggttataagaagggtgtctcagaccaccgtcctgaatctagtgattgttcaacacaatcacaaagatcttctgtcacagaatatgctcgcatgtcaggagaagggagcagtgatagaagtagagctagtcagaagcgacatagatcattatccgttactcaagaccagttcagcgatagatatgatccccaaaacacatattctgatggagttcccctgatagacaagctttgtgatgctactgaggaagcacaccatcgcagacatcatgaaagaaagcatggtcaccatcactgaaggataatagagattatttttgctttctatgtcagtagctaaataatacagggctctgggttattagccttcagctgtatccttttatgtatcctcatgcagctttataacttccttactttctcaattaatctctgttgcagctggtacctttctcaggatctattagctgatgaagttttgccttgttttacaaatttatttacaccgatcaaggttcatattgtgctgtcttgcaaaaatcagtcatgtttatcttatgctaatggttattttaattatatcactgctaatgtttcggaaatcggaagcactttctgctaatgttcaagaaatttttgttttaaaattaatttattctgttatttttacccagtatgagctggcaaaaggatttcagctgtctgccttttgctcaactagagttcagagtagtttttttcctgcaggctcttgttgttttttttgtatctatgcaagtttancctcacctggttaa

SEQ ID NO: 12483 - DNA, 690 bp, Setaria italica
  misc_feature (636)..(690): n is a, c, g, or t
  Peptide Sequence Number=SeqID_78457
tgtccttattgtcttttgtttaactaattagtttgtccttgttgcctctattagcattaaagcttgctggcaattaagtttcgatccaagaccatccttatttgtgcagatatgctacctctgcacttccaatgttgtgtaggtagtttttcacaattcagccataggttactgcctaatgtgctctcatgacaacactttttctgcttttaaatactaactgattcacgtcaatttcatatgctattccattcagcaaaaggtgtataatttgttgacatattattctgtctcaaaacatatctaatttgctatcatatttcttgtaggcaatcaatctgagcaatggggctagttcacaaactacttatcaactgatacaagttagatcattttgttgtagaatgtgcactccctagctacttttgtaccattttgagaaatatatagtgctgtgttcaagaactaccttgacattatgtggaagccaagcatcatgccaactttgaacagtcaacaatctgttctagaactaccgtgactttatgaagaagatgcgatgttttcttactctgcttaaattgttggctgaggcattcgaagtaatgaagatgaacggggttgttgatttcaacnnnnnnnnnnnnnnnnnnnnnnnnnnnnnnnnnnnnnnnnnnnnnnnnnnnnnnn

SEQ ID NO: 12484 - DNA, 1156 bp, Setaria italica
  Peptide Sequence Number=SeqID_78458
aatgtgcccagaaaggaagacaatgtggctgcttcttttccaataggcaaacctgaagtgttcaatgaaactggtatgcgcatgcccttaggcatggtccacaactttagacatagagttaaaccacgaggacgtctgcctttattctgagatgctacctgcagtttctgtccttctgaatccattgaatcatgcaggtgtgactcaccagaacttggcccagacatcatatggtgaagcaatgacttggatgatagctttgcaagggcccttctaacatccataggaatataagtatgagcaaaatgctcaggatcagacatgtcggggtttgaagaaaaatgcttaggatcagacatgtcagggtttgatgagaaatactcaggattggacatgttgggatttgaagaaggtattggagttgaatgaaggttctccaactcattagagcttgtttgacgaatctcatgcaaaggagatgaactagtagataaattgttgatgattttatcagtatctgacggatcaggtgaacattgtcctggagatgcagtccactgctcatcaggctcactttctgtcagtttgtcatctataacaggttgtctgtcaatggcagcagatgaaactttcgccaaacgtctgctacgcctaagctgaagacctgaatttgatgcagccatcagacccttccgtttcctcgtgtgaactctgtgatgtcctggctgttcgttttctacacgagttacttgattatccagttccctgtgaatcacagaatcagattgttctttccgcatctgatgtgtagcatcatttggcagcccctgtctcttctctgcacccatagcattgaggtcaatcaactgcctagttatcctcctgttgttattgtctgcaatagtctcatcgcccagtcgagtgcatgcattttctctgtggtttgcttcatttccaggctcctgttgcttttcctgaacatgaattgccctatttgaagattctgtccgagcatgttccggagatgtcacattgcaaggaagttgtctttgtgacttctgcatgatctgtttgggagtctgcatgtttctcttctcaagatttacagttttggggcaaatggagcgtccttagtcttgtacttagttgtcgtact

SEQ ID NO: 12485 - DNA, 353 bp, Setaria italica
  Peptide Sequence Number=SeqID_78459
aaggattcaggcttccccaagaagcagtttcttgcgtcgcccaccaaggcgaaggccgccaacggcaagggcggcgacggcgttgctccgcttggcgatggctttggtgatctaaagtccaaggccgagggggagcagcagcgggcaggttttggcccaaagagcccggattcttgtacgcgtgatgaatctttgctttctttggttgttttctgaagcgaggtcccgatctttatcttttcagtcagttattactatagtttagagaggatctttggaagtaaagaagcagatgggcagtcagttctttatatgaaaagggtctttttgggttcgtttattgatttattggg

SEQ ID NO: 12486 - DNA, 594 bp, Setaria italica
  Peptide Sequence Number=SeqID_78460
aagaaaaaagaacagcagggatgggttcttgcgcttcggttcaaaacaaggattcaggcttccccaagaagcagtttcttgcgtcgcccaccaaggcgaaggccgccgaacggcaagggcggcgacggcgttgctccgcttggcgatggctttggtgatctaaagtccaaggccgagggggagcagcagcgggcaggttttggcccaaagagcccggattcttgcagcaaggatgaagtgttcttcgagtctcgagcttggttagattcagactgtgaggatgacttttacagtgtgaatggagatttcactccatctcgtggcagcacaccgaactaccaacctagaatgcaaacagtgatgaccaacatctttcaactggacaattcagacaagtccaaatcaccagaaccttctccaactggcaggaggaaactagccgagctcctgcaggaggcgatgcaaaatggccctgaagaaagaaccgatgtcagcaagaatgagaagaagcagttgcaatctgtcgctgcagacgggaagccggtgtctgaatccacatccagctccacttgcagctcggcaggcaacagcacc

SEQ ID NO: 12487 - DNA, 1370 bp, Setaria italica
  Peptide Sequence Number=SeqID_78461
tacgtacctgcccgctcgccttcgtcttcttccctgcacgagaatccgcctcttcaccttttcctcccccacgttgatcctcctctcgccccctttctcgattctttctccgtaggatctttcgctaggagtagcctgcctcgtctgcgcgcttgaacggacatgcttattgttgcggcttgaaaggggagaaaagcggggatgggttcttgcgcttcggttcaaaacaaggatccaggcttccccaagaagcagtttcttgcgtcgcccaccaaggcgaaggctgccaacggcaagggcggcggcggcggcgttgctccgcttggcgatggctttggtgatctcaagtccaaggccgagggggagcagcagcgggtaggttttgaccccaagagcccggattctggcagcaaggatgaagtgttcttcgagtctcgagcttggttagattcggactgtgaggatgacttttacagtgtgaatggaggcagcaaggatgaagtgttcttcgagtctcgagcttggttagattcggactgtgaggatgacttttacagtgtgaatggagatttcactccatctcgtggcagcacaccgaactaccaacctagaacgcaaacagtgatgaccaacatctttcaaccggacaattcagacaagtccaaatcaccagaaccttctccaactggcaggaggaaactagccgagctcctgcaggaggcgatgcaaaatggccctgaagaaagaactgatgtcagcaagaatgagaagcagcagttgcaatctgtcgctgcagacgggaagccggtgtctgaatccacatccagctctgcttgcagcacggaaccaacgccgaccgtggtcgccaagagccggaaggagaaggcatggtactccgggcgctgttgcctgccgagctttgttcatagcctgaccttagatgagagtgagagggggcagaagatgagctctaggccatgtgctatttgacagtggtgctccagtgccctcctgccctgagctgtatttagcacgatatattgcccgatctggaccctgaagctactgtaaagaagtgggggagtattaagagtactatatccttgtaggaatcaagtggataatagctacccgttaaattgatgtgcactgcatgttgatcaactgcaagagtagaacatctaccctgtgcatatcttctcgaatcttcatggatataaatatatatattttcagatgtcaactgccagcatagcaagggcatgtcagcatgtgacatgtgggataccatgcctttcaatagttcatataatgtgattgaattgtgatgccctattggcatttgcatgattgacgaccaaaaaaaaaaa

SEQ ID NO: 12488 - DNA, 847 bp, Setaria italica
  Peptide Sequence Number=SeqID_78462
cttctgctcttcccctgcctcgccctatactcctgcttctgctcctactcctgtttctgcttctgcttctgcttctggaacgacttctgttcctgcgtgatctattccaaacccctcttggagatggactgcgactacgaggcctccatgcatctggatcagaaggcgccctagaagaataaccacgattacgagctgtaccccatccatcaccgcgtcttctgtcatctgcatatctgttcatgccttggttagcagctgccttgctccactcatcacgctcatcagccgctctgagaagctgtggtctttcagagggtgccttaggttgcaattccttggtatctttattgaacccatcagcctgttccttctcatgtccagcaccaccatggtgcatggaggtatcaggttttgggtgtacatcacctttacggtgaccacctgtcttatcaggaagagactcatcttcgctgatctcaactatatcatgaggtccttctttcgcatcccacttggaacgctgtttcctactatcaccagccattctgtcccttctttacaaatatgaaaaaagaaaatggatgccaagtaatttccagaacaagatccccttcctccttgcaaaaattcttccgaaactctgaaactgtagccggcagtgtccctgagatgatacgtcagacctctcctgatcgcctggcagaattcatgagaccttacaccgcttactgtccatcgcctagcgaaggcaccagtcaaggcgcgggcggatctccactccgcgccacccgacgcggcgccagccgagtagggggaagaggaggacggccacttgcgcggaggg

SEQ ID NO: 12489 - DNA, 838 bp, Setaria italica
  Peptide Sequence Number=SeqID_78463
tttttttttttattcacaaacatttcaattttcattcgccagggtgtttccatatcaagacacatcaaagaaatttcttttgtgcaacttatcattacaactcaaatagaccatacatcctttacagataataataagaggactacaggccaccacactgacaaaacatacatctacaaaattaagtcctgactatccagaaaatatttcaagcagcaactgcagaaatcttgggcatcgacaagttgcatcaactattgagttccagcagttttgccaaacttggtggatacttaaggttcagttgctactggctctgattgtcatgacctgggcagggcactgctattgttagcattacagtgaagttttccctcaattgctgttttccgatgactttgccaacttggtggctattaacatttcatttgtttctttagataattgctagctagaatcttgagggctaaaccaaaaggccagtaactccaaaaagtggcatttacaaaatccttcctgaaactgtagccggcagtgtccctgagatgatacgtcagacctctcctgatcgcctggcagaattcatgagaccttacaccgcttactgtccatcgcctagcgaaggcaccagtcaaggcgcgggcggatctccactccgcgccacccgacgcggcgccagccgagtagggggaagaggaggacggccacttgcgcggagggtctcggccaattgcgcggagggcgagggcgagggcgagggcagtggcggcggcggcgtggggagggggaggcgtttcggcggcgggtcggcgtgggggaggggaacgcggagagcggc

SEQ ID NO: 12490 - DNA, 430 bp, Setaria italica
  Peptide Sequence Number=SeqID_78464
ttgttgcaatgtgtctgttttgaaatgttgcacgaagcggttcgagatgtttcatgcacgtaaaggtattgcaatcctcgtgttgcaagtgttgatttttgatgtttcgatagttattgttcaatgttgcgacgaagcgtccgataaaaaaaattatcggacgtccgggcgctagtacgtccgttaataaataatacttctgtaaattccccattacaaatagtgacatacaagaaataatgacgtgaagcaaacttcttttcaccatcaatatacataataaaagtctatatgtaactacaaattagtgattggtacctgaattgagccgcagcaattttctgcacaagtcaatgcaaccatggctcaactcacaatcagatgggaattgtatttcacgtgacctgagtatatttttaagcagctggat

SEQ ID NO: 12491 - DNA, 523 bp, Setaria italica
  misc_feature (484)..(484): n is a, c, g, or t
  Peptide Sequence Number=SeqID_78465
tggcattggtgaactcaataaagttaacttaggtggcgaaacagacgaattatcatattttgttggcaagttttgctgtcgagaggcatttgttgaagaagatgatccctctggtccagacacaaagacatattcctgatctacaaactctaatgaatcaatcataggggaatcttctggatagccacctttacgaccttgtacttgatcaacattgccttcctttgtcttcttaccagcatggtcgtggtgttggctactaggtgcatgattattacccaagacatatctggagaaaagaccaacatgcttcgatggactctggcctgaagttttatccaatcttttacccacagggaacccataagatttcatcggactcttactttcaggtactggactctcatcctgtccacttgactcatcatccaaagggaagcatacaatcttcttgagaactttggcttgaaggcaaatctcttangtcagatggagaccggctcaaggttctctccggagcatg

SEQ ID NO: 12492 - DNA, 1365 bp, Setaria italica
  misc_feature (1)..(47): n is a, c, g, or t
  Peptide Sequence Number=SeqID_78466
nnnnnnnnnnnnnnnnnnnnnnnnnnnnnnnnnnnnnnnnnnnnnnntttttggtcgtgtaaaagcccaatgggtaaataaaaaaccaaccaacgtagcagtcaatctgtttacatttccacaaatgactattgtcttcagcttcttgctaaattggcacagaatgaacctaccatgcacaggcacagcacgaccttcacgtcacagtagtagcctgggcgagttacactggatttttgctgctctgcctaattccacatttcctgacatcttacatgccctagtttgggcaaacaaatatatttacaaatgaaagaatattgtacaagtccactgtcgcttgacctgaacaagatctcgagggtgcacggcagtggttagtgcctctggctccgcatctggccaagcctggtgttgagagcttcaatgtatgttcgcagccgatgccgatcggatcttgtcagagtcaaagggggattgagggcaagtgatggtgcctcgatcaggagaaaccgcagcatggatacagccctcgtatacccggtcatggcatctgctgctttcccgaacatctcatcaacaccaccacgccttcctatatgcaaggcagactgaaatattatttcgatcgcatcaggcatctctgtaccatcagctatctgtcctacagtgctggctagtccttcagcatattcaacatcactaagaaactgtctctctatctgcatgcaggcatcatcagccagttgagagtttccgagcaaatggggagcatcagcacttagccccttcatagggatatcctgggaaggagaatctcttgcagttgaagctacaaatgtattgcataaatgaattgcttgcttccaggttgcaagaacaattagctgaatagagaacgcctccaagtgtctgccagctttgatctcatctttgaccaaaaacgatatggctgatgcatactgctccaatagtctaatccttgccggatgatcagatgggggctgatccatggcatcactcatatctgcggatccttgtgaggtgccagatgctggagaacagtggctatccaagctaccagtcccagcagactgttgtctattaatcggcaaaccatttattggcattggtgaactcaataaagttaacttaggtggcgaaacagacgaattatcatattttgttggcaagttttgctgtcgagaggcatttgttgaagaagatgatccctctggtccagacacaaagacatattcctgatctacaaactctaatgaatcactaatttgtaaatctacatttacaaagtaaagaaataataaattcagtacaaaatattcataattataataagaatgtgca

SEQ ID NO: 12493 - DNA, 572 bp, Setaria italica
  Peptide Sequence Number=SeqID_78467
ttcaatagagaattttcattattttcaacaagaagaatgttctgtttgcaaaaccacaaaattcagagtccaataaattagataaatttaaccaccatattattcttgaactcttgaccatgaaatattcagcaactgtgggaaattaaactaaaaatcaagtaaaataacctgaggttttaggtctcgatgaaccacgttattgtcacgaagcatttgcagaccagatgctggaggacggatgggaggatttgcgactaggccagaaactcttttatgacgttgaaggtatccatgtaagtcaccacctcgacaatactccaatatgagatatatcctcccatgatccttgatggagtcgtggagcgcgatgacgttggggtgccggatgcggcggaggatgtcgacctcggagaggaggctctcgcggagcttgctgctgagccgctccatggcgatctccttcaccgccacctccgcgccccgcgcccggtgccgccccagccacacctgcgagtacgcccccgacccgatcggccgcagcagcttcgttacttccccctacccgttct

SEQ ID NO: 12494 - DNA, 1301 bp, Setaria italica
  Peptide Sequence Number=SeqID_78468
ttagttatttgggttaattttgtttatttttcttacgtttgtaccttgtagttattatttttgctgtcgagaggcatttgttggaagatgatccctctggtccagaccaaagacaattccttctggatagccacctttacgaccttgtacttgatcaacattgccttcctttgtcttcttaccagcatggtcgtggtgttggctactaggtgcatgattattacccaagacatatctggagaaaagaccaacatgcttcgatggactctggcctgaagttttatccaatcttttacccacagggaacccataagatttcatcggactcttactttcaggtactggactctcatcctgtccacttgactcatcatccaaagggaaaggcatacaatcttcttgagaactttggcttgaaggcaaatctcttatgtcagatggagaccggctcaaggttctctccggagcatgttcagaaagaaatgggtggtgcacaaactcttcaactgtaagccgctccactgaattgagccgcagcaattttctgcacaagtcaatgcaaccatggctcaactcacaatcagatgggaattgtatttcacgtgacctgagtatatttttaagcagctggatctgattatccccattaaaaggtggaattccagtaacaagttgatatagaatgacaccaacactccatagatctgcctttgcatcatacttctgtgcttgcatgacttctggagccatgtaaagtggtgaaccacagagtgtttcagcaagggcaaatggttgcagaaacttgcaaatccaaagtcggcaatcttcaacagagaattttcattattttcaacaagaagaatgttctgaggttttaggtctcgatgaaccacgttattgtcacgaagcatttgcagaccagatgccagctgacggatgaaatgcttcgcgactgtttcagaaactcttttatgacgttgaaggtatccatgtaagtcaccacctcgacaatactccaatatgagatatatcctcccatgatccttgatggagtcgtggagcgcgatgacgttggggtgccggatgcggcggaggatgtcgacctcggagaggaggctctcgcggagcttgctgctgagccgctccatggcgatctccttcaccgccacctccgcgccccgcgcccggtgccgccccagccacacctgcgagtacgcccccgacccgatcggccgcagcagctcgtactcccccacccgccgcccgcccccgcctccgccgccacggccgctcgcgccgtc

SEQ ID NO: 12495 - DNA, 585 bp, Setaria italica
  Peptide Sequence Number=SeqID_78469
atcgccgacgccttctggggcaactacatcaccatcctcgtctccctcaccatctacgttcttgggatgatcctggtgaccacctccgcattcctgcccactgccacggtgctcggcggcggctctgtgtttggcgcgcacaccgtagcgttcgtggggctgtacctcgtcgcgatcggaagcggcggggtgcgggcatcactgctgccattcggcgcggagcagttcgacgacgacaatgcggtggaccgtgagagcaagttgtccttcttcagctggttctacctctgcgtcgacttcggcccgatcgtctctggcctgttcatcgtgtggatccaggagaaagtcagctggggcctcggcttcggcatctccaccgcctgcatcgcgctcgccttcggcgccttcgtgctcgccacgcccatgttcaagcgccccatgtccaccggcaaggtgtccgccgacgctggcatgctcgacgaagtcagtgataaggtggacatcatctccgagtcgggctttaaggatatagcggaggaggcgggttcgtcgtggaatcttcgagccatgatgcagggggaggag

SEQ ID NO: 12496 - DNA, 374 bp, Setaria italica
  Peptide Sequence Number=SeqID_78470
gtttccactctgcggtctgcataggctggttgcagacttgcagttgcagcacgatgacatgtatctttgctggctttgctgctcgtgcagtgggacaggatcgaggacaagtacgcggtgaccacgctcgccgtcgcggccacgctcggcatgtggagcgccggtggagtagtatcggcgattgacaggctccccgtggttccaggcctgatggaggctgttggaattggatacagtgggtggttcgcgtaccggaacctgctattcaagtctgacagggatgctttctttgcaaaggtcagggaggtctacgaggatataatcagcggctaataggtcctcgtagagtgaactttagtttttgttgagcttgc

SEQ ID NO: 12497 - DNA, 502 bp, Setaria italica
  Peptide Sequence Number=SeqID_78471
ggaacgtggtggccatggccgcgggggagccggcggcgccgaatgctgccaacgaggagttcaccgagttcgtcaacgccctgaaacaggagtgggacaggatcgaggacaagtacgcggtgaccacgctcgccgtcgcggccacgctcggcatgtggagcgccggtggagtagtatcggcgattgacaggctccccgtggttccaggcctgatggaggctgttggaattggatacagtgggtggttcgcgtaccggaacctgctattcaagtctgacagggatgctttctttgcaaaggtcagggaggtctacgaggatataatcagcggctaataggcggagcactaatgcaagctcaacaaaactaagttcactctacgaggacctattagtctgctgctgttcagtttgttgtccctgtatattttcagttagagcatctaatttgatccttactcaatgtatggataaataatttggatattactcgtacataacaa

SEQ ID NO: 12498 - DNA, 466 bp, Setaria italica
  Peptide Sequence Number=SeqID_78472
ttagttaacttaagtaagtaaaattagttagtaaagctgagtaatgtgaaactgaacaaggtgcaggtgccttgttcagtgtgtacaaacagaagtttggttttgcggaagctggaggactatcagctatgagactgagcaaatatgtcgtgcggaagcagaagtttggtcgtgcgaaggcgctgtccactatcaattataagattgcggatatgtgcggcgggctagcatttgatttttgtccgctagcagtaatttgtttgtcgtcagcatgggcgggccaccatgatgcggaatgggatacatgggcaagccacgttctggatgatgggtttctgagtactccagccttgaaaccactggtccagagtctatgccttggtttcgacgatcttcccgttcagctgaggacttgcttgctatactgtaccatatatcctcggcggtataaggttgataagggatg

SEQ ID NO: 12499 - DNA, 651 bp, Setaria italica
  Peptide Sequence Number=SeqID_78473
gagaaaaatcttaatcatatgcaactaacacaaacatgctcatgctgactttgctctgacggatggctttcaggatcagggtaacccatattgggcaatgatgcatacaaactcgtacaagtatggatattctgctccaggaaactactatagttacgcccatgtctacgacatagatgattacatgcatagagcagatggtgggcgcagaatatgggataacaccgcacctgtaacaatgtggactctgccaatgttgtactgcagggtggtgaagctccccgttcaactgcaaattctgctaccgaggaatgcatccaacaggtacaccaaagtccgggcagtcctcaggttgtttggcaagataacattgaccctgacaatatgacatatgaggttagtgacttccctgcaccaatcttttgtccatgttctcatgctggttatctcaggtaaaacagatacttaaaatatgtatccctgtacctgttgctctgctttagacctgtacacttagctacataggctagagactgcataaattataccatgcattgttgtaatcatttgggtgcttccacgaccaagttatcatcaaatgctcaatttaaaatggaggcttattggcttcctttacttgtctaccgtcct

SEQ ID NO: 12500 - DNA, 510 bp, Setaria italica
  Peptide Sequence Number=SeqID_78474
tgcaataactttcagtatggacataaccgttgcctgaatcacatgaagtgcattgtgttaaagtattttttcccttattcatttttaagccttatgataaccagttttctatgttcttaggttaactttgggttaaaggatgtgattctcatgacatttggacaacctcggattggcaatgctgtttttgcttctaatttcaaaggacatttgccaaatgcaatccgagtgaccaatgcacacgacattgtgcctcatttacccccatactaccgctacttcccacaaaagacataccaccattttccacgagaagtatgctttttgtttgtttcccttttgagttatataactgtctcttcttgatttatagcacatatatcaagtatattgttctttcaggtatggattcatagtgttggcctaggaagtttttgtatattcaatagaggaaatttgtgacggttctggagaagacccagcttgtagcaggtctgtgagtaaggaaaa

SEQ ID NO: 12501 - DNA, 1458 bp, Setaria italica
  Peptide Sequence Number=SeqID_78475
attacttgccctatactcctcaaactcgaattgtgtatggatggctcctaaatccgattcggcgcgcacctaatcccgcaatcattgatcctcgccgggttgggccaggtccttcgcgcaccagtttcactggatttggtctgaggcgtattccgtcgttattgcgccgaatttgggcaggattttggttttcttcctcgcaattcgggggcagtttcgccctggttcttgcgcggcggctcgagggtatggagccgcggaggtggctcgcggccgctgttttgatgtgcgtgctagtgctttgcggcgggagagaactgaagaccaaacatgcgcccatatatgacccagcccttgcccggacgcttgctgaatatacttctgctgtctatactgctgacctgacccaattgtttacatggacgtgtgaaagatgtggcgacttaacggaggggtttgaggtgatagagctgattgttgatgtgaaaaactgtttacaggcatatgttggatttgctagagatatgaatgcagttatagttgtgttcaggggcactcaagaaaacagcatccagaattggatagaggacttattttggaaacaacttgatctcgactacccgggcatgcctgaagcaaaggttcacagtggattttattctgcttaccataacacaacattgcgtgacggagttgtcagaggtattcaaaagaccagggaagtctatggtaatattcctatcatggtcgcaggacactccatgggaggagctatggcttcattttgtgcccttgatcttgttgttaactttgggttaaaggatgtgattctcatgacatttggacaacctcggattggcaatgctgtttttgcttctaatttcaaaggacatttgccaaatgcaatccgagtgaccaatgcacacgacattgtgcctcatttacccccatactaccgctacttcccacaaaagacataccaccattttccacgagaagtatggattcatagtgttggcctaggaagttttgtatattcaatagaggaaatttgtgacggttctggagaagacccagcttgtagcaggtctgtgagtggaaacagcgtgcaggaccatatacactatcttggcatcagtatgcatgccgagtcaaggggacattgcagaatcgtcacggatgatacatctctgcagtataagatggatcctaatggcaacattgtgttctccaagcagcctggtttatcagacgatgagctacatagtgcacagtgaataaactcaagatggcatgaatataagttccctgtgttgctctatgatccctattctgataaattcagaggggatataggatgaatgactttgcagatagttatgtttggtcacggaaaatgtgctggtagcaatcttcatttataggtcttgtcagctgtatatacattgtatatatctc

SEQ ID NO: 12502 - DNA, 565 bp, Setaria italica
  misc_feature (535)..(535): n is a, c, g, or t
  misc_feature (561)..(561): n is a, c, g, or t
  Peptide Sequence Number=SeqID_78476
ttttttttttttttttaaattcgagaacgtattatgcattgccatttctctggagccatgcgcgtacacgaacacgcggaaaaaaagaaggaaaaagaaaacaagatccacagctctatacacagctaaaccaagaagcgagcgacctgcaaaatcatcggtcaccagatcttggcgtcgaggacgtccgctccggcgtcggctccgacctcgtcgcccgcgatctggtcgagcacgagcacgatccccatggcgaaggccgcgtcgaagccgggcctcaccttgagcacgaacacgtccctgcccatgaccacccgcgtcccctcgtccaccttcctcttgatctccgccaccatcttcgccttctccccctcggccctgggcgccgccaccacgcggcagcaccgccgcgcgaaggatccgtcgacgcggagcagctcgggggcgcccgacgacgaggagagcggcgggaggagctcgacgatggcccccgccgcggcgccgccgaggattagagaccggcgggccgagaagngcggcttctggccgtcggcgcggganccca

SEQ ID NO: 12503 - DNA, 236 bp, Setaria italica
  Peptide Sequence Number=SeqID_78477
gctctggtcagcagtaatccaattaatttctttgaactgcatgtatatccacgcatgattcagctcttgatttgcatatgcatctgttcctgcgtgtgactgcagcatgagaagcacaaggccaagaaggaccccgagaacgagcacggccaccggatcaaggaggaggtggccgccgtcgccgccgtgggctccgctggctacgccttccacgagcgccacgagaagaaggaccg

SEQ ID NO: 12504 - DNA, 244 bp, Setaria italica
  Peptide Sequence Number=SeqID_78478
caccatccccggcaagcaactagcatttttacgggatccaacttcctctactgcttgcagatcaacatagagaatgtttgtatttgctggatagctaacctgcaaactgccagcagttactgtaggttctgggatgccatacttttcaaactcagtgtactcaatgcaagtgacctattctcttcctgaagaggtgatgtacaagaatagatatttgacaactttcggagaacgagtgttctcc

SEQ ID NO: 12505 - DNA, 410 bp, Setaria italica
  Peptide Sequence Number=SeqID_78479
ggtgtatgatgtcccagaatggacctaaagcaggatgaagaaatatgggtaagggaaccaagaaatgcaaatactcgctgttatctttgaccatgggaacatctatgctgcatccagaaaggaggtcatgagcattacgcataatgtcaaggagtgaaccctctggagtctggtgcaatgatctgccttctgatttcagcttctttttagctgatgaagtgactcttttcctttcattgtatacaatgaaagtgtcaagctcactttctattcctttgctgcatttgtagttatatgtgttcataaaattatctgcaatattttgcattgtgcactctagcctgcctccagcagcactacactcaaagcccagatggtccacataagatactgactttttcaaattcagc

SEQ ID NO: 12506 - DNA, 1470 bp, Setaria italica
  Peptide Sequence Number=SeqID_78480
ccaaaggatgtccgagaaaaaactatcataaatcatatatattaaaaaatggtgtaagtgttcccccctagaataaatcatcttcaaattagaggttacaacaagacagatagaaggtcgtcatctctaatctgcagtcctgcatgggatagcatgtgatctatgcattgctcgcagagtaagacattaacctggtgcaatgatctgccttctgatttcagcttctttttagctgatgaagtggctcttttcctttcattgtatacaatgaaagtgtcaagctcactttctattcctttgctgcatttgtagttatatgtgttcataaaattatctgcaatattttgcattgtgcactctagcctgcctccagcagcactacactcaaagcccagatggtccacataagatactgactttttcaaattcagcaccatccccggcaagcaactagcatttttacgggatccaacttcctctactgcttgcagatcaacatagagaatgtttgtatttgctggatagctaacctgcaaactgccagcagttactgtaggttctgggatgccatacttttcaaactcagtgtactcaatgcaagtgataccatatgaccacagtccctcgtggttttgtttctcaataagaacgttcaccccttcagtagcacccggtcttcgctcacaagatgcaaaacctaatttcttattgcatcggaggcctattcctgccaatgccatcatggtcaaatcagttgcagcaacaacattgctgacttggcgtacagttgcaccctttctgccacgtcgctgtaaccattggaatatacctctatcatatgcaagtttccagatagcaccatgaccaccaggtttaccaacagggaaaagtgatttgctgattaaccatttaccatcctcagaatttactacaggtaccaatggctgttcaaacaaccggaaattgtcacggcctcggccaaaccaatcaagtttttcacatatcgtaattatatgctcatggttattcttcactgaactagtcatgattgcaaccggggttatacattgatgtccaaagatcttgaagtgaagaaactctctagcctgcagatcccgtatcagcccttccaatagagacctcccacagtaaggaagcaatgcagcaggaagggattcaccagtatctgagtccactaaaccaagacgatcacccgcaccaccaatcggataaatttcacccagttctggcaaacccttgattccccacaaagctgcttgagatgcatactctgtatcctccaatagattaagtccactgggaacatggaaatcaacaaacttgtctttgctaggtcggtgcatgcggtcctttgaggctgaaaggagctccaatgccataatttgatagccgatgatacccccaatgcagtcgtagaactcctcgacgtcgctgaggaacttaagcaga

SEQ ID NO: 12507 - DNA, 1083 bp, Setaria italica
  misc_feature (17)..(17): n is a, c, g, or t
  Peptide Sequence Number=SeqID_78481
tagatggaagccaaacngaaaaaaaaaatgttatttgacaactttcggagaacgagtgttctcctcatgtttgaaaatatctattcttgtacatcacctcttcaggaagagaataggtcacttgcactgtacaaaatcaatacccccttatcttttacaacaccacctacaatctggactaaagtcaaccaacgtcatgcgtgccggcgtgctctcaataaaattaagctggctggaaatcaatgaatcaagaatctgtgattgatattatgtccttatagttctatcaaattcaacttcacatgggcaccatcgactgtatacttccagtgccaggttccactgtccatcatgtcctcacttataggatccaagttaacaacaaaacctgctctgtcctgaatgatgcacattctctggccatcgggaacttcaaatacatggttacccttcaagactacatcctttgcctcaaattccgcatttccatgaagaataatttttacagattccgatctctcaacgtcatgcttccaatagacattactaggagaaatccaattgatcccttcattcacaattttaacattctgcagtctgcatctcccacaccttgcaccatagtgcagtatttgttcaccatttttgttcttcttggttgaacccatgatgttgtcagctagaataataaggcttccatccagctcaacatttttccatagaaattctgcaacctctatttgcaactctgaacctttagaaatagagccacctatgaacttttggtgtatgatgtcccagaatggacctaaagcaggatgaagaaatatgagaaatggtggtccagaatgcaaatactcgctgttatctttgaccatgggaacatctatgctgcatccagaaaggaggtcatgagcattacgcataatgtcaaggagtgaaccctctggagtctggtgcaatgatctgccttctgatttcagcttctttttagctgatgaagtgacttcttttcctttcattgaattaccgacaatttaccaatagaaagaaataaattttttaactaagtaatttaaccta

SEQ ID NO: 12508 - DNA, 499 bp, Setaria italica
  Peptide Sequence Number=SeqID_78482
ttagttttacttaacttttttaggttaagttacccctttacgttaaaacttaatatttaagttgatgggaaacctcacttgggtaccgataaacttgttcctctcctgcgaaacttcaggcactacttaaaagaattgggtgttaccataagatttaatgctagagtagatgatcttatagtggaagaaggacaggtaaagggaatcgtggtctctgattcagaactacggccgggttctggcagccagaagctatcatttgatgccgttgtattggctgttggtcactcagctcgtgacacatataacatgcttcagcagcataatgtcgacataagcccaaaaagttttgcagtcggcttaagaattgagcatccccaagaactgataaacagtatccaatactctgaactggctgctgaagtacagaaaggacgtgggcggatacctgtggcagattacaaaattgtgaagtctcttggtgaaatagatgcagggg

SEQ ID NO: 12509 - DNA, 855 bp, Setaria italica
  Peptide Sequence Number=SeqID_78483
tggagggagtacttaataataaaggcttttcttgtaggatgcttctttagaagctaagtcattccgtcttgctttcgcattggttttggtagctgtttcgttcatgattatatcactaagacaagcacggaatgatgctcgccacttggtgttgtcacttatgtgggccggtctttgcattggcatatcacgatatgtaagaaccaatggccgtatgttctgcaatcgaccccgtttctaccagtcacgccattgatcggtgcagagggatcgttccacgtcaagtgagcttgtccaacttgtcacgacacaaatttttctgaagattctattcattcattctttttgtaaagaacctggcctccccaattttgtttcaacccttaacattcttttacacattgctgcacaatttgctttcgtacacatagtactatacctactaatatatctggctcaacctctcatgatggttgttcttaccatactttcctcacggaaggaaagaattgatgcatataattcataaaaagcatcaccgacattcttaccgtagcaaatatagtatcttgactcgaactagctagcttatgttttacggcctttattttattgtggcgaaccagttaaaactaatgacttctggaaggaacaactcattgtggtgttgtaatgttgcagcgaaaactgtttggtggtgttgatttgtaggagagaacgtctggaaattctgattgcaccgtcgatgcacaaaactgaagaccatgtgtgatctgtgtaaaggcgctatctggtatacatctgcaaccacgagaccagtggcaaaacactacctaacatttacttaatgcagag

SEQ ID NO: 12510 - DNA, 1234 bp, Setaria italica
  Peptide Sequence Number=SeqID_78484
gccttgcgtgccgcgggtgcatccgctgcgaaaggcaaagcggcagctgcgtgctgggtgccaccgtgagccatgggcgccacgagcacaggttgctcgaaggggaggagtgggaggttgggtccccggtcctagcgcggctgccaccgggaggtcgcgtggagaggagatggaggagaagcagtcaattcaattcgaagctatatacatccaaacatgaattggatttaccacctcataagattccaactaacaattccacctacatccaaacatcagatttggtattgcaacccaatagcaaaactaggctgatttgatattggtggccaattcaattccagcagctcaatatctacatccaaacggattgacattttggaatggagggagtacttaataataaaggcttttcttgtaggatgcttctttagaagctaaggtacattcttatcagttacccatgtacactagtttccaatattctctgcgtggtacactttaagagaaaaaatattagaacttggcatattgttaatttcgttgcagcacaataatcttacgttttgctttgcagtcattccgtcttgctttcgcattggttttggtagctgtttcgttcatgattatatcactaagacaagcacggaatgatgctcgccacttggtgttgtcacttatgtgggccggtctttgcattggcatatcacgatatgtaagaaccaatggccgtatgttctgcaatcgaccccgtttctaccagtcacgccattgatcggtgcagagggatcgttccacgtcaacgaaaactgtttggtggtgttgatttgtaggagagaacgtctggaaattctgattgcaccgtcgatgcacaaaactgaagaccatgtgtgatctgtgtaaaggcgctatctggtatacatctgcaaccacgagaccagtggcaaaacactacctaacatttacttaatgcagagcaccaagactcctgcggcttatattgtcagatgcccatttgtttttaaaatctgttcttgtaggcaacctggaaattcacatgggatgaattttccccctgttgtatagaactttttcaggtggcaatgtagtttttagtatcttatggattgacactctttgtaattaatggataagcaacatcctttctttactatggaaacattccgttctttaacacttgtggaatgcaatagacaataagtacaaaacaaaa

SEQ ID NO: 12511 - DNA, 388 bp, Setaria italica
  Peptide Sequence Number=SeqID_78485
gaggtcacacactaagacaaacatgcacaacatggatgaactgttgcatcaaactaaagacatgagcatttctagtgaaaaacggaacccgggtacttacaaatgtttgaaattagtctttgcaacaattgaggcatcactttggtctttgggcttaatccagacttcaagaggaatatcatagtctatgatattcttttcagctaagtaaggcaaaggctcaggttcctgcttaggagcctcacaggtgaaaggctttaaagcatccagagtgacaatccatggcgatattgtagtactgaagcttttcccaaggaaaggtccaagaggtatagtctccctagctttgatgaatgattggagtgccagagagatccccaggcggggg

SEQ ID NO: 12512 - DNA, 422 bp, Setaria italica
  Peptide Sequence Number=SeqID_78486
cggccacccaatgccgtcggggtcgggctcccggggcaggcgggcggggggagggcggctgctccacctgtggtacaagtgagctcgtccggctcgggtgaggaagagggcccgtcggaggaagaggaggaggaggagagcgagggatccagtgagggggcgaggaggcgggatggtggcggtgggaaggctagggtttcggcgaccgagggtgaggcagcggcgagcggaggcgacgcggaggggccgaaccttcccagctgccccatttgtatgatcgcgtggaccgccgacggcgcgcatcgcgtgaggtgaggacgaattgcacagtacactaattttgtgggtttgtgaacaagctcgctggcttgcgtggtcctgaacctctcataattcgctgatcttataccactgtaggttag

SEQ ID NO: 12513 - DNA, 427 bp, Setaria italica
  Peptide Sequence Number=SeqID_78487
cgtgaatgtaactactggatgtttaatttgtcttgcctgaaagtatttcttattcctaatgtgttcctcacatagttaattctgactttaagccgttacactgctcatctcatttaggatgtactccctccgttcctgtttataaggcgcacacacatatcaagattcaaagtttccaatctttgaccaataatttagccaacattttttttattttgtaatgtaaatttgacatggttggatttgtaatcaaatgtactctccaatgactataagtttataaccataaacaatataatataagataaataaatggtcaaagtctattttaggagaccgtgccatgtcacaccacgccttataaacaggaacggagggagtacacagttaaatattatttttaaaataatgtagctcgtttaaagca

SEQ ID NO: 12514 - DNA, 2586 bp, Setaria italica
  misc_feature (2586)..(2586): n is a, c, g, or t
  Peptide Sequence Number=SeqID_78488
acgcctagcgcatcgctcgcccaaatcccgctcggagctgtcacccgcccccaaaaccctaggccgtgctcggccggcgacgaggatgcccggcatgccgacggatggcggcggcgctatcgtcccatttagaggggagcctggccaaggggcgccgtcgccgccacccctgcggccaatccgccacggcgtggccccacccatcttccgcgtctacatcaactggtccagcggcaaccttctgcaggtcgcgtgcctccgcccgcctaactcggagggctgcggcggcgtggaggtcgctgggagtgtggtggaggtgaacctcggctccggcggcaatggtggcgccgaggtcgaggaggaaatcgacgaggcagagatgcgccggatagagtacgggtcggtgccggccttcgcgctgctgcagagcaggaagaacgccctcgcagatgctgccgctatgtcgcgcatgtcctcagtccctgattacgcagaatggtggcaatatgtgctcgaatacagcaaaaccatcggcaatctccttgggaacccggattctccacctgctttcatgatcgaggaccccaagacaattcttaaggttagggagaagcccacaagtttgagggctgcctgggagttgttggagatattctatgttgataaacagttgcaaagctggcttcctgagcgtcttgttgattggttagccgattttgacagcctcttgtcagcgacagagagcacggtgtattctaaactcagcaatttccagaaaaagctcatcaatttgcagattgttgaagacgatcctattactggaatggtttgtcagcagcactttcggttggatggcttgacatcgtggtgaatatgctacggtttcatggatcataccaattggatcagatggataaccgtgagacagaaaatggattagtcgaggctgttgctgttcttgtatcaacgatgccacgcttgagaccaaatttaccaactggtaaattaggccagtgctgcaaaacaagaccggattttgtcaaggcatgggaaaagtggcgaggtcaagtgactaaactggagtgcagtgcattttggatccagtgtggtcaccaaaaaacccgtgatggtttgaagaatttgcttcatattatgatggggaacataaaggaactcactgcttctacctcccattggctggagctgtttgcttctcattttctttacataagaccatttacagtgggctttgaagggatgcaccatttagcacaaaagtgcatacagcttaagccgtcctctagcactactggattaacaggcctcgttattggcgtcctttcagaaaatccagaggttgtgctggcagaatgcactaaacattttggtccttggttggtcacacatgctatggaactgctgacagctgataatgactatgcggatactatgttgcatgaagagcggcctaacttaggcggtataagcatagaggaactgcaccggctagtctatgctcaagttttgtgctctcattctttaacttggcagattgcgccgacttatctgtcttcatgtctaaaccaaggcctagggctcttggagattctacttctcaagcaacccatacaagataatcgcctagtactcaagactttggaaatctgccgtttgtatgaactggacaatattagtacaaacataatgaaggttgctggcatttatcattggaaacatgggcgaaaaggagttggtgtatactggttccagcaagctcatgataaagttcgtcttgacagaattgctcaacagttatttgaacacattgggaagtcagtcgcagatgatagttttaagcaatgggaagggctgctcgagctacttggttctgatattggtagtgcgggtggtctcgagttccttcacaggtaccgtgatttcaagaggtctctgcaccaagccttagatggaaggtccggtgaggctgctcggcaaactgtagattttcttatacagcttatgaggaacccatccaccccgcaacgtttttggctaccccttctacacgattcgatggagctacttaattgcaaacccagccctctaatgaatgttgctgagacaaacttgttgctcaacaagctgcaagagctgtcactcgccaagctgcgccctgatttttcgaacaatcacctaccaagccatgcgttgggctccgtgagattggctctggcatcgaatttggcacgtgccattcttgaagacccttgactcaagcacagttcagcgcaggttttgttggtggattgtcatcatgttccttgctgccacctggcagttcaaactctcagacttgagaaaagattgatcttgggtcaggtctagacgagcagttgtgttatacatgtatcgtacattgtactttagcttagtgtgcgcgaatctgtgggtggatgttaatcgatgtattttgaaggtaaaaaagtaatggcatgttgttgcttgaaaatactttcttctgtggaatttactttgtgaaaaagaggagaaaaataatctggtcagtaacaaaaaaaaaaaaaaaan

SEQ ID NO: 12515 - DNA, 363 bp, Setaria italica
  Peptide Sequence Number=SeqID_78489
cacaattcataagcaatatagattttgataaaggttgcaactttgcagcatatgtaccctttagaagaggatacaccattgcagagggctgagtggatcaaatacttgggaactttcacaaattctgaagacagggcaaatgctgtctatgatgcaataaagaagaaactacttgtgcttaagcaaagcagctgcaaaccttagcacgagattcaagcctattgtagcgtggattgaatacacacacggaatgtggacatttgtcaaagataattacgccttacagtacatcacagatgcaggagcagaaattgttgatgcaaactattacaaataagagatttaatagttcagatccagagg

SEQ ID NO: 12516 - DNA, 865 bp, Setaria italica
  Peptide Sequence Number=SeqID_78490
tgagccgggaacactacggtcagatggtggatagtggggcgccttttgcaaggccgtttcgggagaacgatcctctgctggaccagatcgacggcaatatactcaagcgttggagccgtggacctgttcctggtgcctggtgctcagggacgaagaggtggttcagtgatccatgttcccagtggggcaacgtgaacattgtgagaccaggccctcaagctgtgaagttgcaccaatacgtaaatcagactttagaagaagcaaagtctaggagcaactcatgcaggcggtagcagcattgatgtcagtggcctcatatcccatggttgaaagctatgagctttttccagggctgtccactctgctgaataaattgcggctacctgcctgaacggaaacaagcactcttggcacctgaatatacacacggccatggtccatggaggactgctctgcaattatcatagtcacagatgaggagttccacttcgatctgcgattaatctgcgcaatccccattttggcacctacgacaccgaaggcagatagcttagagccgatgataagcagaggcttatataactactgtagtttatatgctgtggtcatttgttgaacggcttgtgttagtgctagcagatgaagttgtgagacccttttgctctcaggtttgtcaggactggagacattgtagaacaagggatcttgttagtcctactggattactgataagctttgtgcttacatatgcctattcttgtacctggaataagcctccaattgtcccaaaaaaaaccttttgaattgttgtaccaatactattttttttccttttcttgtaaagaaagtaacttacttaaaaaaa

SEQ ID NO: 12517 - DNA, 257 bp, Setaria italica
  Peptide Sequence Number=SeqID_78491
ggggtgaagggacctaggtttagttatggcggcggaggagcatgctccttgtaccaagccccgccccgataaggctaagaagcggaagaagcccaagaaggacaagtggggccagcctctctccgccgccgcggccgaggaagatccgtcggtggggccggagcaagagccaccggcggtaggcgcggaggagtcggcggcggcggcggcggcggcaggcgcggaggagtcggaggcggcggcggcggcggcaggcg

SEQ ID NO: 12518 - DNA, 947 bp, Setaria italica
  Peptide Sequence Number=SeqID_78492
cgggcactcctcgatccccttcgtaattgaactcgctggctcacaaggaacgttccagcttacagctaggatccgaaaggaactcaccaccagctcgtccttctcttctattctcttcttcctccagtgaggcgcaaagcttgcgagatttgagctcgtctcggtttcctttcttgctctgttctgctgctgttgctgctgcttcttcctcctctccggtgggttgcgcgatggaggtggcgttagcgcttgcggccgccgtgctcctcttgtcctccacgctcgctgcctcagagttctgcgtgtgccggtcggaccagccgacgacggtgctgcagaaggcgatcgacttctcgtgcgggccccagggcaacgccgactgctcggccatcctgctgggcggcgggtgctacaaccccaacaccgtcgccgcgcactgctcctgggccgccaacagctactaccagaacaacaaggccaagggcgccacctgcgacttcgacggcgccgccaccatctccaccaccgaccccagtttctccggctgcactttcccttcgagtgccagtgcttccgggacgacggcgggcaccacgaccgtgggcggcgcgacgacgggcacactgagccccggcgtgggcaccgggttcaacggcacgagcacggggatgggcagcagcctggggccgacaggcaccatggacggcgccgcggccggcctgctccccggcgcccagctggccgccttcctcgccgccgccatcctctccttcctcgctctgcactagctcttcccccttcatccgctttgttttcagcatagttccttttgtccagtagttctctgaactatcaatgcaaggaaatggaatcgatttgtgaattggttggacggctccagtctgagacacgacaacgaggggaataaaggcacacgaggggatagg

SEQ ID NO: 12519 - DNA, 1226 bp, Setaria italica
  misc_feature (1168)..(1226): n is a, c, g, or t
  Peptide Sequence Number=SeqID_78493
ccgcgcccttgtcctgaggtgacccgccactccgtgcagccgtgctgcactgcacacgctctcactctcactctgctcgcatctcttctcttctcctccgtgtgaaggcgagctcacacaggcacagcccccaactctcacactctctccacgaagctctctcccagagagctctcgtcctcccctaggcagcagcggcagtagtacaacaagatcatgaaggccctggtggtggcggtggtgcttcttctctcgtccagtctcgtcgcgtcacagtggtgcgtgtgcaagcaggatgcgccgcaggcctcgatgcagaagaccatcgactacgcctgcggctcgggggcggactgcaactccatccatgagaacggggggtgctacaaccccaacaccgtcgccgcgcactgctcctgggcggccaacagctactaccagaacaacaaggccaagggcgccacctgcgacttcaccggcaccgccaccctcaccaccagtgacccaagttcttctggctgctcttaccctacaagtgcaagcgctgttggaacgatgaccccgaccactggaggcacaatgggcggtaccccaggaaccttcacgcccggtgccggcaccaccagcacaggcatgggaaccggtactactactggaaccactggcgctgggctcggtctaggaccggcaggcaccggcatggacactgcagcggcgagcttgctcccaagcgctggggtggccgccgtcctcaccgtgctcctctccgccatcgcattcgcatgacgtttgaccccaagagacaagaccctactcctcctacctgctagtagaaagcacatcacccttttggcaagcttgcttcaggagtgctctgatgatccatggagaaaggaacataacggaagcctaatgcatcctgtccaaaactccactagtgcctgcttcgtgtccggtgccgatggggggtgttcatgggtggggtggcgttctgttttcctttgagaccacaccatgttcttcagtgtaccctgttatttggtaggatggcggtctctgtcgtgcaaggacgattgcctatcttttatccgttgttaatcatgtaaatgtagggaagccagtaggttagatcaaggctggttgcaatgaaaatgctgctagggaaacnnnnnnnnnnnnnnnnnnnnnnnnnnnnnnnnnnnnnnnnnnnnnnnnnnnnnnnnnnn

SEQ ID NO: 12520 - DNA, 277 bp, Setaria italica
  Peptide Sequence Number=SeqID_78494
ggtttttactttttatttttgggtttaagatgggctgttgcggagcacaacgcaaagacgggggagaagttgcagttccgtaaggtcgttagaggccagcagcaagtcgtcgcgggcatgaattacatgctcgatgtcgaaacaaaggaaccctcccgttttatggagcatttgtgtttgatccactgcccaactcatccgagaagcgtcagcttaagtatttcaagcccttgattggatgatggcaacaaccaaattaagggccattactcggtct

SEQ ID NO: 12521 - DNA, 496 bp, Setaria italica
  Peptide Sequence Number=SeqID_78495
agtagccaggtaagtgagacaaacgagccgtaaacttaagaaacccggaaccctaacaaggaacggataagtccccgccgtcgctgatggcgctggcgaacttagactgcacctgcgagaggcgcacctggatcgactccaggggcgcctcggcggtcgggctgtcgtgcgagacgcgctcctccgtgatgcggaggccgcgctgcttcgcggtgtagtcagcgttcaccaggttcacgaacgtgctggacacgggctccacaaggcccttggtcaccatcgcgcggaggagcctcgtgtccaggtcgtcgggtccacgggccgtggtgtacaccaccttcacgcccttgatgccgctctcgccggcgacgagctgcacggccagcctgccgagcttctctgccagggaacgtaaggagcagctctgacatgacctcagctgggaccatgggcgcattcaccgctgtcgctgcgagctcgcccctcagcgcaccaa

SEQ ID NO: 12522 - DNA, 382 bp, Setaria italica
  Peptide Sequence Number=SeqID_78496
gttgccgaccttgccgatcatccccggctggtcgatctgccggcacaggatcaggttgccctccaggctgacgtctacctcatagggccccacgagggtgaggtggggcacgccgtacttgacccggccctccaggacgatgtccccgccgtcgctgatggcgctggcgaacttagactgcacctgcgagaggcgcacctggatcgactccaggggcgcctcggcggtcgggctgtcgtgcgagacgcgctcctccgtgatgcggaggccgcgctgcttcgcggtgtagtcagcgttcaccaggttcacgaacgtgctggacacggggcgtcctccggtgatgcggaggccgcgctgcttcgcggtgtagtcagcgttcacc

SEQ ID NO: 12523 - DNA, 267 bp, Setaria italica
  Peptide Sequence Number=SeqID_78497
cgtccatcaccctctcctcgctgaacgagaccctggattcgaggtagctctcagcgggggcgctgtcggaggcgttcgcaggggccgcctgtcgtcgcgcgacggtaccgaggatgagctcggagcggagcgcgtggtcgaggaggaggtcgtaggtgtcgggctcggatgcgaggtcccccgcggagaggcccgagggggagagcgcgttccatggcgcaccgcactcgaggaggaggcgcgcaacggcggcgtgcccccccgcgg

SEQ ID NO: 12524 - DNA, 1248 bp, Setaria italica
  Peptide Sequence Number=SeqID_78498
aaccaatacaactacgaaacgaactccggcagcggccggccggcgaggaaggccctgaagagcccgagcgacctctccggctgcgagaatggcgcctcgtgcgacgcgccccgcaccgtggcgaaggagagcgcgccgccgccgaacacccgcgtccacccgccgacctgcttcccctggaaccaggcccggtacggcgccgtcgcgttgagccggagcctgctcgccagccggctcaccagcgtcctgctccccgtcagcgggatcaccgagtcctggtcgccgctgtaaaccagcacggggatgccggacttcacgagcgctccgacggtgttgatggtggggatctggaggtccagctgcttgtactcaagaacactgctgcagaccgtccacctctgcacgccgccgctgaggcgggcgtgcatggcctgctgcacgtccttccggttcaggtagctcatcgtctcgtcctccacgcacacgtccagctccctgctcccttgctggggggaaaggatttgggactgcatcaggacagaggagatgcagacgtccagggtgacgtcgtacttatcgacgaaccggctggtctccctggtcacctggctcatcacccggtcgcaggacgcgctcagggagccgtggtagtactcgctcacataccgcgagtagttgcacaccgtcgtgaagatgttgtaggtcgaatccgagatcaggccgtgcgaccagaagaactcggccctcgagttgaaatcggtggagaattcgaggaccgggttacccagagcaatgcctttcagattgaatagcttctccttcttgttgaattcaaccatgcgctgtgctaactgtgggacatagtggccagcatagctctctcctgtaatgtacaggtccctgcccttgtactgtgggaacttggcaaaccagccttgcaagaacttcaaattgtctctggctgtcatgctgtcaccaacaccctgatagaaggaaggatcagtggagtatgagaagccaactcctgcagggctctccaaatacagcatgttggcctctttgttccagctatactcattcctgactagcacattgccactaggcctgaatggcccattctctgagaacgcccccactcctacggatgaacacccaggtcctccgttgagccagagcacgagcggcttggccgccggatccgcctccgcctcggcgaagtagtagaagagcgaccgcttcccggcgtcg

SEQ ID NO: 12525 - DNA, 3063 bp, Setaria italica
  Peptide Sequence Number=SeqID_78499
tcaactcaaaatacagcatggatcaactttatgagctaggaaggaattgacatgaataaatgtaattacaacatagactagcaaactacagaaataatctaaccttcaaaaggatttgccaccttgaacataaggggtctcttatgggaaacaaggtgcctcccttgaccttatgcacaattacaacaattctggtttatgaacttaacaacagaaattccagtaccaagggcttaatatgtacatggtttgactagaagtgcattctgcacaattacatatatttttgggggcaaaaaaaacaatgatacatcatttaccaaacacaatgaagcagctaatgctatctagtgacaaaactagattaacaacaggtgaaactgaactcatggtacaagaactttttcgtacccattgaacaaagcaaaaggctggcatgcatatcaaccagagcttccacaagaactaccaaagtgtgctgtaatatcgctaactaacagcctgatgacatggctgcccgaatttcgtgagatctccatgcactcttccaagtctgcattgcatgccagcttcacccattcatggtcatcgtcgagatacttgatatcaaacgtgccaacatccatccttagcctctttgctacttcatctttcaatacagttacactgcctgagcatgggaaccggaatcttacaatgtcttccttaaaacttgcctttattgttacagtccctgaatgcttcattgacaccaaattactgggaggggccaaaaatggttggtctgctgctggagtgaagagattcttcaagtctttggagctaccagaatcctcaatcagcatcctggaaagtggtaactgtggttcttgaaaaggctctttgtgaaactcttcaggattaagttgaggttctgcgaatgtagaagcaattggcttacaaacaaatgtccggtttgctggactaccctggcatgacccctctgatgtacgtgaatttatgctgccttctccagatgaacttctcgagtgagaagctttgtccgcctcaagctgagcatcgttgttattgtctataaatccttgttgggccatgtgtataccaaaatggccatcattttcaagtgatctttgcaatgaagaatctctgtcaccatcaacagcgagattcgaaggttctgcaactttactctgagttactttctctacattgtgagaatccgatgaaggaccaaccggaataggaagaggacctgtgatagatgtgagattaaatgcagcatctgagccttgaacagactcgattacctgctttaatttcgagagagaccggttgaccttattgatttttcttagatggccaacgagaaatcccatgctgccggcagatgcgcttcatggttgtaggacaaacgccaaggcttttggctgcatttttcaagcttccagaaaaatattgctgaaggacctctaaactgatagttttttcagctttcccacgtctcctttcagtgggtttgttggttttatgaagcaccgaagaatcagaagcaccgctgccatttggtctgctagcagaagtgccattgtcttgagagtagtcatcagccaacaaatgtccctctggcatatctgaaactttcttgttcccattatcaaacttgtggtctcctccatgtgtatcaccttcaggcgatccattaagggaaccatcagagttatcaaattgcgcatctgtcttgagttcttcattctcgatttttagcacattgctaagttgaagggaaacccaactcgagtctgcgtcaccaactacctttagactacgaagacactgcttcatcagagtaaatatagactccaacaaggcattttgctcatcttcgtcgatacaatcgggtggcaggaagaactctaatatgtagtcatcatgtccagtataggaactttgcaagcatattgcaaggcagccagctaatccaaacatccgagcatagtgtacaaggggatactttatcttgcagaacttcctgatatcttttgaaaagcaaggtttccgtgtgataaacgcatttccagaaaccccttgccccctctgtaggtgatgctctacacaggcatctctaaatccccacatatgagcatcaataacatgaaatgccacatcactagttgacatgcagacctcccccatgcaacttccgtcaaaacttaagcaactctttttcaaaccaccaccatgagccaatacacttcgatacttgcaaggaacccatgtttgtgctaaaggaagcttgtgctcttcacatactacagtcaagatctcgagtatttccaccagagcggtctgacggccttcattgcatatctggacatttggatggtccaatatttccgtgcttttaagatttactgcctcaagtgctttgcagactttatcaacctcacaggcatagtttatcttctttgatgtcattataagttcaacaacagcaatacatgactgagcagaaggatcgaaaacaggcagggcaactgtaccatgaacattgtaactgatcgcgtggtttagccgtggatactcggtactgctgtaatactgcacgtttggtgtccactcaggcacctttagcttgtagacacgaccaggtagccccagctctccgacgtttccaccatctactgaaaacatgtacatcatggatacagccctgtactgaattagcccgatgctctggtggtcaagcacgaaaggctgtcctgaagtagtaagaacatagcggtctccattcttaactggtgcccagacttgaaccaacagatgttgatcagtggattccttgaagtacctgagagcttgcgtaagcctctccttgaacaagctagagttatctgtgccatctccgtccagagataggtgaaactgccatttgggattgatttgttcaaccctcttacttgtagtgtcagaattcccggagcgggccctttggacctcctcgacgacggctgctgcgacggcggcctcgggcgcttgtggggcttcgagcgggagcaggtgtcg

SEQ ID NO: 12526 - DNA, 957 bp, Setaria italica
  Peptide Sequence Number=SeqID_78500
ctggggaacaacttattgcccatcttactacgtagctttaagttcagataattcatggtatctgttcacagaaaaatggataaaaactgtttacaagacaggtcttcctgctgtcccttcggttgaagggggcacactccctagagaaaccctgaaacagctccttttgcgtgaagagatgatgtgggataaacttgcgaaatcagaatatggttctttgttaagcatggatggttctctagacacatggtcgtggagtctcaatgttcctgtgcttaatagcctttcggaagacgatgaggtagaacgattctcccaggaacatcaagatgcagtagaatgctacaagcaacagaggaggaaggtttcacatttgaagaaaacaatcaagagtactaagggtttcaaagaattccaaaagatcattgacatgagaaactttacaaaagaaaagattgagcgcttggaagctagatccagacgcttgactcgacggataaaacaaattgaaccaaccggttggaaagaatttctccagatcagcaaagtcatacaagaggctagagcgttagatatcaatactcaggtaatctatcctttgggtgagaccgcagcggctatacgaggagaaaatgagctctggcttgctatggttcttaggaacaaggtcctcttggatctaaagccatctcaattggcagcagtttgtggaagtttagtgtcagaagtgatcaaacttcgtccttggaaaaacagcagttatgtatatgaaccttcttctgttgctactggtgttataagctatttagaagagcagagaaactcgctcatcgacctccaggagaaacataatgttaagataccctgcgaaatagatgctcagtttgctgggatggttgaagcctgggcttcagggttgacctggagggagataaatgaataggaactactagacaa

SEQ ID NO: 12527 - DNA, 247 bp, Setaria italica
  Peptide Sequence Number=SeqID_78501
cgacctggacgtgaagggaagcccggcggacttgcagcacagttccagcatcctctgcctgacggcgcgcaaccgtgaactgctacagaagatgcgcatggcagatgagtcacaacaggccgggaataaaaccgacacaacaacaacaacttcccagcagaagcctggagctccatcccaggacaaggcgccagaccaggacccaaaaaacactgagtccatccctattgaagagattgcaaaatta

SEQ ID NO: 12528 - DNA, 292 bp, Setaria italica
  Peptide Sequence Number=SeqID_78502
tcttctggggatcactcaaaacctcgtacgcctcggagatcttcttgaatttggcctcggcctcctccttggcgtcgccggggttcttgtcggggtgccacttcatggccagccggcggtacgacttcttgaggtcctcctccgtcgcgttccggttcaccttcagcacattgtagtaatccgtccccatctccaacgagatcaacgctcatgccaagaacagcaacagtcacccgcccacctcttcccgagtcccgacgcaatcaaatcctctctggatccgcgccaggcg

SEQ ID NO: 12529 - DNA, 1070 bp, Setaria italica
  Peptide Sequence Number=SeqID_78503
accccggggccgagcaggcgaaattctcgccgccgccgacccattacgcgtcccccacgccctcgccgcccacgtttggatacctgcactcgcggtttagcggcgagactgcgccaatgagcataccgcaggtgggcggtggcaggggccctgtgcaccatcggaacatgtcggaacccacccgagccttcatgtttcctccaccgtctcccaagagtgtgcgaggggaggcagggatgcaggagtccccgactgaggccaatcggtcgttcaagagggcagatggcatccggatgggcgatctctatgctaacttgccatctggttcaaagattaaggacagtagggatgaatctggcaggttctctggtgtcttctcttctagtggttcaccacgactcgggttctcaagaagttcaagcagattgtctatgcaggatgatactgatgacgcggattttcctttcgctgttgatgatgttgatccagattcccgaccagggagtagcagtgggaaggacgtcggggatcaggcaggttcctcatcccataaatcacaagacgctgctgtcggttatcttgtccacctgctaaagtctgcacgtccactgcgagattctagctactcaactcatacatcaagggccgaatctattgaagctggaagcacaagctccttcatgtcccgcaggacatctgacgcacttgaggagctcgaatctttcagagaaataaaggagaacctgctagcacgtagtagatctaggctgcaggattcattggataaaccctagcgccaataccgcccttgattccatattctttaaccggtgaagaatccaaactgtagagttgattatatggtgagctttggtaacatattctggacttgtcaatgtaaataactaatcaactggcgctggtttctgaaatagaatatccaggctgccattgattctattgtggaaattgcttctgattcttaaacctttgttcatagtgtttgtatacaagctgaacaaactggaagcctgtcgctggaagcctgtgatgatcacagcgctcaggcg

SEQ ID NO: 12530 - DNA, 498 bp, Setaria italica
  Peptide Sequence Number=SeqID_78504
gtatcatatcccaacatctgaatgagaccttgcagtttagaggatagtgcggtgagcatttaagttcattcttttttcctctcaatgaaagacttgtagataagaatacttgtgcaaaatcagaaaggcatactgttaaaattaagtcttctctgttggtttgtttgcaaattatgaatcttaaaatttagttagtgtgttcattcatcaggccttcaaattaagagctgttacaagttcacagctgttgggggctaatcagagtagcattttctttatctggcaaggtcagtactgattttagacttgaaagagatggcaagcccacagcaatagcagaggttgactactgtttgtcacattggcaaaggtcaaagcttgacaatgctaaaattagagcagctataaactctggctccactagccatatgtcgtcatgaacttggttgctatttgaaggacactttttgcccctattttggaagatacttatgtttt

SEQ ID NO: 12531 - DNA, 598 bp, Setaria italica
  misc_feature (1)..(11): n is a, c, g, or t
  Peptide Sequence Number=SeqID_78505
nnnnnnnnnnnaaagtttctgcagattcagtcttaacacggcatcttcaccaagcacaagtttcagccctcaaagcttcaaacagactcgacacatctccaagaactggagcaactgtgaagtctgacacctcaattattcagacactgatcaacccgacatcagagacttccatactgagacactggcactgctatcaagcagtaccaagcagcagtgcttagggtacactatgttacaggcatatgggggcagctccagcatcacaggacccctgaaacctgtatgggtttcagggacagggataggttggtcggtaggtgacgaggaggttgcaccccaatgcagaaacagccaagaatgatttgcctacagacagccagccaacggggtgaaggccggccgtctgagtagccatcccctcctcggttcacgccttgaggagctcgcagcagccgtcgctggctgcccacttgaaggaggggatggcggcagccccgccgtggtcgccgtccatgatggccggcagtggggtgaagaagggcggcgcccggaccatgccgccgccgtactggcggtggtggctcgcgtggtcctc

SEQ ID NO: 12532 - DNA, 353 bp, Setaria italica
  Peptide Sequence Number=SeqID_78506
atttatataatctttaagttttgattggtacactcaaacttcattattgagattggtcgactgttagtattgtgaaattgctcgacagatgggatattgcttgcattaaaagattagcttcaggatattgcttcgattgtaggggatgataaaggtatgacttttctccttgtttttagtcattcatgcttattctctagcaatggttaattacaacactgcaggactactagctagtgtatttatctaggttctgatataaagcatataacattggatcttggataatatgctggctatttgtgactggccggagcccagtggttgctttgctatgctacctgcttctgcaa

SEQ ID NO: 12533 - DNA, 344 bp, Setaria italica
  Peptide Sequence Number=SeqID_78507
taggtgaatattatcaatacttctgcttcagttaacatatgcaacttatgggcactcacatagcaggttatttttctgttgttttaactaacatggcatgaggtgatgtttttggctgtttaatttatataatctttaagttttgattggtacactcaaacttcattattgagattggtcgactgttagtattgtgaaattgctcgacagatgggatattgcttgcattaaaagattagcttcaggatattgcttcgattgtaggggatgataaagggtcaacactacccactatccagggagcagtcctcacctggagggtccagggtgaggccgataggggg

SEQ ID NO: 12534 - DNA, 739 bp, Setaria italica
  Peptide Sequence Number=SeqID_78508
tcaagccccacaaaccaaacactacctcgggcacccctaggttgccgggtctaaacaccaacactgtcagtattgtgaaattgctcgatggatgggatattgcttgcattaaaagattagctttaggatattgcttcgattgtagaggatgataaatgtatgacttttcattccttgtcttttagtcattcgtgcttactatctagcaatggttaattacaacacttcaggactactagctagcatatttgtctaggttctgatataaagcatataacattggatcttgataatatgctggctattttgtggctggccgaaagcccggtggttgctttgctttgctacctgcttctgcaactctcttcttttctgagctcattcttacactttagcctgcagtcaagtatatatgttagctattgagctgtttgctttgcttaatcaaatgctatattgcaccatgttttcaaatttgttcccatagttatttagcttaacctctatctctgaaatcaggtacctgataggatgagtttaactgtgcattcagggtcaacactacccactatccagggagcagtcctcacctggagggtccaggggtgaggccgatagggggtatatttgcaacctttcatggagtgtgaacaatttagcgcttgctaacctgttcaacaagcaaggggaggtcctggaagctaggttcatctatgacagggagagtgggaggtcaagg

SEQ ID NO: 12535 - DNA, 407 bp, Setaria italica
  Peptide Sequence Number=SeqID_78509
gccatatccgcggcgtgcgcgggagtggcggcaatgggcaacccggccgccgcagccatcacgcacgtgctccacaacaagcaggagttccctctcgccaccggcgtcgacgacctcctcgtgctctccatcggcgccggcgccggcgcctccgcttccgttcccggcggatcgaacacaccaatgccgacacgttcgccttcgccacgggagctggcgcgcgtcacggcagcaggcgtcgccgacatggtggacgaatcagtggccatggcgttcgggcacacgtgcgggagcagctacgtgcgcatccaggccggcagggcgccgacgccgctccacgctgacaatgcggccgcggccgccggagcgatgctggcgcagcggaacgtggagtcggtgctgttccg

SEQ ID NO: 12536 - DNA, 522 bp, Setaria italica
  Peptide Sequence Number=SeqID_78510
aaacccccccgccgcgtccatcgccacgtccccctgctgccgtctcccaatcctcctcctcctccggggatcgccgcagctggcggaggcgatgtccacccgctccgcgtctcggacccgccgcccaccacgccgcgcgccttcgccgccccctccggccgccgcgaacgggaaggcggcggcggcgtccaagcccacctctccggtccacccatcgttggagaggacggtgaagaagctgcggctgacgagggcgctgaccctcccggaggccaccgccgtgtcggaggcctgccgcaggatggcggccaagcgcgtcgacgccgccctgctcaccgacgcgaatgggatgctctcgggcatcctcacggccgaggacattgccggacgggtcatagctgagggtctcaaccctgaagaaactagtgtggtgaaggtgatgacgcggaacccagtttttgtatgtccaattcatccgccattgaggcactgcagaagatggttccaagggttttcctgtta

SEQ ID NO: 12537 - DNA, 532 bp, Setaria italica
  misc_feature (474)..(532): n is a, c, g, or t
  Peptide Sequence Number=SeqID_78511
tctcccggtgtaccgtgaatacgacgatgaagatttgttcgagacatcgtcttccatctccggcgactcggacggcgaggaccagttctcggacggcgagggcgccggagctctggaccaccagttcatgcagcaggcggcttcctccccggcgcagcagtcggttcggagattgaactccgatagcctctacgatctgtcgtccatgatggcacaactccctgtcaagaaagggctatccaaattctacgacggcaagtctcagtcgttcgcgtgtatgtctgaggtgagatgcctggaagatctacgcaagaaagagaccccctacaagaagatcaagccatcgaggagctatctagcattagatgaagagcaggagtgtcacatgcctggccctaacagcaggggaatagccaagaagcctactggtaagaacgtaagtaaatgagtaacttaagaaaaggtaaagaaaannnnnnnnnnnnnnnnnnnnnnnnnnnnnnnnnnnnnnnnnnnnnnnnnnnnnnnnnnn

SEQ ID NO: 12538 - DNA, 1082 bp, Setaria italica
  misc_feature (1046)..(1082): n is a, c, g, or t
  Peptide Sequence Number=SeqID_78512
gtttaagttgaaagagaggaagcaagaggagctgaggaagaatatatccatccatccaaattccaaaacaccacacataacttgttctcgcagttttcttggggccaagaaatctccccaagtcgaaagcatgggcggattcagcggcgctacaggtctcccggtgtaccgtgaatacgacgatgaagatttgttcgagacatcgtcttccatctccggcgactcggacggcgaggaccagttctcggacggcgagggcgccggagctctggaccaccagttcatgcagcaggcggcttcctccccggcgcagcagtcggttcggagattgaactccgatagcctctacgatctgtcgtccatgatggcacaactccctgtcaagtaagttcctcgaaccttttgcatctatatgcttcttctacacgccttaaaagggaaaaattctcaccttgtgttgtcctctgcaggaaagggctatccaaattctacgacggcaagtctcagtcgttcgcgtgtatgtctgaggtgagatgcctggaagatctacgcaagaaagagaccccctacaagaagatcaagccatcgaggagctatctagcattagatgaagagcaggagtgtcacatgcctggccctaacagcaggggaatagccaagaagccctccggaggttcttgcgcaaatctggcgtctcggaacaacagcaacaacatgctctatagacctcccccaatccctgtaaacaagggtggataccatcagtaggctctagacatcactgaagtctgaaacgtttctgtccagggtttcagctctgttctttttttttttctttgagggattttgttgacaagcgtattggcctgtctcagatgtaagaggttttcctcctctgcagtcaatagaggatctcctttcgttttgttcacgagacatcgattcttgtaaataactgttacactgtactgcggttaagaaagggctgtacatatttgcctgcatatctgaattcttaattatatgaaccaaaaaaaaaaaaaaannnnnnnnnnnnnnnnnnnnnnnnnnnnnnnnnnnnn

SEQ ID NO: 12539 - DNA, 1076 bp, Setaria italica
  Peptide Sequence Number=SeqID_78513
aaatgaaagaacaaagcgaaatcaccagattgtcccaggcgaggagcacacagtaactagcccatcgatcggcagcagcagcagcaatggcggcggcgaagaagagcggcggcggcgagatgacggtggtgcgtgggctggacgtggcgcggtacatggggcggtggtacgagatcgcgtcgttcccgtccttcttccagcccccgggacggccgggacacgcgcgccacctacaagctgctggaggacggcgcgacggtgcacgtgctgaacgagacgtggagcaagggcaagcgcgactatatcgagggcacggcgtacaaggccgaccccagcagcgacgaggccaagctcaaggtcaagttctacctcccgcccttcctccccatcatccccgtcgtcggcgactactgggtgctctacgtcgacgacgactaccagtacgcgctcgtcggcgagccccgccgcaagaacctctggatcctgtgcaggaagacgagcatcgaggaggaggtgtacagccagctggtggagagggccaaggaggaaggctacgacgtgagcaagctgcacaggacgccgcagcaggacccgccgccggagagcgacgccgcgcccaccgacaccaagggggtctggtggttcaagtcgctcttcggcaaatgatccatctatcattcactacacatgctacggtgctttgctgctagtactagtgttatctgctaagcataatctgtgccgcgtgcggcgaataaaatgaattattgccgtagaaattagaatttgtatctgcctctgctgttactgttagtgtacctatacgttcgtgttgtgttgttgtacatgtgcttggatgaatcagtggagttaagatgtagtgcttgattttattttatggtgatgcagtgctgggaacattgtgtcaagtactatcatgtagctttgtcggatgttagctctgactcttaaaataactgtcgggcttgtgggaagcaaaagcatgtcaaagacggtcgagcttgtgaaaggcacccgagtagaaaacccacatgaaacgaaataagaaaacaaaa

SEQ ID NO: 12540 - DNA, 425 bp, Setaria italica
  Peptide Sequence Number=SeqID_78514
ggtacctgtgtccttcagcccatatcttgcacttccctttaagagcctttctccatagagtgactgcaaacgctggacagtcgattatcattcttctgattacacggctggaaaagaagttctcaaaggcatgttcaatatcttccgtctttggctgggctgcatccgaagcaattgcatcatgcaacatgtggatcctatcggtgacaccctccaaaacattgtcttttccaccaacagcaaccttcaggtttgcaaatagcaccatgaaattcaaatcagaacagtcatgaaatttatacaatgatgacagtcctgaatagtcaaaagccaaacaagggcaataaaactatcagttgttttatacggagatgtacatagttgttcctggtagactcatcacttaaaaactaggaatccccgcg

SEQ ID NO: 12541 - DNA, 2444 bp, Setaria italica
  misc_feature (1)..(93): n is a, c, g, or t
  Peptide Sequence Number=SeqID_78515
nnnnnnnnnnnnnnnnnnnnnnnnnnnnnnnnnnnnnnnnnnnnnnnnnnnnnnnnnnnnnnnnnnnnnnnnnnnnnnnnnnnnnnnnnnnnnaagttataactgtaacagaaaaccaaataccttactttttaaatataaattcatatactacctgtcgagtgaaaaaattacaaataaacagaaggtttgagtttacagcaaagtattggatctgatttactagcctataaataggatacaaaatactggcatacactctaacgaatgacaacaatttatcggcacaacttcctcaggtgaccaaaacttatcgattacacaagagtgaagacccgtgagtcatttctgatgcaaaaagttccgtgcgctgaagtcatttctccacagctcctttatgatctggcactttcagaatgccagtatcaatcagcggttgcagctcaggttttgcaagattcctcacctcagaacttggagattccaggaacgctgcaaccaccttagaactgtgtccttcagcccatatcttgcacttccctttaagagcctttctccatagagtgactgcaaacgctggacagtcgattatcattcttctgattacacggctggaaaagaagttctcaaaggcatgttcaatatcttccgtctttggctgggctgcatccgaagcaattgcatcatgcaacatgtggatcctatcggtgacaccctccaaaacattgtcttttccaccaacagcaacctcatataataattctttgccaaaatttgatcgaagtaattctccaacattttcaatgcaagattggacaagagcctcagcaaggtcacttttgatcaacaattcatgccgccttcgtgatggatccttcttgctctcagacacaatctgcatgccttccaaatcatcgggctctttatcagtcatagcatccactttattttctgatataacttcagtagcaccctccgatgcctcaccctcctttgcactaagagaaggcacattatagctcagacaagccagatcagctggagacagatagcgtgagcaaagagggtgaagtagctgcagcaacggtcgtctcccattcttgtcaaaaatgagttctttcaaatgctttgccagctcttgaatcacaatcttagaaacaagctttgtgtcgtcaacaatggaaataatgctaataaggaaaaggcatccaaaatcattcagagcaagcttcataatttgacccttcaaacttttaataatcttctttctgtcctttgcactgccatgtttgaggcaactgattgctagttttaatccttcccttgtctgcatgatccgaacgataagcggctctgacaaccttttcttcttagcttttgttttatttggtagttcagtagcgattgatggttcatctccatctatgatcgatgctccttgagttagaagggggataagttgatgaatcacgtccatggctgaggtcttatctgcaattgtaaagtactccagtatagccgtgtgtactatggaatactcaacagtacctttctccaagattttctgaatctcaatagtcatatactgcaggacagatgatttctgcaatccaagcttggaaattgtctctaacaaactgaaggaactttgcacagtcagatccttgaatagctgaagttcagtggagtacagttccaataacaactgtcttttctgaggtggtgttgctcgctgaaatgcatagtcaacgactgcagcccctatggtatgaggaagaagtttggcaacatggccatgaagagaagagatgaaactggcaaactgctttttagtggcaagctctataagcttctttacaaggaaaacagcatatttcttgcgagaaagagtgagcaaatgtggctgtagatcatcaaaaatagcatccctctctgactgtgagcaccactttacacatgtttgcagaacacgtgcagtaacatgggatccagcaatatccaagtatttcccatccattttccggatggcctgacttactagcttggatctctcctctttgctcacatcgtggcatctcatcttttcccatagtttcgctagttccttctcaaggctgtaatgccgcttcctcttcatcttcctcgcctccgacatctcctttgcagccaggcgcttctccttgggggtaaccggccgcttcttcgccggagcctcgcctgcgccgccatgggccgcgtaaccgccggcgcccgggtgcttcttccgcttcgctccgtcccctccccccttaacctgcggccgcggcttgatcttcccctccgcgtgctcgcgcttgcgcttcttcgggctctggagatcgctgccggcgccggccatcgcgcgcgccgctcgttgctaattggcgacgcaggacgggaggaagggggttttccccaagcccgat

SEQ ID NO: 12542 - DNA, 663 bp, Setaria italica
  Peptide Sequence Number=SeqID_78516
cagaatcatccatcatcggaacaaagaatggtcaggtaactttccaattcaattagtaaccatggcctacagcacattacaaattacaactctctacaggctttacacgggtgacaacccgctagttggtcgttgcaagtatacaatacagggaatcagagtatgattcaatcctccattagacggcattccgtaagagcgaggtgcaggttaacctctggttcgttggctgctgtactagaatcgaagaaccatttgccaagatgatcatctgttctcatcatcaatggtttcatgttcctcaacttcacctactccagtggcgggaatggtggttgtatgaacggtattattgctaccacggcaatgtagtagctggcgctgaaggctctcaataagctgattaagttgttggatatttttctcttgagatagtattatcttttccttgacggcgtcctccctggcgagcagctgctggcggcggcgcgcggcggcggggtcggcgttggcggcgtccccgatctgctgcttccactcgaactgcgacgtgatgatgagcacgagcaggaggaggacgagcaccaccggcctcgtattcatccccgcaccaaccgatccccaattccgaacacaacctcctcgtcacgcacgaagcagcaa

SEQ ID NO: 12543 - DNA, 932 bp, Setaria italica
  Peptide Sequence Number=SeqID_78517
gaggcggagcagtgtaaacagcattgttaaaacattgaggagttccatggaggaaagtagtccaaatgtcacaattgaacggtctaatgcagaggattttgtccagaagctgggtcctgtgctcctaccatgggaaagggaggaggaagatgatgaggtgttcggtggtggcaaggcagggaggcgcagcaatacagaactggcagagaggactatcccagagaatgagctgcggaggctcagggatgcggcattgaggatgaaggagaggataaaggttggatcaggaggggttactcaggacattgtggagagcatccacaggaaatggaaggtggacgaggtggtcaagatgaggtttgaaggccctccgagcctgaacatgaagagaactcatgatttactagaggatagaactggaggaattgttatatggaggtcagggagatcagttgtgttatataggggaatgaactacaaccttcaatgtgtgcagtcatatgcaaaatctacacaaattgattctgataaggaagttgctgatgctaatagtgcgatccatggacgtcacaacttgcagaagtcaagggcagatggtgtgaagcactcaacatctagtggcaatttctctttagaactagaagccacagaagccttcgatattgatagcttcttggatcagttgggaccacggtacaaggattggtctggtcgcagccctatccctgttgatgccgacttacttcctggtgtggtacctggctacaagcaaccatatagagtacttccttacaagattaagagcactctaagagataaggaaatgacagctctgcgaagacttgcaaggcaaactgctcctcatttcgctctagggagaaacagggaacaccaaggcttagcttgcttgtcttattggttaaatttattgt

SEQ ID NO: 12544 - DNA, 479 bp, Setaria italica
  Peptide Sequence Number=SeqID_78518
cttgtcggaatgctctttaaacgaccaacaaggtctcgtgctccatgccgtcgaaggtgttgacgatgaagccgtcggcgcggaggtagtcgaggcccaggtcgaccatgagggcgtacacggggttggtgcgatcctgaatgggctcgatgaggtcgacgccgcgcagcggcatgcaccccggcaggaggacgggctccgggaggtcgcggcactcgccggtggtggtcctcgcgagctccggcgtgtagagcaaagtggccagacacatgaggctcgacgtgcagaagacgtaccgcggcacgccgagctcctcggcgacggcgagcgcggcggggcagagcatgtctgtcaagaaagccgtgacgccagccggggagcccaggagcgagcgtagcatgtcacggaggtgcggcagtgtgcgctggacgacggtgatgatacgggtcacgatatgcgcgtcgagggggagtcgtcgg

SEQ ID NO: 12545 - DNA, 545 bp, Setaria italica
  Peptide Sequence Number=SeqID_78519
ggcgtggtgcgacccaggcccacccgcgtcttcgtcctcccctgtaggctcctcgcacgcagtggggtcctctccgcaccccgccgacggccgaccggccgccagtgcatccagggaagtcgggggaccggccggtgcggaaggaatcgacccggagccagagccgagtctttctctgctcactgacctggctcctattgattctggagttcggttcgcatggcttctgaatcaggggacggcaactgcaatgcttgggcagcgagagatccttctggagttctctcgccatacaagttcgaccgcagagcagtgccaagcggcgatgttttgttgaaaattcagttttcatttttattactatctccttgctgcgttaggcttcatggatggaatggaatacctatctatggtccgaattgttcccatgcctttatgtgtacattatgtgtttggttttcagtgtgtttctttcatgcctgtttctaagtgagcatatatcaagtgggggaacaagtattgcaggtatttctgcttgtcgtgtg

SEQ ID NO: 12546 - DNA, 1412 bp, Setaria italica
  Peptide Sequence Number=SeqID_78520
ggaacaagctcgtcttttgtgcagttagctcagtggttttgttttcatgacatcttcttatgttttcagagcagtgcaaagcggcgatgtttcattgaagatcacacactgtggagtctgttatgccgacgttgtttggacacagaatatgcacaatgattctaaatatcctttggttcctgggcacgagatagctggagttgtaactgaggttggttcagatgtcaaaggctttaaagtgggtgaccatataggcatcggaacctacgtgacctcatgctgagattgtgagaactgcaatagctctctaaagactcgatcaaggggagagacgtccccttgactttcgccttaagataggggcccaccaaacccggaaagcaggcagagatctcacgcgcgctcgcttcattggcggccacggagtccgctgctctgttacagtccaggaggtgggtgtacgaccctgcagcgccaggattcaaaccctggtggggagcgccacacctgggcgctctaccatcgcgctatcagcgcgtctgcactgcaatagctctctagagaactattgcccaaaatcagtttatacattcaatggcattgataaagatggcactgtcacaaaggggggttactccactcacattgtaatccatgaaaggtactgcttcaaaataccagggcaaaggcagcacctcttctatgtgctggaatcactatgtatactccaatgatgcgacacaatatgaaccaacctggaaaatcactaggggtcattggacttggtggactgggtcacatggcagtgaaatttggtaaagactttggccttaaggtcacagttttcagtacgagtgaatcgaagagagatgaagccatcaacatccttggagcagataattttgttatatcatcaaacacacagcagatggagtccctgaaatactctcttcacttcatagttgacgctgctttgggtgaccatcctttgatccatatctctcacttcttaaggttggagcagaagtggagagatggctggtctgattgcatctggaatcatcaagtggacagcaagcaagcttgcttccttggtttctgcaccgattgggccatcatcttcatctgatgagcaacagacttctgcaatcagagatgtgcagatgctgcagaggaggatggcatcagtccagcgcacactggaggcaatagatgaggatagcatcagagatgagtctggaaggcttcgattgagggagctccaggagtttgcctatgatgcgcaggatgctatcgatgagtacaagtttgagctgctgcgtcgtaggatggatgatccagacaagtaacttaacaaaataaaagaaaaagaaaaacaaaaaagaaaaaagtaaaaacaaaactaaaacaaa

SEQ ID NO: 12547 - DNA, 894 bp, Setaria italica
  Peptide Sequence Number=SeqID_78521
tcatgcagagatgagtattctagggtattcatcatatcgagcaatgattgcgccagaaaactgccatatttgtttctttctactgctgagcgtcttgtactgtgtcgtttctgcatgttacttctatccattccaatttcgttcacgtgttccgcttagtgagtcgacaaccgttgctgtactatcattagtgcggatttgattccttagatgtctggtgttaaactgctcgtcatcttatgttgaactcctggagaatgaattatttgctgcaggaacagctattaggctgcacagcatataatttaaaaattattgttgcttaaatattacagaaggaagtatgagtcaagaatatctggtattggtacttgtaattgtagaaaatatttcttcgtttgcaagtaattttaatgtgatttttatgcaagaaattactcaaatctaaatgtcatctctcatttgagcttttaattgccatggcttgatatggcacacaaagattgaatcatcatttttttctatatatggcaaaagctatttacgttaccagtaaaaaagggtcttggtattgagaaataaattctacagtacttaattaagtaccttccttaattctttttgacccttgattagacctcctataaatcatgagacatggcaaataggtgaaatgattgatttattctaccacgtgtcgttagattgaaagggccgaaacttaaatctgagtttgtcccataggattcttcttcccttggtttcagtccttggtacatccatttttgagccgttactcctgcaatttcaggtctatcctataaaataaatttgatatccattttctcaggggctgagcagtgttggggcctctggggtgcctcacgtcactat

SEQ ID NO: 12548 - DNA, 723 bp, Setaria italica
  Peptide Sequence Number=SeqID_78522
ggccctccaagcacgcgtccaacgtcatcttcctcaggcagctctccgtggcgtcgcggctcaaccacgacaacttcgtccgcctccttggctacaccatcagcaacgacctccgcgtgctcgtctacgagtacgccaccatgggcaccctccacgacgtcctgcacggggacagggaggtgctggggcaggcggcggagcagggcgccgccggagggaggccggtgctgagctggatccaccgcgtgcacatcgcgctggacgcggcgagggggctggagtacctgcacgagacggtgcggccggcggtgacgcacaaggacgtgaggtccaccaacgtgctgctcttcgatgggttcagggccaagatcgccgactacaacttgttcagccaggccgcggacatggccaggctcaaccgctccacgcacacgctcggatccttcggctaccaggcgcccgagtacgccatgacggggcagatgacggacaagagcgacgtgtacagcttcgggatcgtcctcctggagctcctgacggggaggaagccgttggaccggacgctgccgcaggggcagcgcagcctggtgaactgggcaactccaatgctgacggaagacagggttcaggagtgcatcgacccgaagcttggcgatcagtatcctcctgccggagctctcaagctcgggcggatcgcggtgcagtgcctgcattacgacccca

SEQ ID NO: 12549 - DNA, 352 bp, Setaria italica
  Peptide Sequence Number=SeqID_78523
cagagagagcccacaccaacgacgagaaaggacaaactgcggcggaccgacccgaaggcaggccaaggcccgatccccccctccccgcccggtcgccgcccccgtgccccagtgcgatagtcccgtcgacgccggcggaccgcgtgagatatgggttgctcctcgtctgtaccagctagaagtacaggagggctaaacactgtcaacaacgatagctcttctgccactgattcaaaggacttgcgtgctaagttggtattgctgggagactcaggtgttgggaaaagctgcattgttcttcgctttgtgcgtggtcagttcgatcctacttccaaggtaactgttggtgcta

SEQ ID NO: 12550 - DNA, 593 bp, Setaria italica
  Peptide Sequence Number=SeqID_78524
aatgctgcctatcaaagtgccgatcattcctggacgaatatccgtccgtgtttgttggatggacgaattgaaggaacttcaaaaacatggcggtcctgatatgattatggctttggttgggaataaggctgatctgcatgaaaatcgtactgtatcttctcaggaagcacaagagtatgcagaaaggaacaatatgtttttcattgagacgtcagctaaaacagccgataacataaaccaattatttgaggaaatcgcgaagaggttaccaaggccaacatcatcttgatggaacttgatcagtgtaggttttagaaagcctggtcaaggagcattgtgtaatgtacactagcagttaattgtccaatgcaccatggtgtcaggtcaagcactccagccatgtgtatacacgcttgtttgcatatgtaacttccatgtaaagcttgcctgatgtgtttattgtgttgagacctggaatttggtccaagttacatcgtggcatgctctgcactggctatcgcacatggaagtgaagggacttatatgcagtttaaagttgcgactaatgtttctaatgacaaaattaaatgcat

SEQ ID NO: 12551 - DNA, 738 bp, Setaria italica
  Peptide Sequence Number=SeqID_78525
gaagaatttgcgagccaaccaaaaaagccaccaaccggcttcccccccgccgtcggcaaccgccgccgacctccgccgcctgcgtatcatctgccccagtccgttcccccggcaaacccccacccccgcgcgctgcccatgggctgctcctcctccttaccagctactaatgctggagggttgagcaatgccaacagtggggattctgatattgattcaaagaacttccgagtgaagttggtattacttggagactctggtgttgggaagagctgcatcgttcttcgctttgtccgtggtcagtttgaccctacttccaaggtaactgttggtgcatcatttttgtcacaaacattggcattagaggactcaacaacagtgaagtttgaaatatgggatactgctggccaagagaggtatgctgccttggcacctctttactaccggggagctggtgctgcaattgttgtctatgacataaccagtctagaatcatttaacaaagcacaatattgggtgaaggaacttcaaaaacatggcggtcctgatatgattatggctttggttgggaataaggctgatctgcatgaaaatcgtactgtatcttctcaggaagcacaagagtatgcagaaaggaacaatatgtttttcattgagacgtcagctaaaaacaagaccgaataaacaataaaaccaaattaatttagaaaggaaaaataacgaacgaaagaaaggtta

SEQ ID NO: 12552 - DNA, 657 bp, Setaria italica
  Peptide Sequence Number=SeqID_78526
acaaaagcaagatttttttttgtaggaaacgtgtagcaggcctgatacttttctgtactcttaaccaccacacatgaaagtaacctttccgtgtggatattttgaccaacacactgaaatgctaaacacatttgctcccacgtttggtcatcctgcctcagtttgttcatgtggtgttcccaactgaggtctttggcgcaatcatttttaacatattgaatatctatggcaggaaatcgcgaagaggttaccaaggccaacatcatcttgatggaacttgatcagtgtaggttttagaaagcctggtcaaggagcattgtgtaatgtacactagcagttaattgtccaatgcaccatggtgtcaggtcaagcactccagccatgtgtatacacgcttgtttgcatatgtaacttccatgtaaagcttgcctgatgtgtttattgtgttgagacctggaatttggtccaagttacatcgtggcatgctctgcactggctatcgcacatggaagtgaagggacttatatgcagtttaaagttgcgactaatgttttctaatgcaaaattaaatgcatcaaatatattaatttaaatttgaacaaagtctagttactctaaaaaaacgtaaaaaaaaaaagacgtaagaccaaacggaac

SEQ ID NO: 12553 - DNA, 931 bp, Setaria italica
  Peptide Sequence Number=SeqID_78527
gaagatagtcaaagttgacgtataacacacagttctttctccattcagctagaagtacaggagggctaaacactgtcaacaacgatagctcttctgccactgattcaaaggacttgcgtgctaagttggtattgctgggagactcaggtgttgggaaaagctgcattgttcttcgctttgtgcgtggtcagttcgatcctacttccaaggtaactgttggtgcatcctttttatcacaaacattggcattagaagactcaacgatagtgaaatttgaaatttgggacactgctgggcaagagaggtatgctgccttggcaccactttactacagaggagctgctgccgcaattgttgtctacgatataactagtccagaatcatttagcaaagcacagtactgggttaaggaacttcagaagcatggtagtcctggtattgtaatggtgttggttgggaataaggctgacctacatgagaatcgaagtgtatcttcgcaggatgcacaggagtatgcggagaagaacaatatgtttttcatcgagacatcagcaaaaacagcagataatataaaccaactgtttgaggaaattgcaaagaggttgcctaggccgacagcgtcctgacaaaactgcaagagttacacaaatacaagtttgtaccatgtaatgcctttccatttcgaaaaatgtaatgcatgtcagcccatatgtacgggtactgtgtggaaggctgatgctcatgtaaagcttattccattctgttaattgtggaggccctttggtattgaatatcctctgatgttacaacaattggtaatctgatggtttcctcttacacaaaacttttttgagggcaatcgaacgatgaattagctacgcaaatttgtcattgttttaggtgatactttttattgtaaactgcctcgatt

SEQ ID NO: 12554 - DNA, 452 bp, Setaria italica
  Peptide Sequence Number=SeqID_78528
gagggaggccatgctggtagctagtggtaggtgggtggtgattatggaggagcaagagagaggtcgagcagcaagcaaagagtggaatgcagttctcgttgcatgttcaagggcttctgaaacatcggctgcagtggatgttttcaagaaaatgatagaggaagggttgaaaccagatgtagtttcctacggagcattgctgagtgcacttgagaaaggtaagctgtatgatgaggccttgagagtctgggaacacatgtgcaaagttggcgttaaaccaaacctgtatgcatatacaattttggtgtcgatttacattggtaagggcaaccatgctatggtagatgctgttcttcatgatatgctgtcaaaacagattgaaccaactgtagtaaccttcaacgcaataatcagtgcatgtgtgaagaacaaaatgggtggcactgcatttg

SEQ ID NO: 12555 - DNA, 763 bp, Setaria italica
  Peptide Sequence Number=SeqID_78529
aaaccgaaattaaccctagaacgaaaaactgaagtagccgcaccgaaaaagtcagccaccaattcggtcattaagttcctggtcgcgactttcttcaacgccatgctcggcgctcggcagcccgtgtagtgatgcctctttcctcccttgggcaaaagcgacaccacagccacatgttccctgtcctttcctttgactatgccttttggtactcgtaatccatatccaggctaactaaaatccatcttgcttcgatgtgcatactatgatgtgtgcatgaagaccaagaccatcttctgctacgatgcccgcgcgtcaggtgcctctggaccaatgggtggccctgtgttgtgccgtaccttgacttgttgcgcgtccactggggttacatggccttttacaagtggaggaccgccgcgtctgctcgccaatcatccccaccttgctgtggaacacaactggaagggccgagatgactagtcttttaacaactctatcgtgcctatgagaaccacatcttccttgttgtggctgctgatttggcattatggaagcatcggctgcgtgagttgaggcagctaactctatcaaagttgtccatccgggccacccggcccgatacggcacgggcccagcaaggcccgttagttttcgtgccatgccgtgccagcccacgggctgcaccgacggcccaagcatgggcccgcagtgcctttttcgtgccgggctggcctgtaaagcatggctgccttcgccccccccc

SEQ ID NO: 12556 - DNA, 316 bp, Setaria italica
  Peptide Sequence Number=SeqID_78530
gggagaaacaaaacaaacaggccactttgtttgaccccctcgcattatgcccgggcagtcttcaaagcaaaaggattagagaaaggaaccctgtcatagcctaaactgttgctggttaaacaaagcgtgcgcgtgtgcagacgtttatgccaataaaattagttaaaccatcagaagataaaagatggcgctgcgtttccagtatctctggagggagaacgatctagaataaaggacacttcggcgtacgtaccctcgccaagcaatttctggtgtccacggcagtgggccccacatgcagtgcaccccacccccc

SEQ ID NO: 12557 - DNA, 239 bp, Setaria italica
  Peptide Sequence Number=SeqID_78531
atcattggcaagatgtatgcactggtggattgcttgggctgacagttgcttccatttgctacctgcagttttttccactaccatctgataaaaatggattgtggcctcacgcatatttccggcacatgcttgaacccggcggtgagaatcaagtgcaacccacatccatgagccgccgtaactcccttcaaaatggttcctttcacggtcctgatgcagtggaaatgaggagcacgaga

SEQ ID NO: 12558 - DNA, 906 bp, Setaria italica
  Peptide Sequence Number=SeqID_78532
cccatactttgcagccctgcgcggcctcttctcgcatcccagcgcctctagggttctctccgtatccttccggcaacggccggtggcgtcgcccttcgctggaaggtcgcgcctgccgagcgctgcgcggagctccggagaccctgccgagatcaatgtggataatgttgaaggaactaggcagtcactaggaagtttcactggttcaggaaaggatgggaaggagtcaaccaaaagtttctcatctaaagagtattcatatctcactgttgctagaaaaactgaagagatatggcgctgccggtgttctgtcatatggattacttaacactgtctactatgtcagtgcttttttattagtttggttttattttgctcctgctcctggtaggatgggctatggtgcagcagtggagagatttgttaaattaatggcgatggtgtgggctggcagtcaagttacaaagatttttcgagcaggaggggctcttgcactggctccttttgttgacagagggttgagatggttcacagtcaagttcaacttcaagtcggaaggaagggcttttgcgacaattgtagggttatgttttggaattgctgccctcctgttctttggattgacaatactctgggcatagtgcacctgctttgctgatggatagtgaggaatcatgaagagatgctgcagaatcgatactgatcccgaccagtaacgcgccgatgacaactctgctaataacgttacattggctgttcacatcttgtatgagcatgtgtttttgtgactcgtcagtgaccgcaaacatcttgagaatgccatattcctgtaaggtcctattaggcgtgtgttcatacttggcaattttagggaaaccaaacaagttttgtagtgggatttgattg

SEQ ID NO: 12559 - DNA, 719 bp, Setaria italica
  Peptide Sequence Number=SeqID_78533
ggttgggcgcgtggcgcgccagctgacctgtatggaggctagccaaccttctcttctctaggtaggactctaggcgtgacccgccggccggcgcacaacatgccatcgccgtcgcctccgtccgcgcgcttcgccacggggctccggccagcaccggccggcgtgcgctcctcccccattggttcgtccccatactttgcagccctgcgcggcctcttctcgcatcccagcgcctctagggttctctccgtatccttccggcaacggccggtggcgtcgcccttcgctggaaggtcgcgcctgccgagcgctgcgcggagctccggagaccctgccgagatcaatgtggataatgttgaaggaactaggcagtcactaggaagtttcactggtatgatatttgtgacatgtacaaacttagctttatcaattcatttcttcataggcctgaactgatctcccgcttttcccctgtacaggttcaggaaaggatgggaaggagtcaaccaaaagtttctcatctaaagagtattcatatctcactgtaaatccaaaaactaataatgacaaaactattaaggtttatgctgtctaggcctcatgacataactttttaaggttcatactgtaggaccttactgttacattagaacctttttagtagaaattgagcttgcgcatcaaactaatatgccctcaaaggggcagaaggcctcaca

SEQ ID NO: 12560 - DNA, 2397 bp, Setaria italica
  Peptide Sequence Number=SeqID_78534
ccggatcgggggcgggggaggggggcgcgtccccggggttcgcgctggccatcgagggcgtgctgggggcgtgcgggatggtggtctccgacgcgctcgagcccgacttccccatcatctacgtcaaccgcgggttcgaggacgccaccgggtaccgcgccgaggaggtgctcgggaggaactgccggtttttacaatgcagaggaccatttgctcagaggagacatccccttgttgatactgcagtcgtttctgggattcggagatgtttagaggaagggactgagttccagggtgatctgttgaattttagaaaagatggttccccttacatggcaaagctgcaaataacacccatatacggagatgatgacatgataacacactatatgggcattcagtttttcaatgattccaatgtggatttggggccctcgcctggctctgtaacaaaggaacttgcgagatctacatggattgcaccagataacactcccccaccgacctcagtgggcaagggtaatttctgggaacattctagtctcttcctactgagtgatgaggtactgtgccagaagatcctgtcaaaactgtcacccagggatatagcagctgtaaactctgtttgtaagcgactgtatcacatgacgaagaatgatgacctttggaggatggtttgtcagaatgcatggggtggtgaggctactcgagcccttgagattgtggcaggatcaagaaatttggcatggggacgactagcgcgagagttgaccaccctggaatctgttgcctggaggaaattgacaatcggtggcacagtagagccatctcgctgcaatttcagtgcttgtgctgtaggcaaccgtgttgtcctttttggtggagagggtgttaacatgcagccgatgaatgatacttttgttctggatttgagtgccagcaagccagaatggaggcacatcaatgtgagctcagctcctcctggtcgctggggccataccttatcatgcctaaatggatcacggctgattctgttcggtggctgtggggggcaggggctactgaatgatgtcttcattttggatctggatgcacagcatccaacttggcgtgagattcccggcattgcaccaccagtgccacggtcgtggcatagctcttgcacagtggatggtacaaagctggttgtttctggtggttgtgctgactctggtgttcttctcagtgatacctacctcctagatgttacaatggaaaaacctgtttggagggaaatacctgcatcttggactccaccttctagacttgggcattctctctctgtttatgacggcaagaaaatattgatgttcggtggtcttgctaaaagtggccctctacggctcaggtctagtgatgtgttcactctagatttaagtgatgacaacccatcctggcggtgcatcactggcagtgggatgccaggagctggtaatcctgctggagttggcccacctcctcgccttgatcatgttgcggtgagccttcctggaggaagagttttgatatttggtgggtctgtggcaggtcttcactcagcttctcagcttcacctcctggatccagctgaagagaagccaacctggaggattctgaatgttccagggcggcctccacggttcgcctggggccacagcacttgtgtcgtcggaggaacaaaggccatagttcttggaggacaaactggagaagagtggacgctaactgaaatacatgagctttctctgataagctcattagtttcaagatgaaaagctcccagcttccttggagcgacatcactggagaaagctacatattcgtgtgactgaggctgaaacatttttttttcaacagtggagctgcagaagtagggttggcgaactggttactcttatgagggcagctgtggagtagcacctgaagcagatcaaacctgattattcgatctaagtctgggagttgccttgtctagaagtaggaataagttacctctgctgctgctgttgtttgtatggtctacgttgcaatagctgtcatacataagctaatctcagttgttcttatcctgtttcctaagggaggactggcgttgtttaggtggagccatgcggcgctccttctttgcgttttgatgtcgcacatgcgacaccgccgttggtgagaagcgatgcgacaattgctctttcctggagaagctgtaacactgttgtatttaatttttcctttttttgcattactttgtgcttacctcaggtgatagtgatactcgcaacattttcttttctgtcttgcttatcaaaggatgaaacccaataattccatcttaaaagtacatgagacacgcaacaggggataggttaggtctacatgggagta

SEQ ID NO: 12561 - DNA, 348 bp, Setaria italica
  Peptide Sequence Number=SeqID_78535
tgtaacacgtacatataggttctgctccatgttgtctgtgcccaaggactctctgtgtgttgtactgtgacaactgacacaggaagagaagcccatgaattggcattgtacaatggagggagggagggtcatgtatctattgtttgaagagagagagttatttttgcaaatagatccgtgtgtgtactgtgacacaggaggagaagcacatgtgacggcattgtacattgtagagagagatgagagagaaaagctcatgtagctattgtttggagagagaggacatttacagtctactatatattatttattctctacttgaaaagattccatatttagtcatccaaa

SEQ ID NO: 12562 - DNA, 1397 bp, Setaria italica
  misc_feature (1)..(82): n is a, c, g, or t
  Peptide Sequence Number=SeqID_78536
nnnnnnnnnnnnnnnnnnnnnnnnnnnnnnnnnnnnnnnnnnnnnnnnnnnnnnnnnnnnnnnnnnnnnnnnnnnnnnnnnnttttttttagtaaaaaaaccttcctaggaaacatgtgctgaaactttactaaatgatgaaaagggaacagattgttcctgaaccacttgtttactcttacaacgactacattgaccctctgattcatacacaataatctaatccgcaagatgttgtacaccgcacaaagagaagatgcctaagagtctgagggtgactattacaacagaattcagatgcaacatgttgtctcatggcccataagagactacattggaagatgtcaccaacctgatttccgccggctaccaaaattttctaataccaactcttcaagttggatagctcaatcaatgacaaagctcactgaaaatgtgagatcgggaatgccactacatcagataatgtgcgttccggtaatatctgttgatgtactttgccttaacattggaaacatcgggggtgtccggggttttcacaggataaaatttgtaaaatttgatgttctcaaatgcctctcttgtcttaggatccatgtcatcaatagctttcttcctggcttctttggcctgtttcagttctctctttctttctctaaccttctcctttagaaattccttaaatttttctttctcatcctccggcaacacctcatctttgactttctcttcaataaaatcctcgtaatcatccatttcccaatcaaaatcgcaaactatcgggggttctagaggatatatgatattgacaaccgtgtcatcttcatcttcaggaggattcagtggcatataatatggcatgcagtaatcgaactttttgactctctcagttttgagatgcttcagcgcagacctccgctgggtgcagccgagagtaaatatttttgttttcaaactgtcgatcctgctaagccggtcctcaagaggaacataaggcacccatgccatcttcatcgccttcattggcactatttcttcattttccctttgaacagaatttatgccaattttatctgatggagggaacggacagtctacagcaactactacaggaataagtactatcttcgattcaccattaacatctaggagttgtggctcagtgcttccaaacaagtaaactgtctttccataaagttctcccccttcttctagtgttttctctaaattttcgaagttccagttgaactcctttatcttatcaatattttcccactcagtcccgataggaaaagcggataaccataaatcctccaaattcctcttctccgggaagtactccgtctcggccttgggcttgggcggcgccttggggcgcctcccccgcccccgagcgg

SEQ ID NO: 12563 - DNA, 868 bp, Setaria italica
  Peptide Sequence Number=SeqID_78537
ccatggtcggaatatttacccgtctaggaagagacatggaggaaattggtgttagcaaaagctataagttggctgaaaaagttgcatccataatggaagaagcacaacctcttcttaaacagattgaggccttagctgaagaaatccagcctatgctctctgaggttcgtggtagcgatctgctcaaggatgtggagactatagctaaaggcctggctgatgcgtctggtgacttgaggaggctcaagtcgtccatgctaaccccagagaacacagatctcattaagcagtctattttcacccttatatttacgctcaagaacatcgagagtatcagctcggacatctctggcttcacgggtgatgagacgacacggcggaacatcaagcttctgatcaagtctcttagcaggctattgtgattggttttggattggatggtgattgctggaaacggggggtttgatgttggtagagtagggcggctggctgtcttggtgagactgaggtaggaagaagtgaaggaatagctaattagagcatctccaacaaaattgccatcccactctccaagccaaaatttggtaagttaaatggagagctaaaaatggatagtcagttggagttgctcttagtgttcctcaaggttttggttgttcttgttgcaagtttaccaaacagtctaaaattcaatccgaatttccaaaaaaaaaaaagggagcaagcgtgaggagaaatctccctacttgctgagctgttaggcccattttttggtgttgactcggccgatcgtcctttgttggctgggccaacgtgtaacgaagtgaagaaatacacgatatattcttgtgtttgcccccaaaaaaaa

SEQ ID NO: 12564 - DNA, 348 bp, Setaria italica
  misc_feature (125)..(125): n is a, c, g, or t
  Peptide Sequence Number=SeqID_78538
ggcagatgatgcacaagctataactgatgacttcagctggctgcgagagtttcaaggggagtcttcagatttgggaccttatgatctatttggatctcaaatgcttggagtgcaggaaggttttnaaaagggggagacagactctctagtatctgcctcacgagaattcaaagcaatgttggaagctgcacttgttaatccctacaagttctgtacgtgactatttttctgtttctgcctatgtgcgtagttttttgaaacatggttttacttcatatgccatttggcttattgaataatcatatcatcataacctcgtaacctttcgttattttttcttttagttaa

SEQ ID NO: 12565 - DNA, 1426 bp, Setaria italica
  Peptide Sequence Number=SeqID_78539
ggcgagaggaagagcgcggagcgagatggaggcgcagggagcccaccgctgggcaggagaaatccgcggtggcggcggctccaattacatcgccaagcacgtcggaatccaaaaccaggtcttgaagtggctgcagcatttctctgacagggtggaggagagggctaaaggggctgccgcggaggtgaatgggttgctggaggaggccggggcgctcgagctggatatgaagacggcggtggtcgccttcgaccacctcacccgccaaaggttcactgaacataaagtttctgatgatgataatattgacttgaaaacacgagacggtgtacgaagttctactctgccacaagtgcgagctcaggattatgaacgtgatatcttaccaagatacaaagacgctttgcatataggacttgcttcctgtaaggatcactttcgaaagaaaggccgttcgacgacctctgttttcagggctatgtccacatacaatcctctcccacatattattggttctgaagagtataatcatgacaatagctgtggcttggcagatgatgcacaagctataactgatgacttcagctggctgcgagagtttcaaggggagtcttcagatttgggaccttatgatctatttggatctcaaatgcttggagtgcaggaaggttttgaaaagggggagacagactctctagtatctgcctcacgagaattcaaagcaatgttggaagctgcacttgttaatccctacaagttctatgatgatgcgagtaatacagcacgagatgcttctgtagagaatacaggcacgagtgaagtacaccataacacagacccagctttgtcgaccaggatggatggagcagcggatgaaaaatcaacagaagcagataatgctgaagaggcggaacttttggcaagcttgcaaaacccagacatcaatgttcatgacatctattctgccttggttagagagggcctttttgatgctggtgatgagatactagctgtggacccagcatcagactcagctaatcctgcagttgaggattcagctgaaagggcctccccggtgaatgaaactgttctaagcgaagaggaaaaatcgatcgaaggggataatactgcatctccgcctgagaagaatgatggagttcctgaatcatcctaggcctggcagtgctgatattggattattggttgtgctctttttcactcttcgtgcggactatttcttatcctagaagatgatgaagtgaggtcttcttaacagacttttgtttgtcatttctgtatgatcttttttattactaggaagctgatgtagactactagacttttcagaagtacagttcagtataacaaaagaacacattgtgtaacagtccactatgagtaaactatccatttgcttctagaaaaa

SEQ ID NO: 12566 - DNA, 278 bp, Setaria italica
  Peptide Sequence Number=SeqID_78540
tcacacaccctggaactccctgcatcttctacgaccatgttttcgattggaacctcaagcaggagatcagcaccctgtctacggtgaggtcaagaaacgggatccatgccggaagcaagctggacatccttgccgctgatggggatctctacgttgccaagatcgacgacaaggttatcgtgaagatcggatcacggtacgatgttgggaacctgatcccctcggacttccaccccattgcccatggcaacaactactgcgtttgggagaagactggt

SEQ ID NO: 12567 - DNA, 247 bp, Setaria italica
  Peptide Sequence Number=SeqID_78541
gcttcacaattgtaaacatttctggtaaatatattcgaatatgcatgagaaattggtgacattgatgtagaataacagttagtagatgtcttaggcatgtgagcaatttttagttgtgatatacagatattgttattagcaggcctacaaagaaagtgctcgatttcgagattatacacactcaaagcatagcttggtattacacatcccgtcaaaatgaaaacatcacctgttttgtgttccaagg

SEQ ID NO: 12568 - DNA, 349 bp, Setaria italica
  Peptide Sequence Number=SeqID_78542
gagtaatgaccgtttcggggcggggcatccttaactcctccctccctccgccgcctcggcgccccacagaccagcaaaagcccctgccctacctgacctcccccgacgcgcgagcgccccccctccatggcgaggcggcgcagctgctgatgcctcgcggcgtcggatcgggcgcggcggccacgaaccctagcggcgtgcggaggcgctcgccgatcccccgacgcccaatccgccggcgcggctcctcggatcctccccgcgagattcgggcctcgccccgtctcgtgctgccgaggtgaggttctggccttctgggtgcggtgagggggatctgctacccgtttgg

SEQ ID NO: 12569 - DNA, 254 bp, Setaria italica
  Peptide Sequence Number=SeqID_78543
agaaatagatcctagcactcagagcctcccagggagggcgagtagggtttctatcctgccattgtagcctgtctactgatcaataaatctcctgtgttcccccagttcctgttgcttatcagtagaggagcttgatttagattggttcctgatcaagctggagtttttggatgtcttggcccatattagtgcgtactgcaacaaaagttacaatttccacttgtctggacaaacacttgttgtagtcatcctct

SEQ ID NO: 12570 - DNA, 534 bp, Setaria italica
  Peptide Sequence Number=SeqID_78544
gctatttgatgaactgggaatagtagctgacgagctaccagtcgaccagttcatcccgcttgggagggatgctttacaaggctccttcagatggaaaatggggcgaacatgagtgtaaatacttgaatgccttttgccattacatgccggattcccagttttcatgctgtttgtttctgttgtctgctgcgctctgcatagtttccaaggactttcttacagaatttagaaccttttcaattacttgttgttccagtggattacctgctgttcatggtttgcgacgtgaagctcaacccaaatcctgaagaagttgcagacgtcaagtacatgaaccgcaatcagctgaaggagctgctcaggaaagccgatgccggggaggatggcgttaagctgtccccttggttcaggttggtggtggacaacttcctcatgagctggtgggatcatgtggagcaagggaccctccaggaggccgccgacatgaaaaccatccataggttgtagacttttagattctactaagtaactact

SEQ ID NO: 12571 - DNA, 490 bp, Setaria italica
  Peptide Sequence Number=SeqID_78545
ttgcgtgtctcagagttcttctgcctttgctatttcgttgaactctggttattgtaagtatttcctaagattgttcaccacagaaggtattctaatgtcatatcctttacagcaaaggtctgcaacaaaagttacatttccacttgtctggacaaacacttgttgtagtcatcctctctaccgtgagtcagagttgattgaggaaattgtgtaggggtgagaaatgcagctcagcgcaagctatttgatgaactgggaatagtagctgacgagctaccagtcgaccagttcatcccgcttgggaggatgctttacaaggctccttcagatggaaaatggggcgaacatgagttggattacctgctgttcatggtttgcgacgtgaagctcaacccaaatcctgaagaagttgcagacgtcaagtacatgaaccgcaatcaagactagaaaggaagactagactacaaggaaaagaccgaattagaccgga

SEQ ID NO: 12572 - DNA, 924 bp, Setaria italica
  misc_feature (919)..(919): n is a, c, g, or t
  misc_feature (922)..(922): n is a, c, g, or t
  Peptide Sequence Number=SeqID_78546
gccggccccggcgccgtcgacgccgacgccgggatggacgccgtgcagcggcggctcatgttcgaggacgagtgcattttagtggatgaacaggacaatgtcatcggccacgagtccaagtataactgccatctcatggaaaagatagaagctggacatgtcctacacagagctttcagtgttttccttttcaactccaaatatgagttgctacttcagcaaaggtctgcaacaaaagttacatttccacttgtctggacaaacacttgttgtagtcatcctctctaccgtgagtcagagttgattgaggaaaattgtgtaggggtgagaaatgcagctcagcgcaagctatttgatgaactgggaatagtagctgacgagctaccagtcgaccagttcatcccgcttgggaggatgctttacaaggctccttcagatggaaaatggggcgaacatgagttggattacctgctgttcatggtttgcgacgtgaagctcaacccaaatcctgaagaagttgcagacgtcaagtacatgaaccgcaatcagctgaaggagctgctcaggaaagccgatgccggggaggatggcgttaagctgtccccttggttcaggttggtggtggacaacttcctcatgagctggtgggatcatgtggagcaagggaccctccaggaggccgccgacatgaaaaccatccataggttgtagacttttagatcacaagaacacttgtttttcctgttgagaaatacccgctgatgttgctgttggcgcatgttccgtaatagtcgtcattttgatgcaaataatctgtaatgtaacattagagtgttcttacatccagaatgatgaggattaacacggaaattcatcgagtgtagttttcggagtactttaaaaaaaaaaaaaaaacagnganac

SEQ ID NO: 12573 - DNA, 254 bp, Setaria italica
  misc_feature (234)..(234): n is a, c, g, or t
  Peptide Sequence Number=SeqID_78547
acaattacaatcatgctcagaaggaaagtgaatttcgtcctgtacttcctggccttcatcttcctgctgcttgtaatgcagacatcattctctttgcattcagtttcaggggatgcattgcaggatgtgttctcagcctcagtagcagacagtcctgatttatcttcattcggcagtgtctccatcctaccattgctgttctgctgcatatcaatggtttcattctcatccttnatctcttcagccttgttacg

SEQ ID NO: 12574 - DNA, 307 bp, Setaria italica
  Peptide Sequence Number=SeqID_78548
acaagacataccaaccaatatgacctcctgcaatacgaccagagcttctgaccttgcagaagatgagcaactaagagcatttcagcgacatctcaagaaactgcccaagcatggggctttctccatggcttctcttcttgttcagtgttcttgtgcagacttctgcaatcttggccgatacggatccgggagactctgctggcctcactgcgattgctgctaactggaaaaataagccatcaaactggaatggcgatgacccgtgcagagacaagtggatcgggataatttgcactgggaacagagt

SEQ ID NO: 12575 - DNA, 2204 bp, Setaria italica
  misc_feature (2174)..(2204): n is a, c, g, or t
  Peptide Sequence Number=SeqID_78549
accagaacatcggtgcgagatatgccgctacatctacaatcatcagaatgaagatggtggatggggcacacttatcttgggctcaagcagcatgtttggaacatgctcaaactacataaccttgaggcttctcggcgaggaaccaaacgacgaggatggtgcattggctaaagggcgtgcttggattttatcccatggtggtgcaactttagtgccccaatggggaaagatatggctttcgatacttggagtgtatgattggtctggaaataatccaattttccctgaactatggctggctccccagtttctgccatttcatccagggaagttctggtgtttaacccgtatggtgtatctgccaatggcttatctatatggaaagaaatttgttgggccaattacaccaactatactggcactaagagaggagatttatggcacttgttatgtcaagattgactggagcaaggcccgtaatgcctgtgcaaaggaggatctcctctgtccccgtacagagttgcagagtgctgtttggacttcactctactggtgtgtggaaccagtgttgagcagttggcctgttaacaagctgagagagaaagccctggacaacctcatggagcatatacattatgaagatgagaacactcagtatgtttgcatatgctctgtcagcaaggctctaaacatggtctgctgctgggtagaagatccaaagtcagatgcatttaagcgtcaccttgcaagggtacctgatttcttgtggctttcagaagatggcatgaaggcacaggtatatgatggctgtcagagctgggagacagcattcataattcaagcattttgtgctacagatcttgtcaacgagtatattccaactattcagagagcctacgagttcatgaaacattcacaggttctgaggaatcatcctggtgaccaaagttactggcatcgccatagatcaaagggttcatggactctttcatctgcagacaatgggtgggctgtatctgacactacaggagaagctcttaaggctgtattattgttgtcaaacattgcaagcaaccatattggtgatccggtaggaagagaaaggctgcatgacgctgttgattgccttttatcttttgtgaacaaagatggtaccttttctacatacgagtgccaaaggacttcttcttggatagagattctaagtccttgtgagagttttcccaatattgtcgtcgattatccttacccagaatgcacttcctctgtgctacaagctctgatactgttcagagagttataccctagttatcgaacagaagagatcaataaatctgtcagaaatgcagcaacatttattgagagcagacaaaaggaagatggttcatggttaggcacttggggtgtatgttttacctatggggccttcttttcgattaaaggtttagttgcttctggaagaacgtacgagaacagctcttccatcaggaaagcttgccactttttattgtcaaagcagctcagtacaggtggatggggagaaagccatgtatctaatgtaactaaggtttatgtgaacctcgaaggtagccatgctcatgcagtgaatacagcttgggcgatgctggcattaattaatgccggacagtttgaacgagatccagcaccgctgcatcatgctgcaaaagaaatgatcaatatgcagttggagacaggagagtttccccaacaagaacatgtcggatgcttcaactgctcccttttcttcaattacccaaactaccgcaacatattccccatttgggctcttggggaatatcgtcgttgccttcgcgcaaacaagagtagtgggcccgtgtgagcatatagcatggtgagtggtgacgaactaatcatggctatgaactatcaattaggatataatatatacccgagctacacttcaaacattaccccaggtgattagcagaatggtatctgctatcatgtatcagctagcgtatcacatgtatactgtgaggctgtaaagttaactcgatattgtaatgcaaagatgaacagtttacagtttctggctgttcatcagtttctggctgttcatcagtttcttagcataagcatccgcttgtgtattgtaacaaacatttgtttcatcgtaacaaagatacacggcnnnnnnnnnnnnnnnnnnnnnnnnnnnnnnn

SEQ ID NO: 12576 - DNA, 1315 bp, Setaria italica
  Peptide Sequence Number=SeqID_78550
tataatatatatagccacaaaataaacaccaatatcgattacagaaaggttaatctaacccccttacgtacaaaataaacacgtccgtaatgatgccaaaacaccaaacgcctctcatatagacatttgtatacggctttccatttgcatcacaaaactaaaaacgcctcagcaactgcgttgcactcttacaagcatccgcattccatgtgaccgcaccacacatgcacacaccacctgaggagcattggtccatttcactctagactgacagcaggtacacgaggtttcatctacactgcagcaacgcacttaggctgccactggttgctgcacaagaccagcgctcattcctttgctcagctgtctccccagcctctcttgtatcctgtccttgattgctgtttccatgttgtggcagtgttgctcaaacttctccaggaaaccggcaacccagcggtccgcattagcaagccactcatcatgatttaacccagcagtctttgccactgtttgcaacttttcctgatgcgccttcacagtttctcgcagtttattaatcttcatattaacttgcagttgtttctccttgacatagctcacacctagatccttccttgagtagccccgtgctaaatttctcatgacatactgattgtagtccttcaagatcctcattatgaggtccgaagtagaaaccccatctgttctttttgtttccttgaattttccaatctttttaacaaaatcatagacatcatttgcagccccgctagtatcagcgtagggtaacgcatcatgagcaacgtagtcaatctgatgtatatcaatgaactcctgtgtgagaacccatggagcatcaggaatgacctcatcgacccacttgcagtggcgcagggactcgtatcgctcctcctgggtcatgacggtcttccccttgtagcgtttggtaagctcgtcgttgcagcatccgacgagcagatacgtattggggaacagcttcttggcctgctcgagggcgcgggcgtggccgaagtggaagagatcgaagatgccgtcggcgtagacgcgcacggggcggtcgccgctcccggcggcctgcttggcgctgctgctggtggtgttgttgtgggcgggatccgcggcggaggatggcgtggcggcggccgcgggcttggcgccctgcctcttcctggcattggagactcgcgccatctctctctgtgcctccggtaacggcagcgacgaagacgaaggggaaggggggggggggggggtgggtctgtctcgtctccctctggatgtcaagtccgct

SEQ ID NO: 12577 - DNA, 488 bp, Setaria italica
  Peptide Sequence Number=SeqID_78551
aacttgacgacagaatctgcacatacttctgggatgtggtgtgtggcagttgcaggccgacaccctgcctatgagctgcaagcagcaaatcatgttgtgagatggcttgatcaactctctgttgttgacttgaagaggcttgttaatggtgaggttattggtcgcaggggcagagaatctgacatggatatggaaattgtgattgaggaatgatgcttctgcaaacatgacgtaccgatatattgttgtacttataatctgatgtagcctaagtaatgcattacattttgtaaacagaccaagtcattgcgagatcaggactaaggatagtcctgagcttgcattacctgcttggttttcctgtgatgcatcactggaattcctttagcttaactactcttagtcattaggggtttgaactttgaagtgaagaaactcctgcccataactggtgcatgtatatatactatatttcacctattttaaaa

SEQ ID NO: 12578 - DNA, 1132 bp, Setaria italica
  Peptide Sequence Number=SeqID_78552
ctatgagcttccaaataagctctcagcagcctgctctcaagttttacggaaaatgcttgccaaataacccacattttgcagtgacaatgcattcagttgcaaagtccatgggtaaagctatgattatgaagagggcacgtctgaagctacatgccacggacatcaataggaaaccccagacccatgaactttacaaattggtttgtagacttcctgaaaaccttagctggctgttggagccaccagaaattcctaaaagaacagcctcaaagaagaagaaacagaaggatgaaatggtgactggtcagtttggtgtgatcttggagtgggagggagttgttgtggaagatgacgatccagacttggagccccgggtttggtatgttctatcacttgaagaggcaaagtctttccctccggatgcattgctgaaggaaattgagggaatgagaactgagcaggctatttcagaagtgttatgttggtcagaagatccagaggaaattaaaaggttggcagcacgcaaggaggtaatatatcaaatcctccgaggaggatactatcaactgcgaccaggtgtccttgatttcttgaatacccttgtggattttgaaattccgatagcaattgcagctccccgctcacgcgagagccttgaagaagggattaaaactgttggtctgcaaggttactttgatgctataattgcattagaggatttctgcctagggaaacctgatggtgagatgtttgaggttgcagcggagcaacttggtcttgagccagacgtttgtgttgtgtttggtaattcaaacttgacgacagaatctgcacatacttctgggatgtggtgtgtggcagttgcaggccgacaccctgcctatgagctgcaagcagcaaatcatgttgtgagatggcttgatcaactctctgttgttgacttgaagaggcttgttaatggtgaggttattggtcgcaggggcagagaatctgacatggatatggaaattgtgattgaggaatgatgcttctgcaaacatgacgtaccgatatattgttgtacttataatgtaatgcattacttaggctacatcagattataagtacaacaatatatcggtacgtcattgtt

SEQ ID NO: 12579 - DNA, 408 bp, Setaria italica
  Peptide Sequence Number=SeqID_78553
ttcagtccacaacctcctccgacttcttaggctttgacaagagataccaacccaggccactcagggcagcaactgtgcctgccaagacagcgtagttcctgttcttgtcggtggacgcaccagtagatgctgactctgttggcccgcccgcggccttcacgtcacttgctgcagagcttgtggttgacgaagcttgctctcctgagctgggacccttgcgtgcggccttctccagcttgtcttgttccattttccaagtcccggaacgcgcggaggtcaccagaagcacgcggctcacgcacagagaccgcatcacgagccacttccaacacttgcggaactagaagcgagtccttagatcgcatcaccagtcgcacacccacacgccttgcaggaatatcttcttct

SEQ ID NO: 12580 - DNA, 923 bp, Setaria italica
  Peptide Sequence Number=SeqID_78554
tttttgaaagcatataacaacttttaattcttacagaaacgctatcgaaagaacatacgaagtatatgactattgtggcaaaaccgaggcaaatggcaacgcatgtattatgtcattcccattcagcatcacagaatgcaccaaggcatataggttctgattaaagactagagacaacagactccatacattcagaacaacagtacccaaaaaacctctttcagcagcgatgtagcattagcatcagacaacattgcgattcatcacatgcgggagaactacagaacgtctcgagcgcatacttcaaagttcaatgatgcggcctcagaacgagtagtgcagagtacatttcaacaattatttccacgaagaaggtgcaggtctatgcgcagaaagtaaaccagggtgaaacgtgaaactgataaggcagaccatccgcggatcccattcacaaccgccccttcagtccacaacctcctccgacttcttaggctttgacaagagataccaacccaggccactcagggcagcaactgtgcctgccaagacagcgtagttcctgttcttgtcggtggacgcaccagtagatgctgactctgttggcccgcccgcggccttcacgtcacttgctgcagagcttgtggttgacgaagcttgctctcctgagctgggacccttgcgtgcggccttctccagcttgtcttgttccattttcttgatgtagacgttctcggcggccttctcctcctcgccgaggaccttgccgccggaggacaggagcctgcgctgcacgaacctcgccgccgtcctggccgccatcgccgccgatcgagaaaccctggaggacgatgacgtcacccgctccctcgctctccgcttcgctccccttgcctttgccctctcgcgaagaaagaaatgagttg

SEQ ID NO: 12581 - DNA, 246 bp, Setaria italica
  Peptide Sequence Number=SeqID_78555
aaagctagctatagagagagcgtccgcgttctatagccacaataatgggctcgcagcaacctgatggcagctgtgatggccacccagaaccagaggccaggtggtgcgctgtgaccggaggccgagggtttatggcgaggcacctggtggccgcgctacttcgctcaggaaaatggcgcgtgcgggtcactgacctcgcccccgccatcgtgctcggccccggcgaggtggaggcactcctctccg

SEQ ID NO: 12582 - DNA, 369 bp, Setaria italica
  Peptide Sequence Number=SeqID_78556
ttctttcatggtactactaccttgggacaaattatctgacgatgatccttgggccagcaactctgtcaatggcaacctatctttcatggctacgggtgtcgcggcgccttcacacggcaaaccaggtcatggcgggagctgccttaggatctgccttcggcgctctgtggtttgctctctggcgttcgctagtgcaggaggcattgttgacttcctcactgtcggcccggattgcggtcatactcggatcagcagtatcttgtgttggcattgtcgtctacatgcgggggcggatcttgcaccggggcggacggggttcaatcccctcatactgttgctagagtcatggaatccccctacaaatttaca

SEQ ID NO: 12583 - DNA, 251 bp, Setaria italica
  Peptide Sequence Number=SeqID_78557
ccacgttcgcgtcgcggtgctcgccggggtccggagtcccccgaaggcggcgcactcctgctacggcgacctcgtggtgaagatgccgcagcacctgctcctcaggagacgcccgcgtgccgacgacgacgcgccggtcatcgcgtctaactacgacgccggcgtctccctcgccctggaagcttccggcatacacgccatggtgagagctgcgcatgtacgtgtttctttctgcaagcgtgaactacatg

SEQ ID NO: 12584 - DNA, 1108 bp, Setaria italica
  Peptide Sequence Number=SeqID_78558
accgcggtcacggccaccgcccgcgcggccgacgccgacagggacgcgctccggcagctggtgcagacgcacgtcggcgctgtggcgatggaccagaagctcgccgacccggcggcgccgagcgggggcccctaccgtccgttcgggacgtacgtgatgtgcaccccggatggcgcggtgtgcgtggacaacccgaccgctgcggtgcagatgctctacgccacgttcgcgtcgcggtgctcgccggggtcggagtcccccgaggcggcgcactcctgctacggcgacctcgtggtgaagatgccgcagcacctgctcctcaggagacgcccgcgtgccgacgacgacgcgccggtcatcgcgtctaactacgacgccggcgtctccctcgccctggaagcttccggcatacacgccatggcgacggaggcgtcgacggcgaggcagtggctgaggacgtcgaggcgggcggggcggcggccgagcctgaactgcgcgcagctggcgacgaagcttggtcggatcacgccgcaccgggcgcagatcgagtggtacaaggcgctgttcgacggcgagatggggtactacgacgcgttcaagcagcagcggtcgcccaagaagttcggcagagccaacatgtgccggttcaggcttgggctgttctgggacggcgtgctcgccatgctcgacgccggccagctcccccacgacttccaccgccgcgccaagtgggtgaacgccgcccgtttctaccagctcctcgtcgagccgctcgacatcgcagactaccaccgccgcaacctccaccggacgcaggggaggtacatgacccacggccgggagaggcggtacgagctgttcgacaggtggtggcaggagaaggggtgcatcggcggtggcgatgtcgcgtcgtccatgtcatcggcggcgagcaggaggcggcggagcaagaacgccgggctgacgcaggacccgtgcttctgggcgcgggtggaggaggcgagggagcggacggagagcgcccggagcgagcgcgacgcggcggtgctggcgatgatgctagaggagctgcaggagttcgagatctactcccgcgagctggtggcga

SEQ ID NO: 12585 - DNA, 859 bp, Setaria italica
  Peptide Sequence Number=SeqID_78559
tcagcaggaagacacgtttgaagttactggtaatggatcttcaacaaaggaagccaaacccttgggccttatggatcataggctgacaaatgccattttgaatattcatgagtttgtcaagttattcataagacaaacatctgagttacaaggaagttcttactataatgttgtatctcagaaaatagaacagttctccagattagttgatgaagttctgtctgatggcaatggcttaaatgagattgtgattgcattatctgaaatattgctagaaagtggggagtttaaactcacattgttgagggagagtgctaatgaggcagaaactaataatctagattgtgttgataaatcgacactattggaaaacaaagctcatcatgaaccatcgcaagatagcatgtctggtgcttcttcccttatcccacattcatcttctgaccctgattttgggggtcccagctctgggggtgcatttgatgttaaaactacagtgcggatatgcacaccagaggaatgtgaaaaactgaaattgcaaaagagaaatttagatattgaattaatgaagtgcaatgaaatgatcgaaactacaaatctcaagtttagtgtgatggagaaaaaccttgaagaccttacattgaagttggcagcgtgtgagaattcaaatagcttggctgaaacacagttaaagtgtatggctgaatcatacaaaacactcgaaacccagaaggtgaaactagaagaagaaataagagttttacagacaaagatagatactttatcagctgaccttgctgaagaaagcgaagccatcaggaggacatagccaagtatagagacctcaaggagaagatgg

SEQ ID NO: 12586 - DNA, 439 bp, Setaria italica
  Peptide Sequence Number=SeqID_78560
ctcacctcaagggcctgtccagggttgatatcaagtcatttgaggagttttcagatctttgttgtggtggaagttacatgctcaaacaaaccacaaaaacttcaaaccagttacaggccagaggacaccaaggctttgttatttacatttctaaagtttacaaggcaggcggagaatgtgctgtatctaagataaatttccttgacttggcagaatatgttgatatcaagcagaagaactatggtggaggggttgctccatcaaattctaacaagtcattatatgctatcatgaatgtcgtgcaagctctgaacaacaaccagagcttcataccctacagaccatataaagtaactcgtattttgcaagattctttgtgtaagacaagtggcgctgtgttgatctgttgtttggatgaagtttcctgccaagatgcagt

SEQ ID NO: 12587 - DNA, 1058 bp, Setaria italica
  misc_feature (1025)..(1058): n is a, c, g, or t
  Peptide Sequence Number=SeqID_78561
aacaaacaaaacagaacacaacacaaaccgaagcagcccccagttttacctgccgcctagggtttccacgccgaggagctacctgagatgacgacggcggcgcggcccacctgggcgccggccaagggcggcaacgagcaggggggcacccgaatcttcggcccctcccagaagtactcctcgcgcgacctcgccgcacacacctccctcaagcccaggaaagaggggcagcagaccacagaggagttacagaagaggaacctcagggaggaacttgaggaacgtgagcgcaagcattactcttccaaggataagtcctatgctgaagagagagacctgcggaaaagttcaatccagctactcttagaagggtcaaagagagatgctgaggataagatagtcccacgagaaattgatgcagatgactccgatgtggagcctaaaagcgatgatgaaagcgatgaagatgacgatgatgatgacactgaagctctaatggcagagcttgagaggataaagaaagaaagagccgaggagaagcttagaaaggagcggcaacaagcagaagaggaggccaagatgaaggaggctgaactgatgcggggaaaccctttgattaatatcaacaatcccggctccttcagtgttaagagaaggtgggatgatgatgtggtgttcaagaaccaggcacgtggagagaccaagactccaaaacggttcatcaatgacaccatcagaagtgatttccaccgcaaatttctgcagaggtacatgaagtgaagcttgtgctgtgtacggtttaaatgtgtccttggcgtggtatgtcagagggcgctatatttcggggctcatcatcttgtgatgcttgtggatgagggagggagagaccattgtgctgtataacataacaggcctttttaaaaatgtgctgtgtctcgatgagtgtttaaacacctaccctgtttcagacggggaaagttgaagtaaacatttgcgcttaagtgatgtctgaaaaaaaaaaaaannnnnnnnnnnnnnnnnnnnnnnnnnnnnnnnnn

SEQ ID NO: 12588 - DNA, 1576 bp, Setaria italica
  misc_feature (1572)..(1572): n is a, c, g, or t
  Peptide Sequence Number=SeqID_78562
gaggccagatgcatatgccaagctttgctcaatgattggcccttcaatttatggccattctgatgtcaagaaagctattgcatgcttgttatttgggggatctaagaagaggctacctgatggtgtccgattgagaggggacattcatgtcttgcttctcggtgatccatccacagcaaaatcacagttcctcaaatttgtagagaagacagctcctcttgcagtctatacatctggaaaaggttcctctgcagctggtcttacggcatctgtaacacgggatagtagctcgcgtgagttttatttggaaggaggggccatggttttggctgatggtggagttgtttgtattgatgaatttgacaagatgagacctgaagacagagttgcaattcatgaagccatggagcagcagacaatatctatcgccaaggctggtattacaacagtactcaattcaaggacttcagttcttgctgctgccaatccaattgcaggacgctacgacgatcttaagactgcacaagataatattgatctgcagacgaccattctttctagatttgatctaatctttattgtaaaagatatcagaatgtatgatcaagataagcgtatagcgaaccacattatcaaggtgcatgccagtggtgctgctgcctcatctaagaacacagaggcaagtgaaggagagaattggctgaaaaggtacattgagtactgccgtgctacttgcaagccacggctttcagaaaaagcagctgagatgctgcaaaacaaatatgttgagattagacagaaaatgagacagcaagctcatgagacagggagggccgcagcgattcccatcacggtgaggcagcttgaagccatcatacgtttgagtgaatctcttgcaaagatgagattgacaagcgtggctacaccagagcatgttgaagaggcattcagactattcaatgtctccacagttgacgccgcaagatctggaatcaacgagcatttgaacttgtcaccagagattgcaaacgaaatcaagcaagcggaggcacaaataaagagaagaatgggcattggaagccacatatctgagcggcggctgattgatgaactaactaggatgggaatgaatgaatccattatcagaagagcccttctgatcatgcaccaaagggacgaggtggagtacaagagagagcgccatgtgatcgtccgtaaggcttgatcttgatgtgggtggagaatacatatcaatgacattggaggcgtcctctccacagctgtgtgtataccgtcaatggaactgcaaccccttcccggaggacgaggcacgcaggctctagcttatctctgactggaatactgtgatctccacaagaatggatgaatttcttgcatcgtagagatagccagatgtgtagctgtaccacaatagtctgttgctgtgatcctaaattatccagtgtgatcatgtaggcttagctttggaaccaaagttctaaacctgtactacttactctaactcaattcatggatgcaaaagttgttttttctgcatctcaaaaaaaaaanaaaa

SEQ ID NO: 12589 - DNA, 403 bp, Setaria italica
  Peptide Sequence Number=SeqID_78563
gacaccacccagaaatacgtcggaacaaaaacggctgcaaatcttctccggcagcgcccgaatccggcaatccgccgctccgaatggacccagggtacaacccccggacggtggaggaggtgttccgcgacttcaagggccgccgcgccgggataatccgcgcgctcaccaccgatgtggaggatttctaccagcaatgcgacccggaaaaggaaaacctgtgcctgtatgggtttcccaatgagaattgggaagtaaatttgcccgcagaagaggtgccacctgagctccctgagccagcattgggcataaactttgcacgagatggaatgctagaaaaagattggttgtcgatgatcgctgtacacagtgatgcttggttactttcagttgcattttactt

SEQ ID NO: 12590 - DNA, 576 bp, Setaria italica
  Peptide Sequence Number=SeqID_78564
tgtactacctaccctagtaaattacgttcggtaactaaaaacggtcttgtctaaattctttcttccggtctagtcgtcccgtaattccggtctaatccgtccgctccgaatggacccagggtacaaccccggacggtggaggaggtgttccgcgacttcaagggccgccgcgccgggataatccgcgcgctcaccaccgatgtggaggatttctaccagcaatgcgacccggaaaaggaaaacctgtgcctgtatgggtttcccaatgagaattgggaagtaaatttgcccgcagaagaggtgccacctgagctccctgagccagcattgggcataaactttgcacgagatggaatgctagaaaaagattggttgtcgatgatcgctgtacacagtgatgcttggttactttcagttgcattttactttggtgctcgattcggttttgataaaaatgacaggaagcgactgtttggtatgattaacgagcttcccacgacttttgaagttgttagtgggaagagtaaaatcaaggcaccaccgaccaataataaccatagcaatagcaaatctaag

SEQ ID NO: 12591 - DNA, 256 bp, Setaria italica
  Peptide Sequence Number=SeqID_78565
tacgccatggagatgtcctcggccatctactcggagtggaggttcactgagcagtccctgccaaacgagctcatcaagagggggatggcgtccaaggatcccagcggcggcgtcaccctgcacattgaggactatccgtacgcggtggacggactggacgtgtggcgcgccatcgaagggtgggtgcagagctactgcgcgcacttctaccactcggatgcggcggtggttggcgacaaggagctgcaggcgtggt

SEQ ID NO: 12592 - DNA, 564 bp, Setaria italica
  Peptide Sequence Number=SeqID_78566
atggcgcgccacacgtccagtccgtccaccgcgtacggatagtcctcaatgtgcagagctactgcgcgcacttctaccactcggatgcggcggtggttggcgacaaggagctgcaggcgtggtgggacgacgtccgcctggtgggccacggcgaccggcagcacgatccggcctgctggctaaaactggacaccgtggcacacctcgtcgagacgctgtcgacgctcatctggatcgcgtcggcgctgcacgccgccgttaactttggccagtacggctacgcggggttcatgccgaaccgccccacccggtgccggcggttcgtgccactgcccggatcaccggagatgctgcagctggaggccgacccggaaaagttttcctggagatggtgcccgaccggttcaccaccacgctggggctggcgcttatcgaggtactgtccaaccacacctccgacgagctgtacctgggccagcgcgcgacgtcgtcgtggacggacgacggcgaggtgctgcagctgctggacaggttccgggaggagctccggcgggtggagaagca

SEQ ID NO: 12593 - DNA, 1002 bp, Setaria italica
  Peptide Sequence Number=SeqID_78567
tgacctctggcccgacgccacgctccttcatggcggcaatgacacgggtgaacgtggccaaggacagaccggcgaggtcgtcgaaccaggtggctccggcggctgcgctgttcttccggcgctggcggtcgccagccctggcgtcgtcggggatgggccagccaaagagcgccgttggcgtggacgcggcggccttggcggcgatggcgtccacgcagcgcgacacgaggccgaggctgtcggcgagggggaggaggccctcgcaggacttgagcgcgcggatggcgtccctggggttcctcaggacggtctgcgagatgaaccggtcggcgcgggagacgaggttgtcgtcggagtggtcgtcggtcatgccgaggcgctcggccgcgcagcgcagcggcgcagcggtggccggcgtgaggtcgagcttgacgccgtagcagaacttggcggccagctcgaacacctccgcgccgccggggaactccgggaggcggatgcggtgcacgtccgcctcctcgtcctcctccagcacaacttctgtttcctcctctctgatctccccggcaccctcttcttgctcccctcctgtggcctcgcgtgattccttgttcgtgatgaggtcgtgaatcttcttgctccgtgacattaacgggaacttgtggagatggaaggtcatgtcgcccacctcgatcacgacatcactgggcaatcccgtggtgcagaaccatgcttggcctttggagctggccgccgccgccggctgctgctgctgctcccgctccccgcgagccatctcccgtgcgctcttcctcctcccctgcatcgaacaatcctttcaagagcagcaacggagaggcatttctcgggaggaagagctgcccgtggtcgtgggaatcagggaattggggagagctcgctcgctactcgcaataatggtgtcctgccaacctatccccgtggtttctttgttttaggtgaggggagtaaaggattcccaag

SEQ ID NO: 12594 - DNA, 480 bp, Setaria italica
  misc_feature (456)..(480): n is a, c, g, or t
  Peptide Sequence Number=SeqID_78568
cgtggcaccacaccgtcgacccatctgggcaggagaagggaagcggaggatccatccgtccaggccccatcgacggcgaggcaaccgccggcggtggtcccaactcccgagcgacgcgtccgaggagcagccgacgccactgccaagcgcgggtcgaccatccttggtgcggtcctcgactgctccccggaaccagcggcagaacagaattccccctggcaggcagcttctcccagctcggctggccccgcgcgccccagccactagacggtggcgtcggcggcgggtgcgtggaaaggacgtcggagccgggcgggcaaatgaactgagacgccggatctaaaaataccagttccccgaggttcctccctccggcctgcggcaaacaaaatccatctaccctttctcttatctcagactgatatagtttggatagtgttggaggcttttgaaggnnnnnnnnnnnnnnnnnnnnnnnnn

SEQ ID NO: 12595 - DNA, 660 bp, Setaria italica
  Peptide Sequence Number=SeqID_78569
tggaaggcaaccctatctggagtcatgacgtgacaaggtcaaatcgtacagtgcctcatcccgcaaccacggtatttgcactgcaacatttgtcgcatccagcagtcactacaacaatggcaccccctctgcaacagctagcagtccttgatcaatcttatactgccccagcagtcagtacaacaatggcaccccctctgcaacagctagcagtccttgatcaatcttatactgccccacggcgggagctacagctcttccctgaagctgcatccactgaagatactgaaccaccacaagaccaggggatctctaatcatgtgatgcggccgcaggcaagatacccaacaacaatggccactttgcctgtacatgtatatccaatccttcctagaatggaagatgagcaatgtagcagtggcactactggtagtggagaggaaggtggtgtaggcaaccattaacagcttaagtacagaatgagagatctggtcgaaacctgagaagtttcttagttgtatcttgctatagctagtgtgctaaagaaaattatacgtctctgtgcctccgtgtgtaaatatcattttactctgtatcagctgaacttactcgtcaactagttactttgatgggagcaatctatcctttttaaaaaaaaaa

SEQ ID NO: 12596 - DNA, 229 bp, Setaria italica
  Peptide Sequence Number=SeqID_78570
gcactggtggttgagggcatcctgaatgccatgtcggccggtatactgatctacatggccttggtagacctcattgctgctgattttctcagcaagaggatgagctgcaacccgaggctgcaggtcggttcctacattgcactgttccttggtgcgatggccatggcgtctctggccatctgggcttagttagcaggatggaagcgaggcaaatgcttgaaaggagctg

SEQ ID NO: 12597 - DNA, 311 bp, Setaria italica
  Peptide Sequence Number=SeqID_78571
tcgcacgcagtacgcagagacacacacacacatggcgtcatcagtaagcttcggcacggtcgcgccggcagtggcatcgccggccggcggcaggagtactctgggccgccgcgcggcgcgcccgtccaccgcgcgcaccatccccgccgcgacgaagatggtggcggcggcgaagcaggagcagaaaggcctgttcgacgccatcttcggcgcgctgtacaaggaggagcagctgctggagacggaccccatcctcaacaaggtcgagggcaaggcccccgcgccgcgccggcgtcgaagacagccgccgg

SEQ ID NO: 12598 - DNA, 805 bp, Setaria italica
  Peptide Sequence Number=SeqID_78572
atggcaagagttggctgaggagttgaagggatatgtgaacgagaagagttaccatgttgtgcttaatgacctatcaacaattgaagagtgggatgacattaaagtatgtttcccaaacaataagaaaggtagtcgaatcatagtgtgcacaccacaagttgaagttgcaagcttgtgcgtggggcaagaaagccaagtattggagctcaagcaattctccactgatcagactatttatgctttctatgagaaggatggaactgattcaccaacactattaccaagctcagatgcagccacaagtacattgaacctagtagcgcccaccaatgagatattggggaaccaatctaaaggtagcaaagacagggaggtgttcagaaataaccttactggcatcaagactatgactaatgccttagaggaatctaaacttattggacgagagaaagaagcatctgatgtggcaggactgatttcagataaacttggtcaacaatttttagtgatttctatttgggggatgggtggtcttgggaaaaccactctaatcaaggatgtttaccaaaaccaacatcttattggcatgtttgagaagtgtgtttttgttactgtgatgcgtcctttcatgctgaaggagctccttaagagcttaatcatgcaactagacacagaatcttctgagaagaggaggtcaattatggatttggggagtggcaaaagaaaagaattagcaacgatgggtgttgaagccctcgttaaagaggtggctaggcttttagaaggattttaagttgtctttgta

SEQ ID NO: 12599 - DNA, 502 bp, Setaria italica
  Peptide Sequence Number=SeqID_78573
tgagcaactgaaccgtaaactacggcacggaagaaaccaaatcctcttgcgtcatttgcaccgttgaaaaatctttgtttggtgatcataaccgtaaaaaaaccatggtaaacgctgttggtacgattaagaatgcacgtaatgaaatgtcatcttaccaactgaaagtcaaaatattctcgaagtcgttcggtaaattgacgtaaattggcagaatgtgtctatccttccgaggaaaggaaggcgagagttgcagtctagaacatgtcctgtcccttgtctgaaggaaaaagaactgtcatcttgagccttagaggtacaggaaggcatcacacaattgactataaatctgcagatccaatgactgttcaatcagtgccgcatccttatctcgcaaagaaggaaggtgcgccaagctttttcgttttttccacagaacaaaagtttgcttgtggttagtcggggtcatgacggggaccaagctttcctgataacgccccgg

SEQ ID NO: 12600 - DNA, 1746 bp, Setaria italica
  Peptide Sequence Number=SeqID_78574
gttgttaaggtaggcagcaaacataactgtaaggaatttacgcagcacagcaatgatttatgaaactacgacactgatgccagtatttgtgtccacagataccattcaccgacgaggtgatcccattctaagcacaaagcagctggcacagtctgttattcggaagtaacctaccactcaaattctagatacaaaaaggacagaaatatggggggatgaaaatggcgaaaggacgaagcggcgttgacgccagcccagcatcaaataagaagggcaatgaagttctcctgtacaagtcgcagaaaatgaggattctcagccatgtagcaccttcaatggatccaattgtccactacagtaactggaagggacagctgagagggcaagccttcctttccactcttcaccaggcttcagagtaataggcttctcaacagctgcaggctccacacacaacatgttcttgtattctccatccccaaaatcttgcatagctttagccttcttgtcccaagggttccaaacaacagcatctggaagcccttcttttgtcacaacaaatgtttttttcttctcatgatcgatgattgcaatttttgagggggcagcaaggtaaactttatcaacttccgattcaaaaacaatggcatcgccttgctctgtgaaacgctcctttgccttcaagttgtcaaggtagtccattgtttccagcccttcaacacgcacctcacttatgtcagagacagagaagtatgtgtgatatgcaaatgtataagagaagggtctcccatcagtgttggtattcctgattcgagatgtaagactcaaatcgccagaaggtccaagagcaactctcaagcgaaactcaaaactgtgaggccagatctttaaatcttcttcagaaggcctcagaatcagatcaacaaaagctttaatagcagggtttactggtaaaggaggtggatcgttgtcaatgctccaaaaccgattccttgcgaacccatgttgctcaagatttccatgagttccaaattggggaaagcagatgggtataccaccacgaatagcttttggaggtttgaaaatagccttgctgctgagaaaaagcaactcttccccattgtcattcttccatgatgttacttgacctccataaagatagacctcggcacagcagttgcgagcgccgcgtagcacaaccttctcgaggccggaggggctcttgacgaactccgcgaacggcgacggcagctgcggcggcggcggcggcgaggcggcagcgccagcgggggcaggggcggccatctcgccacttgcccaggcgacggtggagcgatgaaccctaaccctagccttcctcctccgggggctcgcctctcctgcttttcaaaatagtaaaggcacaagtaagaataaaacagccactgcatgcagtctcagatagaaacatccacaacaagattctgaacaccaaaaataaatatacacgtccaagaagcagaacctagtttctcaacgcgaattacattagtaccattgcgacctgacattcagtttgttgctactatacagggactagcattcaattatgaaaaccagccatatcaagtatggaaacacacaaaagttacattggcatctagcaggcttccatgcaagacagataaaaaggtcacacagaccaagcagataataattgactagtgcacaaaatctattaaaatttactaaattacctattattta

SEQ ID NO: 12601 - DNA, 505 bp, Setaria italica
  Peptide Sequence Number=SeqID_78575
ttcttaaacttaaatttcttacttagttttaagtctactaattgtaaactacgtagtaagtccagggaatggagaagtttaacttaatgatgatagtgtttaccccatagatgcatattgctagtgtcttccatgttatcaggctgtagtaatcaacaaagggcaacacctggatgtcaccatatgtgcgtgcctcattccagagttcctcgtttaccatgaggccaacaaaaaacgtactgctactgctccttggcgcactgcatcatattgcatccatgttcttctaattgccatcctacgcttgaagttgtttgctgttgaaaagatgccaatcagaaggtcgacatctttgccatctggaataggtggtgacttcagcatttcaacattagagttctccaagtcttctgatgtgggcaagccgcttgcaatcgcacttacaagtttaaaatcaccagaaattatcacttcagtaataaaccaaggttccaacccctaaaac

SEQ ID NO: 12602 - DNA, 1034 bp, Setaria italica
  misc_feature (246)..(246): n is a, c, g, or t
  Peptide Sequence Number=SeqID_78576
aactaagtaagtaagaacttagaataaactagtaaatagtaatagaaaggcagtgctttcagttcggcttcagttaaacaagattaccacccacaaacatcaccaagacacaaatggcaccagcaacaatttggggcatagactatgtttcacatgtcatttcaagctcagccttaactgtaaggctgattgaagttctccaggagataggcatggaaatgtcgcctgattgaatggctcaacggntaatcacttgtacagtatcatacatgcagcaaacaagtcctccacttgccgtggtggaagaatgggcttgatgcatgagttgttggagaacaaagggcagtgatgaacagccatggatctccatgaacataggatttctgtggggacctgagtaagaatttatgcgaccataaagtagcccgttgctaacattaagctgctttattgtggattggatctcatctacacggacaaaagcatcgtcatctgttttcatcacatacttggctgatacagcagtggtctgatcaaacaaatcacagttaagcacaatgaaacacgagaagcagggaatggagaagtttaacttaatgatgatagtgtttaccccatagatgcatattgctagtgtcttccatgttatcaggctgtagtaatcaacaaagggcaacacctggatgtcaccatatgtgcgtgcctcattccagagttcctcgtttaccatgaggccaacaaaaaaacgtactgctactgctccttggcgcactgcatcatattgcatccatgttcttctaattgccatcctacgcttgaagttgtttgctgttgaaaagatgccaatcagaaggtcgacatctttgccatctggaataggtggtgacttcagcatttcaacattagagttctccaagtcttctgatgtgggcaagccgcttgcaatcgcaacttaacaaagtttaaaaatacaaccaagaaaattaatacaacttacaagtaaataaaaccaaaggttaccaaaccctaaaaca

SEQ ID NO: 12603 - DNA, 245 bp, Setaria italica
  Peptide Sequence Number=SeqID_78577
gaactactactagtatcattatgctgctacaacggatcgattaggatcagatgctatcttctcctctcttctcttccctcgatttctttcatctacaaggacggcacatcattgtctcttcatcaagaacaagaagtcagttcccggcgccggctgctcctgtggctggctcgccggcggtggtgggggccggcacccaaggggaagctcaggaagggctcgtcgccaatgtcgaagagcgagga

SEQ ID NO: 12604 - DNA, 381 bp, Setaria italica
  Peptide Sequence Number=SeqID_78578
ttcatcctggtgcccacacgagagttatgccagcaggtttataatgaggcatcatctctccttgagttctgtacatccaaattaaaggtcgtgcaagtgactgctagcatgtcgcataaggatattaccgttgcattgtctggcccccctaatattcttgtgtcaactccagcttgtgttgcaacatgcatatcaaagggcattatgcgtgggtcatcaatcaaagaatctctttcaatgatgattctcgatgaggctgaccttcttctgtcctatcgctgtgaagatgacttgaaagctctcatcccacatatcccaagaagctgtcagtccattctgatgtctgcaacttcaagctccgatgtcgacaaattgacgaag

SEQ ID NO: 12605 - DNA, 2149 bp, Setaria italica
  Peptide Sequence Number=SeqID_78579
atggaagagaaggcggaggaggtcaggcaggaagttgaaggtgccggcggggcggaagggagcccagacgccgtcgacgctgggttcgccggcgaggaagaggaggaggaagagaaggaggtgagcttcgatgaactgggcttggacgagcagctgaagagggctctgaggaagaagggcatcgcgaaggcaaccccgatacagcaggaggccatcccgctcatcctggaagggaaggatgtggtcgcaaaggcgaaaactggctctggaaagacctttgcctatcttctcccgctgctgcacgagctattgaagttgtcctcggaaggccgtattcgaaaacccgcaccaaatgccttcatcctggtgcccacacgagagttatgccagcaggtttataatgaggcatcatctctccttgagttctgtacatccaaattaaaggtcgtgcaagtgactgctagcatgtcgcataaggatattaccgttgcattgtctggcccccctaatattcttgtgtcaactccagcttgtgttgcaacatgcatatcaaagggcattatgcgtgggtcatcaatcaaagaatctctttcaatgatgagtcgaacagggagagcaaataagaccggtgcatccatatcgctgtgaagatgacttgaaagctctcatcccacatatcccaagaagctgtcagtccattctgatgtctgcaacttcaagctccgatgtcgacaaattgacgaagctacttctgcataacccatttattctaactcttacggaggttggtcgagctaaggatgatgtgatccccaaaaacgttcaacagttttggatctcatgtgatgttaaggataagatgcttcatatacttgcactgttaaagtttgagcttattcagaagaaagttcttatatttgtcaactcgattgatgcggcattcagattacgactgttcttggaaaagtttgggataagatctgcggtgttgaatgctgagttgccacaaaattctcgactacatattatcgaggcattcaatgctagattatttgattatctgatagcaacggatgatgctaaaacaaaggaggagaaacaaactgataaggaaaacaagaaagatgcaagggtgtcccgcaaacatttgcagcagactttagatgccgaatttggagttgtcagaggaatcgacttcaaaaatgtattcacagtagttaattttgacatgccaccagatcctgctgggtatgttcacagaataggacgaacagggagagcaaataagaccggtgcatccatatcgcttgtttcagcagaggagaatagtatttttgaagagattgagcatatgttgcgagatgttgaaaagaaagatacagattgcatttcacctttcccactacttatgaaagatgctgttgagtctctacggtatagggctcaggatgttgcgaggagtgtgacaacacgtgatatacaggaagcacgccgccaagacataaagaatgaaatcctcaattccaagaaattgaagtctcattttgaagagaatccaagagaccttgatttgctcaagcatgataaattgctaagcaacaaagaaattcctgcacacttgcgtgatgttcctgactacctaattgatccgaaaacaaaagaagccagcaacgttgtcaaactttccagggctgctatgggtatcgacaagccccaaaggcggaaacgacagggattcaagggaggatctggcaaaagcagagaccctcttagaactttctctgctgagggcaaatcacggagacgaggcaggaaagaaagagagggtgaaccggatagaagaaagaagagtaagaaggcagaaagctgatgtcttccatggagttttactattaagctcgctcaattttgtaggcttcttgacttcttgtttactaaacacaactgtagaatctttagacaggcgttgtttaaacaacggcaaggtttaagagtggcaaacggttatggggtgtagaatttgtttattgccttacgggaaacttctaagtatcatgctcttctcttgaatccttgcgccgttcagggtacattaacaatgatgtgaacaaaagtttcaggatttgattgaactaacgaaatcacttca

SEQ ID NO: 12606 - DNA, 580 bp, Setaria italica
  Peptide Sequence Number=SeqID_78580
tttcactggcaattttctccctgtacacaatcagtatcacaatggggatacctgaagggcaaaaactgaagacagaagcaatttatggtgatcttattgttccctgaatccttttcttttgttagagattctgtacacagataatttgccacattagtgcatttttattttcatgataaacacaaatttgctacctctccctcttaaaatctgtatctgtttatcaagggaacctaagatgcatatttaagctccacagcatggctcctgctttttttggtctcttgttcgcttcattctctcctgtggactccggtgagctagggaagtctctacattgcttccgtgtttattggcagaaaactgaaggcacctaaaaagggtgttttaactttttgctatggctacctctcagatgtaaattggcttccaggagaatagttcacttataatggtttagggcttgcttttgtctgtatattcagaatgatttgaccgttgctattttgacagccttttacattcacatatctgtattatgaagcataaatataatgttagtcctgcttaggttagtaca

SEQ ID NO: 12607 - DNA, 485 bp, Setaria italica
  Peptide Sequence Number=SeqID_78581
ccgccatttctcctcccccttcccgcatcgcacgctcctccgcctttcccgtgtcccccggaggaggtttcgagcatggcggagcagccgcacgcggaaggcggcgcgagccccaagcacgagaccctgatggagaagctcgccgacaagctccacgctggcggcggcaagggcgactcctcgtcctcggactccgacaacgacgagcggccgcgcccctcggcgcccgccgccgaggtcaagccctccttctccgtctccgcagccgcggcggccgccgaggccagggccaaggtgttccgcctcttcggccgcgagcagcccatccacaaggccctcggaggaggcaaacctgctgatgtattcctgtggaggaacaggaacatctctgctggagtacttggtggtgtcactgcaatctggatcctctttgaatgccttggctaccatcttctgacctttgtttgccatggtctcatattctc

SEQ ID NO: 12608 - DNA, 820 bp, Setaria italica
  Peptide Sequence Number=SeqID_78582
aatacatgttacgaaaaggtcaagatcctcgatgtagcttgcacctccaagttaactgtagtctttggatcacaatcaatgcaaaagcttgagctgctaacagttcgctgtggtagtgcttcggcattcaagttctttgagttaaagtgtctctctaaactaaaagaggttcgacttattggttcacaagatggcatacttaagaacgacttagagacacaactcaacgaacatccaggaaggcctgctttgaagcttgacggatcatcctcatcctaacagatatattgagctcatcactatatatgctgaccaaggcttcagtccaccacaagactactgatgcaatttcaagtgatttgtacgtcttcccacatgttatcaaagtcagagatcttgagttcgagtgacaacaagtttcatttgattacaatgggcatcgaacttctggtcccacatttgaggcctggtgagcattcatgtgagaacatgttgaagtaaaagtgaattagtctttccgcggctaggattttgatactgttatagacagattgtcaactgattgatacatatatatcaattattttgacagactgatacggccgttcactttaagctcatgctgttaactgattgatacatatatatcaattgttttgatgcagcatttagacagattgttacttcttcgatagtctaaagggtaactggtatgtacttgatcaattgtattatgcgctgctaggagaagcactgaaaaatcattcaaagctgacgtgaaaaaaaacttatatagctaataaattcagtcaagttcgtt

SEQ ID NO: 12609 - DNA, 897 bp, Setaria italica
  Peptide Sequence Number=SeqID_78583
accggatcccagaggtgatcattcctgaagatctggttgtcaacattgcactatctactcgctaatgagatcaacagggcctttgtcaatcttcgccagattgctcttggccgggacataaagaagttccttatggatgccgcagcaggtggcagtaccatggagatgaggatgcggaacagtgggtgttcgcagggacgtacgcggatgagctctttgaaaaagaggtcagtgaatctgggttcctcccaatggtcgcaaacgatgatcctctcttaatcacctatcacacatgcctttatctgtgactatggaactagctggctcaatgctacaatggatagaatgaagattttatgttcccatgagccacattgcataaatttgcaaggtaatgttgactaaattctgttcaaacatgaaccaagatttgaaaggttataactcttttgctcctataattttgtaggcatccatgctttggagaagaaggttgactgcactagcttatgaattccctgacattgaactcatgttacttgcagttggttcagcatggagtttacaaccaagggatgggctacatgcaaccacaggttatgtatcctacttttatttgttagtgaaacaatgttatagtaaatctctgatactaaacatgtcacaaaatttcaaacactacattatttcactggcaattttctccctgtacacaatcagtatcacaatggcgatacctgaaggtccaaaaactgaagacagaagcaatttatgttttgggtgcattgagtttacacaaggagtgcatgtgggactcctctcatccagggggagctgctagactatcaatagccatcggtgtctacattatgttctacgagtacttttgttttcatt

SEQ ID NO: 12610 - DNA, 1000 bp, Setaria italica
  Peptide Sequence Number=SeqID_78584
tccgctccggtttcccggcggcgcctctctgagctctgacgcgatcgatgccgtgtggctccgtcttggtggatctagggtttcggcggaggcgcccggtccccggcgatggcggacgacggcgggagccacgagggcggcggcggcggaggcgtccgggagcaggaccggttcctgcccatcgccaacatcagcaggatcatgaagaaggccgtcccggcaaacggcaagatcgccaaggacgccaaggagaccctgcaggagtgcgtctccgagttcatctccttcgtcaccagcgaggccagcgacaagtgccagaaggagaagcgcaagaccatcaacggggacgatctgctctgggcgatggccacgctcggattcgaggattacgtcgaccccctcaagatctacctacaaaagtatcgagagatggagggtgacagtaagttgtctacaaaagctggtgagggctctgtaaagaaggatgcaattagtccccatggtggcaccagtagctcaagtaaccagttggttcagcatggagtttacaaccaagggatgggctacatgcaaccacagtatcacaatggggatacctgaagggcaaaaactgaagacagcagcaatttatgtggttatccatgagctacggaagtctctacattgcttccgtgtttattggcagaaaaccgaaggcacctaaaaagggtgttttaactttttgctatggctgcctctcagatgtaaattggcttccaggagaatagttcacctataatggtttagggcttgcttttgtctgtatattcagaatgatttgaccgttgctattttgacagccttttacattcacagatctgtattatgaagcataaatataatgtagtagtcctaggcgcaaataatggtgattaccatataagtctgttatcagtctatgctcattttctggaacttcattcctgctaggttgtccctcttcttttttctctttgctacc

SEQ ID NO: 12611 - DNA, 479 bp, Setaria italica
  Peptide Sequence Number=SeqID_78585
cggggtgcggggcgcgtgggcgtgggtgcggtcccgcgcggtggcgccggcgttgcaggcggtggtgtgggcgtgcatggtgatgtcggtcatgctggtggtggaggctacctacaactgcgccgtcagcgtcggcgtcaagctcctgggatggaagcccgagcgccggttcaagtgggagcccctcgccggcgacggcgacgaggagaagggggatgctgcagcagctgctgctgctgcttaccccatggtcatggtccagatacccatgtacaatgagctcgaggtgtacaagctgtcgattggagcagcgtgcgagctcaagtggccaaaggagaggttgatagttcaagtgctggatgattccacggatccctccatcaagaatttggtggagaaggaatgtgagaattggtcaagcaaaggcgtaaatgtcaaatatgccaccagaattggccacaaagggttcaaagcaggag

SEQ ID NO: 12612 - DNA, 629 bp, Setaria italica
  Peptide Sequence Number=SeqID_78586
gcgcctctcgcgtccctcagttccccgcctctccgcggcgatgcgctggctaccgaggctgctctcccacgccgccgcggccgggagggccgccgcggcagcgaggtccaccaccagccacgtcaggggaggatcccacgggttcgccagtggcggctgggatgggtcgccggctgtgccccgggagtggctgcggaagctgtggggggaggagctgaggaagcggaaggaggccgcgagggttatcggcgcgttcgcgaggagctatcggtccgtggaggctgcaggagcggccagggaggcaccgtcgaggagctatcagttcgacgacagggacctcgatccagtcgaggccaaactggcccctcttctcgcaagagctaacctcgtgatcgccagggacattgagtgggcaagcatcatgtttgcttttgagcaggagagcagatatatcataatggacccactctttccacaatctccagtaggttttattcgagagaaaagcaacgtcatctttaggcagctactcagaacaagacggccatttgttgcagaaataactgatgctatgggcaatgagatatttaaggttcgcaggccattttggttatcaacagctcaattta

SEQ ID NO: 12613 - DNA, 1321 bp, Setaria italica
  Peptide Sequence Number=SeqID_78587
tcaaaacaattctagaatcgtctggaactacagagcaccagcgcggccgcgcctctcgcgtccctcagttccccgcctctccgcggcgatgcgctggctaccgaggctgctctcccacgccgccgcggccgggagggccgccgcggcagcgaggtccaccaccagccacgtcaggggaggatcccacgggttcgccagtggcggctgggatgggtcgccggctgtgccccgggagtggctgcggaagctgtggggggaggagctgaggaagcggaaggaggccgcgagggttatcggcgcgttcgcgaggagctatcggtccgtggaggctgcaggagcggccagggaggcaccgtcgaggagctatcagttcgacgacagggacctcgatccagtcgagggacattgagtgggcaagcatcatgtttgcttttgagcaggagagcagatatatcataatggacccactctttccacaatctccagtaggttttattcgagagaaaagcaacgtcatctttaggcagctactcagaacaagacggccatttgttgcagaaataactgatgctatgggcaatgagatatttaaggttcgcaggccattttggtttatcaacagctcaatttatgcagaagtggatggtaaggagataggtgtagtccacaggcgttggcacctttggcggagaatttatgacctgtacttagggaataggcaatttgcagttgttgagaatccgggtttctggaactggacttttagcctggtggatgaagatgataaactgttggctcagattgatcgtaactggaggggcattggctttgagctcttcacggatgctggccagtatgcaattcggtttggtgacgagggactaaggcagaagtttgccctcgcagcagatgtcgaagaactacatgttgctcggcagctgactttgcctgaaagggccgtggctctcgcccttgcaatatcccttgacagtgattacttctctaggagacgtggctggggacttccttttctcattgccacagagtagacacacgcaggccgccatcgcctgtacacagggggaaaaatgttgtttctcattgttgatacaagcttagcagtcgtaccgttatcaggcgattgggatcatcgccagagacaggaaatggttcctgtgtgactgactatcataagattgctggcttcattcttctgcttcacgcgaaacctgaaagtggaggttggcttgcctccaactttgccacccatgtaggttgtcgcaaagcggagattgctgaagtttttcctttcttctgtatg

SEQ ID NO: 12614 - DNA, 346 bp, Setaria italica
  Peptide Sequence Number=SeqID_78588
aaaaccaatctgaggtttctagtttactgttgttggtttttcttttttaaaaaagaaaagaatgcagaactgctaagatattgttttttgttctggcatgcttcgatcaatactttcccgaacaaaagatgtcataaaattgtttttacttggtggaagccttgctattgcaacaggtacttttgacatcacctcttgtcatgtggtgacctattgttatcttggcttagaatataagagtctgctaactgagggaagtgattctaaatgcctagcccactcattcatgttattgatatttattcatcactgtccagctgctagccattagcgaaaatcaccactg

SEQ ID NO: 12615 - DNA, 274 bp, Setaria italica
  Peptide Sequence Number=SeqID_78589
gagttcttgtgaataaaatcgattggaacacaatatggtgcagaattaacatattcttgatggagtgtgtttcccttttcgcgttgaaccatccaatgtgctgcacggagttgatatggcctgagctgaggaatcaaatcagggagaccaccttccaactgttccgcattaatcgaaggcttaacggcctcataaaaagcagcaagatcaaactgtgaatcactttttggtgtgaaatcagcattagcatcatcatcaatcggcacgccaaggc

SEQ ID NO: 12616 - DNA, 385 bp, Setaria italica
  Peptide Sequence Number=SeqID_78590
ctccggctacccgccggaggtgatcccgcggcggtcggacccgtggtccgccggcaggtagacgaacaggtggggaccacgggtccgaccggcaggtagacgaacaggtgggggacgggcctcgcgaggcgctccgagacggtggccgcccagggcttgcagacggcgacgaggtgcgccgacgcgagcgggctgatcctgtagaggatcttctcggtgaggtggagagggaggagctccacggggccgccgccggcctcgccgctgctggcgtcatcggcgtcatcatcggtgcgtgagctggcgacagcctttgctttgttggtcggcctctttgaggagcttttcaccaactcttctcgaaacaacttcaccgcaagctccc

SEQ ID NO: 12617 - DNA, 1623 bp, Setaria italica
  Peptide Sequence Number=SeqID_78591
ttcctaggaaacaatgtatacatgatttcatggtgataaaactcatttcaatcctctcttcatttattagttgctgcatcataaaaaaatactgactgccttacgtactatacccttggtaagaaccatgtcgccgacgagcatgctccctgctcggtgacagcttgcttaaacaaaacctcccggtcttccatggagtagacgccccaggtgttgccgtcgtccctcttgcactgtgcgcagtaccgcttcttgtcgacgaagtagatgcagttgctcctgcagccctccatgtccgacgagcgcacagcgaacgacgacgcggggctcacgaaaagcgcacggtcgccggcgagctccttcacctccgtccagcgccggccctccacgtccagccggtacacctcgaagccgacgatggagaggagctcatcggcgccgtgacggcagaacaggatctcgcggtagtcttccttggaggccagcactcgacggacgaagaggacctccccgccggactccagcaagtggccgtactccgtcgcgagggcggagcgcggcggtgcgaaccagtcaaacaggctcgccgccgggagcttctcgatgcagagcggcggtggcgcggtggcgtcgaccaggaacacgtacccttccttgtccagtatgtagaagcggccgttacagttggccactgacatgatggcgtcaagcgggtacccgcctgccgccaccgaccgcttcgaccactcctcgccgccggaacgccgccagaacatgagctcgccgatgccaatggagacgaaggagtcggcaccgccggcggcgatcaccgggttcccgcgcagcttctcgacgtggattctctgccgcgcgccggtgatcgggttgacgaggaggacgctcgtctcgcaccagcagaagttcgcgaaggccaggcggccgctgggcatggcgccgacgcacccgaggccgttcgtgtccgccaagcgcacgcggctcgggatcacctccggcgggtagccggagtgcatcgagacggagaagacgaccccgcggcggtcggacccgtggtccgccggcaggtagacgaacaggtgggggacgggcctcgcgaggcgctccgagacggtggccgcccagggcttgcagacggcgacgaggtgcgccgacgcgagcgggctgatcctgtagaggatcttctcggtgaggtggagagggaggagctccacggggccgccgccggcctcgccgctgctggcgtcatcggcgtcatcatcggtgcgtgagctggcgacagcctttgctttgttggtcggctgacattgccacttgctcgggttgcccgacacgagctcgccggccagcatccccgtcctggccgtgggcgccggcgctaggaccggcggctccacctcgacgacgttcgcgcgggcatgccgctcagcttctctgcaccggccggctctacgcctggcttccccgcggcgaggctggagcgtggagcggcacagtggggcagcgcgcagaatgaagccgcatcgagcgacggaagtcaggtcgcgtggaggaattaaaggagacggcagaaaagaaagattggataagaaagagatgcgttaaaag

SEQ ID NO: 12618 - DNA, 283 bp, Setaria italica
  Peptide Sequence Number=SeqID_78592
tctttcgttcttacctaataacgaaaggacaataaccccaaaccctaagaccatccccaatccggccgccgcgtctaccgatccgttagatccatggccgccgccgccgccgccgctgccggcgactccgctgtacccaactgggtgatgctggagcgcttggccttccggagggacgaccccgcctccttccgcgaggacaggaggaccttcgcttccggcaccacctccgccggcactcaattcgacgtctccttcatcctcgccgagcctcccaccccct

SEQ ID NO: 12619 - DNA, 348 bp, Setaria italica
  Peptide Sequence Number=SeqID_78593
aagaggatagatcgaatcaatagccaactcctctcgtcgtcctcgtctccaaatcgaggcataccccaaccctagccatccccaatccggccgccgcgtctaccgatccgttagatccatggccgccgccgccgccgccgctgccggcgactccgctgtacccaactgggtgatgctggagcgctgggccttccggagggaccgaccccgcctccttccgcgaggacaggaggaccttcgcttccggcaccacctccgccggcactcaattcgacgtctccttcatcctcgccgagcctcccaccccctcgcgcctctacctctcgtggccggaaggcccaagaacgg

SEQ ID NO: 12620 - DNA, 1213 bp, Setaria italica
  Peptide Sequence Number=SeqID_78594
ccatcgacgaatccgatcctttcggggaggtagtgcatgattacttcatctacatagctgatccctcctcacagtggacacccctgctcagacggctgcccccctgcaccgagtacgacgattattttgagaggcaagttactcgcgttttgccggcgctggctgttggtctgttgtgccatggcgaagacgagtttgccgtggcgcatctggacatcaggtctcgcaaaaaaaaatcagggtctcgcaaaaaaaattacctatccaagctgagctatgcgtgctacgctcgtcattgtcctgcagtgatgatgccaaatgggagaccaagatccttccgatacagtaccaatacgatgatttatcctctgattttctgtactggtcagtggatggtgtagttcccttcaagaatgccttgtgctttgttaactactgtagaggcatccttttctgcgacggcgtctttgaagacagccccaaggtctcctacatccgcttgcctctggatacttatatccgaggggctgatggcgaagcacgcaaggggatgtaccatggcttgtgtgtcactgaaggtggccatcggtttggttatgttgtttgtattgttcatgatggaaaatcttatggcccgagcatgcccaacactggtttcaccctcacctcccggacatttaagatgacagggaattgcaccacgccgtggcagtggaatgaggatgctgttgtcacttcagatgaactatggcatgcaaacaccatggagagtctccctcatgacattgtgatgctcccattgctgagtatggataaggccaatgttgcgcacctttcattgattgactgggatggtggattctcattagtttccatcgacttgagtaacatgcaagtgatgggcccagtcattacatacctcaaagggaaggatgatactgctgatgctgacatcgtcgaggaaaagaaaggattaggtgcacactttattccatccgaattccccaagttcctggatctcaggaagagagagaatcatccataagtcctgtcaccatatcggctggccaccgtcgtcatgtgtgttgcttcttcattttccagttctgttgtgctggattctactgccgactttgttgattggctactacaattctgagtttagtcctcagcttttgtgtgttccctgcacttgtgtactataatagccagg

SEQ ID NO: 12621 - DNA, 1459 bp, Setaria italica
  Peptide Sequence Number=SeqID_78595
gagaggcagagatggcggcgtcggatgttgagtaccgctgcttcgtcgcggcctcgcctgggccaccgacgacaactcgctccacaacgccttcagcccttcggcgaggtcctggagtccaagatcatcctcgatcgcgacacccagaggtcccgcggcttcggcttcgtcacgttcgcgagcgagcaggcgatgcgcgacgccatcgaggggatgaacggcaaggagctcgacggccgcagcatcaccgtcaacgaggcccagtcccgccgccgccgccgctgccggcgactccgctgtacccaactgggtgatgctggagcgcttggccttccggagggacgaccccgcctccttccgcgaggacaggaggaccttcgcttccggcaccacctccgccggcactcaattcgacgtctccttcatcctcgccgagcctcccaccccctcgcgcctctacctctcgtggccggaagggcccaagcaggatagccagggcctggtcatggcggccaaccgcaacctcgtcctcttcaggctcgactccctcgtcgacaaatcccagcctttcggggaggtagtgcatgattacttcatctacatagctaatccctcctcacagcagacacccctgctcagacggctgcccccctgcaccgagtacaacgtttatattgagatgcaagttactcgcgtgtttccggtgctggctgttggtctgttgtgccatggcgaagacgagtttgccgtggcgcatctggccatcaggcctcgcaaaaaaaaatcagggtctcgcataaaaaaatcagctatgcaagctgagctatgcgtgctacgctcgtcattgtccagcagtgatgatgccaaatgggagaccaaggtctttccgctacagtaccaatacgatgatttacactatgattttctgaactgggaagtggatggtgtagttcccttcaagaatgccttgtgctgggttaactactgtagaggcatccttttcttcgacggcgtctttgaagacagacccaaggtctcctacatccgcttgcctctggatacttctttccgagggactgggactgatgccgattcactcaaggggatgtaccgtggcttgtgtgtcactgaaggtggccatcggttggtatttgttgatgttgcccgtcatgatggaaaatgttatggcccgaggatgcccaacactggtttcaccctcacctcccggacattgaagatgacagggaattgcaccacgccgtgggagtggaatcaggatgctgttgtcacttcagatgaactatggcatgcaaacaccatggagagtctccctcgtgacattgtgatgctcccattgctgagtatggataaggccaatgttgcgacgacaacctttcctgactgggaaactttaagtaaacttaagggttaaatttaaggttaaggtaactaaagtaaa

SEQ ID NO: 12622 - DNA, 1149 bp, Setaria italica
  Peptide Sequence Number=SeqID_78596
tactaacaataagagctgatccctcctcacagcagacacccctgctcagacggctgcccccctgcaccgagtacaacgtttattttgagatgcaagatactcgcgcgtttccggtgctggctgttggtctgttgtgccatggcgaagacgagtttgccgtggcgcatctgaccatcaggtctcgccaaaaaaaatcagggtctcgcataaaaaaatcagctatgcaagctgagctatgcgtgctacgctcgtcattgtcctgcagtgatgatgccaaatgggagaccaaggtcgttccgctacagtaccaatacgatgatttatactatgattttctgaactgggaagtggatggtgtagttcccttcaagaatgccttgtgctgggttaactactgtagaggcatccttttctgcgacggcgtctttgaagacagacccaaggtctcctacatccgcttgcctctggatacttctttccgagggactgggactgatgccgatgcactcaaggggatgtaccgtggcttgtgtgtcactgaaggtggccatcggttggtatttgttgatgttgcccgtcatgatggaaaatgttatggcccgaggatgcccaacactggtttcaccctcacctcccggacattgaagatgacagggaattgcaccatgccgtgggagtggaatgaggatgctgttgtcacttcagatgaactatggcatgcaaacaccatggagagtctccctcatgacattgtgatgctcccattgctgagtatggataaggccaatgttgcgcacctttcattgcttgactgggatagtggcagattctcattagtttccatcgacttgagtaacatgcaagtgatgggctcagtcattacatacctcgaaggggaggatgatcctgctgatgctgacatcgtcaaggcaaaagtaaagtaatttattgttgcacactttattccatccgaattccccaagttcctgggtctcagggagagagagaaccatccataagtcctgtcaccatatcggctggccaccgtcgtcatgtgtgttgcttcttcattttccggttcttagatgacgttgtgcttgattctactgccgactttgttgattggcttacttctaattctgagtttag

SEQ ID NO: 12623 - DNA, 1754 bp, Setaria italica
  misc_feature (1728)..(1754): n is a, c, g, or t
  Peptide Sequence Number=SeqID_78597
cgtctccaaatcgaggcataccccaaccctagccatccccaatccgcgcggcatatctaaacatccgttagatccatggccgccgccgccgccgccgctgccggcgactccgctgtacccaactgggtgatgctggagcgctgggccttccggagggacgaccccgcctccttccgcgaggacaggaggaccttcgcttccggcaccacctccgccggcactcaattcgacgtctccttcatcctcgccgagcctcccaccccctcgcgcctctacctctcgtggccggaagggcccaagaagcggggccagggcctggtcatggcggccaaccgcaacctcgtcctcttcaggctcgactccctcgtcgacgaatccgagcctttcggggaggtagtgcatgattacttcatctacatagctgatccctcctcacagcagacacccctgctcagacggctgcccccctgcaccgagtacaacgtttattttgagatgcaagatactcgcgcgtttccggtgctggctgttggtctgttgtgccatggcgaagacgagtttgccgtggcgcatctgaccatcaggtctcgcaaaaaaaaatcagggtctcgcataaaaaaatcagctatgcaagctgagctatgcgtgctacgctcgtcattgtcctgcagtgatgatgccaaatgggagaccaaggtcgttccgctacagtaccaatacgatgatttatactatgattttctgaactgggaagtggatggtgtagttcccttccaagatgccttgtgctgggttaactactgtagtaggcatccttttcttgcgacgtcgtctttgaagacagacccaaggtctcctacatccgcttgtcttggtattactttcttttccgtagggtacttgggactgatgccgatgcactcaaggggatgtaccgtggcttgtgtgtcactgaaggtggccatcggttggtatttgttgatgttgcccgtcatgatggaaaatgttatggcccgaggatgcccaacactggtttcaccctcacctcccggacattgaagatgacagggaattgcaccatgccgtgggagtggaatgaggatgctgttgtcacttcagatgaactatggcatgcaaacaccatggagagtctccctcatgacattgtgatgctcccattgctgagtatggataaggccaatgttgcgcacctttcattgcttgactgggatagtggcagattctcattagtttccatcgacttgagtaacatgcaagtgatgggctcagtcattacatacctcgaaggggaggatgatcctgctgatgctgacatcgtcaaggcaaagaaagaattatgtgcacactttattccatccgaattccccaagttcctgggtctcagggagagagagaaccatccataagtcctgtcaccatatcggctggccaccgtcgtcatgtgtgttgcttcttcattttccggttcttagatgacgttgtgctggattctactgccgactttgttgattggctacttcaattctgagtttagtgctcagcctttgtgtgttccctgcacttgtgtactataaatagccaggaaaaacacctttaccaggctcatccgttgaactatatgataatgctagatgatgtgtccatgccttgctaaaaaaaaaaaaaaaacatgcgagttaaaaatcctgcaatcatgtttcataggtnnnnnnnnnnnnnnnnnnnnnnnnnnn

SEQ ID NO: 12624 - DNA, 260 bp, Setaria italica
  Peptide Sequence Number=SeqID_78598
ttttttcccttctaataacccttgggtcattatatatagaagtgaggggatggtaatttctcgcaagcctctgatggttacatcattcatataaagcccatttcatgagttaggccattcccctaacttattgcaacatatgatatttctcgccgcaacacaattacgttgctaggagtaaaagttccctattgcaatattcgttgctatggttggagtgccacttcaccgctgcaaacatcatcgtatgcttgtcacaa

SEQ ID NO: 12625 - DNA, 362 bp, Setaria italica
  Peptide Sequence Number=SeqID_78599
tgctggttaaagggtgaacagcaatctgtgagcgtttgtctgcgcagaggcgcaaaccagatgtgccagcagcatgttgactctgctatgaccaaattggcaagagacaacaccgatgcggatcaggtgtgcacctccagacatgcatccaggttgccgttagccactctaatcaacaagacatgcttgatagcatcatgcctctaagttgaactagaacaccgtatctgaaccttggtttcggtccaattctttccggattctttcactactaagagcttgtttgatagaaagggattggactggaaccaatgggattgagtctaaaatgaaactaatttctcctccaatcctcctgttcc

SEQ ID NO: 12626 - DNA, 812 bp, Setaria italica
  Peptide Sequence Number=SeqID_78600
tttgtttattttgtttcggtttattttcttaggtttgtttgttcttaccttcctagtactattgtctattcctaggttgccgttagccactctaatcaacaagacatgcttgatagcatcatgcctctaagttgaactagaacaccgtatctgaaccttggtttcggtccaattctttccggattctttcactactaagagcttgtttgatagaaagggattggactggaaccaatgggattgagtctaaaatgaaactaatttctcctccaaatcctcctgttccacttcaattacctactactccctccgtcccaaattacttttttctagatatatattatgtatatccaaattactttttctagatatatattatgtcaaaatgtccaaatatacagtaaaatgtccagatatacagtaaaagtttatgtatttagaaaagtcaaaataaatagtaatttgggatggaggtagaggtgaaacccgtagaggaacgattcccgcaggtggccagatgtgttctaggaccgaatttatatatacttttgagtctaataataaagtcacaccgtgactttcgtcatctgtaccgtcagttagatccagaacggttgctaaatccctcttcctcccttcatccgtgacccctgctcttggagatctccgccccagcaccaatgtcgccgcccccacgcacctccctacctaacttccatagtgataaggctatgagggcagaggaactgccacggactgcggcaagcaaggagaacatccatctgctgccggtgcagaggtagccttagggg

SEQ ID NO: 12627 - DNA, 441 bp, Setaria italica
  Peptide Sequence Number=SeqID_78601
caggatccgatgcccgccgtgctatgccactgaatatgctcatcactggtggattagatgttcaaatgctcctaagaaatgtagaaagtggacaaccgaatctctttggtaattcacgtaactgggagttgccatttttgcagggttttttgatggcccaaaaccatacaggtgcttcatcatcaattcccattactgctggcagttctagaggatcaaatcgacgttatgcctcacgctctgtacctggtgttgggagttcactcctaggtcctcaaattgatgaagctgaggttcatgctgcttcactgggtgttggttcagaaatcactgcgccgatgtttactcccggtactgaattgccttgtacagtgaagctcagaatatggcggcacaatatcaaggaaccatgccgttctttagtaaccggtaggtcttatt

SEQ ID NO: 12628 - DNA, 2283 bp, Setaria italica
  Peptide Sequence Number=SeqID_78602
tcttattagctcagcgggaggtctcacctcgaacaaaacaccaagctaaaactcagtggaccaaaactccaagatgtgatactggttccactgaattagaattttgggttacggatgctcagcacgatctcctttattgggcagaatcacagtccttgcactgctggtgtgccaaatattgccctcttgtgcctgcttcaagggcaaccattgcagctgcgttcagtccagatggaagagtccttgcatctacgcatggtgaccataccgttaaaataatcgactaccaaactgggaaatgtttgaaagtattgcaagggcatcagcgcactccatgggtggttagattccatcctctgcattctgatattcttgctagtggaagtttggattgtgaagttcgtctctgggatgctaaaacatcacactgcactacagtacttggcttctataggccaattgcgtcaattgcatttcatgcaacaggggagcttatggctgttgcgtcaggtcacaaattgttcatatgggactacaatagcagagctttggaccctccaatgatactaagaacacgccgttcactgagagctgtgcagtttcacccccatgctgctccatatctacttacagcagaggttcacgaccgtgattctgaagattcaacaatgacccctgcacttctgaaaaattatgctttcagagacatacctctccttggcagttctggggtagataacttgattagtgaactaccatacacacataattttgagcatgttggtgcttcatcatcagttccagtcaatgctgatagttttgctgggtcaatgacctctgtacctggggttgggggctcccttcttggtactcatgctgtctcatttggtgttgggtcagagcgagctacctctctgcttgataatggcactgaattaccttgtgcggtgaaactaagaatatggcgtcacaacatcaaggatccatttattgcattagagcctgaggcatgcctcttgacagttcctcatgccgtactttgcagctgaagcttgagacttatttacttgaagttacaattacatttactgcagtgaaatgggtacccatttttccccctgtggacgatttttggttgcttgtgttgcatgtgtgctgccacaaagagacggtgaccatggaagtcaattgcatgacaattatgattctactggggctggaacatcaccaactcgtcacacacttccctctcgccaaattgtatatgagcttcgggtctattcacttgagaaggcaacgtttgggacagttcttgcatctagagcagtaaaggctgctcactgtttaacttccgtccagttttcacctacatcagaacacatactattggcatatggtcggcaacataactcactgttgaggaccattttaattgatggggagacgagaattcctttgtacagagtcttggaggtgtatagagtttcagacatggagcttgtaagagttcttcctagtgctggagacgaagtcaatgttgcatgttttcatccttcccctggagcaggtcttgtttatgggactaaggaagggaagcttaggtttcttcaacacaacagtgcaagcatgggcttgaattcctctgctggggacaatattcatgactcatgagatttagaggcatgtgctgtaaatttaattctgggcatattaactgcacctctgcatcacatgcttacgttgctgaaccttctcttcataactgctttcacaacgtcctggaagaggaactcgcttattagggagactctcatctctccaagagggcctaacaggaaaaaacagatttcagcctccaagtactctgattaacgcgcaatcctttgcacctttagttacaattaacaaggatgcatagacactctgcaaaaccttggtactggcgacgagagctgctatgtgtaagaagccccatctgtatgtgtaaacaacatagaagaaattgctctcatgcagcatgagttactaatggagtaatggttgacagtgtatggatgcgagttatatactgataccaggcatccgggagaagcaacgaactgatgtgaaatcttgctatgcatgttttgctttaattgattctagcaggcttttttgaaatcttgctgtgcaggagtaatagagatgggaacaaaggaaaagataaaacttgtacctcaagttaaatcatttctagaagttatgtggaacatgctattccaattccttatattaggatttttt

SEQ ID NO: 12629 - DNA, 1726 bp, Setaria italica
  Peptide Sequence Number=SeqID_78603
acaagaattgcagggcagcagctctatcagtaattttgagaggttcggtgctagagatgatttgcatgtgtcttccccgagcaacactgagccaattccatcaacagctgggctgtcaggatccgatgcccgccgtgctatgccactgaatatgctcatcactggtggattagatgttcaaatgctcctaagaaatgtagaaagtggacaaccgaatctctttggtaattcacgtaactgggagttgccatttttgcagggttttttgatggcccaaaaccatacaggtttgcatcctgcacttgtgaacaataatgtccttgaagacctatctattgatggtactgcagggactaataacttaactagagaatcaccgcacatgcataactttggacgtccaggtgcttcatcatcaattcccattactgctggcagttctagaggatcaaatcgacgttatgcctcacgctctgtacctggtgttgggagttcactcctaggtcctcaaattgatgaagctgaggttcatgctgcttcactgggtgttggttcagaaatcactgcgccgatgtttactcccggtactgaattgccttgtacagtgaagctcagaatatggcggcacaatatcaaggaaccatgccgttctttagaaccggaggcatgccgcttgacgatttctcatgcagttctttgcagtgaaatgggtgcccatttttctccatgtggacgatttctggtagcctgtgttgcatgtttgctgcctcaaacagaaggtgaccgtggtagccaattgcctgtgccgtatgattctgcaggggctggatcatcaccaactcgccacccacttccctctcaccgagttatctatgagcttcgggtgtattcgcttgaggaggcgacatttgggaatattcttgcttccagagccataagggcagcacattgcttaacttccattcagttctcacctacatccgaacacatacttttggcatatggtcgtcgtcatggctctctcctcaggagcatagtcatggaaggagacaatgggattcctgtatatactatcttggaggtatatagagtttcagatatggagcttgtaagggtgcttcctagtgctgaagatgaagtcaatgttgcatgttttcatccttcaccaggaggtggtcttgtttatgggactaaggaagggaagctcaggatcctccagcacaatggtgcagacacgacaaccatggggatgggttgctttgttgaggaaaatatgcttgaggcaattcagaggtatgcattggaaggctgaatgaatattgatcgcatcatgtgcttttatgcttacttccatggaagttttctcagcaggtttcatctctgtgattccgtccaagggaaagcgttaggtccatctccaactagattatgacagataattctcaatgagtttgttcgagtgccttggggattggtctgtgcagaggcggtaggagatgtgtaaatttacatggccatcggcgtagctgccatcacggtgctgtaattatacctttgtacatgtatcctacagtcagcttaactcaattgctgttgtatttcagaaaaaatgacggtgctgatccttttaatgtgaaagtgtttttttttgttgtatactttgcctgtccttacaggcagtcaaacgatgcaaggtgaaattacattggccaaactaatttggttg

SEQ ID NO: 12630 - DNA, 487 bp, Setaria italica
  Peptide Sequence Number=SeqID_78604
cgtcgtcttcgccttctcgctgctgctcaacagcgtgcagccggtgctgtcgggggtcgccgtcggcgccggctggcagtggctggtggcgtacgtcaacctgggatgctactacctcatcggcatccccgtcgggtacctcatcgccttcccgctccgcggcggggtgacggggatgtggggcggcatgctcagcggggtcggcctgcagacgctgatcctggtcgccatcaccatgcgcaccaactgggacagggaggccagcgaggcgcactccaggatacagaaatggggtgggtcggccgctgtcaaagctttgggtgagtaaactgaactgaactgaagacgggcgacatgtgtgtagaaatgagaacacctgccagcatgcgagcaaaagttgcatgggggcagtaagctttggcttgttggtttctggcgagggaacggacacggtgcttgagatccgacgcctgcttgggttgtatct

SEQ ID NO: 12631 - DNA, 388 bp, Setaria italica
  Peptide Sequence Number=SeqID_78605
gtcactctttcatcacaaaaaggaacttccggcaacctaggagccttttgttcagcctccaaagatgccataccatcttttacttgatttacatgttccattctcaaaactgttgtattgctactgtcccacaatttcctaaaccttcttggctcacctgcaaaaccctctgccttttctttctcagactggtcgagcttggtgaaggaatttgtcatcagatcgttatttccttggcatgcagcttcattaggtctgcatctctgatcattgctaaccagttcataaaattcagcatctgatgtccaatttcctaattgttctagttcactgccattttgcatcatctcctgagggttttaccctggtagaataataaaatacgtca

SEQ ID NO: 12632 - DNA, 1424 bp, Setaria italica
  Peptide Sequence Number=SeqID_78606
gatagcgtagaaagaaataatagaaaaagagctccagtataaagatcttcattggtgcgcaatccaattgtataccaccactgataaaccccagaataagcaatattcactggaccggcagcacctcctcgagtaaaggcttccaccgcgggttgcccaaaatgaggatcccaaatggcatgagcaataggtcttacgtgtaaaggatcctgtatccatgattcaaaatttccttgccaagctacatgaaacagatttccagacgtccatagaaagattattgctaactgcccaaagtgagaagcaaaaatgttctgataaagacgttcctcagtaatatcatcatgactttcgaaatcatgtgcggtagcaataccaaaccaaatacgacgagtagtggggtcctgagctaagccttggctaaacctgggaaatcttaattccataatgcctttcaaatcctcctagccactatcctactgcaataattctcgctaagaagaatgcccatgttgtggcaattccacccagaaggtaatgggttactcctacagcacgtccttgtataatgctcaaggctctaggctgagtagcaggagcaacttttaatttgttgtgagcccaaacgatagattcaatgagttcttgccaataaccacggccgctgaataaaaacattaaactgaaagcccagacaaaatgagcgcctaagaaaaaaagaaccatatgcggataatgaagaaccataagactgaattacttgggatgcctgtgcccacaagaaatctcgaagccaaccattaatcgtaatggaactctgtgcaaagtttccccctgtgatatgagttactatcccttgatcacttatagtaccccaaacatccgactgcattttccaactgaaatggaaaataactaccgaaatggaattatacatccagaatagacctaagaaaacatgatcccaggcggatacttgacatgttccccctcgcccaggcccgtcgcaagggaagcgaaagccaagatttgctttatcaggtatcagacgggaactgcgagcaaataaaacacctttcaaaagtattaatacagtcacatggatagtaaatgcgtgaatgtgatggactaaaaaatctgcggttcctaatggaataggtaacaaagccactttgccgcctacagctactaactcgctgcctccccacgttaagctggtacttgttgttgcaccaggagctgttacgccaggcgcgccagcatggatattttgtatccattgagcaaagatgggttgtaattgtatggcggtatccgaaaacatatcttggggacggcctaaagcactcatggtatcattatgaatgtacaagccaaaactgtgaaaacccagaaatatacatacccagttaaggtgggatatg

SEQ ID NO: 12633 - DNA, 1297 bp, Setaria italica
  misc_feature (1274)..(1297): n is a, c, g, or t
  Peptide Sequence Number=SeqID_78607
ttgcttagcacactttcagtcagacttgggtccaaattgaagcaaatatttgtaaccaagcagcaaaacacttctaacaaagccaaaagaaggcctggggcatgtgatctgcactccaacctctacaggtttagtgatcaaaccagctgccactgttttatgtcagggcacgcagatggtggagtggaggtcaagcaagtacctcaaagtcctatatccatatcaactgaaccatccaatcttcttgtgaagatagcagcaccagaatcaagcaaagagaacagtggtgtcatgtggtcatcatcgcctgaccagcttgaagatcctcgcaagccatttcagcactcaaactgttcaggctctccctctgtttcagaatcaggatctgacatttataccaagcgagaggtcatacagaagctgaggcagcagctcaagagacgcgatgagatgatcatggagatgcaagctcagattgcggatctcaagaactctctcaccatccaggtgacacagaacaccaacttgcagtctcaattggatggcactaaccgagatctgtttgaatctgagagggaagttcagcatctgaggaagatcgtcgcagattattgcgttgcagagccgctcttgcacgataagccttttcaagatggacagtggcaatcaaatggcaccaatgggcatgttaatggctattctgacagtagtattgatgaccctgtgttgcactttaacggtgttgagaagaggaaaggagaggcagagagggtggagttgcttaagagagaggtcggtgagctgaaggaagttatcgaaggcaaggacttcctgcttcagagctacaaggagcagaaggttgagctgtgctctaaggtcagagaactgcaggaaaagctctcagctcaagtgccgaacatcttgtagtactctagggttacctttctccatggaccagaaggtgggtctctgatagaataagcagggctttgcggaagaagctcacagcaaaaatcaccaaaatctttgctagggtctttgcagaatgttaggatgatgcttttatcccattttagtcatgatgtcaagtcgatttgctttcagaatgttaggaactaggaagggtcttttctttattcattcatttgtcagacctaggtagttggtagtgaaatcaatggtgaacttggtgctaggtatttgtacaggttttcgattcaagtacaattgtgtattgcgcctcctcctttggaatggatggtttgctaagcccnnnnnnnnnnnnnnnnnnnnnnnn

SEQ ID NO: 12634 - DNA, 2881 bp, Setaria italica
  Peptide Sequence Number=SeqID_78608
ttttttaggttagtactaaaacaattccacacgtccgtattttcatgtacagcatttcttttcaagcaggatgcgcattgtccttattctcgctaacctatacaagacacatgctttgtataggttagtgaaaagaactagtattcttctcttccacatttcgcattattttgcttatgtatgaatcaattgccaaactatatacagcacaaggactaattttcagtcccagtggttcctagccagttgctaactcctaatgtacaaggccgaatttccccagagaaatttagctgaaacccacaaagactatatgaacaccattgaagtcgactgtgaatggatatcaactttgcatcctctatttgcttccaatggtttattttgctgttgatgcagattcggagtagccagacactaaagacaaaatcattgaatgaaggaatttgtgaatgcgggcatgcaggtcaaatgtggatcatggagttgctttccacgcatccttttactgttgatgcagacctggaggtgccaaccacaaaaaaattccattggcaactgccaagtgcatctaacaccaacaagaacagctcatggtcaactactctggaaccaaaatagcagtcttgtatcgataaccgatcaaaagcatcaaaatttgctttcaaaccaacaaactggcttccaagctgtgcacatggagcatctggccatctgcacccatctcttgttcggaaggggcacagtgactcgcaaaaatggtcccctggtgcttctgagaccaagctgtcctcaattgcagagattgatacagagaagtcaccattttcatcttcttgacccctagcatctgtgcctcttcgcaatgaacatgacagcacttcagttctatcctcctggttttcactcgtcgaaaatttgattgtacagcctatagattcaatcgcctttttaatggcagcattctccctttgagcactttgagccgtggctgaggctgtgttacttgcatgtctctccctttgcaagtcttgttttacagattccattttcattttgatatcttttgctctccattcagcgatgtcctttgccttcattgcttctgcatattttttattcatagcatgccactgagattcaagatcaccaccttgtgattcattggggcatgtccatctcagataaaactggggccaaagggttggagcaagtgctgcagcagggggcaatagtgcaccattatgctttactgggtcatagaatggattatagtgctcatggaagctgccgccagaagctcttagatcagccaaatacgaccacatgcaacgacaagagtttgtgacaccagattgctccctttcccgctcactttcattgcaaatcagaaattagctgttgcataagaagtttccaaagcggcatgacaacacacaatccataaaatcaactaggaatttagaagagaattgaaatgcagatgggtacagacgtaacaactgcgagatacaatcgagccactgtaacaatatcggtgaagagttgtttgatgtctgggattgaactgaagcattggaggatggtcctgatggccctaaaggggtcctgcttggtgaactgcttaagttcccaagggaaggttgccttagtagctcatattgcgatcctccgttctcagctactgttggaactcccattctctctgcaaatggatgaccaaatgctaaccaatccttttccacaagggcctggaatccactgaaagttcgataatagggatcaagcaataaacaagctagtgccaccaactgggttgtacggtcccatccatcactgcaatggacaagaactgatgctgcttcttccgcaatttgtgcagcaatccatgaagcaccaaccagaatattttggatatggtttagccattcccctagcgttgaagaaaatgatgtcatgctatttagattgcctccaccccaagttgatccacgattcctccgatctccaacaacagatacagctgaaggggttccatttgacgaaattgagccatgagcatccacatagtccctaaggcgagaaagactatctctcattgtgtggatgttttgtatacctagaaaaagaacctcagatctggggtagttagaggatgactctgaaccccctccctttgccccatttgctaaagcatttgctcttggccgggcatcgattatgtacaatttccttggagatactttatcattggtggttctgctgctaagagcacagacaagcttctcatcggcattgttcctaaagttcatcatcaacccaaccattggctgagctgaccttgccagaacagctccagtcccagggtcacaccatgaaataacaggcaagcgtttgcctgatcgaaaagtagaagcttgaaataaatcttcatcacttatgccccttggtacaatcagttcagaggggtaagttgaacacaatgcataactagaattaactctagttagcctccaccaatcatttgacaaagaaacttcctcaactccccgtaactgaggtaaacttttcctaaaaagacgaaagtattctctcaacagccgccactttggctcagaatcattcttgatggtggatggatcgcaagaaaatgcatataggtcccacaaattagcaggtttagtgcatcttcttaaagcatcaaacacttccttttctgcttgggcagaaaagcgaacacaatgattctcatgtctttgccaatgacttggagaagttcaaggggacggctcttatcagagaggtggggaaggggttgaagcttcacatcatcgtttagcctctcgattgtcgtcagcggaatggtacccaactccattac

SEQ ID NO: 12635 - DNA, 487 bp, Setaria italica
  misc_feature (2)..(2): n is a, c, g, or t
  Peptide Sequence Number=SeqID_78609
cntaaagatagatgatgatcgcactcagataagccttgcattggctgttgatggcattgcacttatcagcagctgaaccaagtcttaaaaagaaagcagcagcatctgaatacctgtcagatagccaaaaatggggataattgtaaagttaagtgcaatgctaaaattatcctcatgcaaatctatcagttatatttactgagtgggattgggaaagtgtgcaagcccctattatatccatcattaggtgggaaataaagatcaaatcctagtttactaaagtttctaggtgttagctttagaataaaattccagaaggtgtcagtcccttaatgtaatttcaaaacatcttctgttctgtctttcaatatataaaaagttcatttgcttcacatgtaagaacaaggaagatcaaaaggttccaaggagaaatatgaatgagataccatatagatgtgaaggagaggctacagtggttgtaaatttt

SEQ ID NO: 12636 - DNA, 449 bp, Setaria italica
  Peptide Sequence Number=SeqID_78610
gaaatcagatacttcattccagcgtcctagctcctttgctaaagcagcagcagattccatatgcttagcggcatcccatggtgaggagatcatttcttgtcctttcgaggccttctcaaatgcatcttttgctttctcattgtcctttctgaatccgatggcagcttgctcatacaaggaagtagcgcttttccaatcagcattccaccttgtaaaactcaattttgttctgctgaaaaaagagtatattcaagaaaaaatgagggaacatgctttatacagactccattgtaagttgatgaaacaggaattttaggtggcacattgacatagtaattgaagtaaagcaggaaaatgtagcacaatcacaaactcaaagaaataatttttcaatggcaaaatctgactatagcgattttatttgttctattgttactacggtaaattaa

SEQ ID NO: 12637 - DNA, 1293 bp, Setaria italica
  misc_feature (1)..(21): n is a, c, g, or t
  Peptide Sequence Number=SeqID_78611
nnnnnnnnnnnnnnnnnnnnngttttaccaaatcatacagagttctggattccgtttgtgcttgcacagaacgtgcatcatactggatttgcaaaaaccatacagcacaggcaacataaacataccaaataaagtctcaataccaccaaacaaccaatacagacatagcagaatcgagcttgaaaaatttcatggtacagatgcccccccacaagtttttagtctgtaattcacattactttttacaactgttcctgctcatctatggcacactaagtgtccccatcacccgtttgctctctgcatcttgaccttggaagttagttttaagttaggtcgtcctcgtccaaggaatcctcgccatcatcagctgctttcttgatggcctgcagatcacctgtaggtagttgccgtgcaagcctaattaccacatggtcaaggtgattgaaggcacttgattgagcaagacgtttgatttcttcagcatcaccttcctcataagcagataatagtttcatcgcacatcgattctggtcgctgttgaggaaggcttgaacctctgagcagtcattgtagcatttctgagcttgctgaaaatcatgtgcataaagatagatgatgatcgcactcagataagccttgcattggctgttgatggcattgcacttatcagcagctgaaccaagtcttaaaaagaaagcagcagcatctgaatacttctccatcttaatgtacaaagctgcagcagcacgatacaagtcaaaggccatctgttccttcccatcttcttctagaactgagcaagcctcatcatacattttaatagcttcttctggagatttctcctccaaggcactggcaccctttgctagagcatcagaggcaggttgtggccttccacattcacggtataattctgaagctctgcgatagaaatcagatacttcattccagcgtcctagctcctttgctaaagcagcagcagattccatatgcttagcggcatcccatggtgaggagatcatttcttgtcctttcgaggccttctcaaatgcatcttttgctttctcattgtcctttctgaatctatacgcgatggcagcttgctcatacaaggaagtagcgcttttccaatcagcattccaccttgtaaaactcaattttgttagcttgtcggctttggtcatgagcctgtcggggtcggaagagctcgccatggtcgggaccgccgccgcctcgtcttcttcgccgcagcgctgcccagattcccacgccttgttggttgctggtctt

SEQ ID NO: 12638 - DNA, 599 bp, Setaria italica
  Peptide Sequence Number=SeqID_78612
agaaggcaatcatatcaactattgttgtcaagaaagcagtcataaccagggacctgtgtaagctcagttctgtcaaaacaataaaaaaaggacagagagggcagtatcaccaactctgtttcctccaatgacaatcaaagctcaactcaactgagctcaactgagaccaagattacccatactctacaaataacttgaagagcaatcagcacctctccaataaatagtctgcctacggtctcttcccctaactgatctagtaagcatggttccactaacaggtttgcagaggccaacatcaatcactgaagtaacttttcttttctcgtaatcctcatcaaaatgcatatcaaacagcatagcgaggcacataacttggtgagtcaatatataatcctcacaagatgaaggtaggcttctaaggatgtgaagatttacctcagtttccattgcacggaggtcattgtgccactttaaagtttcagacttttctgagagcaaacgtaattcgaaaaggggaggcctaagaggatattctatgcttatcttaaccttagcttccagcataacttttggaccattcttcatagctttactca

SEQ ID NO: 12639 - DNA, 1205 bp, Setaria italica
  Peptide Sequence Number=SeqID_78613
gtggcctggcaggatcctgggccccgaggagctcccgccgtcgcagatcatgtcgccgaggtcgggcacgccggtcaagctcctcggccgggaggacgcaagcgtggattggtacaaccttgagaaatcaaagcgtgttaaagcatttaggtgtggggagtttgatgcctgtattgagaaggcagaggctactcaagggactcttgtgaagaaaagagaaaaatatgcacggagagaggatgctattcttcatgcccttgaattggagaggaagcagcttgcatcaaagtatcagactcaaggtttcaaacctgaaccaactggtaacatttctgcttgtactaaacaccgcaaagaccttggaagtactcgctacaagagcaaaaagagcaagaaacgtaaagatgcatctgttcctctcgaagtaaagaaagaagcaggccattgttttgtacatgctggttcaaagagaaacttttcagaatgtcttgctcaaggaaatgttgtaagtaatcacatgggtgatttctcccatttgagatcctctcagggaggttcaactttagagagcaaggagagaagtacaattgtgaagaagaataggtcggatggaagtgattttgaagactcttttgtttcaaaatctgataggcgtcgaccacttgctcatgttttgcagatcagtgaaaaatcacctcatcatttagagcaaaatgatgattatgggactttgttaattggggagaataatggtccatcacttgccacctccagggccagaagaagtaaatattacatatatggctagtgattctggtgaaactcagagtcacagtgatttaccttctgtacaaatgacttctacaggagctgattttgagaatgaaagctatcttcagcctggttatttttctgaggagcagacttcttctgactttgttgaaaaacaaataactgagtcttcagagagggaatgctcagagagtgagactgaagacgatgctgaacttttgcaaattgtgatcatttgttcaaaccatggggaaggctgtgttggatgatgttgatgaatagttgattcgttttatgaggtaaatatgttagcagagccggaacaattatagatgcaactgtgattctgcctatagagtcatgtgctcctgatccttactccattccagtttctgacaagttcaggcattgtt

SEQ ID NO: 12640 - DNA, 290 bp, Setaria italica
  Peptide Sequence Number=SeqID_78614
tggtgaccacggcgcgcgtgtcgtggcacgcgcgctccacgtgcctccgcaccgggcacccggccgtcgtgcacttgtagtagctccgggggttcgggttgcccttcaccaccttctgcccgtacttgcgccaccggtagccgtcgtcgaggacgtcgacgtcgctcatcgtctgcacgaccaccctcggctcccgcaccgtccggttgccggccatggagatcccctcgccgtcaccgccgtctctcctccatctcttggaatccggttcgtcctcgtcgaactcgtcg

SEQ ID NO: 12641 - DNA, 368 bp, Setaria italica
  misc_feature (299)..(368): n is a, c, g, or t
  Peptide Sequence Number=SeqID_78615
atcatggaaggacaaagaagcaggaatcagcaccccagttcttcagccagcggcagttcgaagaacacaaaaggcgggaaaaagaaaaagtgatggcagtatcatcctgttgttttttctattcaacctcatgttaagtttctgtggaagttgtctttctgaggcctgaaaaatcattgcgacttttggtgggattttgatccatttgaaaattaccatacccatatttcttgtagtctccagattcagatggtacacctaaaaatgtggcagccatgaccaaaaaatccaatttaacnnnnnnnnnnnnnnnnnnnnnnnnnnnnnnnnnnnnnnnnnnnnnnnnnnnnnnnnnnnnnnnnnnnnnn

SEQ ID NO: 12642 - DNA, 407 bp, Setaria italica
  Peptide Sequence Number=SeqID_78616
cgcgtcaatgtggtgcccggaatgattccgacctcagaggaattccttcactgtcattgtctgtttgcttggagaaccgcactgacgaagacgtaggaagacggaaggaagatgaagtcgaaagccctacattcacacacgaatatggtttcagaacatgcaatccacaaaggaagacagagacgtcggtatggcaagaaactcgtaccaccatcagccatgtcttttgttttatgtagaagaaaagttccagaaaggatcgtaacaaagccacacatctctgtcacaatttgtgttggattttgcctgtcccagtcctgggcaaagatacaaaatgaaactacaaaatatcaccttctgaattctgactacaagcatttgtggactatgcctgaagctcaagatcg

SEQ ID NO: 12643 - DNA, 1366 bp, Setaria italica
  Peptide Sequence Number=SeqID_78617
accgggcagataacactaacagcattacatctccagtgctaaccactgagaatattttgtgggcatacatacaaatctgccactgaaaataaaaggaagcaaaagaggatctctacattgtattgtacccttagtacaagcccgtccacatgcatatatataccctaacttgtgtgaattagtgattagcaaagacgcgtcaatgtggtgcccggaatgattccgacctcagaggaattccttcactgtcattgtctgtttgcttggagaaccgcactgacgaagacgtaggaagacggaaggaagatgaagtcgaaagcccaccatcagccatgtcttttgttttatgtagaagaaaagttccagaaaggatcgtaacaaagccacacatctctgtcacaatttgtgttggattttgcctgtcccagtccttgaacatgatgacactagccaaaatggttaaagatgtgaacattgtgtaataaatgggtgacacaactgctgtattaaaagtgtcgagtgccttgttcaagtaattcatttgggtaatgacacatgagatgacaaccagagtaaacgcccatgtctgtggatatattagttggttcgttcctgaaaaggtcagcttcaaagcaatgccaagagctttcacgctcataaccgagatggaaccaacaagagagcaaacacctatatagaccatgacatgtgtctgcccataaagtgggacaaaccgataaacaagtatgacagctataccgattaccactgctgcataacacatgaaagctggttccgttgccagatcccacacttctgtcacagactcaatttcacgctctggtggagcatgaaggacaattgtggtggatcccacaacacataggacacatccaagaatgccgaatatgtgcagcttctcccgcagcattacatgtgcaagcacagcgctgataataatgctaagagcaccaagaggagtgaccaaaatagctggagcaaatgcataagctgcaaaatttgcaacctccccaacaatcattgttatcatgccaacccaccaaagaggctcatataaataggaatatccaccgaccccggccctgacgccggaggaggcggccttcttgaggcccttcttcttgatgatgaagctggcgccgatgaagaggctggaggagagcgcgagcaccaggcccttgatgttgtccgccgacatgcccgtgtaccaccttcccccgccggaggcggaggcggtcgaggctacgtccatgcgggccgacgaggctcaccagcggtcaccgcggtgccctaggtggtgtcatgaggaggggcggtgcgcgtgcggcagcgaagtgaaggcgag

SEQ ID NO: 12644 - DNA, 270 bp, Setaria italica
  Peptide Sequence Number=SeqID_78618
ttccatcctccctgctctgttgagaacacaggaggtggccagccaccagtccaccaccaccgaagccaaaacacctccccgtctctcctccgccctctccgacccccgcgcgcgagattgtccaacaacaaagaatttggatgctcctgcctatgcatgatgtcaactaccagagataccgtttagtgctggggaagttgtgcagttttggatcataaattcctacaaaaacaaggcaactatggaccgtgcagacacatcttgggtttg

SEQ ID NO: 12645 - DNA, 524 bp, Setaria italica
  Peptide Sequence Number=SeqID_78619
ctgataccagatgccaagggcacaaaatagcaacgtggagctcgagccagttgaaaacacaaaacattgcagcatacttcgtgtgccattcaagactgaagacggcaaggatttgcgccagtgggtgtcccggtttgacatctacccatacctagagagatatgcccaggattcttgtgccaaaattcttgacattttggagggtaagccagacctgatcatcggcaactacaccgatggcaatttggtggcgtccctcatgtcaagcaagcttggggtcactcaggggacaatcgcacacgctctggagaagacgaagtatgaagattcagatgtcaagtggagagatctagaccagaagtaccacttctcctgccaattcaccgctgatatgattgccatgaacaccagtgacttcatcatcaccagcacataccaagaaattgctggaagcaaagagaagcctggccaatatgagcaccactacgcgttcacaatgccagggctttgccgctacgccacgg

SEQ ID NO: 12646 - DNA, 329 bp, Setaria italica
  Peptide Sequence Number=SeqID_78620
gagggggtggcggcggatgcggccgcggagccggcgccggcgaggccgagcagcatgtggcggacgccgcgggcgtactcgagcaggcggtcgacggccgggatggtctcccggacctcgtccagggcctcgaagttgcgcagccaggcgtggaagagcgggaacgcgtcggcgtccacgaggcgcaccccggtcacctcctcgaacacggcgagccagtaggagccgcagcccaggacgacgtcgaggaggcccacctcgtcgccgccgaagaagcggcggcccttgaacgcgccgtctcggagctccgcctcgatcagggccaggtt

SEQ ID NO: 12647 - DNA, 402 bp, Setaria italica
  Peptide Sequence Number=SeqID_78621
tcaaattttcactgcagagaagaaccgaaatgatcaactggtgagaaactacagagatatgtaacagatcagggattgcaaaccataaaaatcagagaaagacttcactaatttctttgttgaactatattcctattgtagttagttcaaaactatccaaatcctggtaatttgggagcataacagaaaagaataaattgatactcacaacgggcgaaacagatagttcaagataattggaacatatatagacacaatctacacaaaattctgagccgaacagagaccctatccaaaattataggcagtaaccttagcaatattctcccacgaataattaattcaggtaatttgatatcctttacatcgcagcaaagaaatacgatcaccatcatctatcta

SEQ ID NO: 12648 - DNA, 270 bp, Setaria italica
  Peptide Sequence Number=SeqID_78622
cccctctattgctcttgttggttggctgggttcagtatgtggggctgccgcacttggtgggcgtgggggaattctaggaccttgagatctgttctgcctggataacacgacataggaattttccatcctgcttgcacccataacactgccctgaacagaagatgcatgattaccggacgcggcgtgggcgggcagcctgtcggcgtacgagtccgaccccgacgacgacgagcgcgcggcggcactcctggccacctgaaccgcggcaac

SEQ ID NO: 12649 - DNA, 475 bp, Setaria italica
  Peptide Sequence Number=SeqID_78623
ccgtctcctccccgcgtcggggtgggggcggcgccgcgcaccaccaccggcgttgggcgccggccccgtacagggcgtgcctggtcgcgctctggctggtgggcttcgcgctcgtcttcctgtggcagagcacctccgtgggccgcgtgcggctctacacgcgcccgcccatgcccaagcgcgcggcgtcgtcgtcgatggggcagtgggtggcctccccgcccgtgtacgatctgagggagttcggggcgttcggggacgggcggacggtgaacacggccgcgttcgaggcggcggtcgcggcgatcgccgagagaggcggcgggaggctcaccgtgcccgtcggccggtggctcaccgcgccgttcaacctcaccagccgcatgacgctattcctcgccgccggcgctgagatcctgggggtctaggacaacaaatagttgctttcaaaatcgcatcaaatttgctgctaagt

SEQ ID NO: 12650 - DNA, 280 bp, Setaria italica
  Peptide Sequence Number=SeqID_78624
agcagttcgctggcccgtaccagcggcggcggcggcggcggcggcggcggctggaaagcgtacccaagttcgtctcggagcccggagatgagcggctccggaggcggcatgctttgaagcccggggacgagcggttccggaggcggcatgtacagatgcgggtccggaacaggcgagtcctcggggttgtagggggagtacacctccggcggcggaggggagaggtcagcgcgcgagggggagtatggcgggtgcagggcctccggcggcggcggcggcg

SEQ ID NO: 12651 - DNA, 1726 bp, Setaria italica
  Peptide Sequence Number=SeqID_78625
tcaattctgaaattgaaggggatgggctacaaagcaaactgaacaaggagctgtttcattgatacctagtaaacaggtaaaaagaagcagcagatatcacccaaagttatgagatacaactgaaatcagcaaaggatgccaagtgaggtttgaaacaacaccaatatcaagagggctcagttcattctgcgcctcttgttccgttgggagcccccaccatccacatccaatgaccctaatgcattgctcctcccccttctctgcagggatctcgaagagcccgcattgctaggctctcctgcactctctgagataccagcatccccatgtatcactgcaacagtgctcgaattagatgcttggtctgcagaaggtgctccagcaacattaattccatcaactgctggctcattatttctaggatttgatgaagaagcagatcctccatattggcttggtgaagccattcttctaaggtcactcatggcactggccagtctttctgtgtttgcaatgccaatataggcaaggtgctccagcaactcaaatctgtctgatacacgtggtgttgagccacgtctcgatgattctgatacattgttttccatcaaaccagtatcagaggcagtggaagaaccatcagggcggctctcagcttctctctgcatctgcattgctctcatccttgtggccagtgcaattctgctcaggcgagtagcacgttgagcactgtcatttatttcctgcgcagctgattcagatggcccttcaaacctactcacgctattcataatctgctgatccagaaggcgcctccacgatgacagtatcccatgcgcctcaccaagccttcttgagattggccgcatatggtggaattgttgcctgaagctttcaaggcgatttccatgtggcctcggcgggattgtaggaccttgtggctttccatcatcaacagccttctctccatctgaattccctctaccatatataggagtaatatttgactctgtaacctcgcctttgcagactgggcattccttgtggttggaataaacattcagccactgatacaagcacggccagcagaagagatgaccacaggaagtgactacaggctcacttgccatctcaaagcatatgttacactcgaatgtggcagcagtcttgccgcgctcctcagtggattcttctgaagcacctaattctgagccattggcagctaccttatttactgcagcagtatcagctgcaggctcatgctggggcacctgcatggcggcgtccatcccagaggggcgagcctcggagctgaggggtggaaggtcagacctgaaccgcctggggcgaagccaccggcttccagtttgctcgagcagccgcctgtaccggacggcagtgtccgggaagaaagatgaggaggccgttgacgaagaaggccggtcctcccatcccagcagttcgctggcccgtaccagcggcggcggcggcggcggcggcggcggctggaaagcgtacccaagttcgtctcggagcccggagatgagcggctccggaggcggcatgctttgaagcccggggacgagcggttccggaggcggcatgtacagatgcgggtccggaacaggcgagtcctcggggttgtagggggagtacacctccggcggcggaggggggaggccctgcacccgccatactccccctcgcgcgctgacctctcccctcc

SEQ ID NO: 12652 - DNA, 282 bp, Setaria italica
  Peptide Sequence Number=SeqID_78626
gcgcccgcgcccgcgccgccgcttcccaccaagagacgatgcggcggtccctcatcttccggcagctggcgcggcggctgctgagcaacgtgccggagtcgaccgtctacgggggcccgcgcccgcaggagtcctcggcggcgcggcgagtgacggtgaccaccctccgcgggaagcaccgccgcggggagcccatcaccgtcgtcaccgcctacgactacccctcggcggtccacgtcgactccgcgggcatggacgtctgcctcgtgggggactccgccg

SEQ ID NO: 12653 - DNA, 910 bp, Setaria italica
  Peptide Sequence Number=SeqID_78627
aggacaatacaacctagacgtaacgaacctactacccccgtacgaccgtaccaagcggaatgcgcgaccgcctcgcggctcagggcaccaaaggcgtggatgttgtggtggctgacatgctcgacttgccattcgagcaagagagctttgacctcgtgattgagaagggcaccatggacgtattgtttgtggacagcggcgatccatggaacccccaatcctacaacagtaaaaaacgtgatgaaaatgcttgaatgtatccacagggttttgaaaccagaaggcatatttgtatcaattaccttcggacagccacactttcgacgcccgatttttgaagctcccgagtttacatggtctgttgagtatagtacctttggtgacggctttcattatttcttctacactcttaagaagggaaagaggtcactggagtccaacagttaccaaaatataatacctcctgctccaagaataaatatggtccatgaggagctcgagagcgaggattttatattccgcacaaatgttgatgagttgtgagtagcaggttaactagcgagtgcctcaaggtttgaaggtttgatgaaagaagaagctaacacatcaaaagagagatgcgtttgtcaccctgcaatggtgtttgtgggccttgttgtgcaatggcgtgctagggatctatgtacaatatggttgtacattgcgtgcttgtgttagctctagttaaagaatactgtgacatcctttttcccgattatgacatgtcagtttcataggtacaaaatcatatatttgccggtagctgtttactgggagcaagcctgccctaaattttgtttttgaactcgacgagaaactagaacttagggtgggatcctggaaatggcatggctttgtttgagttggttca

SEQ ID NO: 12654 - DNA, 865 bp, Setaria italica
  Peptide Sequence Number=SeqID_78628
cagctacgcattccgttccggcgccgccgccgccgcgcaccgccagcgatggccgccaccgccgccgacgacgtcgcaccgcccactgcctcgggctacctcgacccctcctactgggacgagcggttcggtaaggaggagcactacgagtggttcaaggacttctcccacttccgccatctcctcgcgccgctcctctcccgtccctctcggtcctcgaggtcgggtgcggaaactcgcagctcggggaggagctgctgcgggagggcgtcgccggcggcatcacctgcgtcgacctctcctccgtcgccgtccagcggatgcgcgaccgcctcgcggctcagggcaccaaaggcgtggatgttgtggtggctgacatgctcgacttgccattcgagcaagagagctttgacctcgtgattgagaagggcaccatggacgtattgtttgtggacagcggcgatccatggaaccccaatcctacaacagtaaaaaacgtgatgaaaatgcttgaatgtatccacagggttttgaaaccagaaggcatatttgtatcaattaccttcggacagccacactttcgacgccgattttttgaagctcccgagtttacatggtctgttgagtatagtacctttggtgacggctttcattatttcttctacactcttaagaaggatgcagaagaagctgaaagctgaagcagctcagaagcgctgtgggcataccttgaggagcgggagcacatgagcgattgagtgcttttccagcatgagccctgggtgtttgactataacatcgaacctgcagaaactagctagtgcggacacaccttttctggattgaaattcaaatcgaccagtaa

SEQ ID NO: 12655 - DNA, 446 bp, Setaria italica
  Peptide Sequence Number=SeqID_78629
agcatccggacagttgggtgggaggttgaagaaggtacttgtggggctgcgtgcggatggggaggacgggcggcaggtggaggcactgacacaactctgtgagatgctgtccattggcacagaagaatcactcagagcattctcggtggactcgtttgtccctgtcctggttgggctgctcaatcacgagagcaacccagacatcatgctgcttgctgcacgtgccctaactcacctctgtgatgtgcttccatcttcctgctctgctgttgtgcattatggtgctgtgccctgcttttgcgcccggcttctcaccattgaatacatggacttggcggagcagtctttgcaagctcttaagaaaatatccctggagcatccaactgcctgcttgcgggctggtgcgctaatggcagttctatcataccttgactttttctcctaca

SEQ ID NO: 12656 - DNA, 259 bp, Setaria italica
  Peptide Sequence Number=SeqID_78630
gcagcggcagcagatctcgttcgtcttcctcgcgcgcggcgacggcgacggcggcggcggcggccatggacacccccacagcaaaggcagcgtggaacgccaactacggcgtcgtcagcagtggcgaccgccgcctcgccttctcccgccagctctcctccaactccgccacgccgcgcctcgcccgctcggactcctccatctccatgcccatgcccatgcccccgctctaccaggcgcccaagcccagcaagagctt

SEQ ID NO: 12657 - DNA, 324 bp, Setaria italica
  Peptide Sequence Number=SeqID_78631
ccagttgccctagcctccgccccaccccaacgcgcacaccgcaccgtcgccgccgccgcaacacgccagcccgcacggacggcgactgacggcctccaccacctgccggcggtaattcggggcaggaaccggtggcgagtcacggcgaccggcgagcctagagcgtcatttgcatactttggagagtctccactcctccctgctataccatctccatccctgtcaacaagatggcacgtcagtctgctctctcgctcgtgagagatcgggcaaaggtgggagcgctgaagcgtttaactctgagctcgtccaagacggcaggga

SEQ ID NO: 12658 - DNA, 441 bp, Setaria italica
  Peptide Sequence Number=SeqID_78632
gcaaaaatgttcaagtccagggggtatataaatacatactctttcgatgaatgaacaaaaaaccaaaaaagtggccaggattgagattctacagccctgtttggttgccaccagaatatgcctagccgcagctccggtcgcacctaagctgcagcaaacgaatcgtcagccaagcttttggcgtgccacgacgcaaaaatgaactgagctgctgctgttttcttcggcatgcctaagctacaacatgaagcaaacatagtacggcatcctgctgctggggcgtggtggcctgcgatgcggtgatggcaatgcaagaactaaatagaccttacttataacccaacctaaatagtaaaagatggcagccatgaactgataaaaaaaggacatgcgattgctactcataaacctctactctttaaatccgacgaaacttgtact

SEQ ID NO: 12659 - DNA, 804 bp, Setaria italica
  Peptide Sequence Number=SeqID_78633
cacattgttttgtgggggcaggggagaatgtcctatagcatgtgcttgtagcgaaggtcaacctgcagggtagcaaagcggcggcaataggggggtatataaatacatactgttttgatgaatgaaaaaaaccaaaaagtggtcaggattgagattctacagccctgtttggttgccgccagaatatgcctagctgcagctccggtcgcacctaagccgcaggaacgaatcgtcagccaagcttttggcgtgccattgagctgctgcttgttttcttcgtcgtgactaagctacagcatgaagcaaacagagtgcagcatcctgctgttgggggtggtggcatgcgatgctgcgacggcaagaactaaacaaaccttacctataacacaacttaaacagtaaaaactgaagatggcagcgatgaactgataaaaaacaaaggacatgcaattgctattcataaacctctaatctttaaatctgacgaaactgactattaactcccaatattcctaaacacaaataaatgcagtatttgcataaaactcctggacaaggaaaaaaaacttttgtaaagtatgttatgtacatgcatggttcaaagcatcaagacattacaaacaatgacggccaccaaatagtagtacataatgacttcaagacacagatcaccgattagatttgcatcgataacagcaatataagaaaatacaaaagcctgtgacatccatctatattttgacgtcatagtttcgtatggacataaattgacctatatcagactgaaaaaggcataattaacac

SEQ ID NO: 12660 - DNA, 3041 bp, Setaria italica
  Peptide Sequence Number=SeqID_78634
ggtaaaaagtaaaaagtaaaaagaaagaaaccaaaccgccgccccctcgccctctcgaaccttctcgcctgcccggctgcccccatccctacgcgccctaacactctctttctcttccccgccgccgccgggaccgatctccgctgccccgccgaccatggacgacacctgtgcggtgtgcgcggaaacgctggagtgggtggcctacgggccgtgcgggcaccgggatgtgtgctccacctgcgtcgtccgcctccgcttcgttatggacgacaagaagtgctgcatctgcaagaccgtctgcccctccgtcttcgtcaccaaggccttgggtgaatacacgagagtggtcaatgatttctctctgtttcccgctggagtaaatgagggcaagacaggggatttctggtaccatgaggatacgcaggcatactttgatgacgtggaccactacaagatgatacgggcaatgtgtcggctttcttgtagtgtttgtgacaatgcagaggatcaggttgctcttgctgctcaagcaaagcgcaaaagtaagttcaggagcatcgatcaactaaagggacatttgttccatgtgcacaggttgcacatgtgcaatctttgcttggaggggcggaaggtgttcatttgtgagcagaagctttatttaaggtctcagttaactcagcatatgaaaactggtgactctgaagtggatggctctgaggtagagcgtagtgggtttgctgggcatccggtgtgccagttctgcaaaacttcattttatggagataatgagctttacacacacatgtccagagaacactattcttgccacatatgccaacggcagcatcctgcgcagtatgactattttcggaactatgatgaccttgagctgcatttttggaaagatcatttcctctgtgaagatgaagcatgtttggcaaagaagtttgttgtcttcccgagtgaagcggagctcaagagacataatgcaatggagcacggtgggcggatgtctcgtgctcagaggaatgctgcacttcagatacctaccagttttatatatcgcagaaatgagcaagaccaacggcgtggcagaggtagggggcgtaatgctcaccatgatggaactgagagtcatatctcatcatctgcgcagaatggccgtgcaactgccgatgatggtcatgtgggccgtgttgataatgtttcagggtttttacagtcattaagtgttggttctagttctgcgggagcagaagttagttcaaggactggacgagcactcgaacagttgtcctttccacctctttcagacccagatattcctgacactagagttgactctgttcctgatgaaacctcatttccttcgttatcagagcagcaatccagatatgccctggccctcaatcagagtgcaaggggcactgcaaggcttggggatgagtcattatttcctcctttgcctgggtctagtaacaacagggctcctgcttcagcacaacaggggctacagagtctagccaggagcacacttgcagcaaggcttcaacaacgtagcaagggccctgtgaaggtacttaatactgctcggcctcgtccctctgagaatcctgaattgctccctagttccacccagacatggcctacacctgatcaggggctactcctgtctggatcttctcagcttcgaattggaactcaaacaagagaaaatgggttcatgccagctgtcttcagtaattcggcgtggaatcctgttgctccaaacaagatgaagcactctgtttctactcctaatcttgtgtctggtggctcctctggccaagcgtcatcaagtacagcttatggtagcaatagaagtcaagaaccgcctcaaggtagccaagctttgcctgttgcagaggatgtccgtgctgcaaacaaatctctggttgaaagaatgcgttctgctctgggaatggatgaagacaggtactctgcattcaaagagattgctggtgaataccgtcaaggtatcatagatacttcagagtatctttcatatgtcgaacagtttggactctcgcaccttgttcctgaaatggctaggctattacctgatcctcaaaagcagagggaactcgctgatgcatattatacaaacatacgatttaaaagccttcaagaaaatggcggaggtggaactacctcacacgaggccagtcgtaaaaagaaggggaagggaaaagctcctgttacagaaagcagtgctgctaaggatgtgaaagatgcactagcagataactttctggacactgtaagaaggcttcaatcaaaccaccaggctcaggaaggagaggctgaggtgctgtcaaaggatgggtatcgaccttctaagggggtccaactatcagctggatcctcatctagtctagacagtgacactggtttcaattcaaaagcttctggtgccaaagataatgctggcaagggaggaggcaactgtagcagtaagcaaccaaagaagacatcaaagttcctgagagctcgtttaggtgacaactcattagccacacttgatttaagtcgtcctagcgcgagtcctgaacgacctgaaagggaatcacaaggcccacagatggggttgcctgttcgaggtgcttggaagaatggtggggggcagaaactcttttctagcaatggaaggaagtagaaatcattttactgctgcagtgacgtgtccatatacatggccaacaatagagggaagccccattgccaaatgtgagcattttgggatgggttgtttgctggtttggtaagccttcgtgggagaataccactttggtttaaggtttgtgttcttctatgtttgtcaggtgaaactcaagggtggaacgtgaaaatgtaatgccttaatatcattttaacctttaatagaatccatcggttggcttattacatgaactctgctgaagattctggcttgcctggctggcttcttttttcttgtatttcaggtctgaggttgtcttttcacggcacatgcaagttat

SEQ ID NO: 12661 - DNA, 1492 bp, Setaria italica
  Peptide Sequence Number=SeqID_78635
tttttttttttttagttttgcaagcaactggcatacctactgaaaacatatttaaatgcaataatcagcttcacagaataagggcatactgacgaaacatatacctaggcccctttgacgtagtatctccctattcttacacgacccacttagctttcagcatgtaaaaacacaagtcacgataccgaataacaatattgtcttgcttcagaaaaaaacaagcaagagtcatgttccagtcatgttatacaattttagcatctctgctagccaggcatatgctaatctatcaactcctcggcctctgctcagtatcaatagctcgactagctactccatctaacaggagatgtcaacaaaaggacgccgggcattatatctgtacactgtcttatcatcaaacaactctgccaccgatttcaatgcatcgagaaagcttagtaactgacaactaaaaataaggtacaaaacccgaataatgcgcgcaacggcctcacagtgatgagaaactgcgttgactctcacaaccagggcaattgtgcaagctctcatggatgtaaatatcacaatccaggcagaagtgctggttgcattttgggcagcgaacatggaggctagtttgcccatcagggttaaaaaggttctgctgacagccaaaacagttttgtactcccctttggattctattcgggacagaggaaacctcatcaaatggtgctaccgggaagagatgatgatatgaccttgccaagtgtggagaactaactagtgttaggccacaagttcgacattccgtcggaagctcacacacattaactttgcatctgggacatatgtaaccttcagcaccagactttattttcttgtgacaagagcagatagatataagatcctcaacacccctctgtggaaagcccatcttaatcaaattagctgcagcatattctgcaattgcaggaggtgggggagcatgttccagcaacaattctttgaaatgagactcgtccagtgcaaccgtgtaggatccaccagtctcttcgcagagatgtttgcatatgaaaatctctgcagcaagaccaataacggagcatctaattttggacttcttacatttttctattgtctccatgatatcaccaggatcacatgtatttagggcagagtacaaaattaagacttccttgtgaccatatgatggtacttgatctaaataaccattgacaagttctagagcattctgcagagatgaatcaccagaacactcaagtttccccatcaaagcattaatctgtgattctgggctccctccaatctctgtaagtcgatgagaaataccatctttaattgtcactaggccaacatggctcaaaggattctggtcaaagaattctcttatgaaagcctcagcatgctttgcaacaactgccattctactaggacgataatccatctctgaagctgcccgggagaggtcgatgacgatgtagaggta

SEQ ID NO: 12662 - DNA, 438 bp, Setaria italica
  Peptide Sequence Number=SeqID_78636
aaaagaaaaataagaaacaaaaaatagaataaacttaaggaatagacaaaataaataaaataaaataatcgaactgtaattcccttctaattttagagcactcaataagattaaataacactgcagtcttgttctaatacacaatcattggcttctccgctaactatacaacttcttttgaaacaaaataattttgcatagtttgttatctgagcatgcataaaagacatgcctaacaatatgcgcctgggaacataaggatatggaagccttaagcagaaacctttttggtgaaaatctattttaaggttgaagcttgaatgcttgatgctcaaataaatggactgaaaaaaatggcaaagcaatgcaatagtatgcctcatctaaacacgtcactatttttaaatcttcccttttctttcccaatttgttttgacg

SEQ ID NO: 12663 - DNA, 279 bp, Setaria italica
  Peptide Sequence Number=SeqID_78637
ctgctgcttctgagctcgtgggctgcctcttctatgccggaggtgatgtgctgaggctaattcaatgtagttgtcttgcttgatgaattcaatggctgagtgtggttacatttgtgctctgatgaaatgatattttggttcctgtgctatctgcctgttactatgctcctagatgaaaggaatatttaaaggctcagttgttttatcgcatgggtgaagttaaaagtatgctaaaattcagaatcagtgtctactccgcttcccaataagaatttgtag

SEQ ID NO: 12664 - DNA, 572 bp, Setaria italica
  Peptide Sequence Number=SeqID_78638
acaagacaccggggagtaagggtaaggggcgggtggcggacgacgacgacgagttcgaggagaagagaccgcggcggcgaacggcggacgggctcgccatatactcggccgacgagctcgggtttggcaaggcagatgctggcggcaccgcgctatgccccttcgactgcgactgctgcttctgagctcgtgggctgcctcttctatgccggaggacacctaaaatgaccatcttagcccttggagcatacctgagacagcaacacataaatagttcatcacaaacatccgaccaggtacatcaaacagtgcaacacaagatggcacaagttcacatatggttcacatagttcatcaacatccagacatggttcacacaagtagttctaacttccacatatagttcacacatatggcagttggtaacagcacttggaaacaaaatacacacggcatacatgcaagtcaattccgtcgaaagagccggcggaggagccccgcaataggctctgggccgcgtcgtgctgctctccctcgcaggttccaattccaagaattactaaaaaaaaaaa

SEQ ID NO: 12665 - DNA, 1110 bp, Setaria italica
  Peptide Sequence Number=SeqID_78639
ccataagttaaattattttcatttaggtgatattctgttaaaacctgttacgttttaatgtcaattctggacaaactgatgagctaatgcacagtgcacacctgttaacagttgtttctaactacccttagttttatgacctaagtctgtctgcgtaatatgttcattgttcattggagcactggtcctagtattcaaccaggccatctcatctccaatacatgaagcactgctatcattatagaagtctgaggtggaagatatgtggaaaaacaaaagtgctaggaatgagatgttggtcgtgtctgaaccgtttttcagtttttcctttgtccaattattcatcttaaaacatgtatagcatgctgttttttgagccatcaattaaatgcagagcaagaccaaaggaacgtgagtacgtgactaacgacctatggtttacttaggagatttcttatcttatgtgacttatttgttggttctgctctacagtttagaatttcatcctggattacgagttgggattcagtgcagattttaccttttccctgcgtccacatggaaatgcaaaactaagatacaatcaactgcatgcttttgaaccattcttggttgcgaaattctgttctttctcatttctcactcatgtagcttaggtgcttttacttcttatagctctcgacttataatatacagtaaacataccattaaagtaaaatataaaatatgtgcatcatctcattccattctgttgatgattttgtggggcaaaatcttgtttacaagttccacagttttttaatactttctaaaacccctgtatttagttacaaaggtttgatcttgaccaagttagaaattgaaggttacctttgcttgcttgcacattgaaaagtaatcctctggctgtgttatatcatgttggggagctaaatagtgaaagactaactttagaatttgactgatgagagagcgacagagcatgttataatagtgcgatttacattcttagatctttgatctactcttttttgttgagataaattggttttctattaatatggctgaggcagccatccttatcatagaactttgaatttaaaaaaaaaa

SEQ ID NO: 12666 - DNA, 357 bp, Setaria italica
  Peptide Sequence Number=SeqID_78640
aaattgcatagctgaattaaaagtaggcagatacatggaactcatactaatcgtgccagatgaaaggatgtaatgagcaacacagtggcatgagatataatgtgtgcatgcatgtagaaagtactcatcctacttcctaaatgacatgaaaatggaagtagatctccaagagaaatatattcctacttacatggattttctaacaactgtaacttacatactaatctggccagcgactaggtaatcatccataggggactaagtggtacagatatcataaagcattttgtcagtcacaaagcattttacttgaataagttgcatgtttgcagacaataaggaaaagtagtattgaca

SEQ ID NO: 12667 - DNA, 934 bp, Setaria italica
  misc_feature (895)..(895): n is a, c, g, or t
  misc_feature (924)..(934): n is a, c, g, or t
  Peptide Sequence Number=SeqID_78641
ccagttcggatcgtcggacgcaaagctcaagcggcggcggcggcggcggcggcagcgaagagcaaacgccaggcgcgggatcacatcgggcaggaggagggagaatacttcggctcctgccctcgtccggtaagagagatgccgctgtacgactgcatgctgctggtgaagccgctggtcaccagggaggccatgtcggagctggtggcgcgggtggcgcgccgcgcgtaccagcgcaacggggtcgttaccgacgtcaagtccttcggaaaggtgcagctcggctacggcatcaagaagctcgacggccgccactaccagggccagcttatgcaaatgaccatgatggttccacctaccttcacgcaagaactccactatctgaacaaggaggacaggctgcttcgctggttggttgtgaagcatagagatgcagtatacggtctggagttcatcaacgaggatgacgggaggaacgagatgagcggtttcagccttgctcatacaaaagacgactacgatatcgaaatcggctccgatgaatctgaatctgagttcctcacctcctccgacgatgattccgatggctacaagtatgacttcgaggaggagaagtagaattgcctgtccagatttctgcagtttcagtctgtattggcagatatcttttcttacagaccatatatgttgtcttcctaatatcactggctattgtaggatgagcagcagaatctatgaacttgattgtcacacatttttttcttcgcattccggattatgcctgtaatttgatgtttcaggcgtgtttgtgctgggaagcatgttgtatgaccctgtacgttagtaggcttgaataagctacaaatcttttcgtgacttaaaaaaaaaaaaaaanaaaaaaaaactaagaagaactagaccaannnnnnnnnnn

SEQ ID NO: 12668 - DNA, 1521 bp, Setaria italica
  Peptide Sequence Number=SeqID_78642
gaacggaaaccctcgtgaacggcggcggcggcggcggcgatgccgccggagaggaagaggatggccgggctgtgggagcgcgaggtaggcggcctccctcccaggcacttcgccaacgccgtcatggcctccaaggactttgtgcaatctctcagcatacaaaagaggctacggaagcacaggggctgtgtcaacacgataagcttcaactcagatgggagattcctcctctccggggcggatgatcggaacgtcgtgctgtggaattgggtggaggcgtcaccgaccttctcgttccactctggacacagcaacaacgtgctccacgcgcagttcatgcccttctcggatgaccggagcgttgtcacgtgtgctgctgatggtgaggtcaggcattcacagatacgggaagggggttgcgcaactacagacaaacttgttgagttagattttgcggtacacaggctggctgttgaaccaggaagtccgtacacattctactgctgctgtgaagatagctctgtgtggctttttgacctcagggggaaagatgccgtggaactctttagatgtaggactgcagaccatttcactgctgatgacatcgaactctttgctattgccatagacccaaggaagccctgttgttttgcagttgctggatcagatgagtatgtaaggatatatgatacccgcaagattggtcttgatggaaattctaattccggtctcgcaactgagcacttctgccctccacatttgattggtgaaaacaaagatggaataactggtttggcttactcacagaccagcgagctattagcatcctatagtcatgacaatatctaccttttctcaagagagcatggtttacacttcaacaacattgaggtagatgaacgactcctgatggatgaaactggccccttacctttttgtagagataagctgcctatacctaaggcattcaagggacacacgaaccaacacaccattaagggggttaacttccttgggcccaactgtgattatgttacctctgggtcagactgtggccgtatatttatttggagaaagaaggatggggagctgatcagagtgatgaacggagatagacatattgtgaactgtgtcgaacagcacccttctggaattgttgttgcaagcagtggcattgataacgatattaagatttgggaacctggtgaaggtgaaacccactccattgctactgatgacaaggtcaaggaagatatgtggctctccaccagcagtgattctgatggcttaatttacaacggcgattttgattatgtgatggacttggatgatatctatttatatggaaatgctgatggacattcatctaacgaagatgaagatggatcatcagaggaagatgacgatggtgacatcagtgccgaagagatgacgatggtgacgatagtgccgaagaaggtgttgatggtgaaaacagtgccggagatatgagtgagtggttgacgacgacataacaggcaa

SEQ ID NO: 12669 - DNA, 462 bp, Setaria italica
  Peptide Sequence Number=SeqID_78643
tcgggggagtagagttggagtggttgccgtccagccaacacgcaagcgccccaagaattgagcagcaagaaaccctgctgcgctcgcctccgtggcaatcactagtgcccgatgtggatgtggatggaaactcggagggtgagggagagagaaaatcgcaccttgtgcaactgtttcaggctctcgttcgtgctcctcgagctctccagccgagctctgtactcctcgatttgctgttttttgaggagaacaccggaacagaatcaacagccgggaatcagcttttacagttagaaacaaaccatgccgaattctaatcgctccagctcactaatcgcaagactaattacgcaagcaagcaacctacgggggtaaagaaaaaaatctaatctcccgaggaagaaggtaagaggagccgctgaccttgaggagatgcgcgttctcctgggacaagctcgcgac

SEQ ID NO: 12670 - DNA, 492 bp, Setaria italica
  Peptide Sequence Number=SeqID_78644
tcgggatcgaagtgtcccgcggccaaagaagggaggatccagtcaccatgtcgatgtcgctcccaaccaaacatggtgctaaaggtgaaggtgcagccgcttttgccgtccacgacgctgacgaaggtgtacccatccgggtgcacggtgggtcagggagcttgtgccacgaacggccggcccagccgcccagcacttgccgccgggttcatcaggttcaggaagaggggcctggtcgagcagctcgaaggagtcagtggacgccctgttcccggtcgagatgtagatgaggtggacggaatcggcgccgggccgagggccgaagatgatgccccgagggccgcgagcggacgtcgaagacgggaacgaggctctcgggcaagagatgggtgtcgccgccgcggtcgtcgtcgtcgtcgtcgtacggaccctcgacgtgcatggccatgatcatggtgtcgaaggcggccgcgaagcacgagggccgccccg

SEQ ID NO: 12671 - DNA, 529 bp, Setaria italica
  Peptide Sequence Number=SeqID_78645
gtttaagtctgcacgctcctcagccagagcacggttatctgccaaaagcctccggagttcaacttcctgcaactcaagctcttcctcagaacagctgggtgagggtgagggtgagggtgaggatgaggagctcctctcatgcgtgggccttcatggatgtcaggataggccctacggtcatcagcacgagtggcaggatagcccctatggtcatcaatcaaacgaacaccagggtagcccctacgttcatcaaccagacggttgtcaggataccccctacgttcatcaaccgcacggatgtcatggacttcaggataccctctgggatgaactagacgaacttcatggtaacccctgcggtcatcaatgggacgccgtggcagtcgacctctctccgacatgatgcttggtgccttggtccttgtggtatgatcgtcgccggcgattaccccggtgaagaactggccaacggcggcgccagtcgctctgtcgtcgccgctaaggaaaggtaaggcaccgaagaaccgaa

SEQ ID NO: 12672 - DNA, 373 bp, Setaria italica
  Peptide Sequence Number=SeqID_78646
ctcctcgtgtgtccgttcgtcgtagttctcttttagttttttttggtttttttgtttttttgtttttttttttatcaatattgacctagatttatagtaataattctgtaatttatagtagtggaaaaaatttaatagactactatagaaattaaaattcttagaaacgttcaaacaagtcaagccttaattttaaagcaagcaagtataaagctcaggtactgtaaaccatgtgacatgacaggttaacacctagaaggtaactctttctcccatgactcttgtgatcttaacggtactgaaggcggttcttgtcatatgtcccccatgaactagattcaggaggatgcaaaggacctttctcagaaacccc

SEQ ID NO: 12673 - DNA, 1657 bp, Setaria italica
  Peptide Sequence Number=SeqID_78647
tccagatattgaatataaataactaatcaagatactgaactgatttgagctgaacttttgagcttggaaacttgaaggcctgacacaagctaactcgccaatgaacaaaacttacactctcactgcagcagactgttttcattttccgtacagaggaattcatgacatgacatggggcaaaggcttccaagtagaccaaagttccccaccagctttgatgcactgaaaagcattttcacatgctccagagggaactgcaacaatataataatgcctgcttatgaaccaagtcaacattcatattccgtcaagtattgcaacattcgatgctggctgctgtgctttgaggatttttctcatatctccaactcataaaccatctggttctatagggttcctgtgtacatatcttgatgtagggtgtcgcccttacagtacacataccatgagcaatgacaggttaacacctagaaggtaactctttctcccatgactcttgtgatcttaacggtactgaaggcggttcttgtcatatgtcccccatgaactagattcaggaggatgcaaaggacctttctcagaaacccccgcatggatattatagctatcttcgtatggcttagtgaaggccacctcagggctgcccatctgcatcccatatgctccacctgtgccccatggtctcacttcaaatttagctaattcagctcgcatctgttcaatctcttgtgccatagaaatcatattcttctccattgccttcctttgttccaccaactcaaaattcccttttcgctctagttcacaagcagtcctcacatgaataagttccagttgcagaccatcaagctcttctttcagcataggtagctggtgcttaacagatttttccctggtcagatcttccatgagagatgcagcctctgcagagagttctttcctagtagcaatgagcttctcaatttcaccacgaagctgcataatctcatcacgtaagtgctcatttgctctaagttcagcttcaagcttcctcttcttgtccacaagcttactgatataagcttccttctcagcagtaatgtctgaaatgataacattcaagtggcggacctcatcttttccagcttgtaattccctgtttaagtctgcacgctcctcagccagagcacggttatctgccaaaagcctccggagttcaacttcctgcaactcaagctcttcctctagaacagctgggtgagggtgagggtgagggtgaggatgaggagctcctctcatgcgtgggccttcatggatgtcaggataggccctacggtcatcagcacgagtggcaggatagcccctatggtcatcaatcaaacgaacaccagggtagccccctctgggatgaactagacgaacttcatggtaacccctgcggtcatcaatgggacgccgtggcagtcgacctctctccgacatgatgcttggtgcccttgtggtatgatcgtcgccggcgattaccccggtgaagaactggccaacggcggcgccagtcgctctgtcgtcgccgctagaccaagttagacaagaaccaataacaaagaactaacttaactttaacaaagaacaaataaaggtaaagaactaaggtaagaacttaaaacaaaagaaataa

SEQ ID NO: 12674 - DNA, 428 bp, Setaria italica
  Peptide Sequence Number=SeqID_78648
ggtgtgtgtacatactttttcagacctcgcagggtctctatttatatcccaaactcaagactcctagtcctggtcaactacgacgcaatacaatatctataaccaaagaaacaaactttctaaacaaaacaactcgtacaagagtcggaaacgaactcagattttattaaccaaccctatatccaccatcttgcaaccccctcgccgatcaaaactttttgcctcttatcggtcgaagctccaacacctccgatcagctggaaccctccggcttgcatcggctaaaccccatcggctcccatcggctgaatcctcctgtcttcatcggccaaacctccatgattccatcggctgaactactgtaactccatcgcccgattttactagccgttgctcctctatcacgcatcagcatctatgcttccttt

SEQ ID NO: 12675 - DNA, 336 bp, Setaria italica
  Peptide Sequence Number=SeqID_78649
ggtttgttgtgcaatttctacgctagctctgactgaaccttcagctgcagaccttaccacctgtgcacctctgcaaatctctggaagcaagcatgcagcaacctcagaggaagatggttgtgtccaagaagctcatgaaggtcggcccatggggcggcaccgggggacacccatgggacgacggcggccactccgggatccgcagcatcaccgtttcctacgaccgcttcatcgacagcatcagcgtggagtacgaccacgacggcctggccgtccccggcgagcggcacggcggagccggcggcaaccacacgacccaggcacgttcaatatata

SEQ ID NO: 12676 - DNA, 457 bp, Setaria italica
  Peptide Sequence Number=SeqID_78650
tttttttttttttttacttgaaaaattccaatatacaatatatggtgagtgttaataatgtactacatattacataatatgcctcctggtcaagtaacaaacacaaatatatgctggctagattagtgcctgaaatgcacattcccatccaatgaagagtcatttgtaggcattaactattaacaacttccacaggttccaaaacaactgaatacattaggtaaaactcaaatttaatggagcaatactataatacctcaaaagccaaaatgagccacttcctcatcttcttcatcttcatcatcttcatcatccacaaacttttcgaattcatcctcaaattcctcatcttcttcgtcctcagcatcatccatcatgtctgaagcgggattttttgtccttcaaaccagtgctgagaaccacagtttgtcgtttggatttcatcatatctctctgc

SEQ ID NO: 12677 - DNA, 1533 bp, Setaria italica
  Peptide Sequence Number=SeqID_78651
aaaactcaaatttaatggagcaatactagctggcatgcactgccagcaccaagacatgagtttaaagtttaaacaagttctacatttgatttacatagtaatagcagagtcaaccacctacggatatcgacagtttttcgcaagttcggtaaacaagcgctggaaatcaatgggttatccaccagtgcaccaccaagttactaattggtcaccctcaaaagccaaaatgagccacttcctcatcttcttcatcttcatcatcttcatcatccacaaacttttcgaattcatcctcaaattcctcatcttcttcgtcctcagcatcatccatcatgtctgaagcgggatttttgtccttcaaaccagtgctgagaaccacagtttgtcctttggatttcatcatatctctctgcaatttttccatgttctctttcctgcgttctgcttccaatctttccttttcagcaatcctcttgtcaagatcagccctgtaggtttccatatattccttggcgcttgcttctatagcttcaaaaaatgtattgactccactaccagacactgcggatactccaacagaacgtagattcttgtagaattcgtcaagaaccagagagaggcttcgggtatatgtagcggaataagatttgtctgattccaaagctgtctgaaacacctcaaagtcttgcatccattcgattgcaaactcgtgcttggcgacatcaaccttgttgaatgtcaggactagagggaggcgggttttgtagagaatactgcaggcataaagcatattgctcataaaagtaacggggcttgttgatctgggtgtgtcaacaacatatgcaacgactgttggaaatgttgatgcaaaagcttcagtgatgatagctcccgaagccgaccaagtgaagatctcaatctgcccaggagtgtccaccagaacataatccagttgatctgcacgtctttcaatgacagacacaacctcatcgaacttggtggcaaataagttgagcgaggtgagaatgccaccattgggaccaaggccgtactccttcatcacgtccttatacagcaccgtgtcgcggatatcaatgttagccccgaatggcagtgtcatcaccgcagggtcaaggttgacaacatagcccctcttgtctgaggcttgcatatcacacaccaaccggtgcatcaaggtcgtcttccccgtcccagccatgccgatgacgatgataatcacgggcttcttcttgaaattggtgcgccccgggccaatagagaggcccccaatggagtccgcgagctcctcgctcttcatgctcccctcctctgccttccccttccccttcgcgtccgtctgctcctcgaggtccatctgggtgggcttgctcgtggcggcggggtccgagtcgacgtccatcggcgccgcggtggtttagccgctaaaccctaggcttcactggggctacgggtttgcgcgtagaggaacggagggaggagagaggcggcggaaagaaggtgagagaatggggg

SEQ ID NO: 12678 - DNA, 325 bp, Setaria italica
  Peptide Sequence Number=SeqID_78652
agcacgtcgcctccccgtctctttctccagttattttcccaaccaaaacccgatcaatctttaccagccaaaccaatcccccccacgaaggcagcgacggcagagcgcccaatggccatcgaggcggacacggtggcggcggcgagggcggcttcggtttcggtttcggagacggcgcccatgtccccggccgcctcggcggcggcggcagcgggcacggcgcggccgcgcgtcgggtggctaaagaagctcatcccgcgggactacctgccccggagccggcggtggaggctggcccgccccgtccgccggcggcgcgtccagg

SEQ ID NO: 12679 - DNA, 669 bp, Setaria italica
  Peptide Sequence Number=SeqID_78653
ctccgctacctacccaaacgccagagaggcaggaagagcgccggtggtgacggtgggaagccaaaactctctgcaactccggcgagcatcgaaaccacgcacacgaggccgaggaaccttcgggaaccttcgcgaggatgctctccaagctctcggcgtggttcgtgaacccgcgccggaacccgctggcccgcgcccaccggaacgccgtcgcctcccgcctccgcaaatacgggctccgatacgacgacctgtacgacccgtaccacgacctggacatcaaggaggcgctgtcgcggctgccgcgggaggtggtggacgcccgtaaccagcggctgaagcgggccatggacctctccatgaagcacaagtacctccccgacgaagtccaggcaatacagacgccattcagaagctacctttctgacatgcttgctcttgtgaaaaaggagaaagcagagcgtgaagcacttggagcacttcccctgtaccagagaaccatcccataaaacgctttctttgttacttatgatctaacaatgaacgcaataaaatgcagcagctgatactgtaatatgatactgtagtaaaatgttacggtcgatggagccttgtatatttctgaacgcttgaatgaactgggatatcgttactgaagtcaactcggtg

SEQ ID NO: 12680 - DNA, 773 bp, Setaria italica
  Peptide Sequence Number=SeqID_78654
gcatcacgctccatgtttctgtttgtctgtatggcaaaaaactgatttatctatatcacgagtcccaggtgctggtcctgatccaggaagctccatctttgatgcaggaggtgcagatggaagatgcacagagccatcaccttctgagtatgcaagtggtggagctgatggtttcggatcaaactctgcagactggtcagcagtcggtggtttacttgaagcactgacagagtaagagtcagtgaaactagttgtagatgactctgttcctgccacttccggtggtgcctcataaacacgggaaatagctggatctcttccaaacccagtagtatcagctgtaggaggcgaacagagtgataactctagtccgtattgctgaatggccattgtttggacacaatagacttgaacaacttgttcaccatcaggttggctttcatgtgtcccagtaaggcttaaaataggcattgcaactgtgaaatctgctatatagtccaagcgagtagaggcaggatccgggccataatcaacatggacagcataaatagcattctttttagcatttgcaagcaaaatcaggcttgcttgaggcagcactgcgacctggttgaaaaatgcctcctcgactctaggctccagagaactaacaagttccaaggtctgagtacaattccaactctcagaatcacttggcaacaaccaaccatcttcattagtagaagcccaaattttaatttctcggttcagaggacccgctgtaattagattta

SEQ ID NO: 12681 - DNA, 2454 bp, Setaria italica
  misc_feature (2377)..(2454): n is a, c, g, or t
  Peptide Sequence Number=SeqID_78655
tcgctcctgcggcggcggaagcagccgcagcgggagcagccgccgccgccctcagatggaaacgggtccgaccacgacgatgacgacaaagggaagaaggcgtcggcctcctcctccgcggcgccggagtccaaggaggcgacgaggcggaccaaggccaagtggtcgtgcgtggacagctgctgctggctggtcgggtgcgtgtgctccgcctggtggctgctgctcttcctctacaacgcgatgccggcgtcgttcccgcagtacgttacggaggcgatcacggggccactcccggacccgcccggggtcaagctgcagaaggaggggctccgcgtcaagcaccccgtcgtcttcgtccccggcatcgtcaccggtgggctcgagctctgggaggggcaccactgcgccgaggggctcttccgcaagcggctgtggggcggcacatttggcgacgtgtacaagagacctttatgctgggttgaacatatgtcactggacaatgaaactggattagacaagccaggaataagggttaggccagtcacaggccttgttgcagcagactattttgtacctggatattttgttgggctgtgttaattgccaatttagctcgtattggatatgaagaaaagaccatgtacatggctgcatatgattggaggttatctttccagaacactgaggttcgtgatcaaaccctgagcagaataaagagtaacattgaactcctggtagctaccaatggtggaaatagggttgtggttatcccacactctatgggggtcctctattttctgcattttatgaagtgggtcgaggcacctcctcccatgggaggtggtggtggtccaaactggtgcgaaaagcatatcaaagcggttgtgaatattggtggacctttcttaggagttcccaaggctgttgctgggcttttctcatctgaagccaaagatgttgccgttgctagagctattgcacctgatgttctggactctgactttcttggacttcagactttgcgccatttaatgcgtatgacccgaacatgggattcaacaatgtcaatgattcctaaaggtggtgatactatttggggaggtttggattggtctccagaagatggttttgaatgcaaagctaagaagcaaaaaggcaacgatactggggtttctagtgacattaatgtggaagatgttgaagttgaacctgagcctattaactatggaagattggtatcttttggtaaagatgtagctgaagctctttcttcagagattgagcggattgaatttcgtgatgctgttaaaggtaataatattgcccattcaaattcgtcatgccgggatatctggacagagtatcatgaattagggtggggtggaataaaagcagttgcagactacaaagcttatactgctagttccattatagaccttcttcgctttgttgctccaaggatgatgcagcgtggaagtgttcatttttcatatggaattgccgataacttggatgacccgaagtatcaacattataaatattggtcgaatcccttagaaacaaagttaccgaatgcacctgacatggaaatattttcaatgtacggagtaggcattcctacagaaagagcatatgtctataagttggccccacaagctgagtgctatataccttttcggatcgacacctcggctgagggtggagatgaaaatagctgcttgaaagggggtgtttacttagctgacggtgatgaaactgtcccggttcttagtgccggctacatgtgtgcaaaaggatggcgtggaaaaactcggttcaatcctgctggcagcaagacctacgtgagagaatacaatcattctccaccgtcgactctcctggaaggcaggggcactcagagtggtgcccatgttgatatcatggggaactttgctttgattgaggacatcatcagaattgctgctggggcaaccggcgaggaaattggtggcgatcaggtttattctgatatattcaaatggtcggagaaaatcaaattgaaattatagtgcatgggaagatgaagtgccattagtggattgcgtgccaatgtgattgctccagagtgcaattctatggattttgctttgctattgtagttttccactgattcgtccctttcacaaatttacattgagacaggaagctgatgcggtgctgtaccactattttgggaatcgtacggcattgtatattaaaatgtacaggtgtaagttacagtcgctagcagaattttatctattgattgattttgaagtatttgctaggtattttcccccttttaaaaaatggtgcatacaatggtaggagataaataaattgttcacttagcaannnnnnnnnnnnnnnnnnnnnnnnnnnnnnnnnnnnnnnnnnnnnnnnnnnnnnnnnnnnnnnnnnnnnnnnnnnnnn

SEQ ID NO: 12682 - DNA, 334 bp, Setaria italica
  Peptide Sequence Number=SeqID_78656
ccacctgagacgcgagagcgaacctacgctgtagatatcgaactgctccccggtcgccgccaaggacagacagattcaccagaaaagggaaaccccaagccccccaaccaacatatggcgatgaggaaggctagaagaagaggtcaacggggagaggtttgtggttttcgagcagcttaccagaaggcggtgtagctggcgaatccgagcgacgaccccatgacgccgatgcaggcggcggcgaagaacgcctgccccacccgcagcaccagcaaacaacaaaaccccggcctccccgccagccccggcatctcctccctccgcccacctcccg

SEQ ID NO: 12683 - DNA, 557 bp, Setaria italica
  misc_feature (1)..(40): n is a, c, g, or t
  Peptide Sequence Number=SeqID_78657
nnnnnnnnnnnnnnnnnnnnnnnnnnnnnnnnnnnnnnnnttttttttggcaattaactcaccagcatctgatgcaaagcatctattcagcaatttctatcattagtaattgttcactccatggactttacatgatcccaacatttccattctggggctatgtggtttgctaaatacgtggtatggtaaatttcctttgtaaaagctacaaagagagaagagcagaaaaaagaggtcctataaacattgctatcccacgatcataaacaaaatcaggacgcagccaggagccaaaacatgatcagggctgatgtagcgctgagtgcccaagacaggaaggcaaatgctgtggcgagctcgtattttccgcaagggagttggggataccttctgcagaagagcacgtccttttgaaacagaattacgacaccaccagctgagctcgatgcagcgaatgacaaaattgctgttacccagtctccaacgacaaataagctcaacagaattgggctggtgagatcctttttgactttgatggcatatccatccagacatga

SEQ ID NO: 12684 - DNA, 451 bp, Setaria italica
  Peptide Sequence Number=SeqID_78658
tttttttaatgcaggagcagcatagcaaaatttacgggtaaacgatagagaaaagaacagcaaaaggatcattcagttcggcttctccatatgggcaacttcggtgcttgtataaaacattataacaacacatccaagcatacaactttatatgttcatcaaaacaattaagtagagacatagaaaaccctttaggagaaatcgagacaaaaagatagatgactagagtttcaatacgaatttagtcattacccagtctccaacgacaaataagctcaacagaattgggctggtgagatcctttttgactttgatggcatatccatccagacatgcaagtccagagctccacaacatctgaagtcccattgatgcaaccaagtagcagaaggcggtgtagctggcgaatccgagcgacgaccccatgacgccgatgcaggcggcggcgaag

SEQ ID NO: 12685 - DNA, 320 bp, Setaria italica
  Peptide Sequence Number=SeqID_78659
acgcgccgctcatctcggcctccagctccgccgcggccgcggactccttggccgctttcctcttggcggccgatgactccttggacggcgacgccggtggcggcgaggccgtgcggcgcccgcccgaggacccggaggcggcggccttggaggtggcgctggaactggagggctccttggcggcatcggcgtccttgggagacggcggcggtggaggtggcggcgcgggcccgaaggaggtggtgcacgcgacgatgtccagcagccgccggacgtgctccaccgcactctcctcgctgtactcatcttccactagggtg

SEQ ID NO: 12686 - DNA, 497 bp, Setaria italica
  Peptide Sequence Number=SeqID_78660
tgcgctcaaagatctgagaaacatcaaacacgtttggaagcagacgttacaaagaaaacaagcattatattaagtatagtgaagaaactatacttgaagggggccacatttaacacattcaaaatttccattaaatctaggttagtaaattttcccatggattgaggggtcaaattaacttatggattgcaaggccatcctcatccagctctatcgcggctatgtctaaggcaggctaatcaaaatgccaccaactcaacagctaagcaacagtcaatagccaaatactccacttgttacaactgtgtcacccaatatgttaccatactaccatatgtggttgcaaaaatttgatcagcagcattcatatgcattacgattgaggtagggaacataacagcactattagtgaaccagttaagacagctccggcaggttttcaacatgcattggcaagttgaaaggactccaaggtttaagcactaatgctgaaaact

SEQ ID NO: 12687 - DNA, 272 bp, Setaria italica
  Peptide Sequence Number=SeqID_78661
ccgggtatcttttttttttcttttacacacatctttatgtgaaggggagaggaggtacatagccgtcttttgcttagctacatgcccgcacacactgacacgcaccggccggtctgtctcctgctacttgctcgagccgtcgccgtccgtcgccgtcgcctccggcccaaacagcacccaggtcgcgcacgaccctaggctcctcctgcctactacttcccgccctgacgggtgacggcgacgtcgcggctccattattggccacctccgag

SEQ ID NO: 12688 - DNA, 481 bp, Setaria italica
  Peptide Sequence Number=SeqID_78662
gatgacactctggatcctctagaagccttggcaagttaactatgtttactacagcgaccgctctgtcgcctctttcagtggtggctggggtaaatttgctctaggaaacaatctggagaagtttgatgtatgcgtcttcgagcttttcaaggaggacaacataaaagtgcacatctatcgggttgtcccggagataactccgctcctccgtgccagcagcagagactagggtttccttcgcatatcggagagcgtgatccattgacctgcggctagagaatgagaagactggtaactattcacatgctggagaatgcttctgtgctccttcaagagggagagcactcataattcactgaaacaaacaagtgacaataaacagaagttatgtgctcatgttctgactggaatgatgttgtgccggtcaaataatgtcgttgcgaacatatatatatatatatatatatatatatatatacaa

SEQ ID NO: 12689 - DNA, 1357 bp, Setaria italica
  Peptide Sequence Number=SeqID_78663
aagtcggcgaaggagaagcagaagcagaaggggaagcagaatgaagtgagggaagacggcaaggggaaggagaaggcagcggcgaaggtgaagcaggaggcggcggcggcggccaagagcgctggccagcagttcttcaagatcttcttccccgaccagtcgcgggagcgattgaaaattccgacggcgttccaccaacacctcaaggagcagcctactggactggtttccctgaaaggtccgagcggcaacacatggcaggcattacttacttcagactccgaagggttgttctttgagcaggggtggaaggaatttgttacggatcactctgtcaagcaaggtcacttcttggtcttcacatatgatggactctcacgattctccgtgacagtgttcggttcatttggtgtcgtggacccaccatctttggttgcgaagcgtactaacaatgtagtgattaagattgaagatgatgaagaagaggtccatgtggacatggatgcaggtggcacctctgagacatcaattctccccccagaggagggtaatggaataacaggaaagaggactagagaagtgaatgatatcgtagcagatggcaatgcatcaaagaggcattctagtgttccaaagcaagctgagaaaaagagtcctgaagctattgttcgtacttctaaggatgcatcaacaattgtcaacactgagaaagataccccattcagtatattaaacgaatctacggctttcaacaagactcacgtcagagacaagaatatgcctaagcttggtaaattcattgtgaggagggccaggcaaccagtagtaatatctcaaaggcgtccagtaactgaagaagagaagggccttgctcttagaagggcaaaggaatttaaatcaaagaatccttttgccgtgcaaacaatgatggaatcttatgtctatgtgggatttttcatgaacatcacatgcgaatttgtcagagagtcacttccccggataagcaagaagatgacactctgggatcctctaggaaagccttggcaagttaactatgtttactacagcgaccgctctgtcgcctctttcagtggtggctggggtaaatttgctctaggaaacaatctggagaagtttgatgtatgcgtcttcgagcttttcaaggaggacaacataaaagtgcacatctatcgggttgtcccggagataactccgctcctccgtgccagcagcagagactagggtttccttcgcatatcggagagcgtgatccattgacctccagcatgtgaatagttaccagtcttctcatgctggagaattgctttcttgttgctccttcaagagggagagcact

SEQ ID NO: 12690 - DNA, 356 bp, Setaria italica
  misc_feature (311)..(311): n is a, c, g, or t
  Peptide Sequence Number=SeqID_78664
aggctggggaagcagatagccagcatattgatgtcgttgcctaattcaagccagtttgtatcaagaaccatctcatcaggatgctggggaagcagatagccaggatgttactcgccgacctcttggaagaagacatagtggacttcctaggagagttggtagtttcatgaggacccaactaagagcttcaccaatggtagcagagtgctgtggcaacatggggtttgcccgaacttcaagcagattatgctgaagtctgtaacggcttttcaagtgcacagatgctgcatttttctctggtttgagaaggngctatgtatcatatgtcattacactggagagcataatatacatga

SEQ ID NO: 12691 - DNA, 1861 bp, Setaria italica
  misc_feature (1827)..(1861): n is a, c, g, or t
  Peptide Sequence Number=SeqID_78665
caaactaacaggtcatcatcaaacagtgcattgtcgaaaatacgccgtcatgcagaatcagctgttggttcgaaaactcttgcagaaatgttcgctttatctgattctgaaagattgaagctaaattcggacttgcattctcctattcaacgcaataagactaaccatggtgatggtcatagcaaggatggatgctttatagttctaccaaagcatgcacctctgctgtctattcgacactcaatggacaggaattcttgcttggaaggttcctctcagggtaaaaataatccaattgcatcaaatagtcataacaatggtaagtgtcagtttgattctttcggggataaagcaagactgctgaagcaaattggcaatggcagtgaagctaacttgaggaattcttcctgttcccaaaatcttacggcagacaacttttcaactcctgattgctcaaatgaaaaagtattgttcacaacagatgaagatttagtgcaacaacctgctgaatctgaagcttcagggttgaacttgcagttttctaggaaaaaacgggtgaaaagattgcctttccattgtcacgagtatgaatcaatatctgtttcggatgatactgatggtacaaagtcttgtaaaggcttaaaagaggttgaacagccaagcccagtgtccatccttgagcctccaactgatgaagatagttgtttttcaggatgtttcaagtatgacttgcaagagatgactaagaaacaaagtgatggtcaccaaaatcattatgaacctgaagtttccatgtgtagtgatgatgaagaccattcttcttaccaatctttggaagcatttcaggtcgaggaagacagggacttctcatatctccttgacatacttatatgctctggtatcatagttgctgactggcagctcatttgcaaatcatggtacttgcctggttaccctgttggccctcatgtctttgataggcttgaaaggaattacaacaaaatcgtcacatgggcaaagcctgagaggaggcttctgtttgacctcgtgaattcgatcctttccaaggtactcgcaccatgtattgatgtgcacccatgggtgcagtctagcagacactgtgtgcctctttggggccctgaagggcctgttgagaaggtctggcagacggttgttaggcagcgggaagattgtgttacagggcatcctgatgagatggttcttgatacaaactggcttgaattaggcaacgacatcaatatgctggggaagcagatagccaggatgttactcgccgacctcttggaagaagacatagtggacttcctaggagagttggtagtttcatgaggacccaactaagagcttcaccaatggtagcagagtgctgtggcaacatggggtttgcccgaacttcaagcagattatgctgaagtctgtaacggcttttcaagtgcacagatgctgcatttttcttctggtttgagaaaggagctatgtatcatatgtcattacactggagagcataatatacatgcccaaaaaacaactattgtaggtattctggactctgtagtaacagcctgacaggatctgtactatccaacactttgatctgtgtagtaaactagatatgtgagctacattgctagaagatcatacctatccgtcatctaggtttgaggatgttagttaatatttaggattcagtatttgctaatgtgcagcacatattagaggatgctaacatccagagtctttgaattcggcatgtaatcgccagttgcagaatatacagaccaggaaagaagatgtgaggatctaagnnnnnnnnnnnnnnnnnnnnnnnnnnnnnnnnnnn

SEQ ID NO: 12692 - DNA, 255 bp, Setaria italica
  Peptide Sequence Number=SeqID_78666
aaaagcagaagtggaatcaaccaccagacacatcatttcttcttggctgcagcctacctaccatttactacttactactccatcgaccatatacatattcaatataatattcacaatgaccgacttattaactatatatgatgatttgttcgtcctcaacatcatcatctatcacaaattcacaatggtatgatttgtaatatatgaaccagtgatgaattaatgcattcaaaattctccaaaataatatgatag

SEQ ID NO: 12693 - DNA, 644 bp, Setaria italica
  Peptide Sequence Number=SeqID_78667
tacaatagttaggatctgcttgtcttccggtatgctgtctcaaaccgaacagcatcaccaaaatggtagtaagccatcctagctttagcatcagcccagaagatattggctgactgcccattctttccgtgctgcacggcgtagaaaaatgaagggtcctcgtcttgtctcttcttaagatattcaaataggctttgagcatcctctggccctaaatcattataccgcatctctctaggttgctgagaatctcggcccttcagaaggagattgcgtgtgtcagcaaaattatttgcaatcacaagtacctcaccttgcgagcgaacacagtgaactctgcttgctggtgctgggttcagctcatgagtatgctctaggatgagtttggagaccgtccatacatctttgcccttccgaattatctcaaacaatgcatcacagccatccctagaggggtccaacgcacggactctcttggtatcctctccaatgttctcccggcctgaatggtatcgatgcctggagcacacgagcttcagcatcttgagtgactcatcttgcgacttgcgggactgccgcacacgagcgtcgaaccccgcacggctggcatatgagtagtagaatgtcttggcagactcaacggg

SEQ ID NO: 12694 - DNA, 234 bp, Setaria italica
  Peptide Sequence Number=SeqID_78668
tttctctaaagcaaagtggactgcctggtcgcctctgcgatagagtagaactgtagaatggactgcctcctctcctctgcggtcgagtatatctggcagaatggactgcctggtctcctctacgatcgagtagaattgtctggatggactgctgagctgactgcttccctctctgctactagtgatcgagtatgttggttaagtgtagatctgagacacgcagcagtggatagg

SEQ ID NO: 12695 - DNA, 659 bp, Setaria italica
  Peptide Sequence Number=SeqID_78669
gccatcagttcgcccaagccaaaccaaagaacagatgcagcactgcacacaatccagttccccacaggcgcagcaatcaccccaaccaaaagaaagcaaacttcccagactacatacaacctccccaaaaaacggagcctgttttcaaagtcaaccggctccaggccaccagcatccgcactcccctgcttccatcaccatcagcaaccagcatcagctctggcacggcttctggtcctccttgccggactatcatcagcttcactagcattcgcactgctccgagtcaccctgcgaccactgctcacaacaggactaccattgccttcgttatccacatcaccactcttcctggtccgtttcactggagtgcaagtaacctcttccacagcagcaatgttcttcactcttttagcaggagcaccatctgtgacagtctcagcatcacacttgcgcttctttgtctcagctttctcttcaactaccacatccaccactccggtcacacccaccttggtcttcttatcatcttttccttcctccttgatttcaaccacaattttcacagaaccatcagcgttagcatcagcatcagcactgtcttgctcatcctcgttcatgctgccatcatcctcttccttcgccaaggcatcatcatt

SEQ ID NO: 12696 - DNA, 1440 bp, Setaria italica
  Peptide Sequence Number=SeqID_78670
ttttcaacttcaagcatggtaaaaagttttaagcaatcgaaagccaacaggtacaaaacacggttcagttcctagacggtagaccaactggccctaacaggctaatacaatctacaaatgacaaagccctcggtcagcccatccagcattcaaattctcaggcaaagcaacagaacttcgacggtttctttttctccttcacatccaattaccacaagaattcttctagctgataaaaatggtactcatttaaagttccccaaggtagatctgcttgtcgctgccgcaggacccaatgatcggctcggtggggtggaaagcagtctcgttgactgaaccgttgtgcccaggaagcttgtacaggatccgcctcgatgtcgtgtcccagatgtagaccatgcggtcagcgctcccagcagtgaccttgcggttatctggtgaccagctgcacttcaacaggttcttctcaaagttgtgctggtggcctgtaagggtcttgatgttccggttctctggagcataagggcgcagatcccagatcttgagctcattgtccattgcgttggtcaggaggtaagagccatcaggactaagctgcattccagtgatcatgtcctgatgtcctttgagatactctgtcacttcattcttgcgaagatcccaccacttgacgtcgttgtccagaccaccggtgaataccttatctgctgcctccgagaagctaacggctgtgatctggtatttgtcagggagagtttgaattgcacctctctgacgcaagtcccacagctttgcagtaccgtcatctgaaccgctcacaacaagaggcggccacttgcgtgctgggcaacatgagttgacaaacgacgagtgctcagccatcttcttaacttgcttgccagtctcaacatcccacaccctcacagtcttgtcaggacttgcggagattatctgggtcccatcggtagtccactgaaggtcaagaatagcattcttgtgccctctcagtaccatgaagttcttgcactcaccgtggacataccataagaagatatccttgtcatgggaacctgatgctatcacggttccagcagggttgaacttcatgcagtagatagcactctggtggcctgtaagtagcattattggtgcctccagactggatgtgcgttgctttccaccaggcccaagggcctgatttggatgctgttgaacattagccagctccatccctggccttggggctgcaagagccaaagaattgttgcctggagcagagaacatcttgccgtttatagaaaggatcaagttccaggaagccctaggttgctgctgcccagtgcacgagaaccacgcgcacctctgccgttgcccggaggagggtgtggtgcggtgcggagagctcggaggaggtgtcgcggcctcgcgcgtgttgccggc

SEQ ID NO: 12697 - DNA, 373 bp, Setaria italica
  Peptide Sequence Number=SeqID_78671
attcgggttccccttttctactagatactagactactaccctcctctcgtctcctctcctctcttctgtgccctatcctattgcagccgccacccgctgccgccgcgcttcgtgtaacgggctcggcttcttgctcacttccgccgtcccgcgaggcgcgccgaccggccaggaggccaacggggaacagacggatgcaagtatttcctaccagctaccggtgatctcgaggatcacagtccatcaaggataaggatatgtgtaaccttcatggttgacttagtttggctgccgtgcctctgctttctccaagtgcagggggtgcaagatcacggccatggaacctcataagcttcgctttgttagatgcccc

SEQ ID NO: 12698 - DNA, 270 bp, Setaria italica
  Peptide Sequence Number=SeqID_78672
cggcggacaaagaaggaaggggaaaactatggcgtccgtcgccgcgccgagcgcctcgcaggcggggaagcgcccggccaccggcgggcgggagggcgaccagatggtcgtcacgccgctgggcgccggcagcgaggtcggccgctcctgcgtccacttgacattcaagggccgcaccgtcctcttcgactgcggcatccacccggcctactccggcatggcagcgctgccctacttcgacgagatcgatccgtccactatagacgtcct

SEQ ID NO: 12699 - DNA, 271 bp, Setaria italica
  Peptide Sequence Number=SeqID_78673
atagcactttcccatctgcagccatgacatacatgtcctctgccaccatcctctccttctgcacaccagagggcgacatgacgatgaggcggtgatgctgccgccggtgccggtgacccatccctgcgcgtagaagtggcggcagagctccgccaccagctcccgcgcctcccgcaccggctcgccctgcaggtacgcctccgacgccgacgccgtcgctcctgcaggcgcacccgccgcacgacatggctgcctctgcctgcctactacg

SEQ ID NO: 12700 - DNA, 237 bp, Setaria italica
  Peptide Sequence Number=SeqID_78674
gtactcctcaatacatctctttacttcatctgacccatctttctcacttattggggaatgatccagctgacgatacgatcggccgggagcgggactccaagatcctctaaagtagagaagaatagtaacagaaaggtacaacaaaatgatcacaacctgcagacgcagagcacgaaaatttaattctctgtaaatgctggtccgttatgtatttctagccctgctgcaatgagagaa

SEQ ID NO: 12701 - DNA, 522 bp, Setaria italica
  Peptide Sequence Number=SeqID_78675
tattgtcttagttggtctattaaaggttcttactattattacttcaagtggaagtagacctttatgccactagcatgccagttctttagagccacaggaacatcctcaaagacaactccctgtagttctttcttttcaaatccagtcctccatatatgaccctgaagttgtttcaatggtgtaatcttcctatctgctttaatcattgattccacattggcgaccaatgaattgataacctcttctttgccagcctcatcgggtggaactggaacagccccagcaattccatttcttaaatcatcttctgtttggatgcgcaataacttgatgtcttctttggtttcctcagaatcaaatgtagaagtcagatgctttcgcacattatcacgggcataaggaaacataacatcagtcacaaatgatattggagtagttgttccttcaatgtcaagtacaacacactttgatgatttacaagacaagacaatagaacaaaccaattaaggaaattacaaggga

SEQ ID NO: 12702 - DNA, 2186 bp, Setaria italica
  Peptide Sequence Number=SeqID_78676
agttaaagtttctaagctgactttaaacatgtacatgtcactagagacggctgtagtacataacttctgctatatatctagactatatgtatatcaatatctagaaaaagtagcattttggtacagagaaacaagttaactatttgcatgctttaagtatcctcaatacatctctttacttcatctgacccatctttctcacttattggggaatgatccagctgacgatacgatcggccgggagcgggactccaagatcctctaaagtagagaagaatagtaacagaaaggtacaacaaaatgatcacaacctgcagacgcagagcacgaaaatttaattctctcattgcagcagggctagaaatacataacggaccagcatttacagagcttattttgccattccagtttattgtggtgtcacgtccatctgccttgctggggcaccatactgctacttttgcatgaactgatccccgggctaatattagcccaagaagcactcgcgagttacacacatgtccgggcacgtacagatcaccgtattcgtcagatctcgctaaacgacttgatagtgcggaaaccatggttgtcgggaagtggagcatttcccgggcgaatggagattatcacatcaaaacctgcgttttttgcagcaacggcttcttggaagacgtcggtgatgaataaaatttgagatggactgtcaacaccaagcgattgagagatctcaaaataactcttggtttctcttttgtttccagttgtggtatcaaaatacccacacaggaactttcgtaggtcaccatgtgttgtattcccaaataggagcctttgtgcctctctacttccacttgagtatatgtagacctttatgccactagcatgccagttctttagagccacaggaacatcctcaaagacaactccctgtagttctttcttttcaaatccagtcctccatatatgaccctgaagttgtttcaatggtgtaatcttcctatctgctttaatcattgattccacattggcgaccaatgaattgataacctcttctttgccagcctcatcgggtggaactggaacagccccagcaattccatttcttaaatcatcttctgtttggatgcgcaataacttgatgtcttctttggtttcctcagaatcaaatgtagaagtcagatgctttcgcacattatcacgggcataaggaaacataacatcagtcacaaatgatattggagtagttgttccttcaatgtcaagtacaacacactttgatgattcagcagcatgacaaccattaggaatttcagggctcaaaatgctgcgcagtctctttgcactgtttattggaccatgctcaggagttgcccaatcgatacctaactgatagagcttgatgcaagcatctaaaagataatgatagcattcagcctgtgtcttggcattgatccaagagtcaccccacacatatattccatggttccgtacaaggacagcagttgcctttgggtatgctgcaatcgcctcacttagagagtcagtgagctcatactcataaggagtattctcgataataggaataaccaattcatcacggtagccatgacctttgattcctttgatcatttccatgtgggtcatcctaaactcctttgcaccagggttaagcattgttgcgatgcaagtctccattccatggctgtgaatgacagccccagctcctctcatgagatacgccttcaggaacagaggagcacagtctgtacacttcggaggcttgtttggccatggctttgctgatggcgcagatagcactttcccatctgcagccatgacatacatgtcctctgccaccatcctctccttctgcacaccagagggcgacatgacgatgaggcggtcggcgagcggcacggcggggtcgttgaccttgacggtgatgctgccgccggtgccggtgacccatccctgcgcgtagaagtggcggcagagctccgccaccagctcccgcgcctcccgcaccggctcgccctgcaggtacgcctccgacgccgacgccgtcgcccccgtccccgccgctgccgcatcgcaggcgcacccgccgcacgacatggctgcctctgcctgcctactacgccgccgccgccgctcctcccggtgttgggggactcaagcagctc

SEQ ID NO: 12703 - DNA, 794 bp, Setaria italica
  Peptide Sequence Number=SeqID_78677
aaagcatccaattcccccacccccgggcctcgcttttgtagctttccattccccactgttgcgtgcaagcatcttcccttccccttcctctttaatcccctcgcattgcccccttccagcctagcttcatcttcctcaatcctccctcatcctcccctctgaagtctgtaacaccattctactgctgcaagctctgaataacccccctcctgctacagtacagacaggcagcaggcaggcgtgctcgccttgtttgttcgtttctgtcgccggttgggttgcttgtcctgctgggcgagagattgagaggtgcgagtagccgggagggaacgcacaggcacagcttgtgacgccgggcttggcatcttcttgtttgttcgttgcccatcaatgcactcctccctcaccccttgcctgcgctgcatgcaatccgtgtgtgcctccgctcgccggcgttggttggctgtcagtttcgcgctcgcattgccctctccttcttctttagctacaagaatctgacgagcgcggcggtcccctaggagtctaggacgtaggctccagtgttaagtgtgcgcattgctccggccagcgattggtctggttgcggcggtgccggcagcgccggagcttgtccgttcgtgtcacggttcatgccccagtcggctgctctcgaagggaatcggagcagagcggagcggaggaaggcgatccgaagctagctaagctaacgctccgggcatgcgtttcttcaccacaggcggcggaggcggctcatcgtcggcgcggtcgtacga

SEQ ID NO: 12704 - DNA, 262 bp, Setaria italica
  misc_feature (15)..(15): n is a, c, g, or t
  Peptide Sequence Number=SeqID_78678
cggacattacctcanggtggccttgtgcagcagcatagtgcagcggtgagttgcggccgccgaatgtggagtaccgggcaagacgagggttgtactcaaggagcgcacgcgcctcctgcaggtcgccgtcgcgggcagctgagacaagccgctcaccggaagcagagcacccaaaggagttgcccacaaggctgaggaaccccatggatgcccaagacgaggccttcacggcacagcaccctttcttgagcgcacacgggaa

SEQ ID NO: 12705 - DNA, 1725 bp, Setaria italica
  Peptide Sequence Number=SeqID_78679
cattgcttccaggaaatattcaacgccacaaggttatttacaaaccgaaaaggtagtacttacatcacatgttgctcctgatatatcaacaaggagttgggaccggcgagttcatatgacaacggcacgcaaaaatcagaccaaaccaaccaaagaatacacaaaaacagacctcaagatgggcacaaaactggggacatgcagtgcctatccactctatcagctgccagtagcaacaattgggttaaaggttataggccaagatcttctcgtagtctctccctgggaagctgagcgtcgcaagctagatccgaacctcgagcatcttataaggcagggatttgtgtccatggcacccatacaaaatgccgggttgagtttcatcgcaggtatcctctggcagctcagggagcggaaggaggacgagcccatcggtggcatgcgcccgcactggaattctgtccggtacagatgggcagcaatccaagcagaagaatcggagttcacggctgggcatgtcgtgcaaaatgacaatgaaaggctgtttctcggcagctctcttattgggctcgtaccaggaagtgtgatgaaagagatgattgggtgtcggcagagaggacatggtattgcgcctgctggggtcactgatgtgtagctggttgaacaaaggtataaagcacaccttgtgcaaaattcatgtttacaaccttctgcagcaacagaacagctcccttctaaacagacagcacaggggtcaatacaaacaggtgactggtttaggtacctccatccacactccctggcaatgttcatgatactcataagtggaagacagagataaggagatggaagggtgcgtatccggctctctggttctttacttaaaatttcttcaattgaatttctttgccaggaacgagcaaccattaacggggtccatccactagcattttgtgcagtaatgcaagctcctcgagcaataaggagttgacaacagacagcatttccaccacaagcagcatagtgaagtggggtgctaccagctcctattaagtcaatagtcgttccatcctcaatagtgacctcggaaacagatgctcctaagtccagtaacaattgcacgcactctacatgcccatttaatgcagccatatgaagtggggttaagcctccatccgccttctgatttaccatcttgaccaaagcctcatgatcaaaatcagcagctgaatcttcttcagatgatctatgatttgtgagggtgcagaaattcggtatgcttggaacataatctgcaagcacaagacgaaggcatcgggcatgaccatgcagtgcagcaaaatggagagcagttccaccattgagataatctgtcctgtgaacatttgcattgaagagtatcagtgtttgaacaacctcccagtggccatattgacatgcttgcatcaaagcagtctggcccctgtaattcctaaggttgatctcaactccggattcaagcaatagagagacaatctcatggtggccttgtgcagcagcatagtgcagcggtgagttgcggccgccgaatgtggagtaccgggcaagacgagggttgtactcaaggagcgcacgcgcctcctgcaggtcgccgtcgcgggcagctgagacaagccgctgttgtcttttattacctttgtttctaacctagtcttacttacttatttcttagttttgtttacttta

SEQ ID NO: 12706 - DNA, 330 bp, Setaria italica
  Peptide Sequence Number=SeqID_78680
atggtgctggtgtccaaggggccgaccaagttcctggacgcgcacgggctgcagcagtggtgggccgacgacgtcgagctgcaggtggcgctcaaccacagcaagctcatcgaccgccagctcaggtcgctctacgcgccgccgccggccgcgccgcagatgtgaggctgttgcagtttgacattgacaaggctttagagtttgggcaataaagacacgccattggtgatgctgatctgagcacacggatgatgactgatgagcccgtcctgattgaatgttagcattaccaaatgacaaaatagttgtgtgccaatggttgtggccaat

SEQ ID NO: 12707 - DNA, 808 bp, Setaria italica
  Peptide Sequence Number=SeqID_78681
tttttcggacctcgcctcctcttcctccccgccgccccctcaagccgccgccgccgccgccgccaccgccggagccgcgccaatctagagcgcctgccatggccttcggagctctcgtcgcgtcgaggctggccaggtccagccgcaccctcgcctccgccgttgcccaggctcccgtggcccagcgaacggcgcctcctctgctctccaggcttggagctgtagctcgtgctctcagcacaaagccggcggcggcagatgtcatcgggatcgatctgggcacaacgaattcctgcgtctccgtcatggagggaaagacgccacgggtgattgaaaatgccgagggtgcgaggacaacgccatccattgtcgccaagaatcagaatggtgacctgctaatcggtatcactgcgagccggcaggcagtgaccaacgcccagaacacaattcgtgggtcaaagcgtctgatcggtaggacctttgatgacccgcagactcagaaggagatgaagatggtgacttacaagattgtcagggcaccgaacggtgatgcctgggtggagatgggtggccagaagtactcccctagccagattggtgcatttgttctcaccaagatgaaggaaactgcagagtcttaccttggcaagaccgtctccaaggctgttattactgtcccagcctattttaatgatgctcagcgccaggctaccaaggatgctggtaggattgctggactggaggtgatgaggattatcaacgagcccacggctgcagctctgtcatatggaatgaacaacaaggaggg

SEQ ID NO: 12708 - DNA, 1096 bp, Setaria italica
  Peptide Sequence Number=SeqID_78682
aacccccacaataaacccttgcccgcggccgctgcggcgcttcgccggagcacgaagagagagcagcgaacccggcgatggagtacgtggaccccctcaccggcttccgcgttgacggtcgccgccccaacgagatgcggaagctcaagggcgaggtcggcgtcgtcgcgcgggccgacgggtcggcgctgttcgagatgggcaataccagggtcatcgccgctgtctatggtcctcgagaggtccagaacaaaggtcagcaagtaaacagcaaagaggctttggttcgttgtgagtataggatggcagaatttagtacaggagatcggaggagaaagccaaaaggtgacaggcgatcaacggaaatttctcttgttattcgacagacaatggaggcaagcatattaactcatttaatgccacgttcacagattgatatatttgtccaagttcttcaagctgatggtggaacaaggtcagcatgcatcaatgctgcaacactagctcttgcagatgccgggattccaatgcgagacattgtcacatcttgtagtgctgggtatctgtgttctactcctttgctcgatcttaattacttagaagacagtgctgggggtgcagatgtcacagttggtattcttgcaaaaatggacaaagtgactcttctgcagatggatgcaaaattagcaatggatacatttgaaaacgtaatgggacttgccatagaagggtgcaaagcaattgcaacttacatccgagaggtgctgttggagaacacaaagcggctggagtgtcagcgtggttaaccataagaggcgaatcacatctacccgctcgtgtaacatttgaagtctggactgatctgtgtaacactgcatttatatgtttactcgacagagtaggaagactagtggcctcaactcattgtgtaatgggcttgctggttggatgaatggatttggcgcagtgcagtggacaggaaattcctgagtttcttgtaccgaacttccaacgaacttccaagttgcttaaggtagcttgttaacaaaatataattaattatgatggacgaaccaaacaaacaaacaaacaaaca

SEQ ID NO: 12709 - DNA, 544 bp, Setaria italica
  misc_feature (252)..(252): n is a, c, g, or t
  Peptide Sequence Number=SeqID_78683
agacaaataactagggttaaaaggacaaccaatacaagggtaaataaaccaaaaccaatagctgtttcccgaggtattaagaccgcatcgtcctcaaactgtagcagtacaaaatgtgatgatttagcgatcttcagtagaattttcatgatcaataccaagttttccaagctgctgaatctttctttatatgtagcatttctttcacttcgtatctcattgttaagcttaggaaggaatctgcaacccttnaaataatcttccatatcggtgggtatcttcaggtaaccactaggggcaagatgtgcctgtaatttcacaaccctcaattttgttacagaacagaaaaggctgtctaatgcctagcaataataactgcagaataaaaactgtgacattgcagcacaagttatgcaaacctggacatagtctgaatatatctccaatttaatcagattatcaataagaatacaaagaaacccagaaccacaaaggggcactgaagctgtaccagcatgaggacccccaattgagatgaaattct

SEQ ID NO: 12710 - DNA, 473 bp, Setaria italica
  misc_feature (448)..(473): n is a, c, g, or t
  Peptide Sequence Number=SeqID_78684
cccgaggtattaagaccgcatcgtcctcaaactgtaggagtacaaaatgtgatgatttagcgatcttcagtagaattttcatgatcaataccaagttttccaagctgctgaatctttctttatatgtagcatttctttcacttcgtatctcattgttaagcttaggaaggaatctgcaacccttcaaataatcttccatatcggtgggtatcttcaggtaaccactaggggcaagatgtgcctggacatagtctgaatatatctccaatttaatcagattatcaataagaatacaaagaaacccagaaccacaaaggggcactgaagctgtaccagcatgaggacccccaattgagatgaaattcttgaccggtggtccacaatcacagtactcaattacagcccgggctgtaattgagtactgtgattcttgaccggtggtccaacnnnnnnnnnnnnnnnnnnnnnnnnnn

SEQ ID NO: 12711 - DNA, 1241 bp, Setaria italica
  Peptide Sequence Number=SeqID_78685
tttaccgatcaaacatcactaggctttcatttcttcccttcgcgttccagcgtatttacaaggcaatcgatacagggtccagatgatacagacatttcccaaatacgcacgtcgttcgcatgtaataaagcagccgcacgccttgtacactatcaaaccgacagtatccggcgtatgctctgcttgggtgacgcatccggcttcaagtaaggcacgatgtacttcttcatgtcacttctggagatgcgcaggtgaccacctggcacggacacgaatttgacacgcccagcctcgtccagggtcttcaagccaatccaatcttcggtatagagctttgtctcttgagggggcaatactgggttaaaggcaccatcagggtaataaccaaaccatgctgtttcccgaggtattaagaccgcatcgtcctcaaacatgatcaataccaagttttccaagctgctgaatctttctttatatgtagcatttctttcacttcgtatctcattgttaagcttaggaaggaatctgcaacccttcaaataatcttccatatcggtgggtatcttcaggtaaccactaggggcaagatgtgcctggacatagtctgaatatatctccaatttaatcagattatcaataagaatacaaagaaacccagaaccacaaaggggcactgaagctgtaccagcatgaggacccccaattgagatgaaattcttgaccggtggtccacaatcacagtactcaattacagcccggccaattaagttcccctgagacaagccaactatgttgtagccttcactgagctctttcattttcttgaccttcttacaaactgtatttgcctgctcttgaagtggcattaaccaagagtcccatgctcctcttccaatttcaatgcagtagcctttggagccggaccactccccaagcatctcagtgaaggacgccaacccatcgttcccgcactcgtcgccaatcccgtgcaggacgatgaagggcacggcagaggccaccggcgcgagcacggggaagagtaagaggaggagcacggcgacgtcgcgaggcgcgagggcggccatcggcgcccacggcggggagggggactagggttggggttcgcctcccgtgcccgccgcctctccccgagttaagcgaagcgtcgacaggatttgggtctcgcgagctctgaatcgatggagaagagcggagcggacgaagccagaaagggggtcaga

SEQ ID NO: 12712 - DNA, 695 bp, Setaria italica
  Peptide Sequence Number=SeqID_78686
attcatatcaaactgcatccagccaaatgtgccgcaccgctaacagtagagctgctactgctgagagcttgaagaaagagcagactggagcagctagaagaatgtttgcacatgcactggggctgtctgcagctcaaggaaattatggtgcacctcctaaaccaaagtaatctggagatgagatgctgtgaattggaaaagcttgccaatgcatgctatgactgcactctttatcctgtcacgcatatggcatgagatgaatctgtgatggttggtgctcttttgtgttcatctgcttctgtgaaatggcttttgtgatgctggtagcagatggaaggtcttcatggttggatgtaaactattggactgaccgagaggatctgtggtcctggttggaagaagagcgtagtttgccacatccttgtcaaagcaatcccaaggcctaagcaagctcagttggggaaagagcttgccggatgcacatggcatgccaagtgcttcacaggagtggaagaaacagtgtcatcagtgacactcaactatgtcgtatgtgttttatccagtcagctgcaatgtgtactcttgtagtatgtttatggagagacacgtatcacaatactgcaattagactttacattgtctttgtttaatatatgcagtttcgactgcaatgttattacggaaaaaaaaaaaaa

SEQ ID NO: 12713 - DNA, 700 bp, Setaria italica
  Peptide Sequence Number=SeqID_78687
ctcccgcagctcccttatgcgcttatcaagattgcgggagttgcgtagtgttctagctctctcaacttcaaggcggatgcaagcatgatacgccccaagaccattatctcgtcccttggtcaatccaggatgctgagatccagctgatgaagcaccctgtgatggaagatcttcagtgttctttccaggcctcctaccgatccccccaacggtaggaaaatcatcatccacaatgtcataaatggaaggaacctggtcatccatggaaagcctaccgtttcccacaccagccctgtctggatcacactccaactcatccacaacatcacgaacagaaggggcagcaactggctccgctctcagaacatcgatgctgacctcaaattcatcctgagctccccggccctcattctcagccagccacctcaactgctcctccctgaccgtcgcgcagtccttgcagaaccagtccccctccggcacagtggtccccagcccggcgcagtaggtgtgcgcggccgcgtcgcagagctcgcagagcagcagcagctcgtcgtccgtggagccgttgcacacggtgcagatggtttccgcgtaaggatccacgcccaccgtgctgctcccgttgccctgcggatggtatacctggttgcgctcggggacggtgacgatgcgctcgtcggggaataaacgggacggg

SEQ ID NO: 12714 - DNA, 409 bp, Setaria italica
  Peptide Sequence Number=SeqID_78688
ttcttacggttcgttacgttgtttcggtcgttcctaacgtgctcctcgacggccgtggcctcggcgcgcggctctgcgacctgggctccgcctgcgagggcttctccgccgccgtcgcccccacgcgcgccgccgtgggctcgccgggctacgccgacccattcttcctccgcaccggcatcgtgtccaagaagtccgacgtgtacagcttcggcgtgctgctgctcgaggccgtcacgggcctgccggccgccggcgagcccgggtcggagaacctggcggcgaggatactgccgcgcgtcagggcgcgcggggtggccgggctcgtcgacgccaggctaggggaagggtacgatgaggaagaggccggcgaggtggcgaggatcgccgtggagtgcgcggcggcgcg

SEQ ID NO: 12715 - DNA, 471 bp, Setaria italica
  Peptide Sequence Number=SeqID_78689
caaagagaactgagtctgcctatgactgacataaaaacgaccagcagagctcctagccctcagcgtcgcttgtggcacacctcaatcatgtcgtcgtcctccagatcaaggtcctcaggtgtagatgatgggttaattttctcgccatcaaacacgaagaccagattggatgggttaagtttggccttcttggcatacgccttgagaagcttgtcaaacttctcgtccttgtatacacggaactgttgcttcccatccttgtcttgaattgatatgactatctttcccctggctttctctacttctggttcagattcctcatctagaactatctgttcaggtggttccttgggcccaacttgtttcttggtagtagcatctaactcttgcaatatatcgtgtgctgattcagcaaactttgcaaactcttgtttctttaatctcagttcccgcaacgcgctgtcctcctcc

SEQ ID NO: 12716 - DNA, 351 bp, Setaria italica
  Peptide Sequence Number=SeqID_78690
acctgaggaggacgacttccggcggtaccgcggcgtgcggcagcggccgtggggcaagtacgcggcggagatccgggacccggcgcggaagggcgcgcgcgtgtggctcggcacctacgacaccgccgtggaggccgcgcgcgcctacgaccgcgccgcgttccttctgcgcggctcgaaggccatcctcaacttccccaacgaggtcgccttcggcaccgccgcccggtggggaccccctgccgccgctccccgtcccagcgctgccaccgccggtagtaacaagagggcgaggtcaccggagccagcgctgcgagaacaggacgccgggtgcatggtcagggaggtgaa

SEQ ID NO: 12717 - DNA, 478 bp, Setaria italica
  misc_feature (8)..(8): n is a, c, g, or t
  Peptide Sequence Number=SeqID_78691
tttttttnttttttttttttttttttttttaattgttgaaatgagtctggcacaaggccacttcttttattggatacaaagaaacatcattatttgctggtttattatattacacaactacacaaacgagacatatcacaataaaaacaattattcgcggctaacatatgtgatcgatcaccacaaatgtcgtccatcatacattggccctagccgatgttggggacctccgcaacatagccggcagtgttgacgaagacgcggacgcgcttggtatcgaaatcagtggtcaccatggagccaacgggcaccagaaacacctgcacgtccggccggtcggccaggatcttctgcttcgccgcgtcgcccgacagcccgaccacctccggccacgagctcttaccgctgtcaccgctcattttcgccgatctgtcctgtaaaatcagttcttgaacttgaactttgtgagatgttgtgc

SEQ ID NO: 12718 - DNA, 871 bp, Setaria italica
  Peptide Sequence Number=SeqID_78692
tctacaaaagctcaagaagtatgagctaccagaattaccagctcctcgtcatgatcctgagctgttaacagctgagcaactacaagcttacaagaagatcggattcagaaatagaaactatgtacctgttggagttcgtggagtctttggaggtgttgttcaaaacatgcatatgcattggaaattccatgagacagtgcaagtttgttgtgacaactttccaaaggaaaaaattaaggaaatggcagcaatgctgacaagattaagtggtggaatagtgatcaacattcataacactaaaacaatcatcatgtttcgaggaagaaactaccgtcaaccgaagaaccttatacctttcaacacacttaccaaaaggaaggctttattcaaggcaagatttgagcaagcacttgaatcacagaaattaaacatcaagaaaatagagacacaactccgtcgcaagggtatcaatccagaggacccagttgctatggccagcatccaacgtgttgcctctacattcttccgagccatagatgagcagcaaggtactccctatgttttccgcggggatacagaccattctgctgggactactgaaataaaagaaccacatgatcaaccatctgaagatagtgaccaggaggagcttgaccggttcatttcagaaatagaaagtgcagcagagaagcaatgggaggaagaagaggcagcagagaaagaagaatcttcaagaatgcggtatttggagagagatgaggtgggtgagcggaggggtttcaatagaagttatgaaaactcagattatgaggatagagggcagggaagatataggagagagaataaacaacaaaaggcatcagatgcaagg

SEQ ID NO: 12719 - DNA, 1017 bp, Setaria italica
  Peptide Sequence Number=SeqID_78693
ctccttctgctcttcatatcctgtcatcgcctcgattgcagtcacatcagcaagcttcaacttctgtgttgccactgcaagctgcttccgaaaagtctgaatctgttctttttgtgtattgcatgtttcctcaagtgccgatacttttgtactcaagccttcgcattcttttgaagatttaccaatttgttccttgcaattagcaagttcaaggttcaaattgttcagttgagcaaccgaatgatcacggtcatccctaacctgcttcaactcagctctaagacactccacttctttcctgagttcttccttcaccctaatggactcttgctgagaagctctagaagattctagctgactgctcattgagttgttacattctctcagagcggccatagtttccatcatggcgctcttctctttttgtagttttgagatagtctcaccactctttgaggcatcagcctgcagattactgttgtattgttgtaagctggtgttgtattcttgaagccttttgttcgtgtcttgaaccatttttagctgctcgctaaaccgcttggcgtcatgagtgaccctttctagatctacagtcagtacatctcgtgaactctcagctgattctctttcctgcttttctttctcgtaggactctacagcaatcaatttttcagacttctccctgttcaagctctcctctataaattcgcatcgtcttgtcaagtccaagttagcagctttcaactcttcaatcgcagtgctgagctgggcctccaaatcggtatgacgggtgttctcagcatccatggcaccccgcagtttctcctgctcaaccaaatagccatcctctagctccatgtaccaccggatgcacgctctgagcttcttgatgtagtcgctcatctgctccactctccccttgtaatcgttcttgctcttgcccttcatcttctcggcaagcagcctctccacgtcctccctcccgctgaactcgaccgcgggcaccgcgcggcgcga

SEQ ID NO: 12720 - DNA, 480 bp, Setaria italica
  Peptide Sequence Number=SeqID_78694
caatgcaccagtaagtctgttccatttaaccaaacaagtaccaacagatgccaatgctcaacaagaaataagggccatatacacatgtgcaatcaaagaggaccacctgctctgggatgctttctctagtagagtagtcacatcagcaataccaaagacatcgataattgtaaggtcagacacagttgtattcccatgagagtcgtgctttatagtgtattgtttactgggtgtcatctcaaaactatttgggcgacctggtgctaacaaatcgcgaattgtctcattgtatatttccaacattgatgcttgcatagaatactcccatccttgagattctagagattgacttgtcttaaaaatttgttccaaagaacgaggtattatgcctttctgatcaatgcctggtctgcccatcattgtataagagttaccagatccggtttgaccgtaggcaaatatgcataccttgtatccatc

SEQ ID NO: 12721 - DNA, 1021 bp, Setaria italica
  Peptide Sequence Number=SeqID_78695
ttttgagttacaaggtaccaagtgatttctttgtagcatattagcatagtattgtgctattaccataagccagcagctgaattctgcttggcagaaaaaaaaatacgtagtttcaattatgaacccgccgtcacaactaatattactcaaatctgctacacccaaaggaaaagcgtgacaaggagtcagcgctccaacatatgctgctctcagcacatctccactgcctacactgtacaggttacaagatttctgttgcacatcagcacatcgcctttgtggccaaatgtggcacaaaccaactcattatatatcacattacagtgatggctacaacgacttcacccataactcagcctagaatcgaaggaacgggcttgtgtctgacgccttggtatcccgatctcacaagcattcacccttgaagcaaacctcaaggagcatatcgtctccccaacagatgatgcctcaggtgaaatattgacaaacataagagttttcgagtctcctccaaggcaaggctgcaataggtacgtaagttttgagtttctgaagggaacgtggtcatctccttttgcaatcgcaaagattacatcactcagagctgacaagcttttattgattgactgagtttccttcaagcgatcaccggtggaaccacttttagcaaggcgctcactcccagctaaatcgatcaagttaaggaccccttggacatgttggcctgtgttctcatttgatcctgatatctttagtgtgaacacaaaatgactcctagaagattgttcattcatctgggtcttacccacggatctgttcaaatgcaaaagacaacattagatgcaatagagatatgtaatcacataaatagacatgtagggaaaaaacagcttagatgaacaattaaaacctgcaattcactatatattgacactacccattgcacaaaataaacaatgcaccaagtaaagtactagttaccaattttaaacctaaaaactaaaagttaaacctaaaacta

SEQ ID NO: 12722 - DNA, 1495 bp, Setaria italica
  Peptide Sequence Number=SeqID_78696
tagtacgtacttactacttccctagtcttaaattcgtattctaagtttaaggtacccctttggtactattgtgacaaacataagagttttcgagtctcctccaaggcaaggctgcaataggtacgtaagttttgagtttctgaagggaacgtggtcatctccttttgcaatcgcaaagattacatcactcagagctgacaagcttttattgattgactgagtttccttcaagcgatcaccggtggaaccacttttagcaaggcgctcactcccagctaaatcgatcaagttaaggaccccttggacatgttggcctgtgttctcatttgatcctgatatctttagtgtgaacacaaaatgactcctagaagattgttcattcatctgggtcttacccacggatctgctctgggatgctttctctagtagagtagtcacatcagcaataccaaagacatcgataattgtaaggtcagacacagttgtattcccatgagagtcgtgctttatagtgtattgtttactgggtgtcatctcaaaactatttgggcgacctggtgctaacaaatcgcgaattgtctcattgtatatttccaacattgatgcttgcatagaatactcccatccttgagattctagagattgacttgtcttaaaaatttgttccaaagaacgaggtattatgcctttctgatcaatgcctggtctgcccatcattgtataagttttaccagatccggtttgaccgtaggcaaatatgcataccttgtatccatcaagtgcactttggactaattgcgatatttccacaaacacatcttcctgtgaagcattgtggtcaaaaaccttgtcatatgagaaggaaagcttctggccttggttcatcaaatcaatagcacgcccattagattctactgatgttggaaaagagatagatgctccttctggaccatttgaatcaccatcaaaccgaagaagcggtcgaactcgacagaaaaccctgatatttcctttcaattccaatatagtattatgtagttttttccgcaactcgtcaccttcaacaatttgagactctgcatgtgccaaacgctcctcaaggtattttattttctccttctgctcttcatatcctgtcatcgcctcgattgcagtcacatcagcaagcttcaacttctgtgttgccactgcaagctgcttccgaaaagtctgaatctgttctttttgtgtattgcatgtttcctcaagtgccgatacttttgtactcaagccttcgcattcttttgaagatttaccaatttgttccttgcaattagcaagttcaaggttcaaattgttcagttgagcaaccgaatgatcacggtcatccctaacctgcttcaactcagctctaagacactccacttcttcctgagttcttcgaaaaagaacttaactaaggaaccttaaggttaacaaataacaaaaataacaaaattaaaagtaactaaactaa

SEQ ID NO: 12723 - DNA, 722 bp, Setaria italica
  misc_feature (583)..(583): n is a, c, g, or t
  Peptide Sequence Number=SeqID_78697
gcactggacttcccctggagagcaagcctgccccggatcgaagcaaggatgtatctggagcagtacggtggcagtgccgatgtgtggatcgggaaggtcctctataggatgcccctagtcagtaacgaactgttcctcgagaccgcaagggaagattttcgcagtttccagaaactctgccgactcgaatggaatggcctcagaaagtggtatgacaggaacaagcttgcagcgttcggcgtggagccaaagtgcgtgttgagagcctacttccaagccgcagccagcatcttcgagcccgaccgagcagcggagcgtctcgcatgggcgcgcacggcggtgatcgccgaggctgttctttgcacttgcgaggcaaagcttctgatgttagcacaagggttcacggcgcaattagtgagctcgagaaccatggccgtgatgcactaactagggtaaatgaggatccaaagaaagccctcctgggtgcaattggtgaacttatcgaccaatcttcgtctgagaatgcttctcactgtcttcgtgaagcttggaagcagtggcttaggtcatggaccgcaaaggngggatttgaatcatgtggagggaatacagcattgttgatagttcgtacagtagagattgcttccggaaggtatagtttgaaggagcatgatgtgaaccgttcggagtatacccaattgagaggctcacgtcttccatcg

SEQ ID NO: 12724 - DNA, 1517 bp, Setaria italica
  Peptide Sequence Number=SeqID_78698
ttttttttttttttttttttttttcagatatatcttacatttttatttgttcttgattcttcagtcgtcacatactcagagtcacatgtatgtatactgcacaagaagagaatttacacaacacctcgcttctcccaatcatggctggcactttcaagtccacggaaaacgaaaccagacaatgaaattcgaaatctaaccatctagtagacggaccgtcctaattgcaatggagaaatgtccgaaaatgaagtcagacagctgatgaaccgccaatacatgaaccagaaccaccgccgaatgagtcactcttgagcagacggaaccaccagatcatgagaagagtctggccaatgcagatacccggcaagcatctctctcacagtttcaatttgcccaggtcaatcttttgcttagggtacgtgtaggcttcataatttatcttctggcctagggagcccagctttgtgagtgcggttatcaggtcaacttcatagtctgtccgggatactgtttcacgactcctttggtacttctcgacccatgggcggcaatctggatcagcaatcagtcgttcctcggtagcggcttggtcaggtccgaggaaggctgacatcacagcaagctggcgaggacccaacccaacagcaacgaacctatccttcatctcctgcacagaagctttgctccaatcaggtacccttccctctgggtcagcatcttgtgcatctgttctcccaaatgttctgtcgaacaggccccactgcccgtttgaaccatatgcagagtatagggttcttcccttatcttcatttccaccacatttggcaatggccgcatcaagaaatgatctcttcagtgctgattgtgctgcaaactggatcaggtctgcaaatgaaattggacctcccttggaattggaatctatctcctttttggcttcagtcagcagatccaaggcagcagagagcccactgttttcaggtctgcttatttctagcctgatagatccatttgcacctccagtttttgtggccttgtcatatgtgatggcatcattcagtgccaaggtcaacaaagatggaacgagctctggcttagcctttatggctgtatagagggtatccttgatgcttgattggaactcagagcgttgtctacgctcaatgagatcagctgcagttgcctctcccgtgaatttggaagagccctcaatcatttccagaccaatggcggtcccgacgcagctgccgatgaaatccctcctacggaatcgcagacgctcgtcatgaccagcagcctcgaggccctcaacattgcccttgcagcagacttgaatgtgcgcgtgcctccgtgccggagacgagacggaagaggacgaggaggcagcgacgccgcgggcgccgagcagcgcggtggagaggaaggccgcccccgccattttcagctgctcgccacttcgcgcgcggctgatgcagagatgatgacgcttggctgcttcagtgcttcaggctgct

SEQ ID NO: 12725 - DNA, 519 bp, Setaria italica
  Peptide Sequence Number=SeqID_78699
cgggcgtatcgcaggaagaagtaccctgaaagcacctatttccaaaagaagaaaggcattggcatcaacacggcaaaaaggacaagccataagaggcagtttcaaaggaaaaacaatagacaacacctctgccacaaaagttggagattggaggataccacacttcatactctctgtttcatttctatccctctcgatccttctcgcagatcgaccgacccaactgcttcctgtgtttgttgcagagtgctttcagggtacttcttcctgcgatacgcccggttgttattaccttcattgaagaaaaccagagttgtggttggtgatcttgagaaagctcctttgcatgggttgtgtgtcctcgaagcagttcaaacgagctgcagcatatgaggattccagtatcttggctaaggagactaccttctctgtgaatgaagtggaggccctccgtgagttgtacaagaagataagccattccatattcaaagatggcctaattcacaaggaggagttcca

SEQ ID NO: 12726 - DNA, 531 bp, Setaria italica
  Peptide Sequence Number=SeqID_78700
aggagtataatggcaacagagcgccctgcatcaaagggacagaatgatgtcaggccttcctctttttgcttttgctttggtccgtgaggctgtaaattggatcggcgtcaagggaggaaagaattggccgatacggtggattaaaaggttacgattgggaatcggccgattggtgctacagttgggaatcggccgattggcgctgcaagtgttttggcagacggagttggtggagatcggccgattggaaggctggagcgattgggccaatatgggtttaaagaggatcagagaaagaagatagaaaaagattggcccgtgggagtacgatataaccaactacaatacgagttgtgtttgtaaatattcgttttcgtttaaaattagagatagatcctagtcggttatgaaattggttgtaacaggctataaatagccatcttttagagatttgtagaagaacacatcaatcaatacaaacaaatctacttttcatcgtactttacttttaagtcggtgactttcgccaac

SEQ ID NO: 12727 - DNA, 529 bp, Setaria italica
  Peptide Sequence Number=SeqID_78701
ctcaagcgcaatggggtgattgaatttggggaatttgttcggtccctcaacattttccacccagatactccgatggcagaaaagattgcttttgcatttcggctatatgatctgagaggtactggatttattgaacacgaagagttgaaggaaatggtgcttgcaattctgaatgaatcagatctaattctttctgatgacgctgtcgaacaaattgtggatcaggtacagtacatcaagataaacggttactttcatctcatcccatcggcttgtttggtccaagtttgtccaccaccgagctacaaagtgtactatgacccatttgtttggctccacacctgactttttcaccggcacagcaaagtgcctggtagctttcagtccaattccttcagaaaacttgccatagttttccctttgaattcaactcttgcggtgcaagaagcatccacatcacaaagccgccagccaacgcatggaaatatagcatactaactcaagttctggcagactttcaagcaagcag

SEQ ID NO: 12728 - DNA, 2278 bp, Setaria italica
  Peptide Sequence Number=SeqID_78702
gccaagctacgaggaaggacactgctggttcaggtggcttaagtttcagacatacagctgcagcaacctcctgatgaactgatgaacgtgcaggcacaggtctgtgatctgaagggtgagattaggagtataatggcaacagagcgccctgcatcaaagggacagaatgatgtcaggccttcctctttttgcttttgctttggtccgtgaggctgtaaattggatcggcgtcaagggaggaaagaattggccgatacggtggattaaaaggttacgattggcgctgcaagtgttttggcagacggagttggtggagatcggccgattggaaggctggaacgattgggccaatgtgggcttaaagtgggtcagagaaagaagatagagaaagattggccgtgggagtacaataaccaactccgatacgcgcttgcacaggctgtcggcacttggcaccagtaatatatggttctctacaaatatgggcttgctgcctcttggttcttctcccatgtccatgtcctcttggttcttctgccacaaaagttggagattggaggataccacacttcatactctctgtttcatttctatccctctcgatccttctcgcagatcgaccgacccaactgcttcctgtgtttgttgcagagttgttgtctattgtttttcctttgaaactgcctcttatggcttgtcctttttgccgtgttgatgccaatgcctttcttcttttggaaataggtgctttcagggtacttcttcctgcgatacgcccggttgttattaccttcattgaagaaaaccagagttgtggttggtgatcttgagaaagctcctttgcatgggttgtgtgtcctcgaagcagttcaaacgagctgcagcatatgaggattccagtatcttggctaaggagactaccttctctgtgaatgaagtggaggccctccgtgagttgtacaagaagataagccattccatattcaaagatggcctaattcacaaggaggagttccagcttgctctcttcaggaacagtaacaagaagaaccttttcgccgatcggatatttgatctgtttgatctcaagcgcaatggggtgattgaatttggggaatttgttcggtccctcaacattttccacccagatactccgatggcagaaaagattgcttttgcatttcggctatatgatctgagaggtactggatttattgaacacgaagagttgaaggaaatggtgcttgcaattctgaatgaatcagatctaattctttctgatgacgctgtcgaacaaattgtggatcagactttcaagcaagcagacctgaacgacgacgggaagatagatcctgaagagtggaaggctttcgcgagtaaaaacccgggtttgctgaagaacatgacgcttccatacctaaaggacataaccatggcgtttcccagcttcgttctgaactctggagctactgatgaagagttgtagcaccctggcaagcgcccccatgctcttccgtatattcctcagagtgcgcatggccaagctacgaggaaggacactgctggttcaggtggcttaagtttcagacatacagctgcagcaacctcctgatgaactgatgaacgtgcaggcacaggtctgtgatctgaagggtgagattaggagtataatggcaacagagcgccctgcatcaaagggacagaatgatgtcaggccttcctctttttgcttttgctttggtccgtgaggctgtaaattggtaggtgaagtggctgattgttaactgatgatgttgtagcaccagattgtaaccatcgaacatggcctcattaagttatagtttgtgattttggtaattgagtgataatataatgttgacgtcagattttgacacgtataggatcggcgtcaagggaggaaagaattggccgatacggtggattaaaaggttacgattgggaatcggccgattggtgctacagttgggaatcggccgattggcgctgcaagtgttttggcagacggagttggtggagatcggccgattggaaggctggaacgattgggccaatgtgggcttaaagtgggtcagagaaagaagatagagaaagattggcccgtgggagtacaataaccaactccgatacgagttgtgtttgtaaatattcgttttcgtttaaaattagagatagatcctagtcggttaggaaagcggttgtaacaggctataaatagctatcttcagagatttgtaaataacacatcaatcaatacaaa

SEQ ID NO: 12729 - DNA, 721 bp, Setaria italica
  Peptide Sequence Number=SeqID_78703
accctacccacaagatagtagctaacccagtcaggtgagcaccctgcctttccttctatcatcaggtacaagattctataagcttctttcactcttcttgctcggcctaaacatgaaagtaatatgttgaagctagaagcagctggggcaacaccataggacctcatctctgctaatatatccatagcctccggaacaagggcagagggattgaacttgaggtttctatggcacacacaatggagaaaatcattgaacgatggcaagcccaacggaacgcctgcagatttcatctcatcaaggactctccgagcctccttagcgttcccatgaacgcaccaaccatggagaaggctacgttcaacaatgctaaccataggctctaccgatagttcgctcttgtggtgccacaccacaccctgcgcctcgcgggcgtggcccctcttacacaatgcctgaaccgtggcaaggctgctcgaccatacgccatctcctctgacactgtcaccgcgctcaggaagcaatttctgcctctccaggcctctgaacagccggaccgcctcatcctcattccccgcatcgacaagggcctcgaccacggtggtaaaggtctccggagccatccttcggccatccttctccacatcagcaatggcaattcgcatcgcggttaggtccccagcccgtgcgagcaccccaatcgccctatcgagcgctccct

SEQ ID NO: 12730 - DNA, 1975 bp, Setaria italica
  Peptide Sequence Number=SeqID_78704
gcggcgagcaaaagcgggcggaaaggagagagagaaggggaaagagccaggctcgccgttcccccaccaccaccgcgccagcagctcaaatcctgaatccgatctctctctcgcccgaggttctcggttttgacccggcaaggggggcatggcgacgtcgttcgaccgctgggagaaggaccccttcttcctcgccgccgaggaggtgcaggaatccgccgatcggatggaatcggtgtacaggatatgggtacaggagaggagcgggggcgggggcgattcggaggcggcgggcattagtgaagggcctacggccgccgagcttcgccgcgagctgcacacggcgctcggcaccgccaagtggcagcttgatgaactggagcgtgcaatccgatcgaacgaccatgttatctcagcaaggaaaagatacaagagctaggcatgatgactttgttgcagcaattggctatcgcatattagaggttgaaaacaacttgaaacagtccaatgttgcagaggggaggggcccattgagctgggttcatttggatgaggatgagcgggatgaccttgcggctttcctatctgccggcccttttcagcagaaagacaaagtggtcacaactttggcaggtgatattgaagtgggcagcaatgcaacaaggatgaaaaatgatatatcaaccgacagctccaaggattcagctggttccacggatttgatttccgggagagcaaaggacgatttgcatcgtgggcacagaagagcagttagtgccagtgctgatataggatcatggagcatgtcgattcctaatgaatgtgaagaagctttggaacaatcatctgatggcccacacaaagcgcctttgcttaagatagtgaaaacttgtgcattggcgagtgccttgcaatctaagcctagaacgaagtgcaaaaatggagctgtgaggtgggcaggtgttaacccacaagatgttgaagaggctatcccactgaacacttctcagttgactcagggcttagacggatgctttgaaaggaacaagagttgcttaagtgcttgtgatgaggatacatacaataagaaactttatggttggcttggagcccttcatagacagcttcaaagatctcaatatcaaattcgatatgggcatcctgttcaatttgttgttttagcactggctgctcttgtaatatttgtgtgcatattgaggacaatttggtgactgtttttatttggtcacaattggatttgaagcctcacaagatcagcagcctgtatggtacacattcattggttgttaagtaacttttggccaattggagcctgagtcatgcacatttcgcaaatgtggcagattgtttgtggtaatcaaggttgaaaggcatgtagtgtaatctgattggagcaacttatcttgccacatcttctgggcagtctacctcatcctcggaaaaacatcttcggggtggtcggcttcatccttggatatgtgctgcaccatgcctagcacgcttgatgatgcacctcaagaatttaatcctccatggtggccaattggcgcctatgtaatggtcttgtataaatcagtggcccactggactggtgatcatgctgctaagcagaatttcaggtcttgtgccatgcatcagtgctgccacttttactgcctgacttggaagggtggtgaatttttgtagttgtcatctaaactgtagttagttctatagggggtaggctcggatgcgaaatgtgaaagataccagaaataactgtatggtatctgtttgtactttgtcccccttatattacaacaggattaggaacctggtagtccccagagctagcagtattcgacctttgcagttgttgtaataaggtgacagcttgtgcggattgtgtggaaactgcatgttactgctaaattcagtgaaggatgacagttctacagtaaatacagttaaaaaa

SEQ ID NO: 12731 - DNA, 1110 bp, Setaria italica
  Peptide Sequence Number=SeqID_78705
ggcgaagtgcttcccgagctccggcgggaggagtccggagagcttgttattgaatagccggatgtcaaggaggttggggagcagcccgatgctcggaggaatcgacccggtgagcttgttgtagtataaatttagcgttgtcaagttcttcatcttgccgatcgcctccggtatcgttccggtgaacaagttcgccgacaggtcgagctcctgcaagttgaagaacgtgacctcgggcccaatcccaccggtgaagctgttcgcgtaaaggtacaggcgctcaagcttcggaagcttccaaacccacgccgggatttcaccgtgaagcttgttgctatacagagccaacgtggtcagctcagtgagcgacgagagtttgtcggggatgccaccggtaaggttcatccctgacagccacagcatcttcagattggtaagcttgctgaactcgtcagggatcaggcctggcgcgaaaggattatctgctagagttagcgtctcgagctcgttgagctttgcaatggccgaggccgggtatgtcccgttgaagctattagtgtcaagaacaagggacttgagcttggggaagacagcaattgctgatggcacgcttcctgtgaagccattggacgacaagttgaggtgctccatctccgacgacaatttatcgatgtcggccgggagggcaccggagaagagattgttggacagatcgaggtagctcagagccgagcagccatagatcactatcgggaagtggtcggtgaggttgttgtaggaaaggtctaggtaggacaggttcttgaggctacaaatggaagctgggatcggattggttatgttgaaatttggaaaggagagcttggtcactcggccattgttgcagcttacccctgcccagctgcagtaggaagagttctgggaagtccatgagctgagagcagaagggctgccccaggctttcttgacagttaggagtgtctcatagtcgctggagttgatctgcgccatggatggcgagctggagatgaaagagaggaacactaggaggaggagataggagtgtaaccatttctgtgagtgttagtgttagtgtgtgagcttgaagga

SEQ ID NO: 12732 - DNA, 448 bp, Setaria italica
  Peptide Sequence Number=SeqID_78706
gtttcccctacgtccgtccgtccgtcttttcttcttgggggtcgcgcggctgctcctgccccgcgccgccgccgcttcctcagggcgcacgcggctacttcccccttgcgccaccgctgtttccttccgcacgtcgccgattgcgctgctgtcactaccgccgccgtccgcgccacaaccattggatccggccggcgccgtgccggatcttaggcccgacaagctccagcgccgcgggacgcctcccacgccgatgagcctccactggtggatttgacggccacgcccgcccagatccgccgagcctaggcagtgaggccccgccaccgccatcctggaggccggcgcgggcttccggccgaccgctccggcggcagcgaggggagggaaggggtggtggcggtaggagcgggcggtcgagcgggacaaacgacggaaggaccgtaac

SEQ ID NO: 12733 - DNA, 495 bp, Setaria italica
  Peptide Sequence Number=SeqID_78707
aactgataattggtggaatataaaataatgagtgctccaactctataccacccttccaccttacttagttgtaagaaaatgcagcagaatactgaacaattaaaatattgcttatagctaaattgccacaataagaaaaagaagtataccagcacacacaggatttgatctcgaaagttaaaataaaatatcatagtgaattcatgggagtgtttttgtcaactgatacttgcctggtaagtgagctgctccgcctgcgccagcaattatgacctccacaccccctatccttcgcagacttggcaaaatcatacatccgctctggtgtacgatgtgctgaaacaatcgtagtctcaacgggtatgttaaatttttttaatatcttctcagcatctttcattacatcaagatcagaatcagaccccattattatagaaacacgagggctagctttcttggggtcatatgtgtcgctttgcagcaacttgtccaggc

SEQ ID NO: 12734 - DNA, 409 bp, Setaria italica
  Peptide Sequence Number=SeqID_78708
agatacatcagcaggagcttcgacaacatgacagatgttatcctcgtgtatggtttcaacaacaggatagcagactgtagaaccgtctctgctccttgccacaattacagagagctcctttatgaaaggagcccaccgttcaacatacaagccacgctcaaacccacccaacgaagcaacaacagaagatagctcctcttggttttgggcaacagcattgcctcgaccatcatatgctaacctcttgctttttaccattagaggatagccaaacctttcccctttgcctgacttcatggaagtagatactttacacagtatagaggaagcaggggaaagtatctacttccatgaagtcaggcaaagggatcccaaattttgagaaatgatttttctgcctgtatttgtc

SEQ ID NO: 12735 - DNA, 1880 bp, Setaria italica
  Peptide Sequence Number=SeqID_78709
cccttttttaaaaaagaaaaagatcatcaagcgagcacacgatgacgatgggtttccccggcgccgcacgaggccgacgacgccgcgcagcagcaaggcgcagcaccgacggctccctgggtccctccccgcacgcacacgatgcgaaaatccccgggcatgttatacgaacgaaacctttatactcttatcttccatactggaaggatttgagcttcacccaatcaccctaatcgtttttcctctaaggccaagtcacagcttctgaagatagcacagttagcaagagaaatgcagggcagacttcaggatttttattatctcccccaacttggactagattgcacccccatcaaaattggatgtgaaagaatgccaccggaaacagaactgctggtcctcaagcctttcacttcagatattcctcccaacctatgttctcaagcctttctgctttctccaagaccatgtccctcagatcgtcctggtatttaattgccctgtcgtaaagctcaggatcccttgacgccagcatcctaactgccagcagacctgcattttcagcattcccaatagcaacagtcgcaacaggaataccttttggcatttgcacaatagataggagggaatcaagtccaagaagtgactgagtcttgatgggtactccgattactggaagagaagtcaatgaagctaccatccctggtaagtgagctgctccgcctgcgccagcaattatgacctccacacccctatccttcgcagacttggcaaaatcatacatccgctctggtgtacgatgtgctgaaacaatcgtagtctcaacgggtatgttaaatttttttaatatcttctcagcatctttcattacatcaagatcagaatcagaccccattattatagaaacacgagggctagctttcttggggtcatatgtgtcgctttgcagcaacttgtccaggcgtgattttacactcatcttagaaggccccacaattgtaatatgacccatctttctttgctttcgcatctctggttttgcataccaatgaactgatgcacctggaatatttaatgccctaccaattagctgatgagccaataagaatcctgcttcaccctcatccactcccagaatgttgtacattattgcagcaggtgttttcatcgatggatcgccaaggggaattccaagaatggcacgtaagtgctgctcgtattgtgaggtgtaacatgactcaattgtttgatgcccactgttgtgaggcctaggggcaacctcgttcaataaaatctgatcattttctgttaaaaataactctacagcaaaaacaccagctccttctaatgatttgatagctttttcagccacaccagtagctgacttctttattttgtcagatacatcagcaggagcttcgacaacatgacagatgttatcctcgtgtatggtttcaacaacaggatagcagactgtagaaccgtctctgctccttgccacaattacagagagctcctttatgaaaggagcccaccgttcaacatacaagccacgctcaaacccacccaacgaagcaacaacagaagatagctcctctttgttttgggcaacagcattgcctcgaccatcatatgctaacctcttgctttttaccattagaggatagccaaacctttcccctgcttcctctatactgtgtaaagtatctacttccatgaagtcaggcaaagggatcccaaattttgagaaatgatttttctgcctgtatttgtcctgaataatcattatcgtggaggctttaggctcgcagtcgacaccctgtttttccagcttctcaagggtgacagcatcaacatgttcaatctccactgttaggacc

SEQ ID NO: 12736 - DNA, 338 bp, Setaria italica
  Peptide Sequence Number=SeqID_78710
caggggctttttgcaaaggtcatgtccacggcaaaattccctttcttcgtctcgttcgatctcgcgccgccgttcttcctccgcgcatcatcgcccccgcctcctcctcccctgcgcccaccccctcctgccctccccacgcccggtcaccgaatcaacgccggccgtgctcctacgctgccctctgcttgaatcagcgccggcccctgctcctcctctgcgaatcgacgtcacgcacctgctcctccgccgccctccattccaaatctcagtcgtgcccctgctcctccaccccaatcaacgccggcccttgctcgtccaccttcccttgtcccgaa

SEQ ID NO: 12737 - DNA, 293 bp, Setaria italica
  Peptide Sequence Number=SeqID_78711
acctcaccatcgcctgaaataggaaaccccacgcgacggcgacgcgatcccctccgctgcctattcgccgtcgccaaggagagtctccaactccaatccatccgtctccgccgaatcgccgagtccccaactgcaggaaagcccgaaaccctaacctcgacgagtgatttgtattttgttagggtttcgattcttttgctgctttgatttcaaccgtcctacggcgcgaagatgaagaggcggcggcgctccaagaaccgcaaatcttctggacccgcggctcccgccgcctt

SEQ ID NO: 12738 - DNA, 710 bp, Setaria italica
  Peptide Sequence Number=SeqID_78712
cacttctcttccattgtgttcaattaatggagacagcatatgcagaatggatgaggaaaagtttcgaaatgggaggatgttagctgttgttgaatttgttacggatgtggatgatgatgattgggaaaagttctactcaactgcaagacacaaagcaattgacggaagcaaggtgataatcattagcagaattgaaaatctggcaaggtttggaaccgtaaagacagtatttctaaatagtttgactcatgaggagtacagatacctcttcaaaatgttagcatttggaagcacagatgaaaaggattacccacacttggcagccatagcaaatgagatagcaatacaattgggagggtcgctcatcactgcgaatgtgattgctgatttgctgcgaaggaaccatgatttccagttttggctttgtatactgcagcgtttcaagagaatggtgcataaaaacttgtcaatgtatggtgagcatccaaaagatatccttgataatgagcggccaatagacatcaccacatttaactcctgctcttctcttcgtatgatgccacctcgagtcgaaagggatggtgattcttcagaacggaaattggatcatgttccctttggagacctgataactggatctatttctctacccaacaatcaattcgtgttagttgcatgggagtcacggttacctccatattacgtaagta

SEQ ID NO: 12739 - DNA, 279 bp, Setaria italica
  Peptide Sequence Number=SeqID_78713
cgagggcggcgggtggacggcctgcgaccccatgcccgacgcgctcagggactcggcgtccgcgacgtggctctcggcggcggccacggaccagcgggtgtatctggtggagagggccaccggatgggcgagctggttcgacccggctaagcggcggtggggcccacccgccgccttgggcccgaccccgccgtcaccacgtgggcgtcgcgccaggccgcgcaggcgccgacgagcggctcgtcctgttcggcgcgaatcgggcggacaaggaagcag

SEQ ID NO: 12740 - DNA, 337 bp, Setaria italica
  Peptide Sequence Number=SeqID_78714
gtcgtcgacgcggcctttccactagggagaccccccgtctccgtctccgtcgccgactcgccgacctcgaccacccgcctctccatggagggcggccgagcagcagccggcggcgcatacccctctcccgtcgctgctcctccacatcctgcggcgctgagcaacactcctgttgatgcctcctcgttcatccacacgccgttctactgtgaagaaaatatctacatgctatgtaaggaaatgataggaggtatccactcctttttcccatactctcgatccatagtttctcgccgtagattcaggcaagcatggttcccaccaggaattattactt

SEQ ID NO: 12741 - DNA, 291 bp, Setaria italica
  Peptide Sequence Number=SeqID_78715
ctcatagttgaattaaaacctgaaagatatcttcactcaggtttatagtctttgaagctttacttatgcctcctctggtgatatggaagagtctgtcaaaaatatctgggtggccgtaatggaaccgaaccttgagaggatttgccagaactctttgtccaatagtaacaaaactggtctcttgattggacataaaccaagccagtgacgaaacacttccagtaaatatatgctcacgtaggcctaatatagtgggttttctcttcccatactttctactctcaaactcct

SEQ ID NO: 12742 - DNA, 867 bp, Setaria italica
  Peptide Sequence Number=SeqID_78716
tttttttttattagcaattgctgtaacagctataaccaaccgcaccaccatggcaccattctcaattgggaggcctaacattacagtcttcctacaaagaacccaactgcttctcaactaaaaaacttcctacaaatcccagagataatctggtgattcgcaacagctttgctgtctaacacatgtacttctcgattccctttggaggaaaacatattgccggttgagttaaatctcctaaactgttgctaagttaagccaccacctgcaagggcttcacatccgtctcgccttatttcaccctgttccactacagtgcaggacgcatatttcggattggagtcttcggcggatggagtgctcccatcgccaacagtaaccttagaattagggtaatgggaccttccatcgccaacagaaaccgtagaattggggcaatttgtgttcccatcaacaagggtaccctgagaattgcccttacttatgctcccacctcctactccaacctcggaatctgtgttatttgtgctcccatcgccaacggcagccagagacatatgtgcactcccatggccaacactagcctgaaaattggcatcaactgggcttccgtcaccaacagtgacatgagaattgggcttatgtgtgctcccattgccaacagtatcctgagaattggagttacttaagcttctgtcgccaatggtagcatgagaattgggttgatgtcttctccaatgaccaacagtagcctgagaagtagcgttacttctgtttccgtcaccaacaatgacattagaactgggttgatgtgtgctccaagtgccgacagtaatatgagaactggggtgatgtgcatgtgcactt

SEQ ID NO: 12743 - DNA, 701 bp, Setaria italica
  Peptide Sequence Number=SeqID_78717
cagccggaacacgtcgcggttccacccgcccggcgcggtgcggttgcacggcagcgacgccaccaccacgtccacgtcgccgccgtacagggagaggtccggcatggggagctccgggcaggacggcccctcgtcgtcctcctcctcgtcgatccactccgggaacaggtccgaccaccggaacacgtcggagacgcgctcgaattccacccgcacggcctcaccctccacgcccagcgccagcaggtcctcgtggacgatgttcaccaggcccatccgcagccggccacggagctcgtcgaacatggccggcgcgcgccccgcgttcacgatccgctccgccgccaccaccttgttcgccgccacgcctcccagcttaccttccgtgagagctgggtggacggcgggcaggcgtcgtcgcggaaggtgcagcggacgagggaggtggcgccgctgtcgaggaggtacgagtacttggggtggaggaggagcgccatgtacgccaggagaaagaaggcgaggaacgccgcgttgagcttgacgatgaccgaggcccgcccaggcgacttcaccgcctcccccgccgtggtcacccccatgctgcgccgcgccgcactagtatatctgtatatgtatatatacggcggccgttcactcaccggcgtgtcgtcgtcgtcgggccggccgggcgtgcggtcgag

SEQ ID NO: 12744 - DNA, 365 bp, Setaria italica
  Peptide Sequence Number=SeqID_78718
tacgagatggcggcctccatcctgctctgcgccgaggacagcagcagcatcctgggcctcggagccgagtgcgaggaggaggaggtgatggcgcggagcaggacacgcggggagccctgcgtggatttccccgtgccctccgaggaatgcgtcgccagtttcgtggaggcggagacggcgcacatgccccgggaggactacgccgagaggctgcgcctgcgcggcgggggcttggatctccgcatccggatggacgccatcgactggatttggaaggttcattcgtactacaatttcagacctctcactgcctgcctggccgtcaactaccttgaccgcttcctctcactataccagcttccgga

SEQ ID NO: 12745 - DNA, 307 bp, Setaria italica
  Peptide Sequence Number=SeqID_78719
aaattagaatcaaaccctagctcgtcctcctcttcgatcccccccgactccccaccaggcgactcgccggaaccctagctagccctagatccaccgcgccgcttccgcggccgccgccatggcgaccctcaaggacctcctcccggcgccgaagacgacggcgtccaccttctacgaccacagcagcgacccctggttcaaggagcgctacggcggggagccggcgcaggggtccgcggcggcgaggcccgcggccgccaccagggccatcccgccctacgggaagcgggcgggcttcgtgccgcgg

SEQ ID NO: 12746 - DNA, 479 bp, Setaria italica
  Peptide Sequence Number=SeqID_78720
tttttttgtacagattatattagacataatattaaatggatcaggtccttagctgagcaaaagaagcacatacgcattcttttttaaataacataaaaagtcttcagctaactacgcaggaagcaatagtactacagattagatgataagcaaaatcaaaccaaactgatcgatccaatgtgaagcaatagtagacagttcttcaaatctttagagcagaagtgcagaacacaccttatatccacttcaggacccttcgatgctgattaatgtcatcatcaaatggcatgagcttcacactgctgacaacatcaaagtagatcttctccagactaacagtgacataatgagcacgtagaaactgtgcagtttcagagtctggacagaggataaatccataattgcacgcagggtcaactgccctaaacattgaaacataaggggatccaaccatcttcttaaagcacggacagttgtca

SEQ ID NO: 12747 - DNA, 283 bp, Setaria italica
  Peptide Sequence Number=SeqID_78721
tcagctccctgagaaaattcgcgcttctcccggcggcgagccggcgaaccgacgcctccgacttcgtcccatctccctcttccccttccccacttcgcagcggcgtagcgagcccaccacggcttgcccacttcctctacccgctttctccgagtctgcacaagcacaaatcctagccccccacccgttgggctggcctaaactggtgtgatccctccggacctctcctggatcgactctgttttgccggtaagtgctaataaccttggatacaaaaatggaa

SEQ ID NO: 12748 - DNA, 292 bp, Setaria italica
  Peptide Sequence Number=SeqID_78722
tggcggctgacttcatcaagctactatagaattatacaagtgctatcctaaaacattgaagttatggtagaattataaccacgaaggaattcatatggtgcgcatatggataaaggcactaacattagatcaattatgcagataaagtcgtgtactcgtaaaatctaaaatccagtttatttgaagcacattctgaaatctgaaccaccaaactaacaatataactttaatatacacgaatgcaaactaatttttgaaagtttgatggcactagtttctagtctgtacaaaa

SEQ ID NO: 12749 - DNA, 362 bp, Setaria italica
  Peptide Sequence Number=SeqID_78723
gcagagaagaggaggttccttttcagagaatttggggtggtcaacagtagatgaggagagtgcagcagtggtgatggtgagttttaacatatcatgtttctcatatttcatttatatgcatgccaatatttgcagtccaacattctaaggcaatcatgttaatttaagatagctctgcaattaaaagagttaccttattaattcaacagacaacaacatctcctggtgtacctgtgattgtattccggggagtatctgatttagctggaggggaaccaacatggtcgtcgacaagtctgatgaatctggcatctattaatgcattaaaagtggcagtggagttcatcgctacagttggcaag

SEQ ID NO: 12750 - DNA, 254 bp, Setaria italica
  Peptide Sequence Number=SeqID_78724
atgttcattatggcacagcagggagttccaatgattccatgtcatttggcgatgtcagtgtccccaagcttgttgcttacacaggcgcctggacatggaaggtacccgtccaactggaatcaccttccttaacccacctcaagatgtaatgctgcacctgcacatatagatgcagagttattggaatctaatcaaatctcaatccataatctagtgaaagaaaaataactgcaactgctaactcaaaatgccca

SEQ ID NO: 12751 - DNA, 462 bp, Setaria italica
  Peptide Sequence Number=SeqID_78725
tttctaggacgacggtttcacatcggcagcattcgaggtgtgaatgttatatatgcattgacaggacaacgcagggtactcaaattaaatccggctcgcatttacattctgtgtatctttaccttcatgcttatccattattacctctttggttttccagttgaatgcagcagtcactgtacagaccctcatcgatgtcttcagcgtgtctggcattgttcattatggcacagcagggagttccaatgattccatgtcatttggcgatgtcagtgtccccaagcttgttgcttacacaggcgcctggacatggaaggtacccgtccaactggaatcaccttccttaacccacctcaagatgtaatgctgcacctcgaagtagtttgtgcacagttcagcaaactcagccccttagcatgatttctggtattctgattatcgcagaagttcagattcaccgaa

SEQ ID NO: 12752 - DNA, 1582 bp, Setaria italica
  Peptide Sequence Number=SeqID_78726
tctccctccgcctgcttgcctttaaaagctcgctgtccatggcgaacgcttagcacacagcaggcggactactaataataagctccagccatggccatggcgctcttctcgctgcaggtcctgctcttctcgctgctgctcacgggctcggccatggcagcggccttgccagccatggaccgggtgcgctggcaggtggacagggtcaaccggcgaggcccctccctcggcctcgtcatgtcctacgtcgacgaggccaccgcgctgcaggcctccggctacttcacgccttggcgcgtccaacccttccttgacctctacggacgacggtttcacatcggcagcattcgaggtgtgaatgttatatatgcattgacaggacaacgcaggttgaatgcagcagtcactgtacagaccctcatcgatgtcttcagcgtgtctggcattgttcattatggcacagcagggagttccaatgattccatgtcatttggcgatgtcagtgtccccaagcttgttgcttacacaggcgcctggacatggaagaagttcagatcaccgaaagagtcgtcagcagaactaagctttggagaatataacatcccaaatggaggagacaacttgctaggatccctgaaattcagaaatgaggagctatactccgtgggtaagcctatggaagaagttttttggttacctgtagattcagcatggttcaaaattgcagaacaactcaaggtcaaacttgaaagatgcaatgatactttctgcttaccaacaactccacaagttgtctatgggcttaaaggatcatcagccgacatgtttcttgataatgcagagtacaggaagttccttttcagagaatttggggtgtcaacagtagatgaggagagtgcagcagtggtgatgacaacaacatctcctggtgtacctgtgattgtattccggggagtatctgatttagctggaggggaaccaacatggtcgtcgacaagtctgatgaatctggcatctattaatgcattaaaagtggcagtggagttcatcgctacagttggcaagcagaagccaatagtatcagtacaaaggagtaataactgaaaaagggatgactattatgcaacataattggaagttacactcagaatgatacggaatcttgaggcttcaagtcctatgtcctctccaacaacatatataaatgttggatgtgtagccacattgtaaccatgcttctggcaatgattggttgtgtaattttggaataatgctaggacaaaattgcaatccagaggttttattttttttattaaaagaataccagctgatgtaatattgtttcatttttatcaagaatcatcaacttggtcattaacagaatccacaatctcacccaatagtaaaaaaagaagattcatttattcagttataagtacttatccatcatgtacgtttagtttcagacaaaacaagaagaggaatagcaatgtcctcactagacaacagcttccatgtgcactatttctatatttaagtaaaaaaaactttaactttagaatgtattaaggattaactcaaa

SEQ ID NO: 12753 - DNA, 394 bp, Setaria italica
  Peptide Sequence Number=SeqID_78727
aggtgagattcggcacgtaaggtgcaagcagctgcagtggatcttcctgaaggtggcaccagctaatagctagatatttgagatttctgccactgtcacggaatacagggcactcaagtgtcttatctgcccagcaccctctgattatcaatctgtggaagttttcagatgctggcttcagatcttccaaatgaagtgtctcgttctcatcacttgcagagagaagcaagctggaaagaagaggcatctttgacagtatagagaaaaggtttgcgcaatcccctgcacttatgttgtcaatccacacactccttagtttcgtaagttttatcagctgctcagccaggtccttgttggcttccacagtttctagagtctgaagttcttccaagtt

SEQ ID NO: 12754 - DNA, 366 bp, Setaria italica
  Peptide Sequence Number=SeqID_78728
cattcaccctgctgctccgctttgacacggaacccgtcgaaaacctcctcccgataagtagaaatccatgaaccccggacccggagcccgtagatcagaccagtaggccagcagtcaccacaccatggtgagccccaacaggcccgcagccgccgccgctctgctgctcgtcgtggcagcagccgcgctcctcctctccacgagctcatcggaggatgggtacctcgggcgcctggtcacgccgtggggcgctagtctcacggccctcccgttcagccccacggacgtgctgcccctcctcccccggggcgtcgccatggccgcgctccgggcgctccgcggcgtgtcggacatcttcccggtgtt

SEQ ID NO: 12755 - DNA, 417 bp, Setaria italica
  Peptide Sequence Number=SeqID_78729
aattaggtaaccgaatagggaaagaacaaatagaaaaaccatgctcttcaattatgtccgcaacattggtgttcattgtcttcttattggtaccaataagaagacaatgaacaccaatgttgcggacataattgaagagcatggttttgaggcatgggagggcttcccctttagtgctgagaagctggaaactcttgctgagaaggcaaaggctaaagcagcatcacagaccttggagtcccttctaatcagtggtgatttggactttgtcattggaaaaggtggagcaaaggttcctgtatcagaacttgtcgggaagactgtcctcctttacttctcatcgaaggagctctggtcactgtcactagagatgaagacgatctcaaatcactgttgtctttctacctttgttattta

SEQ ID NO: 12756 - DNA, 1029 bp, Setaria italica
  Peptide Sequence Number=SeqID_78730
ccggcccacacaaccccagtctcgtgcagcacgctcctctgctcctgcgcctgctcatccgtttcaagcgaatccgagcgcaagacccacccagccatggcggaggcggcgcccaccaccaacggcggcggcggcggcatcgggaccatcctcgccgctggcgaccgggacttcctcgtccgcaactccggcgagcaggtgaagatcagcagcattgaggcgagccctgtggccctctacttctcagcctcgtggtgcccgccatgcaggcggttcactcccaagcttatcgaagcatacaaagaactggcttctcagggcaagagcttcgaggtcgtctttgtttcaggtgatcaggatgaggaagcattcaatgagtactttgcaaagatgccatggttggcggtccctttctctgactctgaaggccgtgaggcccttgatggccggtttaaggtctctggtatcccacaccttgtcattcttgatgcaaaaactggtgaagtttacactgaggatggtgttggattagtgagcgagtatggtgtagaggcttaccctttcacaccagagaggatcaatgaactgaaggagcaggaaaaagcagcaaaggagaatcaaaccattaaaagcgtgcttggcacatccactcgggactatctaattacaagcaagggagacaaggtacccatctctgagctcgaggggaagtatgttggtctgtgctttgtggtgcctggctatggtccagtagatgaattcatttctgtgcttgccaagatctatgagaaactcaaagaagtgggtgagaaatttgaagttgtagctgtgtccttggacagcgatgagtcatcgttcaatgagagtcttgcaaagatgccttggcttgccattcctcaaggtgacaagatgtgtgagaagctggttcgttactttgagcttaggactcttcctacacttgttcttattggtaccgatgggaacaagtgtaggaagagtcctaagctcaaagtaacgaaccagcttctc

SEQ ID NO: 12757 - DNA, 663 bp, Setaria italica
  Peptide Sequence Number=SeqID_78731
catgaccttgaatagtggtccttatgctaattttaggcacggatagatgataaagagatgtttatcaagtaaacagagtttctgccagttgatgatggatagatattatttaacggcatccttttattttactgtctgcttagtaaagacatacaatcttttatgcacttttttggtggttttttaattatattggtctaattatcatgagaagactgaaatatacttaatgtatatcacaggttcctgtatcagaacttgtcgggaagactgtcctcctttacttctcagccaaatggtgtggaccatgtcgtgccttcctgcctatgcttgtcaaggaatacaacaagatcaaggtgaagcacagtgattttgagatcgtcttcatctctagtgacagtgaccagagctccttcgatgaatttttcactgaaatgccatggcttgctcttcccttggaagatgaacgcaaggcgttcctggagaagaccttcagaatccgtgggatcccttcacttgtcgccattggtcctaatgggcagactgtcagtagggatgcaaaggcccagctgatgatccacggtgctgaggctttccccttcaccgaggagagacttgaggagctgcagaaggagctggatgagatggcaaaggggtggcctt

SEQ ID NO: 12758 - DNA, 589 bp, Setaria italica
  misc_feature (576)..(589): n is a, c, g, or t
  Peptide Sequence Number=SeqID_78732
agctaggatgagaatggcaaaggggtggcctgagaagaaaaaacttaaaaaggaaaaaggaaacaaatagaagagaagcatgagctgcatgaagagcatgagcttgtcctggagcgccgtggcactttctgctgtgacgggtgcgaggagatgggcaatacatggtcctacagttgcaacaagtgcgactttgatctgcaccccaagtgcgcgctggcagaggaggaaaagaagggtgaggaggacgggaaggccgctgaggaaaccccggctgggtatgtgtgcgagggaggtgtgtgcaggaaggcctagagctgttctcctgggttgcgtttgccagttgcagtgctgtctgaaatggtgtgtggtgtggtaataaataatcatcagatcagttggtttgcttggagttgaggtgtttggtctgtcgatgtctgtattaatcgatcgtagttgcaccctgaacttttaggagtatatgtgagtaccttttcagatcaaataaatggttttagcctcacttgataaaaaaaaaatgacagcatgttgcgagtgtgagagatgcgggttggagtnnnnnnnnnnnnnn

SEQ ID NO: 12759 - DNA, 1622 bp, Setaria italica
  Peptide Sequence Number=SeqID_78733
ttgttcttattggtaccgatgggaagtactaattgtaactacctaattgtttgtcgttactattaatttgtaagtagtctattggtttttgtaggtctattgggtagttgtttcttatttggtaaaaggttaaacaaacaaatggtatcccacaccttgtcattcttgatgcaaaaactggtgaagtttacactgaggatggtgttggattagtgagcgagtatggtgtagaggcttaccctttcacaccagagaggatcaatgaactgaaggagcaggaaaaagcagcaaaggagaatcaaaccattaaaagcgtgcttggcacatccactcgggactatctaattacaagcaagggagacaaggtacccatctctgagctcgaggggaagtatgttggtctgtgctttgtggtgcctggctatggtccagtagatgaattcatttctgtgcttgccaagatctatgagaaactcaaagaagtgggtgagaaatttgaagttgtagctgtgtccttggacagcgatgagtcatcgttcaatgagagtcttgcaaagatgccttggcttgccattcctcaaggtgacaagatgtgtgagaagctggttcgttactttgagcttaggactcttcctacacttgttcttattggtaccgatgggaagacaatgaacaccaatgttgcggacataattgaagagcatggttttgaggcatgggagggcttcccctttagtgctgagaagctggaaactcttgctgagaaggcaaaggctaaagcagcatcacagaccttggagtcccttctaatcagtggtgatttggactttgtcattggaaaaggtggagcaaaggttcctgtatcagaacttgtcgggaagactgtcctcctttacttctcagccaaatggtgtggaccatgtcgtgccttcctgcctatgcttgtcaaggaatacaacaagatcaaggtgaagcacagtgattttgagatcgtcttcatctctagtgacagtgaccagagctccttcgatgaatttttcactgaaatgccatggcttgctcttcccttggaagatgaacgcaaggcgttcctggagaagaccttcagaatccgtgggatcccttcacttgtcgccattggtcctaatgggcagactgtcagtagggatgcaaaggcccagctgatgatccacggtgctgaggctttccccttcaccgaggagagacttgaggagctgcagaaggagctggatgagatggcaaaggggtggcctgagaagctgaagcatgagctgcatgaagagcatgagcttgtcctggagcgccgtggcactttctgctgtgacgggtgcgaggagatgggcaatacatggtcctacagttgcaacaagtgcgactttgatctgcaccccaagtgcgcgctggcagaggaggaaaagaagggtgaggaggacgggaaggccgctgaggaaaccccggctgggtatgtgtgcgagggaggtgtgtgcaggaaggcagagtctagaattccgttgggtattccctttcttactgtttcgttccttatttggttcttttttgttctatttggtaaaaggttggtagttcttaaaggtttctta

SEQ ID NO: 12760 - DNA, 278 bp, Setaria italica
  Peptide Sequence Number=SeqID_78734
ctcgcccccctccgccccgtggtgcccgtccaccgccaccaccgccaccggaagggacgacgcgaggctgctgtagccatccatgcctctctccttccttgttgctcggatctggttatggaggcctgaagtggctaatttgggagttgctcgcgatttgagtggagccggtggcgatcctcaagtgctcggcatgcaggacacggccatggacaatcgagtaggtgagccctgtggaagcatccaagatttggccagaaatgtttattctgctcgtg

SEQ ID NO: 12761 - DNA, 387 bp, Setaria italica
  Peptide Sequence Number=SeqID_78735
ctcggcccgacgcatcatctgtgctgcccgacgtctccccgatctccgctcctctcgcacccttctactcacgacggcggcggcggcggcggaaggcggcgcggtggcaggtcggtgactggcgagcgatggcgccgccggggtcgcggcgttgggcgtacgtgcgtctcatggccgggaccatcctcggcggcgtgcttgggttctacgtcatgcaccgcatcgagacctcctacaaggagaggatggaggagaggctgcggaggtacgaggcgcacatgctcgccaaggcccaggaggcgcagcagctgcaggacgaggcgcagcgggaggataaggcccagctcctgcccgattcgtgacgtcctcctcctcttgcgcgcgctc

SEQ ID NO: 12762 - DNA, 584 bp, Setaria italica
  Peptide Sequence Number=SeqID_78736
aactgtttgggttgaactttgtgacaatggcgaagatggtgttgagttcccactgtggctgctagaaacttcaaacttccctgccagtcctgcaccaccaactttccgcttccttcgtttccctttgtcccgagcaatcctgatagtgaggttttcactagttcgtggagcttctcctgaggccttgtcttccactggattagatggggacacggacatagtcgaagttggcagttcttcatctgagcaagagcttcttcagttcttttgtgttcctttatggccctggactttttgctgctttggtgaaggaaagagggcttaagagtcttgctaacaggacttttcctgttctcctcaaaaatggtacttttccggtaaacggtccgtcagattcagcgacgacagcagtacttgcataggaaagagatgcacgcactaaatctttgcacggtattatgactgaactaccaagggtactgtttgtttctaccactatattgcagctgtcaaatgaaatgtcctctggaactgaagaagtgtatcttactaaagctatatctgttacagtatcagggagagta

SEQ ID NO: 12763 - DNA, 3058 bp, Setaria italica
  Peptide Sequence Number=SeqID_78737
agtcctgcaccaccaactttccgcttccttcgtttccctttgtcccgagcaatcctgatagtgaggttttcactagttcgtggtaggcttctcctgaggccttgtcttccactggattagatggggacacggacatagtcgaagttggcagttcttcatctggattgttcttgtcatctgtactcttggagctatcaataacactggcagggtatttctcagcaagagcttcttcagttcttttgtgttcctttatggccctggactttttgctgctttggtgaaggaaagagggcttaagagtcttgctaacaggacttttcctgttctcctcaaaaatggtacttttcctgtcatcaattttgatgtaatgatcttgagagccccctgccaaagaatgtgggggatatcggacaaagacaagaacaagcagtgttaaagctccaaagaagagtaccaacagcttccaatgagcggatctgagataagactttctgcactggttaagcatgcaaaccggaatatttgcagtcatagggatcggaaagatgccagtagtcatgactaactcaagatctctcttaaccatagctgaagagaagtcagcttgaaaagaaatgagcattcttattgattcacttggtgctaagctaaatcccttgcagttgtccacagcaaaaccatccacaccacaatcagctcccgaaattttaacctttgttacttgaagaggaaggtcaccgctgtttttaacatgtatctccttggttaattgttggctgcacaaagagcttgggacctcttgttggtcattgttgatttattctgaacattctgaatattggagccaaggttaaactctagcttccatgcaggtttggattcctctaaaaggacaatagattgccgtccaccatatgcccgaagaggcagcagctccactcctgacaggttgtttctgatcaaaaccatgcttgaccacatgcagcgattcgaggggcggaagacaataggaccaagcaaagcagtctctgaaggaccaacatgggcctctgtgattgctacatcacttaacgagaatccaaatctagtctcagttgagttaatctctggagatttgcttgagaatgtgagttcacatacatcagttacagttttgcactggtctatgatttcctcagagttcactaccagctgcatggctgcatgctccaggcttgggttatggacctttatccatttagaaaactgcgaaccaatttgcacaatgggaaacattatttcatgatccattagaatagaaatcccatcacttgttccatgagatctccattgtctaagtattgtatcatcagctttgactgctctcatgatcgttggcttcacattatgcaagtcttcaatttgcagcatgctgcctaaagttcctgtcctcgcattagcagaggtagcttcctcatgtaatggtctggtaaacggtccgtcagattcagcgacgacagcagtacttgcataggaaagagatgcacgcactaaatctttgcacggtattatgactgaactaccaagggtactgtttgtttctaccactatattgcagctgtcaaatgaaatgtcctctggaactgaagaagtgtatcttactaaagctatatctgttacagtatcagggaagagtatcaatccattcaggtacttaacctgaaagatcatcgggccatttctgtcatcctcactaatacctacaatcctcagcaactttggtgcaccattccgtaaagaaagcgaaaatatagacccactttcaccacaagtcgatatatgctcaaatgtgacagcaattaagccactggaatcatagtaggttcgcgtatgcacctctagctcaataggtgtcacaaaagtatgcatcgtaccaggagtgcagttgcgcattttcaagcagatagcaccaaacaccttgccttcagaaagagcttgcagtttgaactctataacagtgttcctccttgaaggaagaacctcccattgctcactaggcctaatatacatcactggccatccagattcgtcactgcttgctgtataccagttgctacttgaagatagctccagtgctccatcaaacgggcctagctggcaaacaaggtgagaagaataccttgtgctctccaatgaagacatccaaacagccacttcctcaacatagagagtatcatcatgagggttgtatatcgacaagttcctccctacctgtccacctattaaaacatctatccctgtcaatggcagtatctgatatggtgaactgacagccatgcccttggcatgtataataaatccaccaaaatttgtctgcacaaccagatgtgctgatgacgagcccaacaactttggcaagaaaatgaaggtaactgtggcattatccccaggctgcagctccagatcctcataaccatatacatagaactgggggtcagtgctgaatggctcatacagacgcagggcactgtcgttgttcaaattcaccacggtcaaggtggccatggaggcggcatacaaatctctcctaccccaatccaacaccggcgggtcaatcgccacattcatcgacaaggaactctgaaggccactcgggtcgacatctgcggccggcacatccaactccatcggcaccccggctgatgcccgcatccaattgtcaggcacaagcggcgcctggcaaggctctgcattgtacctcacaccagcatcgctgtctcgccccaatccattgcgcgcccgggtgagcgtcgtgtcaacagaagagcaagtcaccacgcctccgccgccggacatcgggaaacccagtggcggagacgacggtccccactccctcggcacctccaaatccggcgccttgatgccatccgcgcttgcaagcagcgtctgagacagcgaggacgagaagcagaaggcgctttggtctgcacaggcatcccggaaggccgaagaacaagacgaatacgtacgaccgttcactctcctcggcgcaatcctccgccgccgccgccgacac

SEQ ID NO: 12764 - DNA, 920 bp, Setaria italica
  misc_feature (913)..(913): n is a, c, g, or t
  misc_feature (920)..(920): n is a, c, g, or t
  Peptide Sequence Number=SeqID_78738
ctgaagaagctcttgctgagaaataccctgccagtgttattgatagctccaagagtacagatgacaagaacaatccagatgaagaactgccaacttcgactatgtccgtgtccccatctaatccagtggaagacaaggcctcaggagaagctccacgaactagtgaaaacctcactatcaggattgctcgggacaaagggaaacgaaggaagcggaaagttggtggtgcaggactggcagggaagtttgaagtttctagcagccacagtgggaactcaacaccatcttcgccattgtcacaaagttcaaccccaaaacaaggttggtccttttctggtgcaccatcagagctgaagcatggaaacagacatgagactggattcgatgttgaggcaactacatcatcaactggcactaaccgcgagaagaagacttggtcgcaagtcgccaaggagcagcctcgctcgcgttcagcctcacctggaaccccatcaccttcagcttctgcactgaccaccaccacatggctctcaccaatgctgtccacttcttccccgattgcgccgcacgctcgtgctcctggctccaatctggtgaaagacaaggctgtgaagagaggtgagggtgccaggctgaagaaagacttcacatacgacatatggggagaccatttccctgcaaacctgctggggatagtaaggaatggcgcgccatgtaagatgcctgttgcttctgaaggggcctcctatagcttgttcgctagagagccccagaccctcatgatgaagccatcatcatctgcaccgcccgtgtctcgcggccgcggatcgccgccgtctgatgtagcaactggttatggaataaagtgagctggaaaaaatggccaaaaaaaaaaaaaaaaaaaaaaaaaaanaaaaaan

SEQ ID NO: 12765 - DNA, 3137 bp, Setaria italica
  Peptide Sequence Number=SeqID_78739
cggcggcagtggaggcggaggcgcaaagatcgcgcctttgatcgacgaggaggccgtcggcgattcttcgtcgaggtgtacgccggccgagggtgagcacggacatgagctgcagcgacatgtccctggacgagatggacgccacggtgaggaagatggagttcgtcatgttcgatcggtgcggcgccgaagaggacagcgagaaaggcaaggatcctaccgtttgcgacgaaggtgagcctgagcctcacctgaggttggagaagcatggtgccttcagggacaacctgtcggagtgcagcggagctgacaccggcagtgattttgttgaggagttgccatggatgaggtaccatggttacgaatacgatgatagcttggatgatgagatctcggaagaacagaggataagagaagaggaggctggtggagcagagatttctgtggagcaagaagaggaacaaggaacatctggtagattgggtgatgatttcaaagaagatgctgctgaagaacaggaaaatgatgatgatgaaaacacctctaatttggtccaagaaacagagatcattgcagatcaaggtgttgcttgcagagtggagacatgccaggagccagatggaagagatgaagacaacatcctggacacgtcgtgttgtggggaggcatctactggacaaggaacagcagaagagcagctctctgaagatgtctacaaatcagagattcttaatgaagaagtaacaggatgggcgggtactatcctggaagagtgctgcaaagaggagatttcagcggatcgaggagcaaatgatgatgagtacagcgtgcaatctgatgatgaatcagaggtaaccagggagcaggacaaggatgaagagagtacaccagatgatggctctgagatggagatttctgaagatactatctctggtgatggatgcagagctgatttctctgaggaagtaacctccagagctatcccagaagatgatagcactgtggactatgcatttgaacaatatgtgggcactgtggatgatgcatttgaacaagatggcagccctacaaatggccacaatgatgctcgaaagggattttgtatcacaagaagcaaacttgaagttatctctgaaggaatcgctacaggtcaagaaacctatcaagatggctccatggatggcatggttccaaagaaattggagattactgcatgcagattggaagaagcttcagaagaatctggtaattccgaagaaagcaaccagggtggtatctccacatgtgtcgatgatgctcaagtggaactggatattacgacatgcaagttgaaggatgcttatgaagaatccaacaccactgaagaaagtgggctaaacagtaatgcagagaatgttacagatggcgctgaaatggggccagaaattgccaaatgcaatttggaagatgcttctgaagaatctgatattgatcaagacactgcagaagatgattactctacatgtaacagtggtgatactcaaaatgctgatcagagtgataggtctgcaaatgtcagttctgatgctcaagaagccatgggagatgatggttctgcatatgtcagtgatgatgttcaatatgatttggagatcaaatacagcttggaagatgcttccaaagaatctgttattgctcaagaagctgatcagggccatagctccgcagatgtcagttctgatgcgcaaaatgaatctgagcttaccacaagtgagttggcagttatagccatcaccgatgaccatgaaaatgaattcaagatttccacatgcaaatcagaagatatttttgaggaatctgttattggtgaagaagctgatcatgatgagagctctgcatatgtcggtgatggcactcaaaatgaatatgaggttaccacttgtcactcagaaggtgctcaagtggaatctgatgtaattaaggaagatgaggatgggattaatactgcaggtggtcaaaagaaatatgaaattacagcatgtgaatcaggaggtgcttctttaaagcctgctatgcctcaagagactgatggagatattaataacgtatatgcaagtgacggttcgcaaaatgatactaccatgccaaaacttgatgcttgtgaagctgttcatgttactgaagaagcagatcagtctttgcaaataccagcagaattttctgatgcaaaagaaccttctattgacgacatatgcggtgcattcagtgggatgaacctcaagggagatgtatattttgatcctgctgagtctgccacatgtccggggaataaactgatcatctccaggaggaggagaacgcctgaagaggaggaatacctgcgaggtttcaatccgcgcgcaccgaactttcttcctctggaattggatccagacgcagagaaggttgatctgaagcaccaaatgatggatgagcggaagaatgctgaggaatggatgatcgattatgcgcttaggcaggcagtgacaaatttagctcctgctcgaaagaagaaagtggagcttctggtccaagcctttgaaaccgttctgccacatgatgaggaagataagaaaagcatctcacccacaaggcctgtccaagcttgcaactgataacattagagttagtggttacactaatggcgatcttgaccgccgaagctactaactcggaggtcgctgcaatattagtgccagtgaacctgctccaagtttaaatcggagagctgcttactaattgctagggataactagagatctctagctgagttgtttaagaggagctcactcctgctccacaatgaaggataactgcttagtgcttactactgatcaggatattcctatccagttgctgagttgcaaagggaatagctcaccggcttgagttgtgttattcaagtgtgtatacatgtctcgtgtgctaatgtcgtctgatattgtactgacggctctgtgaggattgaaaactgtcaagggtgatggtgtgcatgtgtcctttggcataggtcaataaaactcatcttgagtgcacaactgttgtttccgaagatgattctgtgtatcatattataacaggtttgcatttgtaaaatgtaaaataaaaaaaaaaaaaaa

SEQ ID NO: 12766 - DNA, 325 bp, Setaria italica
  Peptide Sequence Number=SeqID_78740
tcctactcctcactcagtcctcaccccaccccacctgcctcgtctcgagtccaacgaacaaaccaatggctctcgtccgccagcgccgccagctgccgcacctcaccctcccgctcgaccacttcgccctgcgcctgccgccgcagcccgccgccgcgccgtccacctccgcctccgacgcccgcctctcggactacgagaggatctccgtcctcgggcacggcaacggcggcaccgtctacaaggcgcgccaccgccggtcatcgcagccgctcgcgctcaagatcttcgcggccggggacccctccgcggcgcgcgaggccga

SEQ ID NO: 12767 - DNA, 455 bp, Setaria italica
  Peptide Sequence Number=SeqID_78741
gcagactagtccttggactgggaacaacgccagaggttaattctgctgaccagcatcctgctggagtagacaagtcgagagcacctgtgactttgtttggccagagcttctcctttactgatccagggacgctgagccttggggttcgccagggctgcaatgctggagcaattcaacacaaagaaatgcctaccggccacatcatttcctttggcgctgtcgatgagggctcaacgtcggccaggagaagcgccggtggcttcatgccatccactgtcctcgctcctcggccagactatgtagcagtcgaagaggcacagggtttggtagatcacacagacaacagttacgatagtactgttcgtgatcacgatggttttcggctcagcactgaaccttcggcatccacgacggaggcttcgtttggcgtgagctccgatgttgtgacagtggta

SEQ ID NO: 12768 - DNA, 416 bp, Setaria italica
  Peptide Sequence Number=SeqID_78742
aacgaaggtcattgagctcagcagagttgagatgcacaagctccggatcgcgctgcaagtgtcgcgccagcagaatatgcagcttgctcagaccaattcgcaaatgctcgcggaactaaatatggggaaagataggatcaagacattgcaacatgagctttcatgcacaacagcgctgcttaaagtaaaggattcagagctcgagcgaaagaataaaactgctaaccaacggcggaaggaagtaaattcacaggaggtcttgaaagctatatcttccaaaggtgcagctgttgaggcacatcaaattcatggctcaataaccagtggtgttgaacaccagttgcttaaatctcaatctgccgtgccatcaaggactgattgtcaaaagccaccacaagatgcaacaataaagaggg

SEQ ID NO: 12769 - DNA, 351 bp, Setaria italica
  Peptide Sequence Number=SeqID_78743
caatcgatttgggcgcgttgcgttgctcctctcgccctcgccccccgcctccttcctccccaccctccccaatccccaccaaaaccacccgcgccgttaatcgcagcaaccagcggctccatcgccggccgcggattgggcatccgcggattgctaatcgatcgattgattgattgatcgatcgatcgcggcgaggccggggagccggctgcggtggcgaccgcaccgacggttcttggcggttgcatgtatgcgggcggggagagccggcccaatggtgcgggcgggggtgttgggggagacgcgctccggcggcggaggcaggccggcctgtcttcctcctcccgcggc

SEQ ID NO: 12770 - DNA, 458 bp, Setaria italica
  Peptide Sequence Number=SeqID_78744
taaaagaattctaagaataagtatattcgtgaatccttacacggagccagatgaggaagaagaaaaggcaaaggaggaagaagagaagaaacaggatgaggattatgataaggtgggatcttggtatagcaaccctggaactggtgtcgctggttcaacaagcactggcggtggagttggcaagtatctaaaagctcgaactgctggctctgttgatgtgactgtaaatgctggtgcacctgatgattctagcaagaagagaaaagcgactgcatctagtgtagagttcaaagatttctctggctggtagagtttatgtgtttgtatttcctcttgcttctctcagaagaatctgctggtgcatactctggttgcatttttgacatgtacgtctatgatgttggtaaagagaactgtctacacaaggccccatttttcggtgttgtgttctaaaaaaa

SEQ ID NO: 12771 - DNA, 257 bp, Setaria italica
  Peptide Sequence Number=SeqID_78745
tcccgtacgcgaaggcgctcatctccatgcagtaggggccgggggtgaagccggactcgatgacgccatcgccggcgatgaggatctgccgcgccagcgcgttgatcttgagcgtgtaccgcatgtgcggcttgagcagcttgaagatggggtgcatcgcgctcatctgccggtgcgccgcgatgatgaacggctccatgcacgcgtgcgtcctcagccagtggttgatgagctggtggacgccggcgtcgttggag

SEQ ID NO: 12772 - DNA, 502 bp, Setaria italica
  Peptide Sequence Number=SeqID_78746
aagagcctatgtccatttggaaggggtgggtaataactacgttagtaccatatttcaagtattcttccatggtccagcctacacccgccaacatatcatccaggatatccaatggatcttcatttgcaggattgtctgatgtcaacatgacaacatcacttttatcagccgcaacctttgtcataactggcctcttccctctttctttctcaccgcaacatccaacaacagtgatgatccggcgtgggcccagctcccttacaccatccagaagcctcgacagagcctctggtgtcctcgcgtgatcaacgatcaccccaaatgcttgctcctcatcaattagctcacactggcctgggatagcatccacctcttctatgcccctgactatgtcctccagtggtgcgcccactgcaatgccaactgccacagttgcaaggatgttgtaaatgttggcccttccaagcagccctgaggatatctcaaggatcccatgcggtga

SEQ ID NO: 12773 - DNA, 240 bp, Setaria italica
  Peptide Sequence Number=SeqID_78747
tgatagcgcgccccagaaggtttccaatcgagtggtaacgaacaggaaatccggagggggagaagtgcattccggagaagaaataggcataaatagcagccacgcgcggcggcgagcaacgcgccggcccatagtttcgatccgaccacttgctagctagttgttcagagaacagagggaggctgctccgtcctggtagcctcgcgcagtcgcgtggtgcttatcacgggtacaaatgta

SEQ ID NO: 12774 - DNA, 348 bp, Setaria italica
  Peptide Sequence Number=SeqID_78748
tcgtggagatcttcatctgcctgtacgggtttgagatgtgggatgccgacgccaccgtgggttaccgtgctatgctcactctcaaaatggatcgcccgctgtatgttcgtgcgtcgctccgacgatgatatgggcaatttgtgtatgtccccatcctctggggatgatagcaggattcgaatatgccatctttttgctttttatgataacgtggagctcattagttgtgtatattatattggattgtcttttagaaagctgatgtacgcaaatagaattttgtgcacagattgttggacaatcctcggtttttcaccttaaaaaagaactaaatctgagtatttactt

SEQ ID NO: 12775 - DNA, 330 bp, Setaria italica
  Peptide Sequence Number=SeqID_78749
atgggcaggatggagttcctgtggggcgcggacgccgaggagttcaggccggagaggtggctcgacggcgacggtgtcttcgtcaccgagagccccttcaagttcacggctttccaggtgagatctcacgtcgtcactcacgttcaaccaatcaacaacctatccgtgatcttttcagctccaacatctggagtgtcctctgtccttcgcctaccgtgacatgtagcatgtcacatgcttagcctgttgtcttttgtctgttaacacaggcggggcctcgcgtctgcctgggaaaggaattcgcgtacaggcagatgaagatcttcgtgg

SEQ ID NO: 12776 - DNA, 480 bp, Setaria italica
  Peptide Sequence Number=SeqID_78750
cgttcgacaacgccagcgagcaggttctacaccgcttcttggacccgttctggaaggccaagaggctccttaacttctcgtcggaggcggccatgaagcgctggctccgcaccatcaatgccttcatctacgccgtcatcgacaggaagatcgagcagatgggaagagaccaacaagaattcgtgagctctctgcagcgtgcagcctcgccatggtgcgcgcgcgcgttctcctaccattttctgactcagtgatgtttctctccggcaggccaagaaggaggacatcttgtcgaggtttctcctggagagggagcgagatcccggctgcttcgacaacaagtacatccgggacatcatcctcaacttcgtgatcgccggccgcgacacaaccgcggggactctgtcgtggttcctctacgtgctctgcaggaaccaggccatccaggaaaggactaggtaggaggtacgcgccgccgcc

SEQ ID NO: 12777 - DNA, 1943 bp, Setaria italica
  misc_feature (1901)..(1901): n is a, c, g, or t
  Peptide Sequence Number=SeqID_78751
ccaccttccgctagaggccagaccacacgcaaaagcacgcacggctgccacccaccttgggccgagacaacatctgtgctcaccggcgtcaccgccgggcatggactcgccactgagccaacctgcgctgctcgcgctatccttgctcttcctcctcgcgctccacctcgcgcgtcggcgccgcggcagaggcaggaaccggaactacccgccggtggccggcaccgtgctgcaccagctgctcaacttcgggcgcctggtggagtaccaaaccgagctcgcccgccggtaccgcaccttccgcatgctcaccccgacctgcaactacgtctacaccgtcgagcccgccaacgtggagtacatgctcaagaccaacttcgccaactacggcaagggggcgacgatgcacgacgttctggaggacctcctcggcgatggcatcttcaacgtggacggcgccaggtggcggcaccagcggaaggtcgccagccacgagttctccacccgggtgctgcgcgactacagcagcgccgtgttcggcgacacggccgcggagctcgcggggatcgtggccgccgcggcgcggggcgccggggagaggctggacatctcggacctgctgatgcggtcgacgctggactccatcttcaaggtcgggttcggtgtcagcctgggggtgctgtccgggtccagcgaggagggggtggcgttcgccagggcgttcgacaacgccagcgagcaggttctacaccgcttcttggacccgttctggaaggccaagaggctcctcaacgtctcctcggaggcggccatgaagcactcggtccgcaccatcaacgacttcgtgtacgccgtgatcgacaggaagatcgagcagatgggcagaaaccatcaggaattcgccaagaaagaggacatcctgtcgaggttcctgctcgagcgcgagcgagatcccggctgcttcgacaacaagtacctgcgggacatcatcctcaacttcgtcatcgccggccgcgacacaaccgcggggactctgtcgtggttcctctacgtgctctgcaggaaccaggccatccaggacaggatcgcggaggaggtacgcgccgccgccacgggcggtcgcgacgtcggcgcccaggagctcgtcgcgtgcctgaccgaggacgccatcggcaagatgcactacctccacgcggcgctgacggagaccctccgtctctaccccgccgtgcccgtcgatgtgaagtgctgcttctcggacgacacgttgccggacggctacgcggtcaacaaaggggacatggtgaactaccagccgttccccatgggcaggatggagttcctgtggggcgcggacgccgaggagttcaggccggagaggtggctcgacggcgacggtgtcttcgtcaccgagagccccttcaagttcacggctttccaggcggggcctcgcgtctgcctgggaaaggagttcgcgtacaggcagatgaagatcttcgcggccgtgctgctctacctattcagattcgagatgtgggatgccagcgccatcatgggttaccggcctatgctgacgctcaagatggatggcccgctctacgttcgcgcgtcgctccggcgatgagatgcggttggaggttagcctgatgccctgatgccaaaacgtcaacgcctccgtgtgtcccatggtctgatcgtgtctactttggaaagtaggatttgaaaatgagatatttccatctgttggtatcctcgagaacgtggggttcagcagctgtgcatagtattatattggatgattattgtaatagagtaggatcaagctgatcaaaacaaataaagttgccagatttgcacagtctgaagtggctcactctagaaaaaattaaaaaaaaaaaaanaaaaaaaaactaaaagaagaactagaccaaggacaacaacaa

SEQ ID NO: 12778 - DNA, 247 bp, Setaria italica
  Peptide Sequence Number=SeqID_78752
ggaaagcaccaacgcggcagcagccagcagggaaggcaaggaggaatcgagcgagtccaccaccaccgggggttcgccgtggccacagcttgttgcggcgctccgcggaatccaatcctccctcccccactcctcctcctcctcctcctcctcaccggcgcgcgggtttataaatagattcccccgtcacgatcgcccgccgctcggatcggattcaactcacctacccaccaccccctcaatcccc

SEQ ID NO: 12779 - DNA, 257 bp, Setaria italica
  misc_feature (243)..(243): n is a, c, g, or t
  Peptide Sequence Number=SeqID_78753
tcttccttccggcccaccccaacccggccgagtcgggcggcgactgaaaaaacagcgagtagtagtgtgaggacgacgaacgtatgggcctgggtattttaggtgggctttggtttgtcttgctggggcccgattggggtgcgcgattgttgcctggtgatctggccggcgtatgagtgagtgtatccgtaggtttatgctgtaactagttaactacagccacctcctttcctgcgaaaaagntcagggaagagaaa

SEQ ID NO: 12780 - DNA, 289 bp, Setaria italica
  Peptide Sequence Number=SeqID_78754
cggggggcggagctccttctacagctttttttccctacccccctctctcccggcacccgcgcctccctccccgtctccccgacgctgcctcccttcgctggcctccgctcgggaccagcggcacctccgccgccttccgccctgaccggctgacccccgcctcgagctccccaaacagggcctatatcgagaggctggaggcaggcgacctccccggagctgcgggtcgtgtcgcctcctccaccccaccccacccccacccatgtcctccgcctccttcctctcccct

SEQ ID NO: 12781 - DNA, 643 bp, Setaria italica
  Peptide Sequence Number=SeqID_78755
ctgatgacatgatgttagtgtccgatgtacggaaattacttgcaagatgaggaagtagcaattggtaaatgttactgacatttcttctctcaaagatactggtcatgtattctcgccctgttctcttcccaccataacctggcatgcatctcactgaatctctcccggctgaatcggacgcgccggagttctctgatgccaccaggcaaagcccgaatagtaatgtacacaccaggctcatcctcttctacccattccctctcttcgtcacttccgttgctaacagaggctgaaagttcatctgatcgatccacctcttcaggagatgagcttgtccttactgatgcatctacagatgaagtttctgtctttgctccactaatgcttgacaacttaggtgttgatgctagtccaactgaatcgtagcactgctgtccaaggtagcggtcatggcggtaaccgttgccaagatgattggttttgtgctcaagagaatctgaagatgaatatccttttgctccagtgccctttagtggtctgtgcaaagtatgtggcaggtgccccttgttatgtggagctgtagctgggttatcctctttggagctctcattgtcagacatcggagtgcaaggcagaggagcag

SEQ ID NO: 12782 - DNA, 1731 bp, Setaria italica
  Peptide Sequence Number=SeqID_78756
aaatactaactctacaatgaattgaattgaattggatcagctgctagttgaatccatatctattataaaaagaaatgtttatttacaataaaaaatttagccctctattaacacttcctgacaaaatttttgagccgttggtaaggcagcatgaatacaagttaaatagtaaaaccatgtcggaataatgttcgttagatctgcaattgtataggagcaaaactgccaggagatttacagttgaattgcctccttcccaccaattactttagtttgatgagctcgttttgagcttgatttcttatcacgtgttcgcttccctggtaacttcttggctgatgaagccttcccgggttcctttgctgcattgtctggaagcatctttctcggttgtatctgcaccatgggaggccgcaggggaggccgacttcttaaggtagcctgcctctgttccaacagttctcggtggtatgactgaacaacaaaatcacgcctttcacagtccaggaacatgtctgcagtccaattaactcgcgaccttattttatccctaactgtgctgaagcttagctgatctctggaggtgaagcggtcaacttcattgaaccaaaggcatgtaaacaggtttgttatggggatgtgttccctaattatcacacagccctcagggacgtcacttgttataggaagcttagctgatgaataatgagttaaaccctcacttttatagaactctatctggtaatcaattgaagcattatcatattttccaccagccttgttggcctcagcttcctcaaagacatcaaagcgtctgtaatgcctggaaacagcaaagctaacattcttcctccacaagaatctttctaatacctgataaggatccctcactagcttaagtttcccatcaatccaaattgaatatcgcacattaggaaaaagccgatgaagtagtaattttggaacctttccattgcgccttgctaataggtaaggttagacgcgaccaacaactacacgccacagcccgattcttttagtatgatcaatggtagtggagttctttagtgcagcttctgtttcttcatccagaaacataaagaagcaaacagtatcctttgaaaaatcactgatgttttctggttgttgcagtatatcatagtttccaaaaatgcagaggcaacaacagtcctctcgcactgctgcatctcagaacgatcagcttcatctatgtcgaacccagtattaagaccaggtatcttccctcttacaaatccacaatgcactgtcgtcaaatcttttatgtcgtaagatttatctcgttcctccagggatggataacctccaaacaaagaaccaccatttgactcttcggaaaccaaattcgcttcagatatataatttaagctttgaaggacaggtgatgctgatagctgagcaggtctcagtgccagcgcttgctcaacaggcaaataacaaactggacagggccgtggtccagtgcgttttctatcaataggtggaggagacaatgagaaattttcacaaggatggtgattcagaacaacagctggtggaaacctccgcatgggactctgaacttgtttacgactgctatcagattgtttttccatctgtgatgctgtattcaaaccgttcacagtcagtgaatctctttgggctactggtctgcctgatgatgtccaaacagggttcacaaagctccggaca

SEQ ID NO: 12783 - DNA, 1192 bp, Setaria italica
  Peptide Sequence Number=SeqID_78757
ggtaggttggcaaaatattccccactggaagctgcagccacattcaggccctcgatgtcccgattcctaggctaggtaacagaatggtcaggggagtgcgcccttttccgcacgaactaacggctatcaatttgctccagtatgctcccttcgatcccgatgattttcactgatgtatttgagtggcccttgaggaagaaatctgtgatctgggtacaaccaaatagcttgagaatcctcaacgatgggcagctgtcgacaatcaaccccaaagcttcattggtcagttgacggcagaaggaaagatccagagcttccaaccgaacagagcacttgcgggaaattgcaagagcagtaaggtctccaaccttctcaacactgttaagcatcaactcagttaggcatcctccagattcttccaaatatcgagacattgcttcatcactgaatgtgtttctttgaagcttcagtttccttatttgcctgcaaccattgcgaagatgcctcattgctgagtcacgcaacctattcaagttgcggagatctaaagaaattaattgtggacaattctccccgatagtcttgatggaagatgaggtaagtttcaagcaaccagcaaatgctagttccttcatattcgaaccatgtacaggaatgagctcattcacgaacttgtcacacacagattgtattccagacattgacaaaacctctagatgattaatcttctgtagagcaggaagaatcgtcatagcctccacgtttgtgcagtcatctatatatagttctctaagtaccgaatgtaacttgtcagcaagaataactattccagatgaagtgagaagagaacactggcacaaatttagtgagctcagagaaggtgcggcagagataattgtgtctaaaccattatcagaaagacgataatttcccttaagagatatttttctcaacagcggcatgcagttaggagccttagccaaggtagttggcaatatgtagtcaggcatgcatcttccagatatatcgagctgtagatcctgcaagctatctgtgttgcatttcccaaaagttttctcaaagtcatcatcactcagccatgaacactcactgagatgcagttctgtaggactatcacacattagttcattgagaagatgggtattcatcttctggaatgacacagaatctt

SEQ ID NO: 12784 - DNA, 387 bp, Setaria italica
  Peptide Sequence Number=SeqID_78758
atgcaagaagaaggtgaagaaagtagctccaaaataattaatggtaagtcttgtttgatctcagaattgtatgcagaacagtctctcttaccattcagttgcgcatttttcagccgccttcccagaaaaattcctcatgtcgcaaaagcttgctgtattgaattgaattggttatttcatcacactgagtacctgatactaggtagctttgttagcaagcaagtgcctcgtttatttctacgaaatgaacatccagaatccatgacagtaaagcgaagacggccatcctgaaatcgtgttcttttgatcttgaaggcgtgtaccgatgcgagatcgatgccaggagcaacaaggtctcggtgacggcatcgacgaagctcgatccct

SEQ ID NO: 12785 - DNA, 663 bp, Setaria italica
  Peptide Sequence Number=SeqID_78759
aacaacaacaactttacccctacctacaagctctctcgcctcctgcgagcaccttcgcctcgctctcatggcctcagagcctatagagtgccaggtcgtggtgctgagggtgtccatacactgtgagggatgcaagaagaaggtgaagaaagtgctccaaaatattaatggcgtgtaccgatgcgagatcgatgccaggagcaacaaggtctcggtgacggcatcgacgaagctcgatccctacatcatcgttgccaagctgcgtaagtccggcaagcaggccgacctctggcccgagcagccgcagccgcagcctcctgcagagagccaagagcccaagaaccaacccgacgagcagagcaaacacagcgaacctgcggagaagccgggcgccgacaacaacgaggccgccgcggcagagccgagcaatccccagcctccaccggagcttaagcagagcgccgcaggcgagaccccaaagccggcgccagagagcaaagaagcctccggcgccaatgcgaacgccggcggcgaggccgcgccggcagcagagccgcagcatcaccatcaacccagtgaagtgaaggggaaagcgaggcagcagccgccgccgccggagctggagaagcagccggtcgacgcccgggtgacggtggagtacgg

SEQ ID NO: 12786 - DNA, 240 bp, Setaria italica
  misc_feature (142)..(240): n is a, c, g, or t
  Peptide Sequence Number=SeqID_78760
ccctgttgtctcacatgtttcaatggcatccctcactgagctgacgaacacgagctcttgtagctaggcaattccgtgtgtacatacggtaaattcacagcatctgtttgttcattgttttgatcaaaaaaaaaaaaaaaannnnnnnnnnnnnnnnnnnnnnnnnnnnnnnnnnnnnnnnnnnnnnnnnnnnnnnnnnnnnnnnnnnnnnnnnnnnnnnnnnnnnnnnnnnnnnnnnnn

SEQ ID NO: 12787 - DNA, 433 bp, Setaria italica
  Peptide Sequence Number=SeqID_78761
atcttgatgtcggcgacggacggtgcctcgagccccgcgaggagatcgtcgaggacttggtaccggtgcgggtgccgctcgccatgccggacctcggtgtggaggaggcgaacgcctcgtagagggcgagctcgtgctccccgcgtggtcctctgcctggagcagtggagcggcttgtccaagaggccggtgtcgtcgacgagcgggcccagcttgttggggaaggcgcgttggccggcgacctggtgcttcagcgggcagcggaaaagaagcagcagcgtgcaggcagcttgcggcgggggcggcggagtcaggtagcagtagcactgcagcaatgcatagcttgtggttgtggcttgggcggtggagaagataaggaacgccctgtttgttgactgaaagatgagcggataaagtaagagagaaggagaaa

SEQ ID NO: 12788 - DNA, 1829 bp, Setaria italica
  Peptide Sequence Number=SeqID_78762
gtaagtggcctcctgccccgcttttcttactccacttgctcgtcgatttagtctttagggtgcagcgccgggggttgtgtgaaaatttggggaaaatgcagcactctcctttccatttcaccgcggaatgtggctggctttggccagtgtgaatctgtccggcggttatccgtcgtcatcgcgagagccttatctactcctctctgaaaccaggagaggcttgagaggtctgaagtgccttgacttttgaggctgatgcctactctttcagagagaagtgattctgtggctgaaagtgattctctttgattctctagcataaactcttaaaatcaggatggagaatcacttcacagaatcaggagaagcactttttttcagctcccagcctcttagttcatcttagagaatcacttcaccgaatcagttctgggagctctgccaaacgcacccttaccttgaagttttgtatgcatgtagatcctaaccttgatttatttatgaaaaatatttccaaaaactttatgcaggtctttgtggaatatgcaatatttctaagtctagagctgttttcacatgagttgcaccttcgtcacacatcacacaatataagtccaagaaaatatggtatctaataaatagtcattgtagaggctcccttgcgcatttgcagcagtaaagtagaggggtggagtgcacgtactacaacaattggctttttggttctctaatgaaaccaaagcatcgatgataatggacctatattgaagtaaagagggagtagtttttatgttttgctcataactggtgtgcatttggataattggtcaagctgaacaatatttattgagaacaagaatatgctagtacaatgaactcataatgcattgtatgtgatagtttactttagttgtctgtcaatacttgatatgtcatactgtcatgtgcaactttgaacggtatgtaaaatccctgaatttttaatagcacctcctcatatccatgttatagatttaactgtatcatgtctttttaatcacctttcagtaacacatggatctttggagggttatgttcttgttggttgttctactagctgtcaaggtgcggtgtgttagttgccctggtgacatgtggcttgagacggctaccccagctccccacttgaacaggagtgctcccctgccagagcccccacaggaatgacagctgtgacagccacactgtttcctgtgaacctgctgaatctaatggtgctaaggctgttgttggtttcaactcagccgtaactttcttcttcttcgttgtgcctatgatacgagtattgaggttagagcgtaacagccgtactaagtcggatacacaattttggtggtatctttgctgtggctttagtggctacatcgtatgggtatattacttcagtgattgctcttcattacatcaagcagcggtgtttccaatatatatggtgtcaatattgggggcaattgtccatttcatccttttatgtattgctacatatctgactttgggtgtgcgggataagaggccatatgcactgatttttgtactaggatcatccttaatcggtgctactcttctgtgggtgtttaaagtgaaatggattggatggttgggcttctcattgacagccctttcgcattgcttccggttcggagctactaactatcgggacaagttcaccttctggctttttgatgtatccataccaatctgggtggttaatgcattcatatctgtggtgggatccataactggattttttgtggcttaggcaccctcagttgtgcatctcgatggaaata

SEQ ID NO: 12789 - DNA, 511 bp, Setaria italica
  Peptide Sequence Number=SeqID_78763
gctaaagaggtagcagtaatcggttaggagaacaagttgttagaaagggtctgtttggtagacctccatctgattctgattctctataggagctgattctctgagagaagtgattctatgctgaaagtgattatcttagattctctagcataaactcttaagatcaggatggagaatcacttcacagaatcaggagaagctactttttccagctcccagcctattagttcgtatcagagaatcactctatagaatcggtagagaatcacttctccttgaaagactgtttggcagaactcctgctagaatcagctctgggagctctgccaaacgcaccctaaaggtgttggttaatcaaacagacatacctaattatgttctcaggttcctcaaatgttttagtatcttttcctaggaactcaggatcagcatccttgatgcccaccattgtatttttcttcactcttctgtgcatctttgaatggaggtgctgtgatatctgatatcacga

SEQ ID NO: 12790 - DNA, 1596 bp, Setaria italica
  Peptide Sequence Number=SeqID_78764
ttttttcctttttttgttttactttttttagtttaaggttacttagtaattagcctaactctttcagagagaagtgattctgtggctgaaagtgattctctttgattctctagcataaactcttaaaatcaggatggagaatcacttcacagaatcaagagaagctacttttccagctcccagcctcttagttcatttcagagaatcacttcacggagaatcacttctctctgaaaaaactgtttggcagagatcctgctggatcaacagagaatcagctctgggagctctaccaaacgcaccctaagggtccatctagattatttcagctccctatgtctaaaactgatctctggtttaatctgtaacacctacatgcatacaacattaatataagtgctagtatgttgcctcaacaaaacaagttttttaggagctggttgatatgtaaggttttattattgggggttaattgtgcaccatttcaaatttacatcgttgccttcatctcacccatatgtgaggaggaagtattgaagcagagtacattacccatattttcagaggtcgatgaccccttttggagtttggatccttcttttctaagcaaaagttttagtctaaatttcttctaattgctttgtttccataccttacatgtgctggatcagctttctatgaaccgactatataatctatttatatctcatgtcactatgacagtaccataccaatataaggctcttagttaggaaaggaatgtcgagtgcacattgaaatggtttccttttccattactggattcttcactcttctttccaataaaaatcttcctttggatgaactttgatttcagttatcaagtcgctaatcaatatctttggtcatatacactatgacactagctatctccctagctttccttaaagtgtattttatatctgatacaaacccagtccatacaagggaacagttgagctaaccaggtaagcctgatttcaggcaaagcactccatggactaccatccatgagcactcaattattgtcagagttcggggagctcgctgtttaaacttctggttcagaagaaagtaatatactgtaatttctcaataatggggcttaaatgatttgccaacgagaggactacatttggtagttaacaattcaatgttgaaacagttcattagatccaatatgcatttcactgtttggtaggatttaaggtgccatttttctggagatgagttataccctacagtattctgtcagccagcagatgtttcattcactcatgtatgctgtgcccagtgtcaatgtgactcctggagtaaaagaagatcgcttgatgatgacaggaatgcacactgtttctgatatcttctgtgttggctgtggatccattgttggatggaaatatgtaagattcgtgaaaattatttcgtattctgtgtattgtctagcatctgagtttcatgatccccttctctaggaagctgcacatgagaagagccagaggtacaaggaaggaaagtattatttctggagtaggttttaaggttgttctaggtcccttgttacggttaagttcctta

SEQ ID NO: 12791 - DNA, 993 bp, Setaria italica
  Peptide Sequence Number=SeqID_78765
ccagacctcttctccctcctccctcctccccccatcccattcggggccattcccatccgcccccaccacgccggcccaccgcccacgccatccccccctccacccgtttccccactcgcttgcagttgctgcgagcggacaccacaccgctgcgcttcgcacacaaaccagcggcagtaaacaactcccatccccgattaaattctccccgctcccaatctccgatttcgaggacgccggcggaggagaggggatttccgaggcgcggcgatcgcgattggagcggcccgcggctggaatcgccgaggaggcgggttggagtggattggggggagtgagtgaggcggcgatggggcggctgttcctgatgcacctggacggcaacgtctacagctgcaagcactgcaagacccacctcggcctcgccggcgacatcatctccaaggccttccactgcaagcacgggaaggcctacctcttccataaggttgtcaatgtgactcctggagtaaaagaagatcgcttgatgatgacaggaatgcacactgtttctgatatcttctgtgttggctgtggatccattgttggatggaaatatgaagctgcacatgagaagagccagaggtacaaggaaggaaagtatattctggagaggtttaaggtgtcaggccctgacggaagccagtactggattgcacctgatgctcatttggtcggaagcgatgccgacgatgtatgaggagcgattcgccaagctcaagcatgttgttcatcccctgtaaataacctgtgtggtgctggtctttagccagccggggattgctcccattgaaagaatccccggcgtaaatgttgttgtaggtgacctggtcatatccctcctgtcttccctgccaactcaattggatgtttccgtctgtatatgcttgtaatctgtgttgcttaatgatccaataaaagtcccgtttctcaaaaaaacaaaaaaaaaaaaaa

SEQ ID NO: 12792 - DNA, 552 bp, Setaria italica
  Peptide Sequence Number=SeqID_78766
taatcaattgtgccacagagtgtgtgtcgtttagcatttgaccgagctgcccatccaaaatctgcaattttaagccggccctcgatatcaagtagcaaattctctggtttgatgtccctatgaatgacctgcttcttgtgacagtacgccagtgcaccagcaaggctcgcgacgtaggtggcggcggtgcgctcggtgaagcggccagcggcgcgaaggaccttgtacagctcaccccgggccgcgtattcgaggacgaggacgacgcgctcttcgtcgtggaaccaggcgaagaggcggagcacgttggggtggtcgagtcctctctggatctcaatctcccgccgcaggtgggcgtggaaccgatacttctccagcttcgccttgtacgtcaccttgagcgccaccacgtacccgctcttcttctcgcgggcgagatagaccttgccgaacttgccctcgccgatgtacctgccgatctcgaagtcggacatgctccactcctgacgcgccgccatcgtgcgcgagagtggcggtcgagggacggaggcg

SEQ ID NO: 12793 - DNA, 420 bp, Setaria italica
  Peptide Sequence Number=SeqID_78767
agaagcttggaaatgagatccttagcttctgaagatacggaaggagttgaagggaatgtcaaatccactctaactatcttgctcaagattcatgtggcacagaatgttaaggaatgaagataggggagaaaaagaaagcagatgtttcaggccataccttctgaaggtatcagcctgtttatcagcttcaaaaggaggtgagccatataagaactcatagcacaggattcctaaagtccagttgtcaacagcatgatcgtgagcttttttatctatcatctctggtgccagataatcaattgtgccacatagtgtgtgtcgtttagcatttgatcgagctgcacatccaaaatctgcaattttaagccggccagcagtggttctatcagagcttatggtgtgcacggtacagaaagaaga

SEQ ID NO: 12794 - DNA, 1587 bp, Setaria italica
  Peptide Sequence Number=SeqID_78768
tccttagcttctgaagatacggaaggagttgaagggaatgtcaaatccactctaacttctgaaggtatcagcctgtttatcagcttcaaaaggaggtgagccatataagaactcatagcacaggattcctaaagtccagttgtcaacagcatgatcgtgagcttttttatctatcatctctggtgccagataatcaattgtgccacatagtgtgtgtcgtttagcatttgatcgagctgcccatccaaaatctgcaattttaagccggccctcgatatcaagtagcagattctctggtttgatatccctatgaatgacctgcttcctgtgacagtgcgccagtgcaccagcaaggcttgcggcgttgagccgtcagaatctaacaaaagaatggcaaatcagaaggaagcctgcatatgtatatcatattctaggaactgttatggcaatgccagttgccagcacatgttcttggccattaatggcattatcaaaagctgcagtgttcatgctaaaggaaatgcaatgtattctcacattgtttcatgtgtaaatgtataggtcgagtggagtaaaccgcagagtgcacttcatgtggtcgctgtttgtggaaaactttgtttcagcttaacttgtagaacgggattgatcctttgccttgtattgcagagtttctgatacttaatgttgcaatcagaaaatacaaaagtctataaaacccaagaaccattttgacaaattataaaatggaactcaaagttttttaatatcaaagaatttgctgcttcaaccgccttttttatgaactgtaacttctacttgtttccaatgcacaggaaaccagtatcaaggaatcagcaattaatgagttatacatggtatcagagtaaaatcaagttggtggcatttctgaagatcctcttgatgtctttcaggagtcgagtagaagtaatgtcatagaattgccaacttaagacctaatcgtctcatggactagttctctgaaactttgttagtactccctccgtcccaaattactatttgttttgggttttctagatacaaaacttttgttatggatctagatgtatatatgtctagatacgtagcaaaagctatgtatctagaaaaaccaaaacgaatggtaatttaggacgaaggaagcggataaggtgcttttctttctccttccttttcctctgccgttttcatcttggttttgttttaataaataataaaagtaacgttagagtagcctgcagtatttccctaacaaatattaaacaattgctgccacaagagccttgcctctaatattatgggttcaggctaacataatttaagtcataaacagtagaaggaagggcaacgggtccaatccagccggaggtacaaacgtttggggcaaaattaacagtgaagcaaaaggaacaggggcaaggggtccttatggtggcggcggtgcgctcggtgaagcggccagcggtgcggaggaccttgtacagctcaccacgggccgcgtattcgaggacgaggacgacgcgctcttcgtcgtggaaccaggcgaagaggcggagcacgttgggg

SEQ ID NO: 12795 - DNA, 1449 bp, Setaria italica
  Peptide Sequence Number=SeqID_78769
actaataccgtcagtgctgttcagaacacaaaatactgcaatattcgacaatgaataagtaagattgcccacaggcaaaaccacatccatccgcacgaaccatcaatgctccaatttacaaaggtttcacagctcacttcaaaagggaaacacactagcgctgcatccaattccatcctcaatcggcaacagagtacagactcctcccgcttgtaggagcaagcctgcaggcacacaaccactccagaactaacagaactacaaacatccacagtgccctcatatttgagctccaaaagcgacgagttcggcacaccacatcagttaacttacatgtgaagtttctgggccactggcaaacaagtcgttcgccaaaataggccgattttcagatgagaacaggcttaactcttcataggtctttttgcttaatgcaactccctgaaggttctgcattctttttgatccatggatgcttcattatgtcttcaagagaaagcctcttgcttgaatccttcactagaagcttctgaaggtatcagcctgtttatcagcttcaaaaggaggtgagccatataagaactcatagcacaggattcctaaagtccagttgtcaacagcatgatcgtgagcttttttatctatcatctctggtgccagataatcaattgtgccacatagtgtgtgtcgtttagcatttgatcgagctgcccatccaaaatctgcaattttaagccggccctcgatatcaagtagcagattctctggtttgatatccctatgaatgacctgcttcctgtgacagtgcgccagtgcaccagcaaggcttgcggcgttgagccgtcagaatgcaaaattaacagtgaagcaaaaggaacaggggcaaggggtccttatggtggcggcggtgcgctcggtgaagcggccagcggtgcggaggaccttgtacagctcaccacgggccgcgtattcgaggacgaggacgacgcgctcttcgtcgtggaaccaggcgaagaggcggagcacgttggggtgatcgagccctttctggatttcaatctcccgccgcaggtgcgagtggaactggtacccagcttcgccttgtacgtcaccttgagcgccaccacgtacccgctcttcttctcgcgggcgaaacttgccctcgcggcctcgccgatgtacctgccgatctcgaagtcggacatgctccactccttacgcgccgccatcgtgcgcgggagtggccgccgtgggagggagacgaggtgaggaaggccgcggcgagttgcgtcgccgtcgagtcgtcgagttggaggaagtgttatggtctcgctttgctcaaccgcaacccaagggatacaatcagaagaactggaggaagaacatgcgagcgagaggtagaagggggaaaacagacgaacaagaatgagcgagtggtaaatgttcggt

SEQ ID NO: 12796 - DNA, 492 bp, Setaria italica
  Peptide Sequence Number=SeqID_78770
ccaaccacacggtactgaaacgactgatgtgtgagttttcagggaacaagtaggcctgctcactaccatgtcctctgggatgagaataatttcacagcagacgaaatgcagacattgacaaacaacctttgctacacgtaaggcacttgtgctatatgctatttttgacccatgcactatgaaactttgtcttttgagatttttcttagcttaatgtgcgtattgatgcagttacgcaaggtgcacacgctctgtttctgtaggtatgttcttctgtgctttacaaactttttccagttcctcaattttaaatattgactctttggcatgctcaagcctgttcagaaaacaaatctgactggtgttctatcttttgcttcttaacagtccgcctgcatactacgcccacctggcagcattccgggctcgtttctacatggaaccagagatgtcagagaaccagacgtcaaagagctccaacggcatgaatgg

SEQ ID NO: 12797 - DNA, 1881 bp, Setaria italica
  Peptide Sequence Number=SeqID_78771
ggatctgcttgtggccctaccgtactatactctgtaatttcattgcttgatggtaatgaaatttgggcgaggcccttagtggaatgtttgtgcaaatgttggcagccacctctagcttgtagatttgaacagtcaaatattgctgatgactaatatttccatcattccatgtgaatattctttaattacattagagtgcaggttagcgattgtagctattgttagggcgaccacaatgtgtggagaaagtagtccatagcgattataatattccatccagtaacattgtgcaagtagtccataggaaggagatcgcaaaaatcacccatagcactaggggcaggcatagccatttaaaaattatttctgtacagattcagccaactagaagcggagatagatgatatttttctactgtgatgggactcttctctttcacaccattgtggctctttccataactaaagactaactgctatggaccccactcctatggactggtttgccaaatacattggagtcgcccttagtgcttctttatgtttcaactaaattatccatttccttgcagaaactaaattatgcatatgttaagtccattaaatttctctttcagggatggcgttagtgaaggtcagttctatcaagttctcctttacgagttagatgctatccgtaaggttggatacactttagaaccaaattaccagcctcctgtaacattcgtggtcgttcaaaaacgccaccatacaagactatttgcaaacaatcacaaagacagaagcagcatggacaagagtggaaatatttttgcctgggactgtcgttgattctaagatatgccatccaacagagttttgatttctacctctgtagtcatgctggaattcaggtaagaatatctgattgtcccttggaatcctgacatatcatttcagttggaatattctaccgtactgaagttgtcatttgtgatgaaatagtatcgaaaagacctgtcatatgctctattccacaggctatcactacacctagctacctagtgaaggccacatgctaaaagaataacaaactgatcctatggtcaactatgatacttcgtacttggatcagtagcatgggaatatatagtcaggattctccacacggtactgaaacgactgatgtgtgagttttcagggaacaagtaggcctgctcactaccatgtcctctgggatgagaataatttcacagcagacgaaatgcagacattgacaaacaacctttgctacacgtaaggcacttgtgctatatgctatttttgacccatgcactatgaaactttgtcttttgagatttttcttagcttaatgtgcgtattgatgcagttacgcaaggtgcacacgctctgtttctgtagtcccgcctgcatactacgcccacctggcagcattccgggctcgtttctacatggaaccagagatgtcagagaaccagacgtcaaagagactaccaaacggacaatgaaatggagcctcggtgaagcccctgcccgccgtgaaggagaaggtgaagagggtgatgttctactgctgacaaagaaaccacttaaccactcacatgctgtagctaacttggtagagtttagtagagtttagattagattagctttctccgggaatggaagagaagagcatttggatcctgaacaaccaatctgttgactgcttctgtaaagtactctgaacgcctgtataatagttcttggatcagatggcatccaatctgatgaagtacactaagaatctaagatggtgtacatacctgctgatatttatctagtcagatttctttggcagcagacagcactgcttaagatccgtgtatatgatctcccacca

SEQ ID NO: 12798 - DNA, 972 bp, Setaria italica
  Peptide Sequence Number=SeqID_78772
tttaggtaattagtacgtaacttgggtgcgataagttggaggattcctttggtcagtgacataccaacaattatatttggtgcagatgtaacacatccagaaactggggaggactcaagtccatcaattgctgcagttgttgcatctcaagactggccagaagttacaaagtatgctggattggtttgtgctcaggcacatcggcaagagcttattcaagacctttacaagacatggcatgatcctcagagaggcaccgtaacaggcggcatgatcagggagctcttaatatcattcaggaaagccactgggcagaaaccattgagaataattttctacagggatggcgttagtgaaggtcagttctatcaagttctcctttacgagttagatgctatccgtaaggcgtgtgcatccctagaaccaaattaccagcctcctgtaacattcgtggtcgttcaaaaacgccaccatacaagactatttgcaaacaatcacaaagacagaagcagcatggacaagagtggaaatattttgcctgggactgtcgttgattctaagatatgccatccaacagagtttgatttctacctctgtagtcatgctggaattcagggaacaagtaggcctgctcactaccatgtcctctgggatgagaataatttcacagcagacgaaatgcagacattgacaaacaacctttgctacacttacgcaaggtgcacacgctctgtttctgtagtcccgcctgcatactacgcccacctggcagcattccgggctcgtttctacatggaaccagagatgtcagagaaccagacgtcaaagagctccaacggcatgaatggagcctcggtgaagcccctgcccgccgtgaaggagaaggtgaagagggtgatgttctactgctgacactaaagtaaacctactttaacctacttctacttatttgttctttgtttagttctttaa

SEQ ID NO: 12799 - DNA, 1900 bp, Setaria italica
  Peptide Sequence Number=SeqID_78773
tcggaatgcgcctcccggcctacgacggccgcaagaacctctacaccgccgggaccctcccgttcgacgcgcgcgagttcgtcgtgcgcctcaccgacgaggacgacggcaccggcgtcccacctcgggagagggagttcagggttgccatcaagttcgccgcgcgcgccgacctccaccacctccggcagttcatcgccgggcggcaggcggacgccccgcaggaggccctgcaggtcctcgacatcgtgctccgggagctcgccaaccagaagtacgtctccatagggcggtccttctactcgccggatatcaggaagccgcagcgactcggcgatggcctccagtcctggtgtgggttctaccagagcatccggccgacccagatgggattgtcgcttaacatcgacatgtcgtccacggcgtttatcgagccgcttccggtgatcgagttcgtggcccagatattagggaaggatgtcatatcgaggccattgtccgatgctaaccgaatcaagatcaagaaggcactgcgaggcgtaaaagttgaggtcactcaccgaggaaatgtaaggcggaagtatcgcatttctgggctaacaacgcaaccaactcacgaactgattttcccaattgatgatcaaatgaatatgaaatccgtagtggagtacttcaaggaaatgtatgggttcactattcagcatcgtcaccttccctgccttcaggttggaaaccaaaagaaggcaaactatcttccgatggaggcctgcaagattgttgagggtcagagatacacgaagaggctgaatgaaaaacagatcacatcattgctgaaggttacgtgccaaaggcctagagaacaagagatggatattctacagacagttcagcaaaatggatatgagcaagatccatatgcaaaggaatttggcatcaacataagcgagaagctaacctccgttgaagctcgagtccttcctgcaccttggctgaaatatcatgatactggaaaagagaaagagtgcttgccacaggttggtcaatggaacatggtaaacaagaaagtgatcaatggatgcaaggtgagccactgggcttgtataaacttttcaaggagtgttccagaagctactgctcggggattttgccaggaattgtcacaaatgtgccagatttcgggcatggaatttaacagtgagcctgtgataccaatatattcagctagaccggatcaagtggtaaaggcacttaaacatgtgtataatattgcattgaacaaactcaagggtaaagaacttgagcttcttttggtgatccttcctgacaacaatggtccattgtatggtgacatcaaacgtatttgtgaaactgatttgggattgatatcgcaatgttgcttaacgaagcatgtttttaagatcagcaagcagtacttggcaaatgtctccctgaaaattaatgttaagatgggaggaagaaacactgtgctcttggatgcgataagttggaggattcctttggtcagtgacataccaacaattatatttggtgcagatgtaacacatccagaaactggggaggactcaagtccatcaattgctgcagttgttgcatctcaagactggccagaagttacaaagtatgctggattggtttgtgctcaggcacatcggcaagagcttattcaagacctttacaagacatggcatgatcctcagagaggcaccgtaacaggcggcatgatcagggagctcttaatatcattcaggaaagccactgggcgcaagaataacaacgaaagaaggactagaaatagcaagaatacacattagtattaccttactaagtaagtaaggtaacttaaaccgttaaaacttaaaggttaacggttaaacttaaa

SEQ ID NO: 12800 - DNA, 2662 bp, Setaria italica
  misc_feature (2621)..(2662): n is a, c, g, or t
  Peptide Sequence Number=SeqID_78774
aattccccaaaatcgggctctctctccctggcccgggccccctcttccccttccctctcctcagtccctatccgctgctcctaacagcagaggccgcggcacggaggcgcgctctccccggcggtagagttggagctgcaggggggaagaagcgagctggagctggcaagaatgatgggcgccaggatcgacgccgccgactgcccggagtacgcggaggtcgaccccaccggacggtacggacggttcaccgatgttcttggcaagggcgcgtcgaagactgtgtacagggcgttcgacgagtaccaggggatggaggtggcgtggaaccaggtgaagctgcacgacttcctgcagagccccgaggacctggagcggctctactgcgagatccacctcctcaagacgctcaagcaccgcaacatcatgaagttctacacctcctgggtcgacgtctcccgccgcaacatcaacttcatcaccgagatgttcacctccggcaccctccgccagtacaggcagagacacaagagggtgaacatatgggcggtgaagcactggtgccggcagatcctcagcggcctgctgtacctgcacagccacaatccgcccatcatccaccgggacctcaagtgtgacaacatcttcgtgaacggcaaccagggcgaggtcaagatcggcgaccttggcctggccgccatcctccggaagtcccatgccgtccactgcgttggcacgccggagttcatggcaccggaggtgtacgaggaggagtacaacgagctggtggatatttactcatttgggatgtgcgtgcttgaaatggtcacgtttgaatatccatacagcgagtgcacacacccagtgcagatctacaagaaagtgatctctggtactaagccagaagcgttgtacaagttgaaagatccaatggtgaggcggtttgttgagaagtgcctggcgtcggcatctcagagactctcagcgagagagctgcttgaggaccccttcctccgcattgatgacatggctttttcttcagaggatggggattataatgtcacaaccagatatattcggcagccttcatccttagggcatacctatagcaatggctcaatgatgagtaatggattctcagacagcattgatgaagacgctctgactgaagatagatgggactgcgaggatgatgacatgaaaggccaagatggcatcgacctcttcaacgagcacgaagatgagcctcttggcaatgtggatatcacaatcaaagggagaaagagcgaagatggaggcatcttcctcagactacgaatcgctgataatgatgggcgggtgcgcaacatctattttccttttgatgttgaggctgacacggcactaagcgtcgcaacagaaatggtagccgagctggatataattgaccatgaagttactcgaatagctgacatgattgatggcgaggtcagtgcattggtgccagattggaggcctggtccgggcatagaggaagctcctgatacttcatactgccataattgtggatccaacgtgtcatcgtgtggttcactttatgcctacatgtcatcagcccgtcgaggttgtcaatgtgcggagctacatggacggtttgaggagatcacgttccaagccgacggagagcagtgtgatttgcaagaatctgcaggaagctctgatgatggaggtggccagacagagcattacgtcaaaagcaaggattccactcacacgaatggcttcgtgcagatgggtagaagaaatcattctaatcagctttgctttagttctttccaagagcagtcatgctcatccaatcattatgagaatgacactaaccctcacatgaatgggttcgacatgaagcatgaggtaaagattgccaagtacaaagcacggaaaatggcacagttgaagagggctatccatccatctcttgatttcgacaatgcatatggagtaagtaggatgaagccttcactgaacaagctgcaatctttccatgtcggaaagaaccacaattttcgtgtaccgacatgtgaccgaagcccggataaaggaagcagcgattatcattctaacatgatcaaacaagcgtggcagagcaagcaccccgatccgggagcccagagggcccggcattgtgaggtcgacactgctgggagcaatccggactgtacatttacagccaggcgctactataccggggctcagctgccaccaaatcttccaaggaccagatctgtacccctgaatgccgtcgacgcctgaaatgctttcttgccctgtaaattttatagagtgtacatttgttttggttctttttgtgtccattatgaaatatagttgttgggcaagagactgaatgtgactgggggttgtctgtagattaaggctgagctttgtctaaatttttcatcatgtgaatgcagaggccagagaggtggttaggctgtacaagtgcaatctgcatcatttacccccactgggatatcctgttttatcctcaatataggcaacccctcctgtttcattaaactttttttgctcttaatattaatatataaccagtagggggaaacccctcctgtttcataacnnnnnnnnnnnnnnnnnnnnnnnnnnnnnnnnnnnnnnnnnn

SEQ ID NO: 12801 - DNA, 1234 bp, Setaria italica
  Peptide Sequence Number=SeqID_78775
ttttttaagagaattccaaactatattctttatttgactttgatccaatacagtaaatttacaacagtatgataggaatgatgaaaacttcctaccttgatttatattgactgaatttcatcttgtgtgagaacaatagactaagtttgtgtacgtaacaatcagactacactcttctgtacagtagcaagggtgcactcagttgcaacctgaagacaatacccagagtttggtcatttgcaaacaaaactcaaaatgcttcatgtacactatgctcgagctccagaccctacaactcctgtttgcttcatccagaaagaccacttaacagcttctaagaaattttcattcctttgtagagcagcaatgaggttagtatatgtcacgcgatcagggctgatacctttaatcctcatctcttgcatcagtttgacagcatcttcaggcattcttgctatcccatatgcttttatcaaggtattgtaactgtacaaatctggttcaacacctcggctctttagctctgcaagaacattcgccacatcttcgatccaacctctcctcccataaatattgatcattatattgtaagtgtagtgatcaaacttgcactttgctctcttcattttctgcaaaacagcagcaaactcttccagttgccctgcctttccataagcatccagcatgcaattgtacgcctcaagagaaacaggaaaccctgcatcctgcatcttttggatgaaataattcatactacgaaaatttccacttttcgcatatgcagcaataatggtattgtatgttatgatatccaccagtccctgcttgcgagccatgagaaataccttttcagccctagtaaaaagtccagcttttccatatatatctagcaacacattgagggtaacagtgttggttaagtgtccctgttgaatcatttcatcaaaaattcttgacagctcatcaacaggtatggcccgcccacaacagttaataatgcaattatacatgacttcatcacattcaacttgactctttagtatccaataatatgtatcagccaacttctcaagcagaccacattttggtaagttcgaagcatgtcaaggaaaaggtatttatcaggaactatttcattttgtttctccatttctgccaaaactgaacaagcatcctctagtcgctctgctttaatgtacatcctcacaatgacactgtacgcaatcatgtcaag

SEQ ID NO: 12802 - DNA, 275 bp, Setaria italica
  Peptide Sequence Number=SeqID_78776
ctgttcagttattccatcttcaacctgataactctgtagtatttaactctggctaggtaggaattgtgggctgaacatttccatataatttttgtgttctgcagttaacctatcgttatttctttccttccggtagaatgttgttggaccaatacaaatatgtaatgtagaatacatcatggcgtgtattcttccttaatataacttttagaattcatctacataccatttgcttaggtactggtggtattgctctttcccttatttccccctaa

SEQ ID NO: 12803 - DNA, 370 bp, Setaria italica
  Peptide Sequence Number=SeqID_78777
atggaatgatggtacttgagttggttggggcaagggacaaaatatcaatgcagatagcgaatctagtagccaatatttccctcagtggatttatgagcatgtggatgaatactgcatcagtgcttctgagattaatggtgagaccacagagcttgtgagaaagatgatagtggtaggtttgtggtgtatacaagtgatcccaatgatcggccaacaatgactagagtcgtggagatgctagaaggcagcacaagtaacctggaattgccaccaaaagtgctcttgagttgataaggatccatatgttcctaataaaatgttgctaactgataccagatttcacacctgcaaaatatttgctgtatattag

SEQ ID NO: 12804 - DNA, 444 bp, Setaria italica
  Peptide Sequence Number=SeqID_78778
ccggaggggcggaggccgatgatcgggcacgagttgctcatcggcgggtggacgcgggacgggccgtcccggcgcgtgatcggccccgacgacgccttcgccctcgccgaccgcgggtgcagcagcttcgacagccgggtctggacgctgtccgtggtagccgacggcagcggcggcgggagcccgggcacgaacgggccgaagatggagcagatgcggacgaacacggcgcaggcagcgcgcgccatgagaccgacggccttctcgtagctctggttccagagggactcctccttgaggcgcttcaccttgagccgctgcatcttgagctcctgccggagcgactccgcctcgggcgagtccccggcctgctgctgctgcgccgctgctgccgccgccgccgccgccgctgcctgtggttctgcgggatccggcccgctggac

SEQ ID NO: 12805 - DNA, 592 bp, Setaria italica
  Peptide Sequence Number=SeqID_78779
gtcaaccatgtttctgaaacaccaagattggaccacattcatatgtaatcagcattaacataagagcatgtaacagaacaaacagtggttgaaaagataaactttaatagagagaaaataaacttgagaagtcgatcaacagcatcagagaatccctgaagaactgatgctaaaataagctcattctcctcttctcctccagtaacaaaaaagtgcaggtcttggatgaacttgtacaccacaatttgaccgtcaaacattacaatctcagcttccgttccagcgttagctttctgggttttcgcgaagaccgacttctcgaaggccaacttcgccgagagcgtgggccagtcatcgctgtagtacttcacggcaacgcgcttcccctcggagtccagcaataggatgttcttcaccgacgggcaggtatcctgcaccaacaaaggttcaaccatattaggctattaccgtcgacgaccaacaaatcgaggccaccaccatccgaagccgcagatcccatcatgcttgcagcaaagagaaagaagactaatccaatccggtgacacgagagaggggagaacgaggtagcacg

SEQ ID NO: 12806 - DNA, 1274 bp, Setaria italica
  Peptide Sequence Number=SeqID_78780
ttttttttttttttttttttttttttttttttggtaagaatcatgttacacaacttcgaaggcttccaaaactgaacagctagagaatgttggaagtaacttgacattttacacatcaatagatttcagtaaattccattctcaaatgctaaaaaatgtattatatcattaaaacatagctataggatgatactccattttggggtgaagatggagtatcatgcatcacatgagaagagacttagccaagtgctctcttgcttgcgttagggcattgactaaagtctgctcagctgatgaagcactctccaatccatgacccgtcaccttttcagctatctctcttccttctgtttcaagtacaatccctccatcaacaatttcatcgaggcataataggatcaggtccagattctcgagtgctgttcttttgtcaaccatgtttctgaaaccaccaagattgggaccacattcatatgtaatcagcattaacataagagcatgtaacagaacaaacagtggttgaaaagataaactttaatagagagaaaataacttgagaagtcgatcaacagcatcagagaatccctgaagaactgatgctaaaataagctcattctcctcttctcctccagtaacaaaaaagtgcaggtcttggatgaacttgtacaccacaatttgaccgtcaaacattacaatctcagctgttaaagagaaacaaataaaatatgacatacttgaataaacagacaagcaatttcagacagctgaatttacatgtttaaggagaaattaagtccagcgagatgtttcaaccaagctcatttttcagattggtggtgtgagtaggatgtagtacaatcagcatttcaagtttcaacagaggttaaaagaggataacaagagagggcatgaaaaatatatagatgatttgtaatttggtacataagccgtgtgaaagaagcaaatcaataatattacgggaataaaatggcatggccaccacaaattaacaagttcctgagcaaaagaataagaaaacaagaatagtgttaacattgaagaattggctctaccactcttcaggatatataacacatccccaagaatgcagaaagtcatattccattggagtcattaactgcgtatagcaattgtcaatcaatcaatgatatatatataggatagagtagaacaattacatatatcagattcataagctcattatcagacgcacccgtgacacaataacccctgtcatcattagtataaaa

SEQ ID NO: 12807 - DNA, 922 bp, Setaria italica
  Peptide Sequence Number=SeqID_78781
ttttttttttaaactttatttgaccaggaactgaaccaaccataattggaagaatcatgttacacaacttcgaaggcttccaaaactgaacagctagagaatgttggaagtaacttgacattttacacatcaatagatttcagtaaattccattctcaaatgctaaaaaaatgtattatatcattaaaacatagctataggatgatactccatcttcaccccaaaatggaaagcacagcatcacatgagaagagacttagccaagtgctctcttgcttgcgttagggcattgactaaagtctgctcagctgatgaagcactctccaatccatgacccgtcaccttttcagctatctctcttccttctgtttcaagtacaatccctccatcaacaatttcatcgaggcataataggatcaggtccagattctcgagtgctgttcttttgtcaaccatgtttttgagaagtcgatcaacagcatcagagaatccctgaagaactgatgctaaaataagctcattctcctcttctcctccagtaacaaaaaagtgcaggtcttggatgaacttgtacaccacaatttgaccgtcaaacattacaatctcagcttccgttccagcgttagctttctgggttttcgcgaagaccgacttctcgaaggccaacttcgccgagagcgtgggccagtcatcgctgtagtacttcacggcaacgcgcttcccctcggagtccagcaataggatgttcttcaccgacgggcaggtctccatcgcgagaggcggacgggttcgccggtggggtgggtgggaggagagggcgacggtggtcggggtagccggcggtagcacagcgctaaacggggtgggcgacgccgtgcggacgacccgtaagaaacggaaaacgaaaactaaagaaaagaaa

SEQ ID NO: 12808 - DNA, 545 bp, Setaria italica
  Peptide Sequence Number=SeqID_78782
aggtgagggcagttcgagcagggatcctggtgccacttatgcggatgctgcaggattcatccagaagtggggctattgatgaagcgctgaccatcctgtcagttcttgtgagccatcatgagtgtaaaactgctatatctaaggcgcacgccataccctttttgatagatttgctacggtcgggccaggcccgcaacaaggagaatgctgctgctattttacttgcactttgcaagaaagatgctgagaacctggcctgtatagggaggcttggtgctcagataccactaactgagctggcgaagaccggcacagaccgagctaagcgcaaggcaacctcactcctggagcatctcagtaagttacaggtgctctagttccactgcccaccgcataccgttttgtgggtgtgcgtgtgtttttcaacttttttcacgtgtatgtatacatacaggaaaattgtaacttcatctgccatcgagtgtgaatttagtgggttggtgattagtttgtttcagtcacagtaacaaaaaaaaaaaaaaaaa

SEQ ID NO: 12809 - DNA, 1441 bp, Setaria italica
  Peptide Sequence Number=SeqID_78783
tgatctccagttcaagtatgtcacctggcaattgcaagttgctctagcaaatctgccacatagctgttttcggatatcggatgaagttcaagaagaggttgacttagtgcgagctcagcttagaagagaaatggaaaagaagggagcccttgatgtaaacgtgtttacaaaagttcatgatatcttaactcaaattgacaatgctggatcacaatctcagcaaccccatcaacaaccagagcaatcacagatggagaaatttagtaaagatcacctggagttgcaaaacactgttttactagtttcagaaataagcgggttatccaaatctgacatgacgaaaataacgtccgagctgattgaaggacttgaaaatgttggaactcctgattctcccaaacctgccaatgttgatagtcaatcaagtgatgaaacgaaaagctcatctgaggaagttaagaagcctgactccgtagctattcctgaggatttccgttgcccgatatctctcgagctgatgagagatccggtcattgtttccacaggacagacttatgagcgtgctttcatccagaggtggattgactgtggaaaccggacctgccctaaaactcaacagaagctccagaatcttacattaaccccaaactatgtgctaagaagtttaataatgcagtggtgtgaggaaaaggggatcgaaccacctagcagatctaaaagtgatggctcttctcttgaggttggtgggaacagattagcaattgaagcattggttcgcaatctctctagcagctcgttagatgaacggaaatctgctgccgctgagataagatctttggccaagaaaagtacagacaaccgtataattctagcagagtctagtgctatcccagctctagtgaaacttctgtcgtcaaaagaccagaaaacccaagaacatgccgtgacagctcttctaaatctctccatatatgatcagaacaaggaactgatagtggttgctggtgccattgtcccaatcatacaagtgcttaggacaagtagcatggaagcaagagaaaatgcagctgcagctattttcagcctgtcactaatcgacgataacaagataatgataggaagcaccccaggggcaattgaagcattggttgagttgttgcagagtggtagctcaaggggtaaaaaggatgcagcaacggcactcttcaatctatgcatataccaagctaacaaggtgagggcagttcgagcagggatcctggtgccacttatgcggatgctgcaggattcatccagaagtggggctattgatgaagcgctgaccatcctgtcagttcttgtgagccatcatgagtgtaaaactgctatatctaaggcgcgtctacgtcccttttttgtattagtattttgtctttacggtttcgggttccttaggttcctt

SEQ ID NO: 12810 - DNA, 2009 bp, Setaria italica
  Peptide Sequence Number=SeqID_78784
ctcccttgttcctgacttataaccatttgcagtttctttaccttttgtctctttgttattgtgattgtcaaagccattttcttgtgagatagatgggaagctcaaatcatttgaaatataaagctctagaagggtgttatgaatttctgtttgcgcaggcgagtccttgactgctttgatataattttccagaaattccatcagatattgtgggctgtgcacaaatatattcacgaaatccatgggcgacggtatcataagcaagtgcatgctgtttgaacctcttcttgtcgtaggatctccaacatctgtgcagagccttaacagtatttcaactgtttcagcaggtctatgttccacaagaattttcccatattcttttacagtaagacctgcttgatttgcctcaaggctagatatatattgcagtgcctcatcatatctacccagatcctcaagtaaaatcttcaagtacaactcatgcctcccagccttttttgccacaaacatagcatgttcatgatatccagcagcacggcatactcttatggcagtttccacatcaaacttgatttcacctatcccatcttcatctttgatgaaatcgttaagtttctccacatctttcaatttggtatagcagttcaacagaagggtggtgtggtctttggatgctaaccctctatcatgtaacttctctaaataatttgtcaagttgtagatgcgctttgcatcaaggaacttctgtataacatatgatggttcaagatgaccaatagtgtggatatactgggacatagcctcatcatattcctgtttcccatacagatggtcaccatacttccgcagcacctcagcagttgaagcaggatctgcctgctgactttgtacaagattgattgcaactgtataaagatttttcttgaacaacatatcaagcttactttccatgtctttttctccaatgcacagaatttttttgtcagccataataagaataatataaccccactcacagaccaagtgcgaaacatcccccacaggcatgctatgcgcaataagccgattcttaagatcataaacattaagggtacccttctgagtcctctgatcttcaataatgcaaagtaaataacctcgaaaccaacctacaaacttcttctcaccatcaaatgcccagcaaggacccctaccatcgacttcatagaaatacacagcttcaggtctaccaataatcagatccattcggtcactcattgccacagcattggtctggcaaccaatctgatcaagtgtttgcctccttggtggttgaacatgcaagctgaacaaggatacagagctaggagttacagcaaaaagctgatgtgcttgcccctcaactcggaaaccaagaccagtgataggcaaactagtgctgccatcagcctcaacctgcaacttgaagcgtgtaatacgctcacgtgcgatgtctcctttgatgcaataaatgaaaccattgtccagtccaatggcaatcaacagtataggtggtgcttcttctagaaccataaacgatgtaatctttgcttgaggaaactggtcagtgaagacacgcagaatttgaacacagaaaggagctgttgtacttgatccctcttcttgtactttatcaaggtcgaaaaccttgagacatattgccgatgattgcgaagatgactgatcatcatctccaaccgtgacaagaacatttttttgcttgagctgctggaggaagaggacggaggaggcgtgggcctggaagccgtaggagagtcggaacccgcggtcgaggaggcccacggtgccgtcgtcgcaccccaccgcgacgcggccgcggccgcccgaggagcaggtgacgcggcgtgcgatctcggccggcacggcgacggacgacgacccccgccgccgcggctgaccgccttctcctcgaagaactcgaacttgcgccactggtacatgccgggccgacacgaggcgggcggatcggg

SEQ ID NO: 12811 - DNA, 758 bp, Setaria italica
  misc_feature (199)..(199): n is a, c, g, or t
  Peptide Sequence Number=SeqID_78785
ccctaggatgtccagcacctcgccgtcggggctgtacttgatgatcaccgcgtggagcctgccgccgatctgactcaggtaatggtacttggcggggatcgggaggctcagcaagaacttcctcagcttgacatggcggctcatgagccgggcgtacaggctgcgccggcagtggatcgccacccagaactcgcccttntccgttggtcccgcacattgtctgggaatccaggcaagatggcgaagagatccacggtgcctgccttctcgcctttcaacccagtaatctgctcaacctgtctccacaagttcaccttggctacgatagtggatgacagttgaagatgcagaccaaacaggtgtaaggtctatcactaaccaaccaacacagtgagatgaaaatgaaacaggcaaacagcagctaagcaaagcagaggaggggagaggggcatggcatcacagaccgtctctggtagtggatgctggagtcggtgaagtagacgttgccctcgtcgtcgaggtcgaggtcgttggtgaagttcaagcgcacgccctcagcctccgtggccagcggcgtggcgagcccgccctcgggcccgaccttgagcaagccgaagtatgcgtcggcgatgtagaggtccccggtcctcttgtcgaagcggagcccgagcgggcggccgcagatgtgctcgttggggaggtactcgagcggcgacgccctgggcccgccgcagagctcctgcgtccagcgcggggac

SEQ ID NO: 12812 - DNA, 1262 bp, Setaria italica
  misc_feature (1)..(20): n is a, c, g, or t
  misc_feature (51)..(51): n is a, c, g, or t
  Peptide Sequence Number=SeqID_78786
nnnnnnnnnnnnnnnnnnnnctagtctcttttttagtttttttgttttttnttttttttttaaaacttatatatacgcatgcattaccaaatacaaattggaacagatcgaagattcgaagccaggaacacacgtgacaaatctggattcataaaacacgagctgttcatcattcctaaaagttcgagggggaatctaaaacgtcagcaacttacattgctagtactaaaaaagggcaggggagtcaaacagctccagtttgctgtagcaccaaattattgggatcgatggaatacgaccggggcggctaagacgccttggtgaggtcaaagacggcgatgaacggcatcaggacggaccctatccagagcttcccatccttctcctccacctcgctgacggctctcaccacctcccccttggtgtcctccaggatgtccagcacctcgccgtcgggggctgtacttgatgatcaccgcgtggagcctgccgccgatctgactcaggtaatggtacttggcggggatcgggaggctcagcaagaacttcctcagcttgacatggcggctcatgagccgggcgtacaggctgcgccggcagtggatcgccacccagaactcgcccttctcgttggtccgcacattgtctgggaatccaggcaagatggcgaagagatccacggtgcctgccttctcgcctttcaaccagtatctgctcaacctgccgcgcgatccttcgcagaagacaaagaatgagccatccttgctcatggacacaccattgggaaattggaggttgcggtgcagtactgtcgtttcctttgtctgcgggttgtatttcaaaagcctcccagagggatctccagagaaaaccaactgcatgaaattccgtctctggtagtggatgctggagtcggtgaagtagacgttgccctcgtcgtcgaggtcgaggtcgttggtgaagttcaagcgcacgccctcagcctccgtggccagcggcgtggcgagcccgccctcgggcccgaccttgagcaagccgaagtatgcgtcggcgatgtagaggtccccggtcctcttgtcgaagcggagcccgagcgggcggccgcagatgtgctcgttggggaggtactcgagcggcgacgccctgggcccgccgcagagctcctgcgtccagcgcggggacgccgtggcgaagtgcgcccaccgctcgccgtcccagaagacgacccgcccgtcggcgacgcccgtgtacggcccgcggcc

SEQ ID NO: 12813 - DNA, 1042 bp, Setaria italica
  Peptide Sequence Number=SeqID_78787
tactccatcactccattcccttgctcctgttgttgttgttcttgctttccccattagtaggcctcttgcaatcttgagcttttttcttgtcaggacatcttggtggtggtggagctgcagaaatgggcactccttaccacctccaatcaccaagaaccatcctgtctaagctggtcaacatgaggcagctaccaccggggcttccaccaccaccgccgccggagcctccatccaagacgatccggcagccagaggtgctgccacagcggctaccggcagctccttcgaagataattcttcagccgcgtgaccggacctcgccggcgatgtggtttgcggccatcgtctgcttcgccttcagcatcatcctgatcgtggctggcatggtcatcttgatcgtcttcctggcggtcaagccgagggcgccctccttcgacaccgccaacgccagcctcaacagcgtctacatcgactcgccagcctacttcaatggcgacatgacgctcgtggccaacttctccaaccccaaccagaagatcgacgtcatattccggtctgccaccgtggagctcttcttccgggacaggcccatggccgtgcaggtgctgccgccgttcgcacagcgccggggccagtcccaggtcctgaacttgcacatggtgtccagccgtgtgctgctgccgccggaggtggccatggagcttgtgaaccaggtgaggagcaacagggtcgtgtacactatcagaggcgccttcaaggtggaggctagagtttggttcagccactactcatactggatgaacacaatctgtgagctggagctcacagctcctcctactggagttcttgttgccaggagatgcagaacaaagtgactggcttttgaaatccacccctcccgttctattgctgtatcacatcttagatctttttctttttgtatactgaaattgggcagagtaaagtaaatatactcatgattgatgcgaatttgatgttggttcttcatctctgttgacctcttgctggttcagttgctgct

SEQ ID NO: 12814 - DNA, 548 bp, Setaria italica
  Peptide Sequence Number=SeqID_78788
aatttccgtgcacttgtatattcaacgtcaattccttcgagttcttttgcatgttctgggttgtcataatattcaggatcaaagaagtatgatacagcaatcaccatttcttgtacaccatctttgtcgatatctgcaattactggggtggacaagatgtgggcatctatgctcacataattttccgctttctcatgttctagctctttccagtcctcatcaccccacatggattcatcaacatagtcatcataatcataattgtactcatcaggtagatcttctggatcacgaaataagtcaaatgatgcatcaccatcttcctctagagattcattattttcaacagtgtctgccccagaatcactttcatgagtttttgagcttcctgttttgtcatcacttttatcatctgtttgaagaaggcgtctctgagcatgtgatatattctctgctgcagtagtaacactagagatgttcccagaatgagtgttgtttacattgttcaacaactctgcattctctatagtatagactgagtcggagac

SEQ ID NO: 12815 - DNA, 1113 bp, Setaria italica
  misc_feature (789)..(789): n is a, c, g, or t
  Peptide Sequence Number=SeqID_78789
aatccatgtggggtgatgaggactggaaagagctagaacatgagaaagcggaaaattataattgtactcatcaggtagatcttctggatcacgaaataagtcaaatgatgcatcagcatcttcctctagagattcattattttcaacagtgtctgccccagaatcactttcatgagtttttgagcttcctgttttgtcatcacttttatcatctgtttgaagaaggcgtctctgagcatgtgatatattctctgctgcagtagtaacactagagatgttcccagaatgagtgttgtttacattgttcaacaactctgcattctcttgggcttgggtagaattaggttttgtttcaactgagtgttgctcagatgcaattttcagggcctcacctccctgcatacttcctgatttattttgatctattggaggagattccttagaagcagcctctttggcaattgaactgtcatgaacatctggattggagcggtcaactggatctggatttagcccaacataccaatctttatgtactttcctacgaggtacctcaagcttgtccatcatcacataacctgatactctaaagaaatttaccacaccattgtaagttgccaaagctatttcccgtacaccatccttgtcaatgtcataaagaagaggacttgaatgagcatttgactgatgaaatgcaggccatcctggcattttgtcaccatcagtgccttcaagaacttctaggtaatgaacaaatgatggcaccactacttccaattttccatcacngttgatatcagcgatcaagggagttgcataaatgctggaactaacttcagtctgccatctcagctccacatgtttcggacatttgctcttcaataaagcatcttcatctaggtgcgggtagccgagcatgtcatcgctggcctcgcgctgccggaacttgttggtggagttcttcgcctcctccgccgtggcgccggtgacgcccgcgccggcggcaacgaggagggcgcaggcggcggcgagggcgaggaggggccgcatctgcggataaacccccagccctccttagggctcacgcggccgcgccggagtgctgggaggtgg

SEQ ID NO: 12816 - DNA, 2127 bp, Setaria italica
  misc_feature (2044)..(2127): n is a, c, g, or t
  Peptide Sequence Number=SeqID_78790
tcagagacgccttcttcaaacagatgataaagtgatgacaaaacaggaagctcaaaaactcatgaaagtgattctggggcagacactgttgaaaataatgaatctctagaggaagatggtgatgcatcatttgacttatttcgtgatccagaagatctacctgatgagtacaattatgattatgatgactatgttgatgaatccatgtggggtgatgaggactggaaagagctagaacatgagaaagcggaaaattatgtgagcatagatgcccacatcttgtccaccccagtaattgcagatatcgacaaagatggtgtacaagaaatggtgattgctgtatcatacttctttgatcctgaatattatgacaacccagaacatgcaaaagaactcgaaggaattgacgttgaaaaatatgttgcaagcagtatagttgtctttaaccttgacacgcggcaagttaaatggactgcagaacttgatttgagcacaaaatctgtaaatttccgtgcacttgtatattcctctccatctgtggttgatttggatggtgatggatatttggacatccttgttggaactggatatggcttgttttatgttatcgatcaccgcggtaaagttaggaacaaattcccccttgagatggctgagatccatgcgccagtcattgctgcggacatcaatgatgatggcaaaatcgagatggttactactgactcccatggaaatgtagctgcatggactgcagatggagaagaaatctgggaagtgcatctaaagagttcaattccacagcgacctaccgttggtgatgtcaatggagatggccacactgatgttgtggtcccaactgtgtcgggaaacatctatgttcttagtggaaaggatggctcaaaaattcaacctttcccatatagagcacatggaagaatcatgagtcctgttctactgctcgacatgagcaaacatggagaaaatacaaaggggttaactcttgctacgacgtcatttgatggttatttatatttgattgagggatcaagtggctgtgcggatgttgttgacattggagaaacctcgtacactatggttttggctgacaatgtggatggcggagatgatcttgatcttattgttaccactatgaatggcaacgtcttctgcttttccactccttcaccacaccatcctctcaaggaatggagatcatcaaaccaaggaaggaacaatgctgcatatcggtacaaccgtgaaggtatttatgttaagcatggctccaggaccttccgtgatgaagagggcaagaatttctggttagagtttgagattgttgacaagtacagggtgccatatgggaatcaagctccttataacgtgacggtaactttacttgttcccgggaactatcagggagataggcgcatcgtggtgagcagcatgtatcatcaaccagggaagcaacggatgatgcttcccaccgttcctgttagaactactggaactgtgcttgtggagatggtcgataaaaatgggctgtatttctctgacgagttctcactcaccttccacatgcattactataagctgctgaaatggcttgtgctactgccaatgcttgggatgtttggtgttctcgtcatcttacggccccaagaaggtgcaccattgccatcattttcacggaatattgactagtgactatgccagggccccattgaagcagatgaagctgctaggagtatccccaacattcgcatgatgggggacttgttgccttgtttacactgtaatatactggggagtttaatctgcacaggaaacctgcaatttattgctccccaacagttaactagttcaaggattgtagtcttacaatagatccattcagttttgcagaagaattttgtacacacttgagccgctttctaactggtgagtcgtgacgcatcagtttggctcatccgaagcctgagcatattgtcacagtactgagacacatatcttgtgctagattgcccgctgaaaaaaaaaaaaaaannnnnnnnnnnnnnnnnnnnnnnnnnnnnnnnnnnnnnnnnnnnnnnnnnnnnnnnnnnnnnnnnnnnnnnnnnnnnnnnnnnn

SEQ ID NO: 12817 - DNA, 643 bp, Setaria italica
  Peptide Sequence Number=SeqID_78791
gatgaaccttaattgcatggttcatccgaacagaataatcttgcaggggatggttcgaatccaatgagttgcttgccgaccttgcaatgtcatcgtctgaattaccaaccaaaacagtgcctgcgtgcatggcacaagaaattcagaggacaccgtgaaaaatcatctaaaccaacctatcctaaaatcaaattcatgcaggcagcaggacgaattattgcttcgccttccctccggtcacattggacaccatctccctgaggaaccgggccgacttggtcacgggcgagttggcggccatgaggttgtacagcatcgtctccacctcgccgatcgtcggccgcttcttcagccgagacacgaccttgaactcctgcccctcgggcgcgccgccgtcattctccaccatgagcacccagctctcgccgccaaaacctcccgccgtcgacgcaccggagcagcagcccctcttcttgctcagcaggccccgcacctccagccccgtgaaggagtacaccacgcttaaaggaacccaacaagagtctcgttccggcgccgaacgcctccccctcctcatcatcgaagctccacgcggggttgaacaggaccaccggcttggggtccaccgcggcggcggcagcct

SEQ ID NO: 12818 - DNA, 959 bp, Setaria italica
  misc_feature (15)..(15): n is a, c, g, or t
  Peptide Sequence Number=SeqID_78792
gatttccaatccagngtttaaagttgacaaggcaacctaaggcaagctgtgtacgccttatagcctaggcggcaaggcgagctggatcgcccggatgcctaggccacacctttgaaacactgttccaatcagcctcaataaataaattgataaagaaaaagtgatgcatgctttgagctatagatcagcaaggatcatgcacaaggcaccgtccgcttccaagattacttcctgaagcccatatcaagtttcataactcccaatattttaacatccccagtacatatgattccataaattataagtaatcttggcctccaccgtaaaattagcataacttccatacctcaatggagaattgcaaatctgttgtatcacataaagttgatcggtactccaccttaaatccacatttcactgcgatctcctctaacacacccaatattcctccatgttgtatgaagtatcttcctgattccatttgtctacttctttgtcttgaaggagcatgccgagtcgctatgtcctccccagaaaaggatctataggttgcaggtgcatggttatgaagcattcgatgatcttcattgtgaagtggccgaggaggatatctctggttcttatagctatgtctatctgcagatataggattgtccccgtcagggaagtatgatggatgctgtggttgcttattatcataatttacagagtcagattctaaatgaaattctgttgaagccttgttcaggttccttgggttcatctcatcctctaaggaaagccaatttccatgagattgcactggcggaactgagacttgtgcaggaggtctgtcaggaaacggctgtgcagcttctcttgtgtcttgaccatgttgtaatatgagaagccttctccgagtgtcaggatccaactcagactcaggaacctcaccctcttctctagctggagaaccttgg

SEQ ID NO: 12819 - DNA, 387 bp, Setaria italica
  Peptide Sequence Number=SeqID_78793
ttccgtacttctagttgttgtagttagttggtctgttcggttgagcaagttgaccgagcatggatttcaatgttccgtaagcctcatcagcagcctgcagcttagcttcctcccatgttactccaactcctttccctaggatttgcccacctatttctacctgaaaagccaagcattatttcagaatataagaagaatgagctacgagcacgaaagccatcggagcaaattgaatctaaaggaagaaaaactcttgaccaatgacaacatacaacaaatcatgtactgtatacaagggtaacagaagcaagtttacttgctttaactgatcttacagtatcaagatcatacggtgtaccaggcatagttacatgaacattcatccag

SEQ ID NO: 12820 - DNA, 1532 bp, Setaria italica
  misc_feature (64)..(64): n is a, c, g, or t
  Peptide Sequence Number=SeqID_78794
ttacaaaactcgatcaaacacacttcaaaattgttaaatcagattacatcacgaattctgaaangttttttacaaaaataaaagaatgaggttaacatggtgccacgaattctgtgttcataaatctcgcgccatgattctaaaaatacatggcgcaagacttatgaacacaaaagctgccgccgccagaagaaaattggcagccaactcggatgagctcaactaccgagcagcgagcatcaataaccactggagcctaatctgatctaggtgtgcacaaatgataatctacggctacagcatcaggaatgtacactctgagatccactctcagttccggcataaggaaatgggaatttgatacaggtcagaacacatctccaagagctcacttcagatcaggttacaacaacagttgcaatcgcggataatggcagcttgaagatgatggtgagaagaaacctgtacacgaaactgaaaatgcgatgcctaggcgtcatcgcgtacaataaactcttgccctcgtaaccatctagcttgcacttgcaattacggaatgcttgaggggaaacgtgctggcatgatttcctgattcttcccaggagattaagtgcatacttcagactactgtcaaggaaagcgactgtcgtctctagaatatctgcctgaaggaatcctttgtatcctctgcgagaaatctggcttgaagcgcttattaaaattgggcaccaatgaccttggagatgcagactgtcgttgagcaagttgaccgagcatggatttcaatgttccgtaagcctcatcagcagcctgcagcttagcttcctcccatgttactccaactcctttccctaggatttgcccacctatttctacctgagcacaaacttctttacctgctgaaccatctatagatggctgatcttggaatgctaaattatacccttcaaccttacaaagctccttgagagcagcaacagaaccaccaggttttcttaagttatcgattctgtcattcgtatatctagactcgtctgaagtgcttgcagctggtaacatatcgtctctattacttcctggatatctgtgtgagtttggattgctattaaaaccattctccttcgcaacagtcatcttatctgggtcccatgataaaaatttgtctgccagatttcttaaggaggtatcagcagcttgacactgtgcttccttccttgtttttccaaatccttcacctattttttctccaaaaatccaaacctcaatggagaattgcaaatctgttgtatcacataaagttgatcggtactccaccttaaatccacatttcactgcgatctcctctaacacacccaatattcctccatgttgtatgaagtatcttcctgattccatttgtctacttctttgtcttgaaggagcatgccgagtcgctatgtcctccccttcacattgcaaatcaagttcagaatactctaaactaagcacgcacccacaacattccaagaaaggagttacataacttagctagc

SEQ ID NO: 12821 - DNA, 319 bp, Setaria italica
  Peptide Sequence Number=SeqID_78795
tgccttgcctatcccctgttgcgtttctcagaaaacccctagccccccgcctccacctccaccgctcgcctcctctcccacgcggccacagcacgccaagccttccggcgccgaaaaatgggccacagcgacggggagcacgagctcgagggcgacgacctctctgccgacgacacttcctggagcgacggcgtctggtccgaggacgccgacgaggagtcggtgtcattcgaggacagcggctccggctccggctccgacgccgattctgacgaggcggcggcggcggaagagagcgactcttcggaggatgaggtgg

SEQ ID NO: 12822 - DNA, 436 bp, Setaria italica
  Peptide Sequence Number=SeqID_78796
ttaacctcaaggtcggacaaggcggaattaaggtagttagtactaacaagggcttcctccggaacaccactgtggctataaagatgttgagctccactggtgtgcaaggccaatcagattttaagcacgaagtcacttttatgaatacggtgagacacccaaatgttgtgacccttgtgggtgcgtgcccagaagccctggcccttgtgtacgagttcatgccaaatggtagccttgagggctgcctggagcgcgtggccggagcaccagctctgtcatggcaggctaggacacgcatcatcaccgagatctgttctgcgctctcgttcctgcacaagaacacaccctatggcatcgtgcatggcgacatcaagcctgcaaacatactcctggacggtaatctagcgagcaagctatgtgactttggcacatcccg

SEQ ID NO: 12823 - DNA, 505 bp, Setaria italica
  misc_feature (457)..(505): n is a, c, g, or t
  Peptide Sequence Number=SeqID_78797
ggatggaaggggccgtggtggtcgggttcatgggaaggagcggctggcaccttgacgcgctcggcctctacgtcgcggcgctgcgggccgagacgctctgcgacgtggtccaggagcgcggcctctcggcgtaccgctccttcgtctacggcggcgacgacggggcgcggccgcggcatcatcatcagagcaagaagaaaccgttcgagtggtgctacaaataactgttactataactgaagcgaagcacactgaagcattccattgggccggaaagggctccaagaaccagagtgagcgatcgcctattcctctatcacgtggtaaggttaggcaactttacgtaaagtgtttcacatactatgaaaggataagattaagaacaagtcacgttactgagagttgtaatccagtgaaggagtgaggatggttcaactacagaacgaaagaaagtttnnnnnnnnnnnnnnnnnnnnnnnnnnnnnnnnnnnnnnnnnnnnnnnnn

SEQ ID NO: 12824 - DNA, 663 bp, Setaria italica
  Peptide Sequence Number=SeqID_78798
tgtagggttgccatccacgagggagttctcgtatatctccttgcattcttgtacaacctccttggcttcctttcttggaatgccttcccgcatcgccacaagcttctcaacgacctcaggctacaaaacaaagatgtcaagttgcagagcataacaagaaatgaacacactgtttgatgaatagtcaagcatctggaagaactccctcgtggatggcaaccctcagaagtccggatttgtgtttggcaaattgaagtgcctgacagcaaagaaaggaatatggaggaagcttgggcagtgaggacgagagtggtttccccaccatcagggcaaagattgtatatttgtgtaaatgagagtaaagctaatccaaaactctcagctgaagctagctccctcatatcagccagaatccgcactctgctttcaacttttgtcacattgatgtgctccctgaagaaatccataagcacctcttcatctaacctcatcctatcaattgtttcttcttttatgtagtttttctgagagagaagatgatcaacatacacaacaattgtttcctctatgcaagcctccacaaatcttcgaaatgatctttcctcaatatacattttgacatccccaaaataatcagcaaacgttgcaacgagatattctgtg

SEQ ID NO: 12825 - DNA, 605 bp, Setaria italica
  Peptide Sequence Number=SeqID_78799
ttagaagggttagaccaataccaacgaagggagttctcgtatatctccttgcattcttgtacaacctccttggcttcctttcttggaatgccttcccgcatcgccactaagcttctcaacgacctcaggctacaaaacaaagatgtcaagttgcagagcataacaagaaatgaacacactgtttgatgaatagtcaagcatctggaaaaattactgggcaatcaggctgatgttccagtatatttgtgtaaatgagagtaaagctatccaaactctcagctgaagctagctccctcatatcagccagaatccgcactctgctttcaactttctgcagcagttaaaaaaaattcagtgaaaactggttcaagtaaatgcagaagcatcaaacctcaaagatgccgttttaggacgatcagtgttcaatgacaaaaagtcaatatccaattagatttccataaaatgcatgcaataaaactatcacatgaggctgtgaatagttttaactttgaatgaatactatacttactgtcacattgatgtgctccctgaagaaatccataagcacctcttcatctaacctcatcctatcaattgtttcttct

SEQ ID NO: 12826 - DNA, 823 bp, Setaria italica
  Peptide Sequence Number=SeqID_78800
ttgtaggtttgtcctattcctacgtagggtagtttcttcgttattattcttcctttgtctatttctttgttactaaccttcctttggtctttccttttctttggaattgcctttcccgcatcgccacaagcttctcaacgacctcaggctacaaaacaaagatgtcaagttgcagagcataacaagaaatgaacacaactgtttgatgaatagtcaagcatctggaaaaattactgtctagttccttttaacaaaccattttattggataaataaaattagggctttagaaaggttacatgtgtttttacaccaaaattctctgtagctaagcaaagcggaatatacaattttgcttctcacatgctgcttacacactgatatggtataaacgtgaacccaatagtagcatcgatgaaagaacaaaagaatgatcacaaaaagaagtaaaaatatacaatctttgccctgatggtggggaaaccactctcgtcctcactgcccaagcttcctccatattcctttctttgctgtcaggcacttcaatttgccaaacacaaatccggacttctgagggttgccatccacgagggagttctcgtatatctccttgcattcttgtacaacctccttggcttcctttcttggaatgccttcccgcatcgccacaagcttctcaacgacctcaggtgggcaatcaggctgatgttccagtatatttgtgtaaatgagagtaaagctatccaaactctcagctgaagctagctccctcatatcagccagaatccgcactctgctttcaacttttgtcacattgatgtgct

SEQ ID NO: 12827 - DNA, 2752 bp, Setaria italica
  Peptide Sequence Number=SeqID_78801
ttttttttttttttgtaaagacttaacaaaccattttattggataaataaaattagggctttagaaaggttacatgtgtttttacaccaaaattctctgtagctaagcaaagcggaatatacaattttgcttctcacatgctgcttacacactgatatggtataaacgtgaacccaatagtagcatcgatgaaagaacaaaagaatgatcaacaaaaagaagtaaaatatacaatctttgccctgatggtggggaaaccactctcgtcctcactgcccaagcttccttctaacgtaccttctaggttgggtctaattctatctgtattgtttctagttctttgctgtcaggcacttcaatttgccaaacacaaatccggacttctgagggttgccatccacgagggagttctcgtatatctccttgcattcttgtacaacctccttggcttcctttcttggaatgccttcccgcatcgccacaagcttctcaacgacctcaggtgggcaatcaggctgatgttccagtatatttgtgtaaatgagagtaaagctatccaaactctcagctgaagctagctccctcatatcagccagaatccgcactctgctttcaacttttgtcacattgatgtgctccctgaagaaatccataagcacctcttcatctaacctcatcctatcaattgtttcttcttttatgtagtttttctgagagagaagatgatcaacatacacaacaattgtttcctctatgcaagcctccacaaatcttcgaaatgatctttcctcaatatacattttgacatccccaaaataatcagcaaacgttgcaacgagatattctgtgaccattccctccagccagtctttctggtaaagcttcacaagtagatcctgcacacctgggtcttcaaaaataacactaacagtttgaagaacggcttccttggcaacctcaagaaatcctttgcaagtgtcttcaaaattaacctgttcagcatagtttggtggaagtgcctccaatgtactgctacttagctctgttgaaagttcatagcaatgcaggttattgttaatcaatgcacatagtgactccagaccaacatcagaagctggctcctcaagtctttgcctctcagctgcttgaaaatcaagcatgacctgaataactgcaagagcaatacggtatagcatgacgtctgtactgttgtctctaactatctgaacttgctcagtcaatattctgaacagatccactgctgcaggtgtatatagttttccatcctccttagtctttggtggttgtgttttgtctgcctccaaaatgttgctgtaccatttcttagttgttgcctgcatacgctcaacatacatattcatgaggggatccaatgcgccactttcagaacaaacttgggcaagtgattcatccacaccaagaccaatcagattttcttgatattgcacaacccaaccagttaccttcaggatatttatattttgaatatcatttgctctatcgctgagaagtcttagcatctgaatgaacctttccgtatataagtttaccatgagctggaaaatttcatatctaggaggaaagcatggtgcaacatagtcatatatatcgccaagctcgtctccaattgctttggcttcctccaaagcttccatcaaatcctccgaaaaaacaagctcagtaagcagcttgttgaagcgggcttcaacagccatccgaatacactcatagcatttgtccttgtagccctttccctgaaccttcgatttttcttgagtgccctttcttggggtagctgctgcacctttttttgcagttctacgttggtttgttattgtcgccatagcgcctgcaccctcggcctcagctgcttcttctgcaacttgttgatctatgatctcttgcatttcaacaaccctcaaagctctaaccaatgtctgagggctctcttttgcaagtttgaaaaagttggtgatatggccccataatgtcttctcaaatgtttcccatgttcgatcaacatcctcaaagtattctcttagcctgccaacttcttccttatgagatgcagcagcagctagagcaaaacgcctctttccatcaagagctgttaatctctcataagtgtgaattaactctttgtcattgcttaatgagtcgcgtgctgcagccgcctcaacagaaatggacatcatacctcccatatcctttaaagttgtgttcagattgtttcttgcattgctaaggagcttgatcttgtcatggttctcaattaaagtttgacactcctgacacaacttgtctatatctatgaagttctcacgtagtttgtttattgtttcctgagataaggctagagcactgataccagcatgggcttgctcaacctgttctgccaccattgtactgagctgtgcatcatttgtctgctgccgcgcgaggtagtcggatttgatggaggcgatggaggagagcagctccgggagcgggagcagcttggccacctcgcgcaccgcggcctccttcgcctcgatgcccagatcctccatggccgccggccgacgcggacgccgacgccagcagcctgcgcgccgccggccccgcgctgcctcgcgagtcgcctccgaatccggtgggagaagggcgcggtggggatgggagacggagagagatcgtgaggaaggctggtgacctggtctggtgtggtgtggtttcggtcctggtggttgaa

SEQ ID NO: 12828 - DNA, 469 bp, Setaria italica
  Peptide Sequence Number=SeqID_78802
tggcaaacgactcaggccggctttgcctgaaacatgtcgtcagctgcatccttctctaccctaccctaacacagctggtgtacactgcactacttcgatggcagcactctcactgtaaatttcactactacgtcagagtccacctacacaatcatatttatgactgcaactagtcaggcacgctgatctcacgcaccagcagagttacttgtcgcgaccaagacgagaggaccccaaaggagaggctcatctcgcgtccttgacgagcggcttcaccttgcgcctgtgcccgaagctgttgaccaggtccttgcgcgcgcagacggggaacaggtggacgcccggcggcctcagtcgccgcaggacgtaggggaagctcagctgatcgcgggacgtgaacctgaccacctcgttgaaccagaggcacatgaagaggttggtcgaggggccgtgatccctcacgatcact

SEQ ID NO: 12829 - DNA, 1296 bp, Setaria italica
  Peptide Sequence Number=SeqID_78803
tttttttgaatacttttaaagctcatgcgagtattagagttaacaatttacaacaagatagattgtacagacagaccactgcttccaagcaaaaaaatttgggtcagaatgggtcataaacggcgatgcaacttgtgtctaggaaggaaaccaagtaatacctagaacggccactgctaatcagcaggatttcctcattttgtcagtagtgcttcaatcgtcagcaagtcatacagaaatttctgcagcctaactctacgctagattgagttgggcaactgcttgtcctccgctgcatttttagcatcaagccttttgggattcctgcccttatcaggcccaccgatgactccccaggtctcaaactgccgttgtcgagccctggccctttccttctcctcctcagatttcgtcgcgaagcagtatgggcaggagacaccatactcccattcaggagattccatgtcttcatcgcttactggctgcttgcatccataacaaagtttgtgggtgccttgtgccaatccatgctccaccgagacacgcttgtcaaacacaaagcattcaccgtcccacaagctttcagccttcgggatttcctctagatacttcaaaatcccaccttccaaatgataaacctctttaaagcccttgctgagaagaaagctggatgccttctcacatctgataccaccagtgcagtacatagcaactcgtggtagctgtttagatttgttagcattgaggtcttgtgctggttgaccagctccattatcattatttacccctgattcctgagtatcagattcaaccaattcgaattgatcatcaacccaagtaggaaactctctgaatgagtttgtacatggatcaacagctctcttaaactttcctatgcgtatctcgtacatgttacgcacatcaatgacaacagtgtctggatcacttatcaatgcattccagtctttcggcttaacatattttccaaccattttagttggcattacacctgggtctccaaatgtcactatctctttttttaatttgacacggacatgatcccatcggaatggcgcatcatccccagcaccaacaggagactggcaggtatgtccatgatgtatggcctcgtcctctggagtaaccggtgactggatcattctcaatccttttaagcggttatcttcttgaataaagtttaagactttatccacagcagctggggtcccacagatgctaccgttgattccctctggtgcaaggataatgccacctgaaacacgcagcttccttctt

SEQ ID NO: 12830 - DNA, 755 bp, Setaria italica
  Peptide Sequence Number=SeqID_78804
gactaacttacttctggctacatcagaaccaccaggtggcctacaatgtcacttctttttgtttaataatttaccatgtcacttctgaaaaaaggcgaatgtcagcaatacaccatccaagtatatatattatctgttacatcaccaaaagaaattgaaggactaggtgggcttccgagtacagcagcttcaaaggccttgagcacaaaagtaaggttgctaagaattctccagcaaagctttcatgaactacaatgtctggattagaaacatcccaacaaaacactagaacagataagcttttccttaataatgctacaagtatgtattctcaacagccgcaacactatacagacctacctgctagttttccttaataatgcaataaggcaacaaaatgtaatcttgtgtacacagaaatcaattgcaaaccctgagcccacatttgtataagcttttaaaggaactactaataaaatgataagagtatattgattgtcagtgtcattaacaaatcagttacccctgcagaatcaaaacctcccctacttccacaaatgccagcataccagataaaaaattgcattgggaaaaaacaatttctccaaaaaagattaaacactatggttgtatgagcatgcgcaatgaaacaaatatgtatgaccatgcagatcaacaccaaatagcccacatttgtatgagcatgcactatatctcctttgagaactttttgggacttgtatgttttgattttt

SEQ ID NO: 12831 - DNA, 1572 bp, Setaria italica
  misc_feature (29)..(29): n is a, c, g, or t
  Peptide Sequence Number=SeqID_78805
ccgcatagagatggaagacactcgaagcnggttgatagaggttcactccgtttggctgaaaagggccgaggttgtaggcttgtaaagcatccttccatagggtcatgtagatggaggagtctgccacatggtttgcagtgcgataaatgtggcgacatttccatcgaacttccattggtcaagcagggtcagaattgcggttccaaactaatgacggttgctggataaaaaaaggtcaaattggattggtttatgatccaaagacaaaaaggtgatctgtctgtttgcgtgatttttcacaaaactggcatgctccctctttggtaagtgctactggaactttttttaaaatccttgttttgaggatgaagactttgagagatgatcgtgacaaggtaaactaaaatatattttttattactgttcctttcacttaatgaggcaaccaacagtcttagctgttttatgcacattatggtaaacagtgctcaaattatcagtaagttaaaaatgcaattgatacccacccttcaaaagtaacagttattgaggtcggcagttatgggttgcttgcatagagtttacagattcattctattgaagttaagaagtcattatttcaagacacgttacagtatgcagattgtttaagttaaaaatcatatagaaatggtaaaatgtggagtagagctagaagctattaccttaaccagcagaattgtgctatactatcattagggccatatatgagtgtttgcctaagaaatcatgcattcacgcataggataaggtgctgttccgtgaatggttatcattacttggaatagtaatatcccatgtatgcttgaaatctatttgaagatctatcttagcgagcatttacaattacttagcattccatgatatgcttgttctgtgtcagtaacaggttttgtgttcaacacttggcggttttaaactgtctaaaattgtttttatactccatgcattaatggagtattattagattactgggaaaaatgcattgcagggtacaactcaataattgtaattataaattgatgcatattctcttatgtcagatcattgcttccatgatcaaggggtccatttcagacagattctctgtaaggatattgtgttatgatgcagtgccaatttgtttacaagattttaatccattacatggttattgcaaagggaaatcctgaacaattttctgctttgataagttttcaacgtgcaacgttgcctgcacttctgtaaagggatattatcatgtaaaggaaagtggttttaggtgaagggtgtgaaaatcaaacatacaagtcccaaaagttctcaaaggagatatagtgcatgctcatacaaatgtgggctatttggtgttgatctgcatggtcatacatatttgtttcattgcgcatgctcatacaaccatagtgtttaatcttttttggagaaattgttttttcccaatgcaattttttatctggtatgctggcatttgtggaagtaggggaggttttgattctgcaggggtaactgatttgttaatgacactgacaatca

SEQ ID NO: 12832 - DNA, 812 bp, Setaria italica
  Peptide Sequence Number=SeqID_78806
tcctattctactagtagtctattgttgtctagtactttgtcccttagttgtcatccaaagtaaccttttagtctagaattggaagaaatagctcaacgaaaacaagtctaacatccctagataaatagatagtatagtagcagagcaaggcctgccagatggccaaggagaacgaatctacaaagactacaactactgaatcctcagttctgaaggacaagcatatatagctactacactcgattacagatgaaagatcatcacatcatggtgttgaagatgcatattcccatcacagagcatgtgcagacttgccctagtgcgaaagaacctaacctaccataccaataagttgcaaactagcagtctgaactgggagctccaaaatatccagttgctgcttgtaatgtgaagttctgataacttcaacacccatgtcacccaactacacctatctgtccttcaacgagcccaatatcatcactttcaccatcagatgcttcatcaagttttgcaattgcatcaagcaatgactgctcttggtctataagcaatttttttgccttctgaattgcatacacatctggatgggataataccatctcgaccttcttcacaagaataccagtattaggtacatcaatatgattgaagttgaaaaggctgatgccattgggtgtctcgtgaaaccttcctcttctgcccatgcctggcatagcaccatcagatgccaaccaaccaacttgatttggaagggcttgataggcagagccccatcttatgttttcaggtgccatcagtgcatgtattct

SEQ ID NO: 12833 - DNA, 1197 bp, Setaria italica
  misc_feature (1185)..(1185): n is a, c, g, or t
  Peptide Sequence Number=SeqID_78807
tcaaaccctctctcaccgtcggcgacctcgccgccgtcgccttcatcctctcccccggcctctgccgctgccggactgtcttgttgtttgttgtagtgcgcgaggtcaacctaggcaagggcacccccaaaagttttcgggattcttcaactgaagctcgccccccgtgtggagtgtctttgaagatgatgaaccagcacagggaggaggatgccctgagaggttgcgcggtcaaaaaccagaaggcgatttgggacaagaccctggagatgagattcttgctgcagaaggcgttttccacttctaacaaattgccccaggaacccatcaagacgaggttttgcaatcatgataaggagatagagcaagcctatgagaacttggtgacgtcgtcaaagcagactctggctagcatgacggaactgcaggaggctttgctggagagtaaccaggctgtgaaggatgccaatgaaattccttctgcccccaatggagagaatgacgagtggtcagaagtacagaggtcgcagacaaggataacgacatttagaaatactgagatagataaatggcagaggaaaatacaagtgacaacaggtgctgctgcactgaaaggaaagctacatgcatttaatcagaacataagtgaccaagttgctggttacatgagagatccaagccgaatgattaacaggatgtacttgaccaaatctgctgttggtgtgttcggagaggatgtgggagaacatggagcagctgatgaggggcgcattgtggaaggtgattctgaacttattgatgattctgagttttatcagcaacttctcaaggagtttcttgagtcatgtgatagaggggcatcagagtcagcattctatgctctacgaaagcagcaggtgaaaaagagaaagcttgttgatcgccgagcttcaaagagtagaaagataaggtataatgttcacgagaagatcactaacttcatggccccagtacccatggctcttcctccaatggccccgaagttgtttgagaatttatttggcacgagcaactaaaatcccaccaaagcgtgaactcaaatttcacatataacgtgtagcaattttttgtagtcttgaaattgtagcatgtgcgatgttgctggacttgaaactgtgaatcgatcattttcattgtcaattttgngcagcgacaagc

SEQ ID NO: 12834 - DNA, 576 bp, Setaria italica
  Peptide Sequence Number=SeqID_78808
cctgcccgcccttgctcggcggcggatgtgcggggctcgcgagatcccgcggcgtaatggtgtggcggccgcgcccggcgcggacgaccgcgaggagcgcgctgagcgcgagcttggatggggatggggccggggacgcggagttcttgaggaggatcgaggagctcgcggcggcggcgggggtggcagccggcgggcgcagcggggtgcggctggccggcgagcgtggagcgtagcgcgagcagcgtcgggctgccgctgtcgctgcgcatgctgaagcgaaagaagaagcagcagcagcagcggcaggtggtggcgcggcagtcgcggtgggacgaggggctgctgggctccgccggggagtcggtgggccgcgccttctcctcgatggtgctcatcgtgcgggagctgcagagcttcgcgctgcagcagatgcgcgacgcgctgctctgcgacgacctgcagggcgtcctggcgcacgtccagggcgagatgcacgcctccttcgtctggctcttccagcacatcttcgccggcactccggcgctcatgctctccctcatgctcctcctcgcc

SEQ ID NO: 12835 - DNA, 381 bp, Setaria italica
  Peptide Sequence Number=SeqID_78809
cccgtcgcgccagccagctcccgcaccctccggctccgtaccgccggccgccgctcgccggcggtacggagccggagggtgcgggagctggctggcgcgacggggaagaggagtcggccctgggaacccggcctctgggccgtcgattgcggcggcgagagggaggccgcagcggcagcgcaggcggcggccatagaggaagccatgggcggcgacggcggagcggaggcagaagaagaccaaggaatacatggagaagggccagctggtgcctgatgagattgtagtcaatatggttaaggaacgccttttgcaaccagatgctcaagaaaatggttggctattggacggttatccgagaagctattcgcaggccatggc

SEQ ID NO: 12836 - DNA, 1479 bp, Setaria italica
  Peptide Sequence Number=SeqID_78810
actcaacattttgatagtaagtctgcagcctcagcttaaccttttcttctgtgtcatcaaatctctgtgtaagccttgacgcaatttcttcattctctggtggagaatacttcaaatgatatattttccccgtgacaggatcaagccgtcttccaaccaccctttcaacaaggagttcatctggaacatctaacaaaatgaatgcatcatccatttctccagttgagaaacaacacattacacgtgcatgttcgcaggacagcaataatccatgtacagcagcgcatgctaaaaaggatctctaaagtcctcgtcccgatgaatgatccgccacctccattcttgtacaacaacacatggtacaaaattcctatgcttcaaccacatttaaatggaggagttcgctatcatgcgagccatcttacatgagcatgcctgacctgcacggattttacccgctcaagcgctggcgaccgtttctgttttcttgtccaggatagagctcagctgcttgtcgatctcggcaaacacttcgtccactgtgacatctcctttcactttgacaataacattgtcatatgttgatagcaatgactcaacattttgatagtaagtctgcagcctcagacttaaccttttcttctgtgtcatcaaatctctgtgtaagccttgacgcaatttcttcattctctggtggagaatacttcaaatgatatattttccccgtgacaggatcaagccgtcttccaaccaccctttcaacaaggagttcatctggaacatctaaacaaaatgaaagtatcaggtcggatttcaagagtttccaatgccatggcctgcgaatagcttctcggataaccgtccaatagccaaccattttcttgagcatctggttgcaaaaggcgttccttaaccatattgactacaatctcatcaggcaccagctggcccttctccatgtattccttggcctgcttcccattctcggacccagcagcgatctccgcccgtagcaaatctccagcagagatgtgcaccaaaccgtatttggccttgatgagctcacattgcgtgcccttgccggacgcgggagcccctgatatcatgaccttgagagggtcagccaacgctgcaaccacagccttgctcgcccggcgcaaggagcgggtcgccggcgagcggcggccggcggtacggagccggagggtgcgggagctggctggcgcgccggggaagaggagtcggccctgggaacccggcctctgggccgtcgattgcggcggcgagagggaggccgcagcggcagcgcaggcggcggccatagaggaagccatgggcggcgacggcggagcggaggcagaagaagaccagacgacgagacagtagacagaaaacaaagggagttgcggcctttattaattccccctttttttagtttcatcaaaacaaaatcagttttggtttttttttggaattttt

SEQ ID NO: 12837 - DNA, 260 bp, Setaria italica
  Peptide Sequence Number=SeqID_78811
gccagggaagtgtgtagtatcatgatgcgtgcgtaataaccacaacgaacgaacaaccaccaccaccatgacttttcaaccgtatcaacaagacaacaactcaacactccctgctccactagcagatacgcagagcagcaacggtcactcgcgccggccaggccaccgctccacctccacggggaacgaacggtcagtggcagtactggcggtaccagcagcacctgccgaacccggcgtccccgtccccggcgacgacg

SEQ ID NO: 12838 - DNA, 408 bp, Setaria italica
  Peptide Sequence Number=SeqID_78812
cctctccggcgaggaggagctccagtgactgctccggccattcagaccgctttgctggcccgggtttaagcttggagctttccctgtccacgtgtgggttttagatcactgctccagttctggattttgtacatcgatcgaccagcttttgctttggtgatcgccgggcgtggcgtttctttaggatgttcctggcatcatgaccaagtagaaagttagtagtagctaatcccaagttggtagtaggacgatgaccttagaatcatagcatgttatttctagctagtatgtgcaaggcctcctccaatgagtccaggtaagctatctcatatatgtccacgtcatcatgcatcctatgtggaggaaaccgaaattcaaaatcaatccatctatctcctatgccacgct

SEQ ID NO: 12839 - DNA, 591 bp, Setaria italica
  Peptide Sequence Number=SeqID_78813
ggtgctccgcgccgccgtcgccggccgtgcagtccaccgctcatcgaccccaaccgggcttcccaccttcttcgtcatcgacaagctcttcgaggacgggggtcaagctcccccgaggccgaggacctcggcttcctccgcggcgtcctgccccgcctgctgcagaggctccgcgacagccccggcgaccaggtgctcctcttcgacacgcccgccaacgtcaagaaggacaagttcgcatggttgagggacgaggagttcgcgagggagacgcttgccgggatcaacccgtacgcgatagagctcgtcagggagttccctctgaagagcaagctcgacccggcggtgtacggaccggcggagtcggcgatcaccgccgacatgctggaggtgcagatgaggcgggtgatgacggtcgccgaggcggtgaagcagaagcgcctcttcatgctcgactaccacgaccttttcctcccctacgtgcacaagatccgggcgcaggagcacaccaccatgtacggctcccgcaccgtcttcttcctcaccgacgacggcacgctgcggctgctggccatcgagctcacccggccg

SEQ ID NO: 12840 - DNA, 1624 bp, Setaria italica
  Peptide Sequence Number=SeqID_78814
tttttgtaaaaccaccatccagaatcatccatatatacattatatggtgtatacaaccaaacacaccataagctgctgatggtctttttttcttacgctacagtgtagacacatctgggcaagtggatcccgaataaaatattaagtgtattaaatgtttaccaagttttaccttagaatattttgatttgccatggaacatcagaagttagctgttcaaactagaccgagtacctagttaaaacttgaaacactgggacaccaaggcaaggtttctgaaaaactatacagcaattgatacaaaataatcaaagcatgagccaatgacagactatccgagtgttgcattgttattggtttgcgtacaagtaccataacaaacactgggaaacacagggcaacgcagccgaaagctgcatgcctgtttcagaaatcagaacaccacacatgcccagcccaactcgccagatcttccatttcatgatgtcatagtgaactccgattgatcacggaggccctggggatgcactgtattgagccatctagtccaatttcgcatagctttgtccattgccatctcctttctcaccatcgttttgcccaagatccttcagcttagctaggtatgccttgtggaatctgtaacctctatcagtcccatacagataatcacagtatgtgaaaacagaagcaaaattgctttggctttggcctcctacataatgatgatagtcatggtattctgctcctccatagaatggaatatactttgttggggtgaatgggaaatcaaagccgctgtgtgtctcgatagcctccacctggcggagtataatccagagccagaatgtgatcatgtggcccggagcgatggctggcccgacaaaggaggggatgccaagtatcagaacctcagcccagtgtgcgtatggagctgcgaagccgatcggtgccgtgaactcatggtggacgcggtggatcttctggtacccccattccccgtggaggagccgatggatccagtagttgaggtagtcctcaacaaggaagtacaccagcagctgcgccgccatctccccccagggacggcaatggcagctgtgtgtgaattcccaccatcttgacggccgggtaggagacgagctggagcgggccgatgacgagaaagaagatgcggaggacgttcttgtagcagcggacgaactcggccctggagagccgcacccggggctgcagcttgtacggtgagacggcggcgggggcccggagctcgaggagcgcgacggggagcggggccagcgtgaagacgacgaagaggaagaggatgttgaggcagtagaggtggtaatccggcacccccgcggtgtaccggaaccacagcgcctcggcgggcgtcatggcccgccccagtgccgcctccgccaccgccgccgtcgcgtagggcagcatctccggcgaggcgatgggagggaccccggttgcgagagagatgttcgcaccaccgcggggtgggggactatccgcaattcccgggggtagcgccgccgccgccgagcagctctcgctttcgaggcggttccgttcgccggcgcctttcctccctgctctggaggagacgagggga

SEQ ID NO: 12841 - DNA, 260 bp, Setaria italica
  Peptide Sequence Number=SeqID_78815
aaaatactaagtcatagttaaacagaaagaggacttagagtatatcaattccctatttttatctttaataatgatacaattgggttcctaaaaaaagaatacaatcaggagtgctgggttgaatcgttatgttgctgataccaagaatgaaaacacatggatgtctgcacaaataatagataatttgggttgactgaaatgctgtaatatatgccctcgaaaacagtaatatttatatgctccacgagttaacttgcaga

SEQ ID NO: 12842 - DNA, 1424 bp, Setaria italica
  Peptide Sequence Number=SeqID_78816
atcttgaggcgagactcggtgctgatggtctccttgttggtggcgccggcaggatggtcgccgcactccagccgcagccgcaggtgaacgggcttcatcaccaccaggtctctcgcgtccccgcggctccccatcagcagctccacgcaggcgtgctcctcgcggcgctggcagcacatgatctgcttgacaagggcttcctgatccgcgcgatcgttggtcgccctcgcgagcttcaggtacagcgcagcagaggccaccagctcacatgtcccagggctgacattcaccgcacaggtgaactgcacccttctctggtcttggtagctttgatcagcgggtttgtcatcgcctccatgtgcagtagtaggttcctgggcgacttcagagaaggctaggttgtccagctcatcgtaccactgctgtgcgataccaacctttttctgttggggcgttgttcgcatcagaaccagagacctcagcaccagatcccctcacttggcgacagatacaattctcagccaaaggtgcagcaagttcagtgtcagctggaatgtctatgtagaccgtgatattgcatcttccaggaagcacatctacttgacggacatgctcctcaaattgttcagttgaacgaccccaggttgatactctctcaagattgcaaatagaccaatatggcaaaccaaggacctcacagttagagaaattaatatttgaggtgttcttggtatccaagtcatgcttcagaaccctctgaccatctgtaacctcaaatataatataattatgaaatcttgagactgacgatacaagttccttgctggtgaccttctccaacagatcagaaagttccttagcagttgatgaacgattcgtgtgtatatccttaagaagggcaaacctctcatttactgtttgctgatatgactccattacttcagctcttccaatatcctgtttctcgccagttgatattctcaagatccatggactttcaaagctgcggtctgcaactaataagtcatcctctgaaatctgtatcaaatgccatggaagtgctactgagtctgcatcaaaatcttgaatagttggagcaatttctttctcaaaccaagcttatcagtaatccaactccaaatgccactgcttttattagacactggataaactgtttctaaagtcctccttcctaaatctgcttttcggacagcgtgattctccgaatctacaatatatagacagtcttcatcagcatggtaaaatgatgacgctgggcgcaagaacttggctgattcaaactcgccatcctcaaagcctggggaagatccaatacagtctaaaatcatcccatcgctgttgctaatgatgatcctatgatggttactgtcagagataaaaatacgattcccatcttcatcaac

SEQ ID NO: 12843 - DNA, 264 bp, Setaria italica
  Peptide Sequence Number=SeqID_78817
cgcacccagtccaaccaaatcggccgccaggatgaagggcggcgacgtcagcagcattagcccgctggtctccttcgtcctcggcgctgccatggcaaccgtctgcgtcctcttcttcatgtccgcaagccccaccaggcgcctcgccgacatctccgccttctccaccggcaactccaccgcaagcacggacgacctccgcctcgcctcctccgccgacagcggggtggccgacggcgacggcgacggcgacgtcgtcagccg

SEQ ID NO: 12844 - DNA, 2258 bp, Setaria italica
  Peptide Sequence Number=SeqID_78818
ccccttcccacctcctcctcgccctccctacctcccttcccgatccccggccacccatggcgacgacccgcccggtgatggcgctcctcctcgttgccgtagccgtgctcgccggcgccggcgccgcgcgcgggttctacctccccggcgtcgcccccgccgacttccgcaagaaggacccgctcgccgtgaaggtgaaccaactgagctccatcaagacgcagctgccctactcctactactccctccccttctgcaggccggggaccatcgtcgacagcgccgagaacctcggcgaggtcctccgcggcgaccgcatcgagaattcgctatacgtgttcgagatgatggagcccaagctgtgccagatcgtgtgcaaggttgctccgaaccaagacgaagccaaggatctgaaggagaaaatcgacgatgagtaccgcataaacatgattcttgacaaccttcctttggtcgtccctattaagaggttggatcaagatgtgcctactgtctatcaacaaggtgtgcatgtcggcgtcaagggacagtactcagggagcaaggaggagaagcatttcatccacaaccacttcacatttctggtgaaatatcacaaggatgcaaacacggatcttgctaggattgtggcctttgaggtcaaaccatacagtgttaagcatgaatatgatggcgattggaaggagactgctacacccctgaaaacatgtgatccgcactcgagacgtctagtcgtagactcaaattcacctcaagaagtagaagccaataaagagattgttttcacttatgatgttaactttgaggaaagtcctatcaagtgggcatcacgctgggacacctaccttctgatggcagacgatcaaatccattggttttctattgtgaattctctgatgatagtcctcttcctctctgggatggttgccatgatcatgctccggacactgtaccgcgacatctccaagtacaaccagttagaggaccaggaggatgctcaggaggagacagggtggaagcttgtccatggcgatgtgttcaggcctcctgtcaacgcagacctgctgtgcgtatatgttgggacaggcgtacagttttttgggatgctgcttgtcaccttgctgttcgccatccttgggctactctcgccatcgaaccggggagggcttatgacagcaatgctcctcctctgggtcttcatgggcctatttgcagggtactcctcctcgcgcctttacaagatgttcaagggctcagaatggaagaacatcacaatcaagacggccttgatgttccccggcattgtgtttgcaatattcttcgtcctgaatgctctcatctggggtgagaagtcctctggtgctgtgccattcaccaccatgtttgcactagtcctcctctggttcgggatctctgtgccgctggtcttcgtcggcagctaccttgggttcaagaagcctgccatggaggaccccgtgaggacaaacaagataccacgagcaataccagagcagccatggtacatgaacccagttgtctcagtattgatcggaggcatcctgccctttggcgctgtgttcatcgagctcttcttcatcctgacatcgatctggctgcaccagttctactacatcttcggtttcctgttcctggtcttcgttatcctgattctgacctgcgcggagatcaccattgtgctctgctacttccagctctgcggtgaggactaccagtggtggtggaggtcctacctgacggctggctcatcagcgctgtacctcttcctgtacgccacgttctacttcttcaccaagctggagatcacgaagacggtctcgggcgtgctctacttcggctacatgctcattgcctcgtacgccttcttcgtgctcaccggcaccatcggcttctacgcctgcttctggttcaccaggctcatctactcttcagtcaagatcgactagaaatctagactgtagttgtaacactgcttcgtcggtttgagatatcagaggttaaaagagaacagtaggcaaggaatcatcagaagctcagaatgtagtatgcattatacaggctgaaacgtaggctgcttattcaggtgttttagggtatttgcagtttgattctgtaacactaaattagtgtacttttgatgccagtaattcggtgcaggtgtgtatccttgcagaacaggtttcagatgataccatcaaacgatttaacattactaaaaaaaa

SEQ ID NO: 12845 - DNA, 677 bp, Setaria italica
  misc_feature (635)..(677): n is a, c, g, or t
  Peptide Sequence Number=SeqID_78819
gcaactggtggtttcggctgttctttcatttgggattctcatttattcagagtaagcatcctaggggttggttagatagatgagaatcccaaatgaaagaacagccgaaaccaccagttgcgggtggtctggcaataatgctagtatgcaacaacatttgctccttggaatccttaataatacctagaagctcgtagtcattcactcataaagctgagtgcatatggctacgccaacgtccttcgcgatacttggaaagtttcactaacaacaagaacaggctataacagtacagggttgtttggaagagggcattgcttggcgattcaaaaagaacagggctataacaaaggggttgtttggatttagatccatcttattacccctctattcaataaaggcccctatcgggttagggactagtgtcgaccatgactcctcttgttagaacctttatctaaggtgccataacggttctgtgattgctgtgagttaggtcttgtgggattctcatttattcagagtaagcatcctaggggttggttagatagatgatctaaaagttttgaactgcggtgatagtgtatgtaccataagcttatacagttttgatgatggatatatccataataacnnnnnnnnnnnnnnnnnnnnnnnnnnnnnnnnnnnnnnnnnnn

SEQ ID NO: 12846 - DNA, 618 bp, Setaria italica
  Peptide Sequence Number=SeqID_78820
ctatccctccatcccggttctccaagctttaccttgtcctcttctgcattttcagaattaaagacatctgatttctcacgaagagcatccttaagccttgacttcaagtcttctttgttttcacgctcctgtgatccaagatcattttcagcctcaacaatcgcagtagcaatgctggaacctggtgatgatacccgtgcagctttccaagcttggctatgagctccattttgttcatacggtgatggtactgccccagatgcaaggcgagatcctcggaaatttgcaacgggaacaataagatcctctctgacatggggatccagatcatcaccacgctttgcttgggccttttcccgttttattctttccgcttgacgctgatgcaaacgagcccttttctgaaatattttatcctcgtaagagccaactgcttgaatgaagtgttcaactctatccaaatccggcgtgcaagaatccgttaaatagccacccattgaaggaaattccttcttgtacacagccattaacagatttatagccccctcctgatctctaatgttggcatatgtggaagaaaatcattgccaacaaaaaagcacatgaagatgaaatcat

SEQ ID NO: 12847 - DNA, 511 bp, Setaria italica
  Peptide Sequence Number=SeqID_78821
agcccaacagtggcagcaacaaccatatagttcatatgctggaagagggccttatggagcggaccaccacccacaagggctgattcacgatcacagcaatcacagaaccgttacggtgctttggacagaagttccaaccggagacctccatctggatatggccgataagagattctgattcaattcctgttgtagttcagactttgttgttagtagagcttcccttgtaaaatagagcaactcagctaaggcataggtgcatacagcgtctgcaaagtctgttgatcttcaagcagctaggccgtggcatcgaagattgagagaagattttttatactagtgttatttacagaccatcagatactggtgattggtcgccattctttcatttgtggatctctttcattgagaagatggcatataagcgccctgggtttaacaggttcagttggtggatatgattggaggatgtttaccaagttttacccagaggctagacaacatttggttg

SEQ ID NO: 12848 - DNA, 330 bp, Setaria italica
  Peptide Sequence Number=SeqID_78822
ctgcctctccaagttggcggcctgatatggctcctggtgggttgtgcctgttgctattatcatgaggcctcctgccgctgtcttcatgccacagcactggaggtggtttcagatccccagcttcaacagtcttcttgggtatgataacaccagctggaggccgggctatgtgcttatgatgatccggaagcttgtagatcgagcatatcacttgattatccataatatcctccagcccatccacaggagacctaaagataggagggcatggataatcaagtgatatgctcgatctacaagcttccggatcatcataagcacatagcccgg

SEQ ID NO: 12849 - DNA, 967 bp, Setaria italica
  Peptide Sequence Number=SeqID_78823
ggtggtggtccgcctccataaggccctcttccagcatatgaactatatggttgttgctgccactgttgggctccaccatatggagggggctggtaacctccaccacgaaccccaggatacgctgatgggggttgttgcccatacagtccaggacccggtggcagagcaacaggctgtgatgaatacatgttgccaccagtctgctggtatccatatgcaggtggaaccctgcctcttgcatcatggtagccatctcttgcatatgggtgattttgttgccttcctcggttaccttgttcatattgccctgatctgtcatactgataatgacctgatcctgatgatgcataagctggtatttgaccatcaggaacaccatccctaggcacattccaaccaggacgtccagcagactgctccactcgtggaggcatcccttgattgccaatagggtgaactacattcaaatggtgcatgccattcattatagtttgatatggcattgatgggccattatgttgccccctaccatgagcatttaagctgtttataactagtcggtgggctgcctctccaagttggcggcctgatatggctcctggtgggttgtgcctgttgctattatcatgaggcctcctgccgctgtcttcatgccacagcactggaggtggtttcagatccccagcttcaacagtcttcttgggtatgataacaccagctggaggccgggctatgtgcttatgatgatccggaagcttgtagatcgagcatatcacttgattatccataatatcctccagcccatccacaggagacctaaagataggaggcatggactccccactgacaaagagttatgtagccattcattcctccactagcagaaggatcaagtcttttactttaatttcatttctcttctttgtcaggcagatgtaccaaatttgctgttgagagagtagatata

SEQ ID NO: 12850 - DNA, 1996 bp, Setaria italica
  misc_feature (1964)..(1964): n is a, c, g, or t
  misc_feature (1974)..(1974): n is a, c, g, or t
  misc_feature (1985)..(1985): n is a, c, g, or t
  misc_feature (1993)..(1993): n is a, c, g, or t
  misc_feature (1996)..(1996): n is a, c, g, or t
  Peptide Sequence Number=SeqID_78824
gcgtatcctggggttcgtggtggaggttaccagccccctccatatggtggagcccaacagtggcagcaacaaccatatagttcatatgctggaagagggccttatggaggcggaccaccacccacaagggctgattcacgatcacagcaatcacagaaccgttacggtgctttggacagaagttccaaccggacgacctccatctgtttttttttttttgggtgatagaaatcacacttgtattactgccatctaagaacgagatacatgattatggatatatccatcatcaaaactgtataagcttatggtacatacactatcaccgcagttcaaaacttttagatcatctatctaaccaacccctaggatgcttactctgaataaatgagaatcccaaatgaaagaacagccgaaaccaccagttgcgggtggtctggcaataatgctagtatgcaacaacatttgctccttggaatccttaataatacctagaagctcgtagtcattcactcataaagctgagtgcatatggctacgccaacgtccttcgcgatacttggaaagtttcactaacaacaagaacaggctataacagtacagggttgtttggaagagggcattgcttggcgattcaaaaaagaacagggctataacaaaggggttgtttggatttagatccatcttattacccctctattcaataaggcccctatcgggttagggactagtgtcgaccatgactcctcttgttagaacctttatctaaggtgccataacggttctgtgattgctgtgagttaggtcttgtgggaggtgctccacctccataaggtcgctgctgccactgttgtgctccatatggtgcaggctggtaacccccaccatatgctggcgggggctgtccataccgcccaggacctgctgatgaagcagcagaatgcgagttgccatggttttgatggcatccaggtggaggtggaactcttcctctagagtcatggtgattatctctcgcatatgggctgtagtgttgccttccatggttatctcgttcataccgagaaggccctggcctttcatgctgataatgaccatatgctgcttgaccattggtcaagttatcaccaggaacataccagccttgtccagcaggctgttccattcttggtggcactccctgattacccatatggtgccttccatttggatagtttgtaccattcattatcgtttgatatggcatagacggggcattgtgttgcccaccacctcgaacattcaagctgtttacaaccagtcgatgggcagcctccccaagttggtggccagatagagctcctgctgggttttgcctgctgctgatattgctaacaactattttgtcttcctttggtaattcctttaattaattaccttagtaagtcttcgttagtggatatggaccgataagagattctgattcattcctgttgtagttcagactttgttgttagtagagcttcccttgtaaaatagagcaactcagctaaggcataggtgcatacagcgtctgcaaagtctgttgatcttcaagcagctaggccgtggcatcgaagattgagagaagatttttatactagtgttatttacagaccatcagatactggtgattggtcgccattctttcatttgtggatctctttcattgagaagatggcatataagcgccctgggtttaacaggttcagttggtggatatgattggaggatgtttaccaagttttacccagaggctagacaacatttggtgattgatgtgctcagaaaatttttcttaagttttggcccattttgatatcagataagtgtatgtatgagtcccaattttcagtttcgatgggtgtattccaaatcatgtacaaactctaagatggcatttatttatgataagtggacttaacttttaaaaaaaaaaaaaaaanaaaaaaaaanaaaaaaaaaanaaaaaaanaan

SEQ ID NO: 12851 - DNA, 2538 bp, Setaria italica
  Peptide Sequence Number=SeqID_78825
atggaaggcaacactacagcccatatgcgagagataatcaccatatgctgcttgcgagaaggccctggccttcatgctgataatgaccatatgctgcttgaccattggtcaagttatcaccaggaacataccagccttgtccagcaggctgttccattcttggtggcactccctgattacccatatggtgccttccatttggatagtttgtaccattcattatcgtttgatatggcatagacggggcattgtgttgcccaccacctcgaacattcaagctgtttacaaccagtcgatgggcagcctccccaagttggtggccagatagagctcctgctgggttttgcctgctgctgttatcagaaggcctccgattgttgttatcataaggtctccggttgttgttatcataaggccttcggttgttgttatcatgaggcctcctaccactgtcttcatgccacagcactggtggtggtttcagatcaccagcttcaacactcttcttaggtatgataacaccagcaggtggacgggcaatgtgcttgtgaggatccggaagtttgtagattgagcatatcacttgattgtccataatatcctccagcccatctacaggtgatctgaatacaggaggggatggatccccataacaaagtgcaatgtaaccgttcattcctccactatgagaaggatcaagcttttctttgatttcattgcgctctttgtctggcagattcccaaatttgctgttgagagagtagatataaggcgaaagtggatgggagccattcacaaaaagcatattgcacatggtactgtttctccttgcttcttcaggcgtcaaagtatgctcgacctttttaatctcagccaacaaccgatcctcatcaataaagggcagttttgctatcccctgccaagagaatctcttgccattcatatctacctcaaaatcagtaggataaaagtcaattattggtgaacttggatcagtcatcagttgccgatactgaagagggagtgcatgagcacttgcagcagggaaaacccccataagttgatcaaatggcttgaatggtgacccaagttcgaaagttatattgagctgactcaaactctttaaatccgaagcaaaaggagcataatgataagggtaaaaccattgccatgagcagaccccttcatagtagtaatgcattacccaacacaaaccttcagcatatttgagagcaacatccctacgtatttcttccatctggtcagatgttcttgctccaaacttctcttcataatacctatccctccatcccggttctccaagcttcaccttatcctcctctgcattttcagaattaaagatatctgatttctctcgaagtgcatccttaagcattgacttcagttcttctttgttttcacgttcttgggatccaagatcattttcagcttcaactatggctgcagcaatgctggaacctgacgttgatactcgcgcagctttccgagctcgattgttcatttctttgttgtctttgtgagatccattctgctcatatggtgcaggtacagccccagatgcaaggcgagatcctcggaaatttgcaacgggaacaataagatcctctctgacatggggatccagatcatcaccacgctttgcttgggccttttcccgttttattctttccgcttgacgctgatgcaaacgagcccttttctgaaatattttatcctcgtaagagccaactgcttgaatgaagtgttcaactctatccaaatccggcgtgcaagaatccgttaaatagccacccattgaaggaaattccttcttgtacacagccattaacagatttatagctccctcactgatctctaatgttggcatatgtggaagaaaatcattgccaacaaagaagcacatgaagatgaaatcatcaacaatgcgttcaaaatctatctggaaaggaggatttggcattctgaactcgtattctaagtactcccgaagggtccagatattcaagaactggtatggtttctttggaacaataggatcacctttctcatcatattccccagcttttcttttgccttttccttcacagttagcagcaagatgtcccacctgaccacataggaaacatttgtcctgctgtccaggagtataaactacctctctcaatattgagaagtgtacttcatgggttgctaaagctaacatgatcagatctgcatccaggccatacaggcaatggcgtgtatttgggttaaaaccagacagattccgttggccacgaatgtacgacataattttatgttccccttcaccaggaacattggcatcagacaaaataactttaatttgtttccatccaggatcataattcaacctgagatggatgtaatactgcaaagcaactgataaaacagccataaactcagtccctggagtaataacattggaatcacatgtttgtgattgctgtttcgcaggaagccttctcccttccctctcaaactcttcgcgcagccgtt

SEQ ID NO: 12852 - DNA, 607 bp, Setaria italica
  Peptide Sequence Number=SeqID_78826
ccctcgtcctcctcgcgctgctgctcctctccgccccgtctccgtccgcttccgcctcgctctccttcctcgccgattccttcaacgcctccgtctccaccttcgcggacccggagctggaggacccggccccttagcccaccttcctcgaggaggtcatcgacgccgtctcggagaagtacgactgggactcggacgccgaggtcagggtctggccgctcgacgccgacgccgtccgcgttggcgcggtgcagcggtacgattttcgggcgcgggcgggcggggtggcggcgctggcgcggttctccgacgaggccgtggagtggaggcgccccacctcgcccgcggtcgaggaggtggacggaccggacgggatcgacgtcgtccccggcgacggcgcgtttgggttcagccgcggcgtgagggacgtggagctggtcgggccggtggagttgaagctcgctggcgatgaggatggcggcctcgtcgagctccagttgccatcggggaatgtcacttatacaaggctgaagaagatactagtcgctgatggagttggattagaggtcatcggtgcacagaaagtttcactttcccacccacacag

SEQ ID NO: 12853 - DNA, 734 bp, Setaria italica
  misc_feature (676)..(676): n is a, c, g, or t
  Peptide Sequence Number=SeqID_78827
cccccgaggcttgtgtctacccacatgcccatgtcacttcttcctggatccatagctagccatggttgtcgtattgtttatatttgccgagagcccaaggatgcctttgtgtcattgtggcatttcttgaaaaggatacatggaggacatgctcctgacttggactccatgttcaataggttttgcgagggttctttgcccagtgggcccttttggaaccattgtctcgagtactggaaagaaagcatcgcgagccctgataggattctgttcctgaaatatgaagacatgatgtcagatcctgtgaggtatgtcaagaaacttgcattgttcctcggtgtcccattcaccggcgaggaagaagaggatggtgttcatgagcaggtggtaaggttgtgcagctttgagatgcttagtggcttggaggctaatagggccggaaacatacctcacaggatctgacatcatgtcttcatatttcaggaacagaatcctatcagggctcgcgatgctttctttccagtactcgagacaatggttccaaaagggcccactgggcaaagaaccctcgcaaaacctattgaacatggagtccaagtcaggagcatgtcctccatgtatccttttcaagaaatgccacaatgacacaaaggcatccttgggctctcggcaaatntaaacaatacgacaaccatggctagctatggatccaggaagaagtgacatgggcatgt

SEQ ID NO: 12854 - DNA, 223 bp, Setaria italica
  Peptide Sequence Number=SeqID_78828
aaaggattagcatatctgaagcagcaatgtgggggatggcgcgcatcgatgagtggaaaccggtgatcgcaatgctagtctttgatctcatctctgctgtcacaacagccttgatcaagaaggcgctgcaggagggtctcgaccgtctagtactcatcacgcttcgtcaactggtggccacagtcttccttgctccgatcgcctatttcaaagaacggagcac

SEQ ID NO: 12855 - DNA, 454 bp, Setaria italica
  Peptide Sequence Number=SeqID_78829
ctgactgaatgagcaatacatcactgagcacttgactcacaatatcaccattattttccatatgtatcaaagaagctcatgtcttgatttagcaagacctgaacatattttgatctgatgacagcagtctgccgttcccccgtgagaatccagcatgatacctcgatccatcctgcaacaaaaacaccagcagctatatagacgatatacaaagcatgctccttaaaccggtggagcagctcatcactgtgtccatagagagccgactcaacccgctcagagtcgagcaaattcagggccctcccgaagtagtgcaggtacacaacgagcgccgcgccatgggcagcagcagcgagcgccccggcagccatgagggcccagtcgaacccatcggcgaactcgaaagcctccagaaccgacacggccgcgggcggcggctcgacctcatcttcct

SEQ ID NO: 12856 - DNA, 537 bp, Setaria italica
  Peptide Sequence Number=SeqID_78830
tggaggtacttaaccatccaggtgagcacgctggccgtcgtgtcctgcgccgcgaacagcacgccgatgatgttgtcggagatctgctcgtcggtgaggaggggcgcgccgtcatcgccccgggactgcatcaggcagcccaggaggtcggagctcggctccccacgctcccgccgctcgcgcatgatgtcgctcagcacgccgtgcagccgccgccgcgcctgcatcgccttgtaatacagcgtcccggggaggctgttggggaaggagttgtagcccttctccacgatggagtaattcttcctcagctccgccttccgccgctcgtcgagccggccgccgaagatcgtcacgatgcccacctcaaacgacagcctcttcatggcttggaacgtgctcattacgcggccgtcccaggcggcgagcgtggaccgcacggcggcctcgacctccggcacgagcgcccgcagcgcgtcggggccgagcgcgccctgcacgagcttgcggaggcggaggtggtagtcgccctggtggaag

SEQ ID NO: 12857 - DNA, 280 bp, Setaria italica
  Peptide Sequence Number=SeqID_78831
tcctcggcaacagagtgcccgtacttgtgctgctgctggagaacactcgtcacagaacattagaaaggtgaactggaacgagatgttctttttcaaagtcgaatctgaggatagttatattctggagcttcttgtgcttgatgctggtagaggtcaaccagttggaatatactctgctccattgaagcaagttgtgcaaaagctccctcctacctcaaattcggactctgctaaatttgatttgactctaggtgaccttatgtcaaccaagacagtggaa

SEQ ID NO: 12858 - DNA, 692 bp, Setaria italica
  Peptide Sequence Number=SeqID_78832
taagttaaactttttaacaaaagtaacgaaaatactagaaggaataagttaataattctaggagcttcttgtgcttgatgctggtagaggtcaaccagttggaatatactctgctccattgaagcaagttgtgcaaaagctccctcctacctcaaattcggactctgctaaatttgatttgactctaggtgaccttatgtcaaccaagacagtggaacctgaaactgttaaacctagtgggaaaataagatttgctgtacttgtttctggtagagctagtgtacaacaagggaagacaaccagttctggaagaagtaagactggatatatccaaattagtccttccaaagaagggccttggacagacatgaagttaaattatgctgtacctgcagcatgttggaggtttggcaattgtgtgattgctagtgaagcaacagtcaaggagggcaacagataccttagcatacgttcccttgtgtcagttactaacacaaccaattttgttgttgatttgcgtctaaaaggaagattcgctcaaagtgcacgatcagatgaacagggaaaagacagttctgttaaagaggatcaaatcttgatcggaatgttggaacccaattctgcggttccagtcccactaccaggcctctcacatcctgttgcgccttatatgttgcagctaagaccggtct

SEQ ID NO: 12859 - DNA, 393 bp, Setaria italica
  Peptide Sequence Number=SeqID_78833
gcgcgaagtcgtggatcccaactcccaagaaccgtagccttctactgctaccgtcctcttcttccccggcaagacgccgcggtcactgccccctcaccatataatcaaatcgccgcccgtcgccgattcgattagattgatagaaagcggagccgacgagatgccgacgctgacgaagctgtacagcatgaaggaggccgccctccacaacactcccgaggactgctgggtcgtcgtcgacggcaagatttatgatgtgaccaagtatttggaagaccatcctgggggtgctgatgttctgcttgaagcaaccggtaaggatgctaaggaagaatttgacgacgcggggcacagcaagagtgccaaggagctaatgcaagactacttcattgg

SEQ ID NO: 12860 - DNA, 517 bp, Setaria italica
  Peptide Sequence Number=SeqID_78834
atacatcaaatgttataaaagttgacatgaaataacattactagaattttgatggaatatactttaaaatattacattcaatgacttgaaatcaaagattttagaacaacggcattagccaccatgtcaatgtcgtaaaaggtaagtaaaaacaatgtaagatattagtctacataatgtgagatgtagggattctcatgtaacttgaaagaaatgagatgcaaactatctaggaagaattagacaattttcataagaaaaaataggcacccaaattcgagttgaagaggatccaaaacatgagtggtggagcttcataccgaaaccccatcctccactaactgagttattcctcatgtcctgttacttctagtacatcttgtagcgtggcctctttgtttttccggcattcatcgctggaaatacttcagaacttccttaatctttgtaggtaaaacacaaaaaaatatgcacaatggtaatattaactgaaagtggacaggtcactaacatttcc

SEQ ID NO: 12861 - DNA, 253 bp, Setaria italica
  Peptide Sequence Number=SeqID_78835
ctcggtcaagtgagcgtctgcccctccacgcaatcccaagggcctcggctatggcgtccccctccgctccggcggcccagtctgaccgcgccgcgctcctcaaggccttcgacgaggcctgcacgggcgtccgcggcctcgtcgagtccggcgtctcctccgtccccgcgctcttcgtgcacccggacccctacgcctccgcgccgctcgcgcccccgggcgtctccatccccgtcgtcgacctctcactccc

SEQ ID NO: 12862 - DNA, 299 bp, Setaria italica
  Peptide Sequence Number=SeqID_78836
ggctgaggctcgcggggagctggagctcgcctctccctctcccctttgacgcggatggtattcagaagaggtatatttatgccacggggctcgctcggctggaagggaaggttggagcgggaattctgcggtcaaaggctggctgggaaagggaaaggaaaggaggcggccttttcgcctggctggcacggccgtggtggattggctgatggccgcggggtggaagaaacgaggacgaggaggacgacggaggcgcacggccgctccgcacgggggcgctcaggctttgcggataggaa

SEQ ID NO: 12863 - DNA, 835 bp, Setaria italica
  Peptide Sequence Number=SeqID_78837
cgccgcgcccgctcgccgccgccgcggcgccgtcggcggcgtcgttccgccggagggacaggtggttccacctcccgctgcacgatccgccgccgcctcccgaggcggccgaccgcctggagccgctggcgcccggggagccgctcgtgttggacgtcctcctgtcccccgccggcggtggagcgggagcgagagcgggaggggaggtggtggagaggtggacggtggcgtgcgagccctggccggacgccgcggtcggcgaggaggtggctgtgaaccgcgcgtacaagcactgcttcacgctgctcaggtcggtgtacgcagtactacgcgtcctccctgcgtaccgcgtcttccgcctcctctgcgccaaccactcctacaactacgagatggtccaccgcgtcgacaccttcgccgagcccttctggcgcgatcaggaggcagccatgcgctcccaccgcttcgtccccgtcgagacccagctcggccgcctcgtggtctccgtccagtacctccccagccttgccgccttcaacctcgagatcacctctctttctataatccccgactacgtcggcagcccggccgcggagcccatgcgcgccttcccggcctcgctcaccgaagccacgggctccgccttcccaccgtccaatcagctgcagcgcccgcacagctgggctccgcctgtgttctgcccgcactcgccggcacagcaggccatgttctcgccgccaccagtgatttacgcctcaccgacgccctcgcctccccactttccaggtgggtatctgcaatcgcgtcgtctcgtttaggggggatctgcgccagt

SEQ ID NO: 12864 - DNA, 363 bp, Setaria italica
  Peptide Sequence Number=SeqID_78838
tctcaccctcgagtccaaggcgtggaacgaacgccggtcccggcggaggcgacgcgcgactggcggcggcgctgcagcggctgtcgcggcgacggacacgacgactcgtcgctttccccgcggcatccatcagttctgtccaccttctcgacgaaatggttaacagtttggcgggatcactggtgaggcggcaaaatccccatcgacaggaagatgatcaagctgtactgccctttcatcgcatccttgcattgcatctgtgatctgtcatagcaggagtagcaggaatccttgctagcttttaattagcacacggttaagcctattcctcttccagctcagctgttctctagacctagaaga

SEQ ID NO: 12865 - DNA, 1969 bp, Setaria italica
  Peptide Sequence Number=SeqID_78839
tcaaggacagtggtgtccctgtgcatgataatttaaatgctggagaatctgggacgtcacctcgtcgtgacatgatcttcagaaggcacgaaagcttcaactttggaaggacggatgcaatccaggagaggcgtttttctagactcaggccatattttgtccctgaaactgtggaatggaatgcgagcaatttccaaagacagttcagcgataagagtgagtctaaattgagctctgtaactgaatctgatgtggcttcttcagttgctgatcaggaggatcacaaggaccatgatgaaaaggatttacacatggaacacgagtcacctgctcttgtgagacaggatagtgaccttgcggatgttggaagtgactgctcagatggaatcaactccatagatgttgaactagacaacagtgacatcgatgaccgtgagattgctttacatcattttgtctttgaaagatcgcaagaaagggaagcacatcttgcctcaacgaaaggaaagggtcatgaagaagattattccaagatgccatttcatccagttcctgacttgcttagctgggaagatggagatggtgacagcatccttggtgctaaaccttctttccaacttaacacagaagagaaatgctcagaatggatttcatcctccaggccaactgtggagggtgaatcacattccagggaccttccgaagtaccttgacactgatgtggcatcaagctcaaatacagttgtacttggtgcaagcaatacagctgagaaagatggaaatgttgatctcatgtcctattcaaacaatgaaatgccattggataacctgattcatgggtctgtggagctgccttctgaacttgtcacagaaacattgccagtcatatctagggatctgcaccctatccctgaggagagagttgttgagaacttcagcatgcaagaaaagcatgaaacagcaatatttactgaatcagatgcttccttgactggcttgcatgtaattgaagaacactttgatgttggatttgacaaaagtctgagctctgtttcctcatatcctcgagctagtgatgccatccagtctccatcaattgaacatgcagaagtcttgaatccctttgtttccatggctgctgaaccaaacaaggtggatataggtgacatgaacgacgaaacaactgtaggatatctacttgattctgatgacgaggctggtaaaatctatcccgagcctatggaagaaagtggaattgatgaaagtttcctgtctgaattggacacagtgggagactttggagtagaaccaatgagactggatcagcgggttccagatcagggttcccatgatgaaaacctgaccaatggtgttgctgcagattccatgattagccctcagacttctgacaatgtcagcttgaccatgtcggaacccagtgctgaagactccagggagcagtctccagtggttgatgacctaaatggccctgaatttagttggtcttttggagcatctcatggtgaccctgagcagactgtctacaatcctcggagacggatccttgaagcaagcccatctgaagcaataaacatggagttgaagccaccatgcaatgagtcagaagtgccttctgatgatacaccatcagcagcaatcttagcagctgcatcaagtgaaccggagatcgctacaaatgagttagtgacaactacaaccaatcctgagatgacgattctagatgcgaaatctctggaggatattgagactgcctttaaactagttagtgatggtgtggtttctgagcccaccatggacactgaaattttacacacctcaggtgttaatgttgattcggagcccaaagagagtggagagctccatgtcattgatgcaaaatctgtggatgacattcatgctgctttcaaggagcactgtgattctgttgtgaataggtctgcagaatccac

SEQ ID NO: 12866 - DNA, 1444 bp, Setaria italica
  Peptide Sequence Number=SeqID_78840
tccaccagtttcaatcaaatagtacaacagaaactcaaccacatggtacaaacacattgttgtatctccctatcaccaaaccgaagtgtctgggcaaaacttgtacacctcttcaaattacagccaaaggaggggggaatcaaactaaaacaaaacccgccaaaaaccttgaaagagaaaaagaaagttaaaacaaacacattcattcacacaaaaaaatctacatcaaaactttgtattttgggtattgtgaagtatatgcacagtggcagtggcagtggcaggctcctgatgctaaacaagagcgctccatcaatacttggcagctccttcgcacttcaaggaaggagcatttttgtctcgaacttggtaatatatctgatggcattctattttttccatttcagtcaactcggtagcattcactgatgttcattttcctctcctctttcacgataatcctctgactccaccgcttgtgcagtactcttggcactgctatcagagaccttactgaacactgcatcaatgtcatcgtgagtctttgcctcattagaaaccatattgcttttactctccacagctaaagcatccccagcatctccaacattatgtggactttcgggatgcaatgcttcagtaagtgcatcctgctttgtggattctgcagacctattcacaacagaatcacagtgctccttgcaagcagcatgaatgtcatccacagatgtgcatcaaagacattcatttctccactctcttctacatcaaaactttgtattttgggtattgtgaagtatatgcacagtggcagtggcagtggcaggctcctgatgctaaacaagagcgctccatcaatacttggcagctccttcgcacttcaaggaaggagcatttttgtctcgaacttggtaatatatctgatggcattctattttttccatttcagtcaactcggtagcattcactgatgttcattttcctctcctctttcacgataatcctctgactccaccgcttgtgcagtactcttggcactgctatcagagaccttactgaacactgcatcaatgtcatcgtgagtctttgcctcattagaaaccatattgcttttactctccacagctaaagcatccccagcatctccaacattatgtggactttcgggatgcaatgcttcagtaagtgcatcctgctttgtggattctgcagacctattcacaacagaatcacagtgctccttgaaagcagcatgaatgtcatccacagattttgcatcaatgacatggagctctccactctctttgggctccgaatcaacattaacacctgaggtgtgtaaaatttcagtgtccatggtgggctcagaaaccacaccattcacttaacttagttttaaaggcagtctcaatatcctccagagatttcgcatctagaatcgtca

SEQ ID NO: 12867 - DNA, 638 bp, Setaria italica
  Peptide Sequence Number=SeqID_78841
atccaggattatatcgaaataacgcagtacccccaagcccgtttaaactctgcaatgtcaagcttgtctccataaaatggatcagattcagagatctccaaggtcacagtatatgagtcccttgatggatttgattcgatgaacccgtagtcaagtgccagttcagcattactcttgtccaggtcatactgaatatatatctgttctccagatttaacgtccactggtgttcgcaaagagaacatggcttccctaccaaaaaggccctttcctttgatctcccaactggacccttctgaggtaatgaaaggactgtgattaaccagatcagcaaatggtatgagagcaagcttatctccacgcagctctggaaatacccttgatctgagtattccaaatgcccataggaaatcatcaaatgttatcgcaccagggaagatgtccttattcgcatttatgatctcagcttcaacgctttcgaattcactctgcacatactccttcacacccattgttgtgctcagtaactgtgttccttgtatctctaggagctcttcttctgaccagaagatggtggagtcggtctggcgggggaggatggcgaggtagggcgcccacggcgagtctgccccgcgcgc

SEQ ID NO: 12868 - DNA, 250 bp, Setaria italica
  Peptide Sequence Number=SeqID_78842
ttttgcgcttctgaggcctgggcatgagctcctggcggttgctgggcctccgtacgacaccttagaggaggtgattgggataagggggtcggccaacgtaggatcactcaaggactttggagtggcgtaccgagaagctccgatggtggccttgattgggaagcccttgcttgtgccatcagaccagaaactggatgtgccttcatacagagatcttgtgggtactcatggcgcaagagcttaagcgtag

SEQ ID NO: 12869 - DNA, 407 bp, Setaria italica
  Peptide Sequence Number=SeqID_78843
gccgagcgcggtctggaactcgtcgaacgtgagcgagtacaccgacccctgccgcgccagcggcagcggcgtcatcggcggcaggtgctccggctccggctgctgctgctgccgcctcccgctcccgcccgggaaatccatctccgatccgccgtcgcacaccaaatccaccaaccccctccgcaagcacgcgccaggaggccggagccgccaatcgggagagctcagagcaggggtttggcagagcggagtggcttggcgacaagggatacccgaattagcaaaggaaaatcccgcggattaggaggaatttggtggagacctgagaggcgaggtggaagacgcgcgttggtgggtgcgggaagggcgctgcgcgaccgcggcggcgaggcgagagaggggattgg

SEQ ID NO: 12870 - DNA, 764 bp, Setaria italica
  misc_feature (737)..(764): n is a, c, g, or t
  Peptide Sequence Number=SeqID_78844
gaagagagcactcagagcaggaggagttgttgctttgcttttgtttggtgagcagcggaggcgagagcgtgtgcgtcgccgtcgtcgtcgccatggagggcctgctgccgttcctgtaccgggccatcctccacctcgccagcggcggggagacgcccctcggcaaccccttccgcaacgagtcgccgtcggagtcgcccctcgcaccctactacgtccgcctcgccggcgccggcgcccccgaccgtgccggccttcctctcctccgcggcgcgcggctactacgatcgcggctgatcgatcgaaccagccagctcatctcctcctcctcgtcgatggcttggatgcggcatgctgcaagatacgaatatacgatacgaggcttgcagatcagaagaagaattcttgtgagcttcttctttaatttagttgtgtgtgagagtttgtgagcctttgttgattcccctttctcttggcttcttcttggaatagcttttggttcttcctttccttggcttcttcttggaataaaggcaggaatgggtggatggatgaatcctggggccttgtgaaggaggctcatctgcctctgccgttgtacatacgtgatcagtctggtgctcgccaaaattgcaggcgctcagacacggcgaatgtgaaactctgctactgattatacatgattgtgagtgcaatatcagatggtcaactagtcaaaaggttttgtgaaaaaaaannnnnnnnnnnnnnnnnnnnnnnnnnnn

SEQ ID NO: 12871 - DNA, 456 bp, Setaria italica
  Peptide Sequence Number=SeqID_78845
cttcgcggagcagcagaccaactgcggtcaagcgcaccgagtggggcatcgggatggagatcggcgacgacgtcaggcgcggcgaggtggaggcgctcatacgggaggccatggagggggagaaggggaaggagatgcaccgccgcgtgacggagctcagggagagcgccgtggccgcggcgaggccgggcggaaggtccatccgcaacctggacaggctcatcgacgaggtgctcgctcctggcttgaacacccaacactagctaaacgtcgccctgtcttgatggcctcttgttgcttggcggctggcgctggcaagatatcaaatctttgtgatttgaattggatatatagcgcttttgatcattacaatatgtactgaagacgagatttgtggtgtatacatcccttggatgcagttcgagtgatgatagtaaagcacttcaagttaaaaaa

SEQ ID NO: 12872 - DNA, 938 bp, Setaria italica
  Peptide Sequence Number=SeqID_78846
gcaagttagaggaaaatttaagcttagtgggacttagttgtgatatttctttagcatgtgtgataatatgtgattgaaatttgaatcagttatgattgacaagtaattgatggaagaatttataagaggacgttgcagatagtgacaacaatgatttcatgtctagaggaaatgaagaatgccattctatatttttcctttggggaaatttagtactgtggtattgtatttcatatactacctcgttcttaaatatatgacaccattgactacctcgttcttaaatatatgacaccattgactttagtttcgttcgtttgactattcatctgtccaagcaatgtccttatgttcaaaaactcgaccacaagaggagatccccctgagcttgttctagaaggtgccgtgcttcgaatccggtcgggacaggagtttcatcgactcctggagttcaacgctctaactggtccaccgcgagaagcttggcagtatgccagcatgccttatgtcaacacagtttaaaatatcattttcctgctgcaacaatgagtgatagtctcagaaagctcgatgtaagattacctgcactagaatacagacatcaaaatcattgatggtctaatactgcatgtttgctttgattaccacgtcgactggttgtggcaagttgcctgttcgttgctgcattgctgcaggatggccgcctggtggcgtggcctcttcatgtccaggtctgcgcgtgtcaatggaaaaaaggtgaatctttacagtatccagaaagcaaattttccaagatctaaatacattcttgaagagtaatttccattctcgcaacagtattgccaactgtctgtttcattgcttgactgctgtatttgttcaactttgctttgcaaaatttgcagttcctccaatgcctgctgggatagtggtatatg

SEQ ID NO: 12873 - DNA, 455 bp, Setaria italica
  Peptide Sequence Number=SeqID_78847
ttaagaggaaaatttaagcttagtgggacttagttgtgatatttctttagcatgtgtgataatatgtgattgaaatttgaatcagttatgattgacaagtaattgatggaagaatttataagaggacgttgcagatagtgacaacaatgatttcatgtctagaggaaatgaagaatgccattctatatttttcctttggggaaatttagtactgtggtattgtatttcatatactacctcgttcttaaatatatgacaccattgactttgtttcgttcgtttgactattcatcttttctccaaatattttataaatagataaatctacatgttaaatctaaaatactttagacaatagacataatggtactcattttactttatttaactaattcattaaatagatgttggttaaagttggaacaaaaagtcaacaacatcatatatttaagaac

SEQ ID NO: 12874 - DNA, 474 bp, Setaria italica
  Peptide Sequence Number=SeqID_78848
taccttccaagcattgaagtgttcaagtgaaattgcaagttagatgaaaatttaagcttagtgggacttagttgtgatgtttctttaacatctgtgataatatgtaattgaaatttgaatcatctatgattgacaagtaattgatggaacaatttataagaggacgctgctgatagtgacaacaatgaattcatgtctagaggaaatgaagaatgacattccttttttttttgagggaaatgcagtaagggaatcccctactgtggtattttatttcatataaaataaataaataaaaagaggtacagtagcatcctggagtgctaaatcacaaaaaggccaattgatagagataagagagaggtcagagaaaaaactttacagaaggctattcagccagatggatacattgtgactaaaagaaaaggactaaatctgtgcaagtgaatctttacagtataccacaaagcaaat

SEQ ID NO: 12875 - DNA, 1384 bp, Setaria italica
  Peptide Sequence Number=SeqID_78849
aaactgataacttacctacttgcatgtcgagtttaaagtattattttcctgctgcaatgatgagtgatagtctttgcattccagttcttagaaagtttgatgtaagattgcatgcagaaaagacacacacttcatttttttatcattgatggtctaacactgcatgcttgctttgattaccacgtcgactggtagtggccagttgcctgttcgttgcagcattgctgcaggatggacgccagtggcgtggcctgttcacgtccaggtttgctcgcgtccatgggaaaaaggtaggaaaccccaactgatgtctgcttccttctactagatatgttcccttaattatttttgttccttccaagcattgaagtgttcaagtgaaattgcaagttagatgaaaatttaagcttagtgggacttagttgtgatgtttctttaacatctgtgataatatgtaattgaaatttgaatcatctatgattgcaagtaattgatggaacaatttataagaggacgctgctgatagtgacaacaatgaattcatgtctagaggaaatgaagaatgacattccttttttttttgagggaaatgcagtaagggaatcccctactgtggtattttatttcatataaactaattcattaaatagatgttggtcaaagttggaggtgaacaacatcatatatttaagaacggagtgagtataagaacggagtgagtataaattaataaataaataaagtgttacagtagcgtagtggagcacaaaaccacaaaaaggccaagtgaaggagagaagagagaggtcagagaaacaactttacagaaggctattcggccagatggatacatttatgactaaaaggactaaatctgtgcaggtgaatctttacagtatccagaaagcaaattttccaagatctgaatggagactaaggtcttttgaagatttgtgcatttctctgtttccaaatttcccatgctgagataatgaagatctccatgaaaaattggtgctgacattcatcttagcttttttaattgtagcaaagaatctgatagagtgatccgatgatgtaccaactaagttccagcatctactgctgaaaggacattcaaagaacaggtgatatgtggtttcctctagatttaggttgcatagtacacagttataattgtccccatcaatcttgtagtttcttcttctgtgtaagtttctggaattcagtctatctttgaagattagccacatgaatttttttagctttttggtcactttagctttccaggttcaattgaaaggagttggaggtgtaatagatctgaatgatagcagataatacattcttgaagagtaatttccattctcgcaacagtattgcc

SEQ ID NO: 12876 - DNA, 743 bp, Setaria italica
  Peptide Sequence Number=SeqID_78850
tttgtttcttttttgttttatttttttaccttttacgtttttcgttttactttttggttttttgttttggtttcttaagttttgttcctttgtttcgtttgttcttgtctatttgctttgattaccacgtcgactggttgtggcaagttgcctgttcgttgctgcattgctgcaggatggccgcctggtggcgtggcctcttcatgtccaggtctgcgcgtgtcaatggaaaaaaaggtgaatctttacagtatccagaaagcaaattttccaagatctgaatggagactaagcaaagaatcttgtagtgatcccatgatataccaacgaagttccaacatctactgctgaaaggacgttcaaagaacaggtgatatgtggtttcctctagatttaggttgcatagcatgcagtgacaattttccccatcaatcttgtagtttcttcttcttagtagtttctggaactcactctatctttgaagattagccacatgaagatttttagctttttggtcattttagctttcaagatccaatcgaaaggagttcgaggtgtaatagatctgaatgatagcagataatactttcttgaagagtaatttctattccccaaactgtattgccaactgtctgtttcattgcttggctgctgtatttgttcaactttgctttgcaaaatttgcagttcctccgatgcctgctgggatagtggtatatgaaagtgtgtctgtggagtgctat

SEQ ID NO: 12877 - DNA, 882 bp, Setaria italica
  Peptide Sequence Number=SeqID_78851
caaagaatctgatagggtgatccgatgatgtaccaacaaagttccagcatctactgctgaaaggacattcaaagaacagtttcttcttctgtgtaagcttctggaattcagtctatctttgaagattagccacatgaagatttttagctttttggtcactttagctttccagttcctccaatgcctgctgggatagtggtataatgaaagtgtgtctgtggagtgctatctgccagaaactgagcgagagatacatttcatttttttttgcaaaggagaataatcttggtagttggtccctaagataaaatccattcctggcatcattccacatcaatgttgccagttggacgctttgatttccctattgcgaccatcttttatctatgatctttactagcaatattattagtgggcttattagtttggtaaaaatggccaggtgaattgttatttagacaatgttgcgttaagactatatattgttatgtttacgataaagtaccatacccttcctggctaatttggaacctctttatttcttttcacgaaatcaaggagcattagtcactaacgattaacctacatatattaatatgagatgtttggtcataattgccagtgggttctctgcatggagaatctgtagtaaatgaaatttctggagcaggcataggtcactgcagatatccatgtgttttctctctcaatattcatgtataccttggttgcagtgtctggaggctttttaacttggcttaggagatgagggaaaataaatttctgtttatttatttaggactgacatggtaatggtcttttttgtatatgcacacaaattccatactatctctagtttttttttcctaaggtcttcttttt

SEQ ID NO: 12878 - DNA, 2700 bp, Setaria italica
  Peptide Sequence Number=SeqID_78852
tcctggaatggaatgcaggtgttaatccttgcccagtaaagctgttgcctttctcgccgatttccgccatgccaccataaatccagcgagggcggcgtcgttgcgttcaatcgtggtgcgtgagaacgcgatttcgcccgggctttatatagggcgggggtttctccccccaatttcatccagtttcgctgccatttggagcgatcgtgctccagttcgggggaaggaatcgtctctgttgaatccctgagctccggggatggatcttgacatggacgactacatcgacccctacgaggaggccgaggccgaggccgccgcggaggccgccggattagcggaccccaaatccgaggactccgacgacgactccgaggacgactcggacgcggagagcgactacgaggagcaatccttccgcctcctcacatccggcaagcaccgggtgcgcaacccggacggcaccttccgctgccccttctgccccggcaagaagaagcaggggtacaagatcaaggacctcctccagcacgccgacggcatcggcgtctccagcaagcactgccgccacggccgcgagcgcgcgtctcaccgcgccttcgcccgctttgtccgcaccgatccgtccttcgcggaagaccttgtcggtatcactggcatcctcggtgccattaagcccgcccctgctaacgccaatggcagtggaagtgccaccgcggaggcgaaagccaatgttggtcctacgggatccagttctgcgccggcggagaacgtggggccgccacgggaggttgagaggtatgcttggccatgggcttgtgttcttgcagccggtgcagggttcaatgctgaggagtttgctggtagagtagccatgtttagttttgttgaggttgtgcctttgtttatcgatgagatagaaggcatggaaacctttgcaatcgtgaggtttaccaatgattggagtggatttaatgatgcgcttacgctagagaaccattttagtgtgaataagctggggaagaaggaatttgagactaggaatagtggtctaggtgctgcagagggggagggtggcgaaggtgaggtaaaggtttatgggtgggttgcccgagagggggattacaatggagggactgtggtgggaaggttcttgaggaagcgtaccatcctgaaaacaatagatgaggtctccaaaactgagttagagaagtcaggggagatggttgcaagactggcatctcagatagaggaaaagaaccgatacttgcaggatttggagacaaagaagaatgcaacagaactctcgatctcacggcttgaggaggacaacaggaagctacacgaggcgtacaatgaagaaatgcgaaatcttcatcgcagggctcgtgaaaatgctctgcgaattttccaagaaaatgacaacttgaggcaagaattagaaaataagaggagagaactgaattcacgagctaagcaacttgaaaagctgtcagctgagaatgctaacgactggaagacactcgatgatgagaagcagaaggcgaaagatgataatagtgaacttgagttagccagtatagagcagcagagggctgacttcgatgttctgaagctattggatgaccagaagagggaaaaggaagatgtattcgcaaggatgctccaactggaaaaggaactgcatgagaagcagcaacttgagctcgaagttgcacggttgaatggtacactccaagtaatgaaacatttggagggagatgatgatggtgatattcatgagaagatggagaagctgagtgaaagattagagcgtgagaagaaacggctggaagatttgagtggagatcttgtgaggaaagagcgtgaaagtaacgacgagctacaacaagcccggaaagaattgattatgggcttggaggacgagctaaatgggcgggcagctattgggataaaaagaatgggagaacttgatggaaaaccatttcaaaatgcatgtaggaggaaatttggaaacgatgattaccaggtcaaagcagcagagttgatcacaaattggcaggaggaactgaagaagccatcctggcatccttttaaggttgttcaggttaatggagaagataaggaagttctagatgatgatgatgcaaaactgaagttcctgtggattgagtatggtgatgacgtgtgcaatgcggtgaagaccgcgctgatggagataaatgaatacaaccccagtggtcggtatgttgtgcccgagctgtggaacttcaggaaaggccggaaggcgacgacgaaggaggtgctcaagtaccttttcgggcagatggagacgacaaccaagcgcaggaggggctgatgaggtgccctaggccgcctgactgcaaagccaataagtagtcgtgcatgcgcgccattggtgccattgtgggagccctgtgctgctcgatcccctcctgacataggagatgtatcctctgtgttaatgttccattgcgtaacgacattacaagcgtatgtgatgtgtggaagcatgtggttgtgctgttgccgcttcaggccctaaaaactgatgtgatcggtgaactgaataataccaacccgtggctttcgtgccctacttaggtgtctgtatattgtgcaggtgtacatatgcagtagtgcaagtgatagcctgcttggcctttatcttgtgtgcta

SEQ ID NO: 12879 - DNA, 3882 bp, Setaria italica
  Peptide Sequence Number=SeqID_78853
ttttttttgtatatcaatacgacagtaattcagtaaacatatatgtcaacaactacatacatgaatagcaacaatcaaaattgcagatatacatgttgttagctatctcaataggttcttttcccaactgaacggagctatactttttacacggctggctttggagcttctactagggtggacaccaccaattacaccccgacatttcttacacaaatggagaaaaaaagaatcccaagggaaaaaataaagaaatagaaagaaagaaaagaatttcgctatattgctcaatgaagctaaaaaccactgccttgcaggagcaaacaaagtggcgactactatcgacgaacctgtcaggtgacgcagatttcctatggtactgtatgaattgttaaggatgggcctttcttatgcaatttccccctgatctgcttgatcttcgcatcgaccctcgcagtgaaaccaatcttcgtcttctgcctggccttcgaccgctccctcttccacattgtctggtcttcgacatctttctttaggtacttgatctcttgaatcacatggtgatcaagtggattgcatgatctctggtaggatatgtgaatcaggtaggggatgttgcaagcagcagtcaccagaagtgtcgctgcccagtatatgggagctggcccaaggacttccaacaggatctgatagttgtcacgggacctcaatgtcatcccgtaggcgaggatgaagagataccaagttgttatgctgccccacacaaagagatgctgaatccatgtgaaatggctcattgttagagcaatttgcatgttgacagcccagatgatgcaggtgaacatggtagttcccactgcagccatgtctgcggtctggcccccagcacggattgcctgatcatagaatatgcaaaggttgaggaagaatatggccagagatgagtagaggccattccccatccatcctaggatccggtaccaatcaaagaaaagattctttggcccttgctgatatagtgctgggaactgtaagcagatttcagatgaaacatcttgctcaaacactccaagtgatataacaggaagcgaggtaagaacaacattgaaaagcagcataaaccaatcgtcgtatacagattgcccagaaaacccagcaaacgcctcaaagtaaaatattgtaagcccaaaggcaatattcttgtaaaagaagtagcagatcatttgggcaattctcttgtagcaccaatgtccatggacgactagaagtcgctcaagaaaccgaaactgagaaattgaaaaatcactagccatcactgcctgcatgccctccaccccacttataccaactccaatatcagcttcttgaatcatgcccacatcatttgcaccatcacctattgctaaagtggtttgtcctataccttctttgacaagtcgagtcaccagtgctttctgctttggagacacacggcaacatatgacagaagcacactctatcgccagattcaagaacatgtgcttcatgtcgtcctccaaagcaaataccagagcttttccatcaataactagagcaaatgctgcatctggatccttctcgagtttgaccatttgtgacccattggcgatttgtgacagaagactctcctttgcagccttctttgcatcctgggctacctgatcaccagtgggtatggacaaacatatttgtttcatgccttgcctcagcaaactgcacgcatatccgatgttaattgcagtttccatcttatcgccagtcagaacccagatcttgagacctgcttgcgccaaacgatctatgcactgaggaacccctttttgtaatttgtcctctactgcagttgcaccaacaaggatcaactctctttcaatcaaatcagagacacgttcaagttgcaactctcgatcaggcccaatagaggtctttgctttaagaaactcagcattccaagaagaatactctgattcctcaagcaccctgtatgatagtgccaacgttcgcaggcctgcctcaccataatcattcagatgcctggtcgtatcaacttcatacatccttccattttttgccagtctctcaaatatgatgctgtctgctcctttgcaaaaaagaagaatttgaccatcttcatccttcaaaatgactgtcattcgttttcttttgctattgaattccaataggttgagaatcttgaactccctctcagttgtgccctttgaagatgtgtgtttctccctgacaaagacacttgattgtgttcgcttgaaaaattcaaacccaaattccctggctgcaacaagaaaagccccttcatcaggtgattctgcttcataggcaatagaaccagttgcctcatttgtctctggtatcgctgtgtggcacagagcaagtatcctgaagaagagtagaattgtggaagaatttggctccttggtccagttcccttgcatgagacggtcatcctcaaaactgaagccttttatggagggttttcggttgttcccaacactaaaggtgactccttctacaagctcgatttcatcctcattgttctcctcccatatatcttgtaaaggcatgtcattgtcctcatcacctgatgccatctgctttgcagcagcaatttcaacttcacttgaacccacaccatatgaaactccagcaattgaacacttcaagaagtccatctgattgcaggtcaaagtgccagttttgtccgataacacagtatgaacctggccaagctcctcattcaagttggatgtacgagcctgagcagtattaccagtgtcctcatcaaacatatgaatgtcctggttaatgaaatgtgcttgcaataccttcacgagttcaatcgagacatacagcgagattggaatcagatacccgtaaagaatgagtgctgtgattagatggaatatcccagaaagagcagggcgtgatgggtcatccaatttattgctattctgtggctgcaagtaccaccagtggggcaaatctaacttgatcctcacagcaaaaccgattgaactaatgagtgatatcaagacgagcacagtgaacagaatgtatatgattaaatccatcttcctctcaatcctgctcctcttggatggtgactcagttgaattctgcatgactttactgtcatggccagtaaagatgaccactccatagataaaggatgtattccttagttttgagtccctgagaagtatctgaaacgggtcaagggcgtacacctgcctctcgtactcaaagttaccagtgaatgtgtacaagctcgggttgggatcctcacagcgtatcactgcctggaaatccttaaatgactcgtcttcttccaatggcagcgtaacctcaagtgaccttttcaccttgaggttcgtctcgccatccaggttcatcgtctcaacatagcaaatgccatcttcatagctcgatgacagtagcagcaaatcagcagggaagaactggtccttctcgaccttgaccacatcgccgacgcaaagttcctcccagtgccggtacacgaattcgccatcgcccttgtgcacggcgaccttgcggttgttcaccttcatgtcctggatgaagcggcgccagtcctccaacccctccttgagcatgctgagcccgacaacaaaggccagcggcgcgatcatgctgacagccgagaaggggcacacaggggtgagcgagaggatggcggtgaggaggaagtagaggttggcgacgcgccggaactgctcgaagatggccttggggaagaaggtgatgatgttgtacttggtggtggtgatgtagttggtgggggtacttgtagtcggtctttcttgtctagggtcgggtttgtttgtt

SEQ ID NO: 12880 - DNA, 490 bp, Setaria italica
  Peptide Sequence Number=SeqID_78854
tctgattgaggctgttccctcatctggaattcaggatatttcttccagtttatctggaaaatctcaccttttagctacaagaaacagctaacgagaagacgacctgcaattgatgaagaaagagtccaaagcatgggaaatttgaaattacccactcatctgtcttgatgttgaagcagatgcaatatatgtgccacatcaagaacacaacctgccagaccacctggaggatagagaagagcatcgtactgattaccaggtttagagatacaggattctccgatcttagagttcctgaattaatgcatctggtaatatattttgttgagcacattgtatatgttgattcagcaacaacaaatcctgtcaaaagggccataaacagccgatgattcttctgtcctatgcaagtaccaaacgcagggcaatgatggtcatagccctaatggttgctttgcaccagttacactgcctgacacgagagagcatt

SEQ ID NO: 12881 - DNA, 518 bp, Setaria italica
  Peptide Sequence Number=SeqID_78855
tttaagtaaaggtaacttagtttacccttacaattacttaggcctttgtcatacggatttacaaatttgacttccaaatctgattgaggctgttccctcatctggaattcaggatatttcttccagtttatctggaaaatctcaccttttagctacaagaaacagctaacgagaagacgacctgcaattgatgaagaaagagtccaaagcatgggaaatttgaaattacccactcatctgtcttgatgttgaagcagatgcaatatatgtgccacatcaagaacacaacctgccagaccacctggaggatagagaagagcatcgtactgattaccaggtttagagatacaggattctccgatcttagagttcctgaattaatgcatctggtaatatctgagcacagcacgtagatgaagttgtcaaactgtaggtctgaaattattgactactaaaactccaaaacaaatactaacatagttgcacagtaatttcgttagaaagataagaataaccac

SEQ ID NO: 12882 - DNA, 1069 bp, Setaria italica
  Peptide Sequence Number=SeqID_78856
tacatagctagaattgtattcgttttgggatgtagggagtacagatttcacctgaacaaacaaactgtctaggtaaatagcttgaattgcattcattttgggatggagcgagtatacataactaggtcctctctgaaatttttcatgcattcttgcaattttctagagctacaaggagtgttgcctacaacttcacgcccagtgacagcaacttttcaaaaaatgctgattttttgcatgttaaattagacagcagagtccaaatgatgatcacaacaacgaatgacaataaatgctacagcagtaacaatgaaagcaggcttccagaattctgggtcatgttgtcacagttgacccactcccgattcccgatccccatgtttcagttccatcaggtcagatcttcaaaatgggctttcgctttcaatcatttcggcgtcagaaattctctaatgttacagagcatgcctttgtcatacggatttacaaatttgacttccaaatctgattgaggctgttccctcatctggaattcaggatatttcttccagtttatccactcatctgtcttgatgttgaagcagatgcaatatatgtgccacatcaagaacacaacctgccagaccacctggaggatagagaagagcatcgtactgattaccaggtttagagatacaggattctccgatcttagagttcctgaattaatgcatctggtaatatattttgttgagcacattgtatatgttgattcagcaacaacaaatcctgtcaaaagggccataaacagccgatgattcttctgtcctatgcaagtaccaaacgcagggcaatgatggtcatagcccctaatggttgctttgcaccagttacactgcctgacacgagagagcattgggagctcactcgggtaaatagcttccacaaaatccttgcagccagcttcctctaaatatgacgaatcacaagcaacaataccaggatcaccagataaaattctgtaaaggccccacagaagcagtgcacattccgcatttagtagcatgtccagcagagaagaagtgtctct

SEQ ID NO: 12883 - DNA, 278 bp, Setaria italica
  Peptide Sequence Number=SeqID_78857
tgaaaattcacattcactagttgtgctcatctcgattgtatcatgcttgctagctgaactgaacctctctgataaaccaaatggcactggcatttcttcccacgattctggatcagcgaataataaaatttccaatacatgggatatgataatatctgcattttccatcgtggaagatatattatgtaagattgcatcaagtatgacggaagatttgtggcagtctgtcattgtggtcttgagaaaagttatggattttgtgacagcaaggaacctta

SEQ ID NO: 12884 - DNA, 262 bp, Setaria italica
  Peptide Sequence Number=SeqID_78858
gcgagggtgagacacacagacacgcgcccgcgcgcgcgaggcccagagccccagagatgtcgccgcggccgcacttcctcgtcctcaccttcccgttccagggccacatcgccccggcgctccgcctcgccaggcgcctgctggccgcggcgcccgacgcgctcgtcaccttctccaccaccgaggccgcgcacagccgcatgttcccggccaagcccgacgacggcggcgccgaggtccccgatgacgacgaagtcggcgg

SEQ ID NO: 12885 - DNA, 522 bp, Setaria italica
  Peptide Sequence Number=SeqID_78859
aggatgtggacgccgcggtggagcggccggcgagggagagcgggtcggagatgacgtgcgccggtgtgggcgcggtggggtcgcacttgagggagaggtcgaagtcggtgagcatgatgtggccgtcggcgcggacgaggacgttctcgggcttgaggtcgcggtacacgatgtccaccatgtggatgtactccagcgcggcaaccacctcggccgcgtagaacctgactgcggcctcggagaagcgtcggtgcggctggcgctgtcgcaggacgtggaggtcgccgccggggcagaactcggtgaggaggcaggaccatcggtccccctcggcgacgccgtagagccgcggcaggaacgggtggtccacggcctcgaggatctcgcgctccgtgcgcgcgcggccctccttgttccgcccctccagctccttccggtccatcaccttcgcggccaccagcacggcccccacgccagcgccaccgccgccgttgggcttctccttcttcgccctgacctcgg

SEQ ID NO: 12886 - DNA, 173 bp, Setaria italica
  Peptide Sequence Number=SeqID_78860
tggctaagttaacagcctctgaacttttcatcagacgaaggcgctggcaggtttccacaaacatcctgtgcggaggctcagccaggctgctgggatgcagtctgcgctggtttggttgcctgcactgtcatgtgaacctggcccagctcatgcaaaaggcaccactcagcctg

SEQ ID NO: 12887 - DNA, 1247 bp, Setaria italica
  Peptide Sequence Number=SeqID_78861
tgtcttgttaactaggctgtaacagaaaaagaactgagtgaatcaagatggttgcaagcatgagctggcaattgtaccataggaacacaagctttagaaaacacgtacctaagttaacagcctctgaacttttcatcagacgaaggcgctggcaggtttccacaaacatcctgcataaggattaattagaaacttgacatattgatgtctagtgggaacattctactatggacttgcatctctttggagcactactctagttcattgcagtatacaaagaaagaagatacataataaaataaaacggaccgaaccatcgcaaacctcaggtaatatatttcctagaaggatcaagaaccaatttgctctgtagcagagcccaaacggtgtgcaatccagtagtggagtacgaaacaagaaagaaaaccttatccaaagttgcacaacttaataaagttcatcttttcatacataggccactagaattgctctgttgtggagagaaacagtacacagatttgcttaaacaaacaaaagagctagaaacagccgtagcaacttatacgtacaagaagcctcaaaaagaaattattgtgattgatccacctgatagatgtttacggatgaaacataaggttaaaaaaacaaaagaggtgtggataactagattcaattctccccgttggttatttgagttaaacttgaccaaaagaaaaaagggctgtgctacaaggtgaaaaggaaatgacaaagcttgtctctaaatgtaaatggcaaaaaagggttgtgcttctaagtctaatttcctgagatcactcaggggctgattggttacctgtgcggaggctcagccaggctgctgggatgcagtctgcgctggtttggttgcctgcactgtcatgtgaacctggcccagctcatgcaaaaggcaccactcagcctggctcctgggaaacgcagatggagtctgtttcaggcgggcctggctcgtgggtgcaagtgattttttcactaatgatgatgttaagcaggtgattaacttatattaagtggtattagtatttttcaaagatgattaagacttaatgaggtagaataagaactattaaagtaaacttaaataaaataagcatcataataatatttatttgtaatagttcatctcatgcaacatgttctcatgcgggcaaccaaacagcttctgtccgtggcctgggtgaatgaatacaggtagacaatcaaaccta

SEQ ID NO: 12888 - DNA, 864 bp, Setaria italica
  Peptide Sequence Number=SeqID_78862
taaatgcaactacaaacttttctcagctcaatagcataaggggaccaaaagcggggttggtgacaactgtacacatttctatctcacgtgaagatcctcaggagagcaaagttccctctttccttcaagaagcctgtgcgaagagtgaggagtgtgcttcaccgcgcagctcttggtgctaagttaacagcctctgaacttttcatcagacgaaggcgctggcaggtttccacaaacatcttccaggggacgtcgccgacaagcatccagtcgccgtccttgtcctcgtacgtgggcacgtactccgtcccgttcactgcgtccaccagcttcctctcgtcgtcggcgaacttccggatggtgaagtgggagaagaacttgtcctggagcgcgcggaggagctggtcgtagccggcgtaggcctcgaggtccaccttccgcaggtagggcgcgccgtcgacggccaccttgacgaacttggcggcctgcttggccttgcaggagcccgcgacgtcggcgagcgcgttcttgcgatacgacctcaccggcggccaccccaccacccgcgccttgggtgccggtggagcatcggaggactctgcggcggcggggatcggggaggagcggtcggcgtcggcgtcggaggaggggcgcttgtggtcggggtcggggaaggcggaggaggacgaggacgaggacgaggacgcggagcccgggaggcggagggtgagcgtgagcgcggtgtcctcgaagtcgaggcccgacgccgcggaggactcggtagagctccgctccgtctccaccgacatggccgagcggcgtgggtggggctgccgcggctgcagctgccgttccgtgtgggcg

SEQ ID NO: 12889 - DNA, 200 bp, Setaria italica
  Peptide Sequence Number=SeqID_78863
aaatgcagcagctgacgagcataagccgctcgtcccaccagcccaatcagagctgctggtctaaaaatccaatgatagtttctattgtgcaatcggtttatttgggtcaaagaccgtacctgcatagtgtcacgagatccaactgtaaatttcttatgtaacagtttgtatgatacatagacatgaatgaactggtaagg

SEQ ID NO: 12890 - DNA, 606 bp, Setaria italica
  Peptide Sequence Number=SeqID_78864
ggcacaggaagagcgcccccaacagagctatgccacccacagagctcatcagcactaaaattttgagcgtgctccgccattgtcgagaagaacattcaagctagcatatgccacccacagagctcatcatagattgtccagattttagtgtgacacacttgcccaggttccgttagcacgtgtgctagctaggcactcctacgcggcgatctgcgcccttgagtgccagcaacgcagctccatacgccgcctccgtctgctccgccttccggaccggcacgcccagcaccctctcccggatcgccgtccacctgtcgttctgcgcccctccccccgccgtgaacacttcctccacggccgtcgcgccgagctccctcagcaggttgtaccctttggcctcgattcgcgcgatcgactccaggatgccgtgcaggtactccgcgtcgctctcgggccgtggctgcaacctcggcgccatgtcgggatcagagaccgggaacctctcgcctttcctcggcagcgggtagtactcgagcggcgacgcgacggccgggtcgatgcgccggctcaagacgaccaaccaagactacgaccgtacggtagaaa

SEQ ID NO: 12891 - DNA, 724 bp, Setaria italica
  Peptide Sequence Number=SeqID_78865
gtccttttcatttttcagaacatgaatctcctccgccattctttgcagttcatcagtcttcacagacctatcaatcatgtcttcctcaagaattatcttacatagtgatgattcctgattgatggtgtatagaaatgtttgtagcttctcaaaactgtcagtctccataggagaggatttcgttctttgttgtatgttgctgaggctctgcagtaccaatttggcagtatccagaggctcattaccttccaatgtgacatcagaaaattctgcaaaagtctttatcagctcattattctgtgaagagacaacagacaatttatcgacagcagcattatatagcgacagcaattctgaatgttcatttacaagcatgtccttttcctgtttctcttccagtagaacaattgtcaaacggtcaatttcctcgtgcattgaaaccaactttgattcatgtgcagccaatctacccaacatatcagcagactcactatgtaaccggactacatcatctttggcctggttcagtgagctgacaagccaactgatctgagaatcaagttcaccggttaagaccgaatgtggaatgtcaactgagcttaagatatctttaactttgtggtgctctgagaagatcatatcagcactaatcttctgctcaactaaccatcccaatctgtctgtcatctccaaggaaagcagatcctcaggaaatgttgcctcc

SEQ ID NO: 12892 - DNA, 1200 bp, Setaria italica
  Peptide Sequence Number=SeqID_78866
gcggcgacggaggtggcgccagttcagcagcgcggccatgcggcggcggcggtttggcgggcggtggcggggtggctcggcctgctcttccagatcctgctccggatcgtccgcggcacgccctcctcgtgggcgcagctcctctccttcgtgggcctgcgccacccgcttctcccagtcgccgcccaggcgcagccctcgcctgaggtggccttcgtgcagctcccctccgaggcacccgctgacgcctcgcctccgccgctccggcgtctcacggtggtgcttgacttggatgaaactctagtttctgcatacgagtcatcaagccttcctgctactctgcgcacccaggctgttgaagcaggattgcgttgctttgacatggagtgcacatcggctgaaaaggatgctgaaggaaggcagagggtaaatcgtgtaactgtctttgagcgtcctggtttgcacgagtttttgcagcgaactagcgaatttgctgaccttgttctctttacagctggtttggaaggttatgcaaaacctctagttgacaggatagatgctcataacagattcattcaccgtctctatcgtccatcaactgttactacggaatacagagatcatgtaaaagatctttcttgtttgtccaaagatttccagagaattgtccttgttgataacaatccgtacagtttcttacttcaaccattgaatggaataccttgtattacattttcagctggacaacctattgatgatcagcttatgggaacgatattcccgcttctcaagcacctttctctgcaaaaagatgttaggcccgcattgtatgaaacgtttcacatgccagagtggttccaaggacaaggaatcccacaaattgaacaagcagtttaggaattacaactgacacataggattactggaaggctaagccagctaggcaacatgtgagaatgtttgtacaatatgtatagatgcatgaagattttgttcaatgcggagtaaccatgttcaaggggagggtaagggataaaaatgaattgtaattcagcacaattatagacctttatttgtgatgtgcttcttactttatccttgtatagcactctttttgcctcaggttcgtggaactatttgttagatcatcgagctgtcaatgacagaaacaagaaagaagtgctatacaaggtattaaag

SEQ ID NO: 12893 - DNA, 319 bp, Setaria italica
  Peptide Sequence Number=SeqID_78867
cctcaagtccgcctcctccgctggcagcgccgccgccgcggccgtcaacgtggtcgtcgtctccgaccgggccggggggcccgggtgccgggcgggacgggagcggggccgctcgtcatttcgccggccacgggcgtgcacgagctgctcgagtgccccgtctgcaccaactccatgtacccgcccatccaccagtgccaaaatggtcatactctgtgctccacctgcaaaactcgggtgcacaaccggtgcccaacctgtcgacaggagcttggtgacatcaggtgtctggcattaagaaaaagtggccgaatcactt

SEQ ID NO: 12894 - DNA, 284 bp, Setaria italica
  Peptide Sequence Number=SeqID_78868
gtgggcgtgagcggcgcgcgcgacctcccctccttcttggcgtagtgccgcacctgctgctgaagcgccgacggagggcggaaggaggaagcgatggccgggtggaagaacccctggggaagaggcgcgtggagggagtgatgccggcggcaggacaaggagaaagcgacggtgaaagaggggggttttgggagcaggggtggcggcagcgggcgggcatgggaggcgacggcggaggcggaggcggaggaggacgacgagaggacgcggcggccgaggccggc

SEQ ID NO: 12895 - DNA, 274 bp, Setaria italica
  Peptide Sequence Number=SeqID_78869
cactgaaccatctctccccaagaatcgtcgatggactccgtgcacacctccaccggcggccgccggcgccgcgtgctgttcttcccgctcccataccagggccacctcaaccccatgttccagctcgccggcattctccactcccgtggtttcgccgtcaccatcttccacacccacttcaacgccctcgacgcgtccctccaccccgcctacgacttcgttcccgtccccgacggctgcccgccggcggacacccccggcacgctgcaggtga

SEQ ID NO: 12896 - DNA, 479 bp, Setaria italica
  Peptide Sequence Number=SeqID_78870
cgccatgtccccttcctcgctgctgctgcaacactgcaaccaggacctgctggcgacaccctgctacgaccctaccactactttgtcatctgcgatgacgatgccagcattggcttccgtcgtcgtatcaacgcccaagtcgtcgtcgccgacgacggcagaatcgccggctagtgctccggtggcagttgacaatgggcttcttgatgacatggtgccgccggcaatgaggcatggatgattttataggctgcatgcattcagtagctgatttctcggtgaattagtatactacagttaagcatctgattggttatactagttacttatatattgggcggcagagataagaagtaattgttacatatatacacatatatgtatggtcaatcgtcggcagccttgtgacaaactaaattaattttaataccaaaggactagaccgaacgaatttagaacctaattaactaattaattaa

SEQ ID NO: 12897 - DNA, 276 bp, Setaria italica
  Peptide Sequence Number=SeqID_78871
gaggggagtgcgcggatcgggcggcgggcgcggcgcggatgttcggccgcatgaggtgcctagtcggcggcggcgtccaggacagcccgcgctctgcggccaagagggtctcgccggcgtcgtggcggtcggacaccgccgcagccgaagcagccgcggtagctgggggcaaggggccggtgatctgcttcaggccgccggacgtgatggagacggtgcacgaggtggccatttacatccaccgcttccacaacctcgatctgttccagcaaggat

SEQ ID NO: 12898 - DNA, 433 bp, Setaria italica
  Peptide Sequence Number=SeqID_78872
ggataacccagggtggagtattcacgcagaaccgctcgcagcctcgcacgccaatactccaccctcgcgaaggccaggcggcggcgctcttcgactcccggcacgcggctcttcctggcgggcgaccacgcctggggtggcccttgcccttctcgccgcgcagggagtaccagccgcggagctccggcctcctcctggcagcgcgcggtcgagctccaggcagggcagcgagtggccgagctccaggtagggcggcgtcgcgatagcgggcagtggacgagcggcaggctgacggagctcttactgggcggcggtgcttgcggtggcaaaccccgctgggtggaagaaacatgtcaagaatggcgcctccgtctcctcctatgtccatgaagcctccgacgctgcccttctcccctcccaaaaagccgccgcc

SEQ ID NO: 12899 - DNA, 574 bp, Setaria italica
  misc_feature (1)..(75): n is a, c, g, or t
  Peptide Sequence Number=SeqID_78873
nnnnnnnnnnnnnnnnnnnnnnnnnnnnnnnnnnnnnnnnnnnnnnnnnnnnnnnnnnnnnnnnnnnnnnnnnnncttttaaaggtcaacatgcaatttacagctcagggtaaagatagatggtggaccagcgataactagtgtacatgggagctaacattctaccgttagaatagcaaaacgcatacatcaggcaagtagtacaacagtcttgaaaaatgattacagctgttctataatcaacaattcaaagtgatttctacacaatatatattaaacacattattttgctaatccagatccaggcctaccagctgagacaaccctcaatcataggatgaagacctcaccacagacgagtagtagtgggcctctaactccttgaggcttgtggctgcctcctgcccaattctctccagcattctctctgttccctccacctgctgaccaagcacctcaatcctcctatccacattctcattcaacgaagcaagcccggaaaagatggctgttctcttaagttcggacaccaatttcaacagagagtctgctgaatgtaccatgcgggctgcgc

SEQ ID NO: 12900 - DNA, 347 bp, Setaria italica
  Peptide Sequence Number=SeqID_78874
cccatgatgccatggccaactctttcagtgatatctaaccccacttgcagttcaatcggggtctttacaacagaacaatacaatggtgaatggatatgtcatgatttcacacctttggatgtatggttcctcaaaacttatgtggaaccgagtgtgccttcatgcaaattgcacaatcagtcaagtatggttttgcctcgcaagccaggcatgactaaataccaaatttctgtgatactgaagttctttaatatctaaatttggcataatagttttcattctctacttctgttactgttaacccaacctccatccacgttgtgcaagcgcttcacgaacacgtgaag

SEQ ID NO: 12901 - DNA, 1339 bp, Setaria italica
  misc_feature (302)..(302): n is a, c, g, or t
  Peptide Sequence Number=SeqID_78875
gtggagcattataatcgatgtttggtcattgctagtgtactccatgttaaccagatgtggctaataccaatcacagtatcattagtattagccacatctggttaacatggagtacactagcaatgaccaagcacaagaagatcctcaatattacaacaacaaacatggcatatacagaaatcaccaaaggaaatcttctaggcgttaaacttctctctgtcgtgtggagcattataatcgatgtttgggcccacagggataatcccgtatggatttatgggtgagtagcctccatagtagcncttttttatgtactccatgtttaaccgtgctgctgatgccaggaatttggtatatgtccttggtgtaattgaacagatttgggtattccctgatgagcttcttgttgcatttgaagtaaacagagtaaacctcatcaaatcttataagagttgtaaacaagcgcacgtctgcctctgtaagttgattgccgcataaaaagcgttgcttgcttagaatatcctcacatttgtccaaagcctcgtataatttcgtgaccgcctcgtcatatggcccctgttgctttgcaaaaccacatttgtacacaccgatgtttatcgcttcgtataccaactcattgatctcatctatgctggcctgtaaatgagcagggtatagatccagatcaggattctttgcaaactcgttgaactcggagttgagcattcggatgatctccgcgctctcgttgttcacgatggtcttgagctgcttgtcccatagaacctgtaacacaacacaggaagatcaatccgattgtttagctggaaatgtcaaatgaggagaagagactcacagggacgcttggtttcccggcgtaatttctgctggcgatctcgtaaagctccctgatgctcttggctccgttgaaaggatcgggctcggcacctggctcctcatctttggtggcaggaaacacccatcccatatggtcgtcggtctccttggtcctctcaaagacgggtttcaccgaggtgaagccgatggcgtgatcgaggcccttgagcttgaggaaggcgaggcacctgcacgcccaggggcaggagtaggcgacgtagaggtggtacctccccggtgcggcggggaaccgggcggagctgtccctggacacgaagctccggaaggtggacggcgacgggtcgaatgccccggagtcggtgacttcctcgtgccccgagcgcgccatcttgacgtcgacgaaggtggtggagagcgtccgggcggcagtggcggtggaggtgcggcgactggggaatcgtgtgctctgcctacggccttc

SEQ ID NO: 12902 - DNA, 525 bp, Setaria italica
  Peptide Sequence Number=SeqID_78876
aaatcccgtatggatttatgggtgagtagcctccatagtagctcttttttatgtactccatgttaaccgtgctgctgatgccaggaatttggtatatgtccttggtgtaattgaacagatttgggtattccctgatgagcttcttgttgcatttgaagtaaacagagtaaaccagcatactgatcggccctgacaggtgggcccgcccgaccacgccgtgcagaccaagacatgaagatacgtggagcacaagtccggaggccgggtgaacggattctgcccgaatatcacgggatacttgctgtaaaccaactcagattgttttccatgtaataactgactctaggtcgtcagcctatataaggcggccaagagcgccccccgagagtaacgtacatcaactcttcgcatcccataccagcaatacaatccacaagaacacaggacgtaggtattactctccagagacccgaacctgtctaaaccttgcgctcttatgttaccattcaagctattgatcttgcg

SEQ ID NO: 12903 - DNA, 813 bp, Setaria italica
  Peptide Sequence Number=SeqID_78877
actacaacagcagtgctactcgccatgtatttaaagacaaatagagtatctattatacaggatattttacatgacagtccctattactaccggaacaaagcaaccaatcacagtatcattagtattagccacatctggttaacatggagtacactagcaatgaccaagcacaagaagatcctcaatattacaacaacaaacatggcatatacagaaatcaccaaaggaaatcttctaggcgttaaacttctctctgtcgtgtggagcattataatcgatgtttgggcccacagggataatcccgtatggatttatgggtgagtagcctccatagtagctcttttttatgtactccatgttaaccgtgctgctgatgccaggaatttggtatatgtccttggtgtaattgaacagatttgggtattccctgatgagcttcttgttgcatttgaagtaaacagagtaaacctgtagaaataaaaagattcagtactcataactggttaaccttaatccgtataaggaaatatttgtaaactacagacagaaaattttaagttctaatgaaaccaaaaaatgtatagcttgaaactatagtattctacttcacaattgttcatctgcatataaaaatgccacctaataaggaaatgaaaaacgaaaacaagatgatggaaaaaccctgtatattcaaaatgtttacgtgtccacctttatatggtctaataattgtcaaaccccttatttgcgcacagttttttgcaattgattaaaggcgacaccaaaaaatcacactctgcatctcattcattt

SEQ ID NO: 12904 - DNA, 497 bp, Setaria italica
  Peptide Sequence Number=SeqID_78878
taagtcttctagtcttctattgtttgttaatttaagtaacctattccttgttaaatttgcctaagttttttgtttgtcacagaatcagttgccagaaggaaattaataagttgagttgaaatgaactatatacttgcatgctaatcagctaatcacaaagagaacacataagaaaactgaatacatcccaatcagtggcacacaagctatgtgaatatactatttttccacctcaatacagcacagtaacaagaagagagacttggataaccaaaatgtgactgatagcaacactgcaacagcattagataacactaccgtaaaaatgtacaaactgtaagctcactagatggcaaacatgaagaatcggaaacagtctcacattgtatattggagtgattggtggttcagtagctcttagcttctgtagtattctatagaagaaagcaaaacacaggaactgcaaaggcttccagtctgcattgcccattatagct

SEQ ID NO: 12905 - DNA, 157 bp, Setaria italica
  Peptide Sequence Number=SeqID_78879
ttgcaatgcacttgatcaattaaggtgattctgttgttaggctaaaaaaattccatacattacactgctgttgaaatatgcacgcgaaatgttttcatcagccatcagcagttatggattcaccggcacaatgctgatggctgatgaaatatgcacg

SEQ ID NO: 12906 - DNA, 647 bp, Setaria italica
  Peptide Sequence Number=SeqID_78880
atcacagcttcatactatcgatgaacacgacaaggaattttgttgaggcttagacggtcctgagatgtttggacatgccaagtttcagtcagaggccaacttgactggtagtgccttgtccatcgagggaaagtcaagaatccacaaattttgtagcatactttaccagcatctgtcaggtgtgaggcagagagttttttttattatttcctgaattaaagtgataatatttcctgaattaaatgagaatactgatgtctgacaaacgggagctccgtagcctaacaacagaatcaccttaattgatcaagtgcattgcaagtatctgagtatagggacatctaataaaaattccatacattacactgctgttgaaatatgcacgcgaaatgttttcatcagccatcagcattgtgccggtgaatccataactgctcacataaaagcctgcactaaaaactctctgcctcacacctgacagatgctggtaaagtatgctacaaaatttgtggattcttgactttccctcgatggacaaggcactaccagtcaagttggcctctgactgaaacttggcatgtccaaacatctcaggaccgtctaagcctcaacaaaattccttgtcgtgttcatctcttatttcgtta

SEQ ID NO: 12907 - DNA, 408 bp, Setaria italica
  Peptide Sequence Number=SeqID_78881
aaattcgtcgtctgcagtctcctcggcgtccttgcgcttcttcttgtaggccatcttcatctggtcgaagctgtcgagcggcctgatgcccagaagctcgtacgggttctcctcgtccccaaactccccgctccctgccgcagccgccgcgttcgccgcaaccacgaccgcgccgcggggccgcctcacggccgacgcgaccagccgcagcgaatggggtatgggccggccggcgcggcgagggagagggagaaagccgcggcgcgagagggatggtgtgagcgcgaatgcgggcgcggccgccgcggcggtcgccgtcgccattggggtctcaacgcctagggttttagagcagtctcacgcgacggcgaggaggagaagccggaagccatgggagcaaagggcgag

SEQ ID NO: 12908 - DNA, 1103 bp, Setaria italica
  Peptide Sequence Number=SeqID_78882
caacagcagtgtaatgtatggaattttaattagatgtccctatactcagatacttgcactgctgttgaaatatgcacgcgaaatgttttcatcagccatcagcattgtgccggtgaatccataactgctcacataaaagcctgcactaaaaactctctgcctcacacctgacagatgctggtaaagtatgctacaaaatttgtggattcttgactttccctcgatggacaaggcactaccagtcaagttggcctctgactgaaacttggcatgtccaaacatctcaggaccgtctaagcctcaacaaaattccttgtcgtgttcatcgatagtatgaagctgtgatatacagaagaaaggctgcagctgcggtaacaatcatctcctggtagtaataaacaatacggggagtgtactgccatgaaagctcaatcaagttaatagctgctgtataacccagggacgcagtgaaaacacatccaaatatcaaacccaatgcgcggactactcttttcgccattcgtatcccccgtccttcaacctcaccatattcattgtatattggagtgattggtggttcagtagctcttagcttctgtagtattctatagaagaaagcaaaacacaggaactgcaaaggcttccagtctgcattgcccattatagctatccaaacaacaaatgctgctgatattgccatatttatgcgcatgtccttcactgttgatctggagaatctcggtccccagggcactactggttgattgtcagcatacttgatgtccttggacacctgaacagacccgtatgtgactcccttcttccgatactgcagctgctgcatcatgacggtgtcgaaggccctgtccaacttggccagaaattcgtcgtctgcagtctcctcggcgtccttgcgcttcttcttgtaggccatcttcatctggtcgaagctgtcgagcggcctgatgcccagaagctcgtacgggttctcctcgtccccaaactccccgctccctgccgcagccgccgcgttcgccgcatccacgctaccgccgcgggcctccgttcggggttccgttccttttctttacggtttccgttta

SEQ ID NO: 12909 - DNA, 342 bp, Setaria italica
  Peptide Sequence Number=SeqID_78883
tgactaatattttttctacttcctcactgtgtaaatccattgtagtaaactcactgtaaagaacaggtagttttctttcactgtatcctctgcttcaaaattgttaaaaggttatatggcttcatcatatagctttgttagcacacaacgtcatatgtatggaatagtttatttctcttaactgttattttatgatgcagcctgatatccattttctacttgacaggtggctcattcactgtagctatttgcaccagtaatggagagaggctcacttgacttagctcagtgtatcagagatggtatctttggataagtcaggcctagatggtgtatcgtcta

SEQ ID NO: 12910 - DNA, 557 bp, Setaria italica
  misc_feature (522)..(522): n is a, c, g, or t
  Peptide Sequence Number=SeqID_78884
cggcgacgattacaccatcgacgcggcgaagaggatgaagtacgaggagctcttccccgtagaggccaagaagttcgggtacgaccccgccaacgccgcccgcgccgccgcccgcaatcgctccgtcgaggaggcccttgacgaccgcgtgcgcaagaaggccgaccgctactgcaagtgaggtggctcattcactgtagctatttgcaccagtaatggagagaggctcacttgacttagctcagtgtatcagagatggtatctttggataagtcaggcctagatggtgtatcgtcatttagctagtctcagtactgttgaagcattttcttaaatgcatatgtaccagtaagcagaaggatgctttgcatctgttctgacatgattttattccaccctctttctttcttggattggccatttagagaataccagatggttcacaccagtgttattgcatttgtatttgaaatacagttacaagcctggaaagttttccaaaaaaaaaaaaaaaaaaaaaanaaaaaaaaaaaaaaactaaaacgagacacgacaac

SEQ ID NO: 12911 - DNA, 456 bp, Setaria italica
  Peptide Sequence Number=SeqID_78885
tgttaaacctgaaacctctttccatcagaatagaaaacaaagtcttgaagcggtttctcaatatcacatttggttctccaatggaggaaattctcattgaaaagcttatcgttaaggttgttctacctgaagggtcaaaggatatcgaagtttcagctccctttccaacaaagcagtggcaggaggtgaagtattcacaccttgacattgttggaaggccagttgttgtcttggagaagcctgatgttattccagagcataatttgtatttccaggtttactacaaattcaacaatatatccttgctccgagagccgttgatgcttattactggtttcttcctcctgtttgtggcctgcattgtttacatgcgcactgatatgtcaatttccaagagctctccttcttacttggccaagctacaatggatgaggtgcaagccatgttcagaaatcc

SEQ ID NO: 12912 - DNA, 428 bp, Setaria italica
  Peptide Sequence Number=SeqID_78886
gggggaagatcttcaaattgtccatatttcagttctgaatccacaagttttgcgcttggatgccttgtgtatgattcaaccctttccagaagaaatcactcaagctgaagcacaacttgttgtctatcaggatagtgctcactatctatcgccttaccctgttaaggtacagacacttactatcagattgcctggtggaagggttgaatcatacacaaggcatccaagcgcaaaacttgtggattcagaactgaaatatggacaatttgaagatcttcccccgttttcctacttgcctgtgatcgtgcactttggcaccaccatgggcaatgttgtagtgttcagtaatctgtacatttccccagtgagatatctcaatctcccttataacttccttcgcgactaacaaaaggattgttgttctcaaa

SEQ ID NO: 12913 - DNA, 2584 bp, Setaria italica
  Peptide Sequence Number=SeqID_78887
actacttaggacaaggcaggcaggcgcacacacgcacccccgagggttttaagcacctctccctcgatctggccgggaagccaactccccgacgcgatctggccgcgggaagatggcgactccgctgccgcctctccgccgcgccaccaccaccctcctcctcgtcgtcctcgtcgccgtcctcgcctccaccgcccgcgccgatctcgtcatctccaaggcagatcgcagggttgatctgacttcgcatatcgttcgcgtcctcgcttccctcaaggtcgaaaatgttggaccggaccctgtctctcaagttttactatcctttcccaatatccaagcgaagaacttagcagctataagagcatttggaactgaaggaaaagtgaagggtccaagtactattctgccaattgaagttgttgagccttctggagctcccccagagctaacattcttttctgcattgttacccaaacctttgggaaagggaaagactctacacttggatgtcctgactgtattcacacactctcttcaaccctttccagaagaaatcactcaagctgaagcacaacttgttgtctatcaggatagtgctcactatctatcgccttaccctgttaaggtacagacacttactatcagattgcctggtggaagggttgaatcatacacaaggcatccaagcgcaaaacttgtggattcagaactgaaatatggacaatttgaagatcttcccccgttttcctacttgcctgtgatcgtgcactttgagaacaacaatccttttgcagtcgcgaaggaagttataagggagattgagatatctcactggggaaatgtacagattactgaacactacaacattgcccatggtggtgccaaactcaagggtgaattttccaggatcgattatcagtctagaccttacgtaagaggtgtttcatcttttaggaatcttattgcgagactgcctccaagggcccactctatttattacagagatgagatcggtaatatttcgacatcacatttgtggagtgattctaagaagacccatctggaaattgaaccaaggtttccattgtttggtgggtggcaaacaacctttactgttggttatggtttaccgcttcaagactttgttttctattctgatggaaagaggtttctcaatatcacatttggttctccaatggaggaaattctcattgaaaagcttatcgttaaggttgttctacctgaagggtcaaaggatatcgaagtttcagctccctttccaacaaagcagtggcaggaggtgaagtattcacaccttgacattgttggaaggccagttgttgtcttggagaagcctgatgttattccagagcataatttgtatttccaggtttactacaaattcaacaatatatccttgctccgagagccgttgatgcttattactggtttcttcctcctgtttgtggcctgcattgtttacatgcgcactgatatgtcaatttccaagagctctccttcttacttggccaagctacaatgggatgaggtgcaagccactgttcagaaaatccagggtctctttgagcaatgcttggcagttcatgataaactggaggcctcattgcgtgatttgtcaaggactggggacgtccagtcttgcaaggctgctcgtaaagctgctgatgcacagtttaaggagctatggaaagagctgaagccattgttgacatctctacagtcatctccccagtcttatcagatatggccaaaggtagaggacttgatcacaaaggagagagagatgcaggagaaactcatgacaaggcattccaccgttgtcgacagctttgagaagaagctgcgtgggcaagatgtagagaacaggattgctttgcagcagcagaaaattgctgccctgaggcaggaggtcgaatctcttctagagtacattagtgagatttgagcaaatctgcgccatagcgattagactgttttgctgggttcatcccgatgttgaaatctagtactctgagattgtgtcggtaaccatccagtttcccagttgagtcctggaaattgcaatgaccatgtaacatgataatcactgtaatcattctggagctgactaaattttgcatttgatagcaatatcacagggaaccttcatcttttggacttagtaaaaaaaaaaaagcttatcgttaaggtatgtcatggatgtgcatcaaacaagtaaatttcattttgctagtttaaacctgctaggcaaaattgcagattatgcgaccatcatgtgttggtattcattctaaaaccacagcctttatatattttagtttgttattttagttgtctgagccttatagtaggaatgcgaattacaggaataatattctacgcctcgtagtgattgcattatctgtgtttttcccttgtaagtatctctgttgttggacaggttgttctacctgaagggtcaaaggatatcgaagtttcagctccctttccaacaaagcagtggcaggaggtgaagtattcacaccttgacattgttggaaggccagttgttgtcttggagaag

SEQ ID NO: 12914 - DNA, 261 bp, Setaria italica
  Peptide Sequence Number=SeqID_78888
cctcgacgtccgcgcctacaccaccgtgctgcacgcgctgtcccgggcggggcggtacgagcgcgcggtcgagctcttcgccgagctccggcgccagggggtggcgcccacgctcgtcacctacaacgtcgtgctcgacgtgtacggacggatgggccgttcgtggccgcagatcgtcgcgctggtggaggagatgcgcgccgcgggggtcgagcgcggacgacttcaccgccagcacggtgatcgccgcgtgctgccggg

SEQ ID NO: 12915 - DNA, 611 bp, Setaria italica
  misc_feature (3)..(3): n is a, c, g, or t
  Peptide Sequence Number=SeqID_78889
tgngaaatggatgagtgaatttgcatactcgctgtcagctggtaaatcagatgatggatcacagctaggtatcgggaagccactgattgtctggcctacagtggaagatgccgttgctcaatagagggttatgcagctggtagttgcattccaagtcctcaaaagaatgttgagaaagacttcttgaagaaatattggtccaggtggaaagcggaccatgtaggtcgttggtatgctcacttttcttgtaattacctgaagaactatgatgttatttgaatgaaattccatgactgttacaccgtcaggatgcttagagcatttattggcccaccacgatctctgactgcaccaccatgtttttaccacttatagaatagcttctgcatagccatgattgaaagactggcgtttcaggacctttaattaagtgcctaaggcttcaaacctcctgcacaagtataacttctccagataaatatttctttacctattagttgccaatgggggagtatcagtaataaaagaggttaggaaggatgaaggcgacgcttctggccctgccattctttgccattttccgaaaggacaagacaagaatacaaggtaca

SEQ ID NO: 12916 - DNA, 1258 bp, Setaria italica
  Peptide Sequence Number=SeqID_78890
tattctttcattatgttttccggctcatgcgggtccaaggtcttccatcatggactaacacttcttcagttaccattcaggatgtcatacagggtgaagtgcttcttgctgtactctcaaattacatggtggacatggattggttgctttctgcatgtccaagtttgagaaaagttccacatgtcctagtcctacatggacaagatggtgcttcagtagagcttatgaagaaactgaagcctgcaaattggatccttcacaaacctccactcccaatttcatttggaacacatcattctaaggccatgttgcttgtatatcctcaaggaatccgtattgttgtgcacacagcaaatttgatacatgttgactggaattacaaaagccaggggctatggatgcaagattttccctggaaagacacaaaggatctgaataaaaaagctccatttgagaatgatctagttgattatcttagtgcacttaagtggcctgagttcagagtaaatctcccagaggttggtgatgtcaacatcaatgcagcattctttaggaaatttgactatagtaattcaatggtcaggttgattggatcagttcctggttatcacgtgggccccaatattagaaagtggggccatatgaagcttcggaatgttcttgaggaatgcatgtttgataaacaattttgcaagtcccctctaatttatcagttttcttccttggggtcacttgatgagaaatggatgagtgaatttgcatactcgctgtcagctggtaaatcagatgatggatcacagctaggtatcgggaagccactgattgtctggcctacagtggaagatgtccgttgctcaatagagggttatgcagctggtagttgcattccaagtcctcaaaagaatgttgagaaagacttcttgaagaaatattggtccaggtggaaagcggaccatgtaggtcgttgtcgggcaatgcctcacataaaaacgtttactcgttacagtggtcaaaacattgcatggtttctgcttacgtcatcaaatttaagcaaagctgcttggggtgcgctgcaaaagaacaacacacagctgatgatacgctcatatgagctaggtgtattattcttgccccaaacactccaatctgtacctcaattctcgtgcacggagaggaacgcttcaaaccgggatggcctcgcccttggcaagacaatcaagaccaagctggtcacgcttcttgtcttggtaaaggtcgt

SEQ ID NO: 12917 - DNA, 491 bp, Setaria italica
  Peptide Sequence Number=SeqID_78891
tatcgtatattatgaacatgaactgtcccatcagaacatccaacagcaactacatctaaagcaggtgaggaaacacaacaacgaactggtgactcccaacccttgaaatcatacaattttttctttgtgctgatattccacagctgcaaggggccttcttcactaccaacaattaccttatttagataagtatcaggatgcatgatacaggttggagtaaacttgtctcccaatgatatgcttccaactggctcactgtttggttctgctcctttgaaggcccagatgaatatattacctttagcatctgcactcagaacatattctccaaacaggtatagcatgttgaccttctcttcatgtttactccaagtaacaacctgatcagtccttttgaaaactgcaatatcacttccatatgcagcaaatgtataatccttgtaggatgcaagagtccggatcttcttgggcagttggggtccagctagaac

SEQ ID NO: 12918 - DNA, 278 bp, Setaria italica
  Peptide Sequence Number=SeqID_78892
cgggccttggtccccgccaggtgacggacggtgacggccgccaccagcgacgagtccaggccgccggagagcagaacgccgaaggggacatcggtcatgagcctcttgatcacggccttctcgaaggccttcctgagcgccagcgggtcgtagcgaaccgacgggatgacggccacctctactcgagcaaggagggagggttcacgagatggtacaaccctccgtggtacgacgaggaggccgtcatcccgtcggttcgctacgacccgctgacctca

SEQ ID NO: 12919 - DNA, 193 bp, Setaria italica
  Peptide Sequence Number=SeqID_78893
gctcgtgaactctcccgccaatgtccttacccctgctgtgcttgcggaagatcattagcatatttaagtttctgatccacctccggaccagaacccagtccaataatatcaacctgtttcaggtgcaccttttttgactcagacttgtatctgctgtcctcatacgacccgagcacagttccagaagcaattg

SEQ ID NO: 12920 - DNA, 722 bp, Setaria italica
  Peptide Sequence Number=SeqID_78894
gaacctctcaaagatcatcctgtagtagtaggcctctttgtggtcgggtgttgtgtggaagatgaactttgcattcgacaacatcttgtcagtcacatttgatgctgcatgggcctttaagccatcgatccaactgtacccaacaccatcactgaactgctccttctgcctgtacaggatatgctttggcaggaatgggttctcctcatcgtcgaatgccttcctcagtacccacttctcaattcttccaagatcaggcgatcctgacggtgcccggcggcccaagcgtggcgtgcagcacggccaaggccgtcgagtgggacgcgcagtggtcggcgaatctcgacccctcggggagggcggcgctgggcgtccatctcgcctcctaccaccaatccgaatccgagtccgaatccggcgctcagcagcagaacaagcatgccccggccaccatcgcggcaggagccaagaagcccaggaccatcaaggctacaacgacgccgccaggcgttgtcatcgagggctagctcgctacaaattactaaatgattaagcaaagctgccattatatttaagctgttcggcgcatgctgtaactagtagtcgtgtttaatcctgaatatccttttcttaatctttatgtatcgaggaaccaatatatgcttactttgctcgaataatgagttggattgtcctattgttttgttttggttaaaaaaaaa

SEQ ID NO: 12921 - DNA, 864 bp, Setaria italica
  Peptide Sequence Number=SeqID_78895
gtaatttgtagcgagctagccctcgatgacaacgcctggcggcgtcgttgtagccttgatggtcctgggcttcttggctcctgccgcgatggtggccgggcatgcttgttctgctgctgagcgccggattcggactcggattcggattggtggtaggaggcgagatggacgcccagcgccgccctccccgaggggtcggagattcgccgaccactgcgcgtcccactcgacggccttggccgtgctgcacgccacgcttgggccgccgggcaccgtcaggatcgccggcttctgggggaagaacctctcaaagatcatcctgtagtagtaggcctcttttgtggtcggggtgttgtgtggaaagatgaactttgcattcgacaacatcttgtcagtcacatttgatgctgcatgggcctttaagccatcgatccaactgtacccaacaccatcactgaactgctccttctgcctgtacaggatatgctttggcaggaatgggttctcctcatcgtcgaatgccttcctcagtacccacttctcaattcttccaagatcaggccggacctgtaatgaagtcagaaatggtcactgtctgaaaaaaagaggtttcagtttcaatgaagtgcttgagatcgtcagtaccatcttccactcgggatcgatgctcatggcctcgttgatgaactccttgtccaagaagggcacacgagcctcaaggccccaagcagaggttgccttgttggccctcaagcaatcatactgatgcagagctttgatcttccggcaggtttcgcggtggaactcttctttgttggggcttgtggaagtagaggtatcctccgaagatctcgtcggagccct

SEQ ID NO: 12922 - DNA, 2180 bp, Setaria italica
  Peptide Sequence Number=SeqID_78896
ttttttttttttttttttctttatccaaacaacatggcatccaactcattattcgagcaaagtaagcatatattggttcctcgatacataaagattaagaaaaggatattcaggattaaacacgactactagttacagcatgcgccgaacagcttaaatataatggcagctttgcttaatcatttagtaatttgtagcgagctagccctcgatgacaacgcctggcggcgtcgttgtagccttgatggtcctgggcttcttggctcctgccgcgaatggtggccggggcatgcttgttctgctgctgagcgccggattcggactcggattcggattggtggtaggaggcgagatggaccgcccagcgccgccttccccgaggggtcggagattcgccgaccactgcgcgtcccactcgacggccttggccgtgctgcacgccacgcttgggccgccgggcaccgtcaggatcgccggcttctgggggaagaacctctcaaagatcatcctgtagtagtaggcctcttttgtggtcggggtgttgtgtggaaagatgaactttgcattcgacaacatcttgtcagtcacatttgatgctgcatgggcctttaagccatcgatccaactgtacccaacaccatcactgaactgctccttctgcctgtacaggatatgctttggcaggaatgggttctcctcatcgtcgaatgccttcctcagtacccacttctcaattcttccaagatcaggccggaccatcttccactcgggatcgatgctcatggcctcgttgatgaactccttgtccaagaagggcacacgagcctcaaggccccaagccagaggttgccttgttggccctcaagcaatcatactgatgcagagctttgatcttccggcaggtttcgcggtggaactcttctttgttgggggccttgtggaagtagaggtatcctccgaagatctcgtcggagccctcgccggagatgaccatcttgaccccgagcgacttgatcttgcgggacatgaggaacatgggcgtgctcgccctgatggtggtgacgtcgtacgtctcggtgtggtatatgacgtcctcgatggcgtcgatgccgtcctgcacggtgaagtggaactcatggtgcagggtgcccaggtgatccgccacctccttggcggccttgaggtcagggggatccctcccaggcccacgcagaaggagtggagcttggtgccccagcgcttggcggccttggtccccgccaggtgacggacggtgacggccgccaccagcgacgagtccaggccgccggagagcagaacgccgaaggggacatcggtcatgagcctcttgatcacggccttctcgaaggccttcctgagcgccagcgggtcgtagcgaaccgacgggatgacggcctcctcgtcgtaccacggagggttgtaccatctcgtgaaccctccctccttgctcgagtagaggtggcccggggggaaagatctcgaagtgctcgcactcgtcgtgcagggccttcatctccgacgaaatccagaccgagccgtcgattccccacccgatgtagaggggcggtgacgccgatggcgtcgcgggccgccatgaagcggccgtggcgggtgtcgagcaggacgaaggagaagacgccatccagcatgtccacgaaaccttccccatgctcctcgtacaggtgagcgatgacctcgcagtcgctgccagtcctgaacttgtggccggcagcggagaggtgggtcctgaggttctcgtggttgtagatctcgccgttgacggtgacgacgacggactcgtcctcgttgtagaggggctggtcgccggaggccgggtcgatgatggcgaggcgctggtgggagaggtagcagtcgcccacctgccgcagcccgctccagtctgggccccggtgcttgagccggcgcgacagctccagcacgcgggcgcgcttctttccctgcagcgaagcctcgtcggcgcagcccagcacagcaaggatgccgcacatcctgctacctcactcacaatgcaaccttaaatttttgttttgggaggaaactaaagcttgagttgcagctaggcttctcactctgctgagattacgagatcaaacagcagacgagatgagctgagctagcttgtgttgagtggagtgagc

SEQ ID NO: 12923 - DNA, 449 bp, Setaria italica
  Peptide Sequence Number=SeqID_78897
gctcaaccttagtgtctgtttaccgccggtactttgtttccatcgtctagctaggcgcctagtccaacaatgttatcttgacgacctgacctgtccacaaaggtatctgcccaagtaccatcgtcttaacatttctttatggcggacgcggccttccgacgtcccatgggacaaggccgcaaaagcagcagaatctttatggtcaggccccaacccctttgccacttcaccaaaccgactcgaatatatgtgcactggcacagatatatgctacataattaattcatgggatttttttggttgtgattcgacctttgatgggtgactaagagccagttaactaggtatgatgtagagcacgcttggttactgaagggtttaagttttagccggactctaaaaaaagttttaattagctgcatcatgtttatattgtgtgcaaactgtat

SEQ ID NO: 12924 - DNA, 1767 bp, Setaria italica
  Peptide Sequence Number=SeqID_78898
aactaagggggaacgaagaatagactgcgggacggcgtgcagcccgacaacgccaccttctcgaccgtcatcagctgcgcgcgcgcctgcggcctgcccagcaaggccgtggagtggttcgagaagatgccggagttcgggtgctcgccggacatgctcacctactccgcggtgatcgatgcgtacggccgcgccgggaaagccgaggcggccctccgcttgtacgaccgtgctcgcgcggagaaatggcagctcgaccctgtgatctgctcgacggtgatcaagatacactcgaccaccggcaacttcgacggtgcactcaacgtgttcgaggaaatgaaggcggccggggtgaagccaaaccaggttgtgtacaacacaatgttggacgccatgggccgcgcaatgcggccatgggtggtgaagaccatccacagggagatggttgaccagcaggtgcagcccagcaaggcaacatactgctgtctcctgcacgcttacaccagggcgcgttatggtgaggacgccatggccgtgtaccggctgatgaaggacgaggtgatggacatcgacgtggtgctgtacaacatgctcctatctatgtgcgcagacattggctacgtcgacgaggctgaggagatcttcagggacatgaaagcgtccatggatgcccggtccaagcctgatagctggagctactcatcaatggtgactctgtattcttccactgctaacgtcctaggcgcggagggcgtactgaacgagatggtggaggctggcttcaagccgaacatcttcgtcctcacctcactcatccggtgctacggcaaagctggacgcaccgacgatgtcgtcagatcctttggcatgctcgaggagctcggtatcagccccgacgacagattctgcggctgccttctcagcgtggcggggaacacgccggatgaagaactgggcaaggtgatcgactgcatcgagaggagcaatgctcagcttggcgccgtggtaaagcttctggtggataggagcgcctcctctggatctttcagggaagctgccagtgagctgctgggcagcgcccggggcctggtgaagatgccttactgcaacagcctgatggatctgtgcgtgaacctgaaccagatggagaaggcctgcgcgctcctcgacgccgcgcagcagctcggcatctacgccaacatccagacgcggacccagacgcagtggtcgctgcacctcaggggcctctccgtcggcgcggcactgaccacgctgcacgtctggatgaacgacctgtacacggcgctgcagagcggcggcgagggcctgccgccgttgttgggcatccatacggggcaggggaagaacacgtactcggacagagggctggccgccatgttcgaggcgcatctcaaggagctcgacgcgccgttccacgaggcacccgacaaggccggctggttcttgacgacgagcgttgctgccaagcactggctggagatcaagaaggcgtctgaattagtagctgtgtaaactggttaatttagggatacataggatttgtctgtgtaatctgcaggtgttctcccatccgatacctcctcgacctcgacagatttctgcaggtagatgctcgattgcttcatcgtagcttctaaaggtccatttctactgctttcatccagatggtcacagaccaaggaataccagcttcagctcatcattcaattgagatattaacaactgataatataacaattaaaaaaa

SEQ ID NO: 12925 - DNA, 641 bp, Setaria italica
  Peptide Sequence Number=SeqID_78899
caaggctacctgaaaatgcggctgtcactcgtcgaaagaaaaccagacgttcgtggtctgtggcaatgattttctccaagaaagctcccaacattttactccaattctctgtttctgtattctacactggatgtattcctctgcaaataatgagcaataaaccggatcctaccaagagtagagctcctcattcttgttgtagaagccatatttgcacaagattcccatccttcttctcaaccaatatcatagatttttaagacagcgttttaatggatcctcagtattatcatataccttggactccaattcaacaggcttcccgctccgtcggcaccttatgatttcccgagactgctccatcagctcaacatacttcttgcgcaattccagcatggggtgctccccaattgcagtgtctcccccagccatgtacgcctctttgaggacaacaaagcatgtcttttccttcaacaacaagtagaatacatgcgggtgccgctcaaacacaagatggaacttctgtggcagccccaggtgctgcctaaggcagagtaaccgccgcctctcagcagagcatgtcacaaacaaactaagcagctcatggagcaccccgacagcccgcttttccgaaacatcgc

SEQ ID NO: 12926 - DNA, 242 bp, Setaria italica
  Peptide Sequence Number=SeqID_78900
ccagacggccacggcgggcctcccaccccgctgccggctcgggttgtgctggcctctggtgagctgctcgtccgccgtctccatcgccatgagcgacgcagcaaccagcatgtaatgcgcgcgcaatgcgcagacgagtttcgatcttctgacgacggacagaatcaggaatctgatctttggtttttctggaggctgcccgtcgccaatcttgtaaaaaaatgagttctttccttaacact

SEQ ID NO: 12927 - DNA, 389 bp, Setaria italica
  Peptide Sequence Number=SeqID_78901
ccggctactacgacgacaggaccggcgagttcacgagcctaaccctgatcagcggcgaggccatgcaggcatgggtggactacgacagcgacgccggccgggtcgacgtgaggctggctccgatcaggacagggaagccgaggaagccgctggtttcgacggaggtcaacctctcgacggtaatcggagaggaagcgtacgtcggcttctcgtcgtccacgggtacgctgaccagccgccactacgtgctcggctggagcttcgccgtgggcgagccggctccggccatcgacatgtccaggctgcccaagctacctcaacggagctccgaatctccatcgaaggccttagtaattgctcttcctgtagtcgccggcgggctcaccctc

SEQ ID NO: 12928 - DNA, 2628 bp, Setaria italica
  misc_feature (2323)..(2323): n is a, c, g, or t
  misc_feature (2573)..(2573): n is a, c, g, or t
  Peptide Sequence Number=SeqID_78902
ttttttttttttaacttactgcaattttcttgtctttactatacataaacactttttctataaggccatatgtatcttttcatatatctacaggagtacaactattttctatacatatttatattagcaccacttctccatgtcccagccaaaaagcagttttaagttttaacatgcaagacaagttgagtggctgcaaaactgccaatcaacacttggaaattatctaccgaaacagcataacatgtcaaagcacagcagctacagaaaattctcgccaggctgggtcgaattgcttcattgtgctacacgttgtcaaaacaacctacaagctttccttctcccacctttctcaaagtcatgtgttttgaacagattgcaacttaaactactgatatcatcgtgattgtttcgatttcctgttggattgtctacccctcccttcgtaccttgaagacgaagatgaggatgctgaggaagctatggctgtaacagctgccttatcttttgtgaaggccttgcgcacgtcctctttgagttcagagaagcgcatccgcttgagatgctggtcctctggagtgccagtttcaaggtaaatcaaatcggtggattcttcaatgaggaacttgtcaagaacatctgaacaatgagggaagtatcgcctcccaagctcaactgtctttgttaaggcatcgaggcgttcacgcaacctcttgttttgcatcgtgggggtctcatttagatccacctccttcagtttactgaaatttctgatgccagcaaactcttcagttgagtcagcttgtgctatgcgcatgacaagcttggcttcagacgggaagaatattcttgcaaaggcaactctgttttccaagtttatgagcctcatgtgaaaattatcaaccagcaaaggtgtggcaattgactcctctatggagatctggtccaaaatgaaggatttcctcttaagttcttgctccaatatgtcgatacacaagtaagccttgcttttctcctcgcacttctccaacttcctgttgcagtctttctctcttgttagtctcttgcaaatagtaaaagcatcacgcccatccggggtcctctccatcacagaggctcccctctccacaagcgaaagaatgatatctggttctcgcctcatgcaagctatgtgcagcggtgtatacccactgttattcttcagattcacattggcagaattcagtttcagcaattccgcaaacactttaggctcacagtaggctgcagcatagtgtacagcgaatgcatcatccaaggtgactgcagactcctttaacagcaagccaacaaggtcaacatcgtcagaatccaaggccttgaggatgtttctaaccctcttctcatgctcagggtccagaatagcgttctctgattcatcatgaaacacactctggcggatttccttgatcttgcagtatatatcatctggaagctccttctcgaggtaccggctatcgagactagagactgcaatcctctgaagactctgattgagcaggtcctgaagctcacaggtggaagcaacatgaacaatcggcaccacatcttcgtccagagctgtgctaacaaagtccgagagacggcgctggaagagggagacaagctcggagatctggaagccagatgcggcgtacatggactcgacgacaaagtcaatcgccggtcggcacgccccgtgtccgcacgcgtcgtccatgcagacggtggcatcctgcggcgccgacttgaggcggccggtgtagaggtacccgaggacgggcacgagggcgtcctggccgatgtggcggcccccggggaccaggtcggcgagctccagccgtggtttctctccaaaggcggcaggcggcgggagggaggcgaagtggtcgcggaagaaggcgctcctagcggcgaggatgcagcggtggacgccgacggcggcgccgcccttccccgcggcgagcgcgacctcggcgtccgcgcagtcgaggaaggccgggtcgaggaggcgctcgaggttgtcgctgaggcggcggagcctgacggcctcgagctcggtcggcgtggcccgcggcggcggcggcggcggcgtggactggggcgacgaggacggggacgagaagctaatggtggaggcctccatggttctagaaggggcgcgaggcgattagaaggttatagaagcttcagtgcgtgctgctaccgagatttgggaggcctgaaagatcgaagcttcccttccagctccaaagattcaagccttttgcacgaggatttcgtggctctgcgagacatgaaaacngggaattcgacaaggcgcaacgacggatgctactaaaccaagcaggaatctgcagattcaagatggaacgaggaaagtacagcgacctccacctctctatccagcaaacaaaggaaagtcgcggggaagatttcctcccgaaatgaagctcaaatcatcagaaaacctgacagattccctaacagagcacgtacagcagatgggggcagtggaagcccaacccaagctcgtgcggattcggggacaaacncaagcaagaacgactgccgcgacagcctgagagagagagagagagagagagagag

SEQ ID NO: 12929 - DNA, 259 bp, Setaria italica
  Peptide Sequence Number=SeqID_78903
gtcgtctttgtcgtttccgtccgccgggcgacggcgcggggccgcggcgggcgcagcggagtccatctcgtcgcagtcgcagacgcggcacccgccggccgcgccaaggggcagcctgaggcagctcctcctcctcgcgcggcgtcggctgccatcgcgctcgcccagcttccgggggtccgcgaccaccacatcgtccgggggctcggcgcggagcagggaggccaggctgttgctgccagatctctggagcggcccg

SEQ ID NO: 12930 - DNA, 631 bp, Setaria italica
  Peptide Sequence Number=SeqID_78904
cgctcccgctgccgctgccgctgccgctcccgccggcggcggcgccgccctccgacaccctcttcctcttgccccgctcgtccgcgccgccacccagctcctgggtgccctcgtcgtctgagtcctcctcatcggagtaatcctccgtgttggacgtcgagaagctcatctggttgcccagggccatcggcatccccgcgccgccgatcgccacggcaggcggcggctcggcaggcacgcgcagggccgagggcctcgccgcgccggaggacgacaacccgacagaggtcgccgggggcacgaacgacgccgcctgcgccgccccgccggtgccgtgcagcgcctcgagctgcgtgaagaagcggtacgtcttgccgtcgttccggccggcgcggctctccttggtgcgcttgtagtacttgtgcacgttctcgaacttctccttgcacttcttggcgctccgggtgtaccccttctcggccagcttcctgccaaccaccgcatcgatcgtcattagcaacagcaacaagaaaaaaagagcttataattaccttgtatccaattcaatggcgtaccaccgccaccaaccaccgcgatttcaatcatacatgcaaggcaactgtagccctca

SEQ ID NO: 12931 - DNA, 919 bp, Setaria italica
  Peptide Sequence Number=SeqID_78905
tttaaaggtttaaaaaccttaagaaaccaaaaataacaagacgtacgtacaagtaagaaagaatcttcctcattgatgtatggaacaactgagccaaccactcgcttggtgctcaggtcaatggtaactagcgagatcttgaacttgccagacaagtctgcccaatcatacaatacaaagtgcgcaacattgatatcatccatactcagcaacgggagcatcataacctcatgtgggagatccttcgtggagtgtgtagcccacaggtcatctgcttgaaccacaaaactattggctgactgcgtttccgtcactgccttggagacgatggtgaaaccagtgtcaggcaccattcggcctatatcagcaccatcatggcggccaacatcaaggattgccaacgtgcgaccaccttcggtgacgcacaagctgcggtacaacgcggggaagcctgcaggatggtagctggagtaatctggaggaaaaccggcgaagacggccttggggctgtctccacagatgtcctcacaatacaatacgcctctcctatagtccacccagcagagggtattcttgaagggaaccacttcgtttgttgtaaagttgagcagattgatgtgtttaacatgctgcccctggatcggcagatacatggcctcccacttctctcccccactagtagaatcatctctgacggtcgagcggagcacccacaactccacctccagcgcctcggcctccgggtcacgcctgcttacgctcatatacgccacggcaaactcctcaccacagcacaacaggccaacaccccaaggctcgaacgggcgcgggatcggcctcccgaaatacgcgtttgttgtctacggttgttcttaacctttggttcttagtttccgttttctttgtttagtttagttta

SEQ ID NO: 12932 - DNA, 712 bp, Setaria italica
  Peptide Sequence Number=SeqID_78906
ttccttcctgcctctggacgacctgctgcatgagaccctcgaagaaggacatcatcttcttgctgccgccagcgccgccaccgcgctttcgcttgccgaggtggtcctggctgccgcccgtctccgccgtcatgtcgtcgtcctcggactcgtcgtccgactccgagtccgacatggacgagaagctcagaccttgcaggttgaggggctgctggggccgggggcagctccatgggcgccgcagccggaaccggagccgggcccgccgaagatattggcgcaggctgcatcggccccggcggcggcggcggcattgaactcataggcggcggcgcggatactggcaccgcgaaggcgtgcagcggctgagcgctgcttgctggcggcagctgctgctgtggctgcggctgcggcgcggccgcatgcagcgcctccagctcgtcgaagaatcggtaactcttgccgtcctgcctccccgcgcggccttctttggtgcgcttgtagtacttgtgcacgttctcaaacttctccttgcacttcttggcgctcctcttgtagcccaaatccgcaagcttcctggagacgtcctcccagagggggcccttgagcgtggcgtcgcggaaggtggcgtccatctccgaccggatcctgatgagcgcctgacgtaactaaacctaaacccgtaaaaggaaaaaccaaaaaccggtaaaaa

SEQ ID NO: 12933 - DNA, 462 bp, Setaria italica
  Peptide Sequence Number=SeqID_78907
cggcgacgtagtagatgaagtagtcgtgcgccatctcgccgaacggcgacgggttggagaggtcgacgaaggagtccagcctgaggaggacgaggttgcggtgggccgccgcgaggtggcacatcatctcgcgcttggggcctccaggccagctgaggtagaggcgcgagggagtggggggctcggcgaggatgaaggagatgcggaagtgagcgccgacggaggtctcgccggtcgcggaggtcctcttgtcctcacggaaagactgggggtcgtccctacggaagatgaagcgctccagcatcacccaattggggagggcgccgccggagccggcgggagcatcggcggcggccatggatctgagggggttcggtggaggaggcggcggcggccggattggggtattagatcgattctctagctagggctggggagatttggggcgaggaccacgaaagg

SEQ ID NO: 12934 - DNA, 1094 bp, Setaria italica
  misc_feature (68)..(68): n is a, c, g, or t
  Peptide Sequence Number=SeqID_78908
tatgacattgaggttacacgtagtaacatggtccatccaagccgcagcccacagaagctatcattgancgtttgatggcgatttggaccattacgagagtaagaggtgaccagcaaaggggaaggggcggcctgtgtcatacagtggtaaaggctgctggagcaccagagttttgggggcagaggttgtggcaccatctgatacatgtatggaaagaatcatggaaccccaacagagaaattgaagcgccaagggtatgttcatcatatagcattaaactcaaagaccatattgtacgatatgatcaacctgcaccttgtaggtctggtgaaggcttttccctccagctgtctcataaaccacagaatgaaatagcccatcacttaacacagcagaacccaaaaagggtgacaagtggccaatgcagtgaaagtgattcatgcagggttcttcgtcgtcctttgaagattcaggaacttggggaattctgatggaaggaagtgcatcaagtaatttggtttagcctcgaccaaatcagcatcgtcagtagaaagatctaccccatcgatgtatggaacaactttgccaaccactcgcttggtgctcaggtcaattgtaactagcgagaccttgaccttctcagacaagtctgcccaattatacagtacaaagtgcgcaacattgatatcatccaaactcatcaacgggagcatcataacctcatgtgggagatccttcgtggagtgtgtagcccacaggtcatctgctttaaccacaaaactattggctgactgcgtttccgtcagtgccatggagatgatggtgaaaccagcaggcaccattgggcctatatcaatgccatcacggcggacaacatcaaggaatgccaacgtgcgaccaccttcggtgacgcacaagccgcggtacaactcggggcggtacaactcggggcggactgaaggatggtagctggagtaacccggaggaaaaccgacgaagacggccttggggctgtctccacagacgttccttcacaattactaattattgtccctattccttattagttccttacccttagttcttagttagtt

SEQ ID NO: 12935 - DNA, 1657 bp, Setaria italica
  misc_feature (1)..(42): n is a, c, g, or t
  misc_feature (46)..(46): n is a, c, g, or t
  Peptide Sequence Number=SeqID_78909
nnnnnnnnnnnnnnnnnnnnnnnnnnnnnnnnnnnnnnnnnngtcnctttttagtgaaattgaagcgccaagggtatgttcatcatatagcattaaactcaaagaccatattgtacgatatgatcaacctgcaccttgtaggtctggtgaaggcttttccctccagctgtctacagtacgacagatacagaaaaaacacaatcaaagactattggagtactccctaaacctcacaaaaagtgaacacaatagtacttcataaaccacagaatgaaatagcccatcacttaacacagcagaacccaaaaagggtgacaagtggccggtgcagtgaaagtgattcatgcagggttcttcctcgtcctttggagattcaggaacttggggaattctgctggaaggaagggcataaagaaatttggtttaaccttgaccaaatcagcgtcgtcagtagaaagatcttcctcattgatgtatggaacaactgagccaaccactcgcttggtgctcaggtcaatggtaactagcgagatcttgaacttgccagacaagtctgcccaatcatacaatacaaagtgcgcaacattgatatcatccatactcagcaacgggagcatcataacctcatgtgggagatccttcgtggagtgtgtagcccacaggtcatctgctttaaccacaaaactattggctgactgcgtttccgtcagtgccatggagatgatggtgaaaccagcaggcaccattgggcctatatcaatgccatcacggcggacaacatcaaggaatgccaacgtgcgaccaccttcggtgacgcacaagccgcggtacaactcggggcggtacaactcggggcggactgaaggatggtagctggagtaacccggaggaaaaccgacgaagacggccttggggctgtctccacagacgtcctcacaatacaatatgcccatcctatagtccacccagcagagggaattcttgaagggaaccacttcgcttgtcgtaaagtcgagcagattgatgtgttcaacatcctgcccctggagcggcagatacttggcctcccacttctcaccaccatcagtagaatcatctctgacggtcgagcggagcacccacaactccacctccagcgcctcggcctccgggtcacgcctgcttacgctcatatacgccacggcaaactcctcaccacagcacaacaggccaacaccccaaggctcgaacgggcgcgggatcggcctcccgaaatacgcgttgtgcacggtgcaacctggcagccgtctgagagcaggcgtggattgcgcctgcgagcgggggtcggcggcgacgtagtagatgaagtagtcgtgcgccatctcgccgaacggcgacgggtaagaggggtcgacgaaggagtccagcctgaggaggacgaggttgcggtgggccgccgcgaggtggcacatcatctcgcgcttggggcctccaggccagctgaggtagaggcgcgagggagtggggggctcggcgaggatgaaggagatgcggaagtgagcgccgacggaggtctcgccggtcgcggaggtcctcttgtcctcacggaaacaacaaagaccgacggtaacaaaactaacggggaacggtaaaacaaaaactaaacggggaaacgaaa

SEQ ID NO: 12936 - DNA, 1611 bp, Setaria italica
  Peptide Sequence Number=SeqID_78910
tttcttttgttttattttctttgtttcgtttacttgttagtactagtctggaggatcctaggcaccgacatatagatatttgacaagaacatgggctttatttctagcactggaatgccaatgaacaagttttccaaacaaaaagtggcacaagttgggcctatgacattgaggttacacgtagtaacatggtccatccaagccgcagcccacaagaagctatcattgatcgtttgatggcgatttggaccattacgagagtaagaggtgaccagcaaaggggaaggggcggcctgtgtcatacagtggtaaaggctgctggagcaccagagttttgggggcagaggttgtggcaccatctgatacatgtatggaaagaatcatggaaccccaacagagaaattgaagcgccaagggtatgttcatcatatagcattaaactcaaagaccatattgtacgatatgatcaacctgcaccttgtaggtctggtgaaggcttttccctccagctgtctacagtacgacagatacagaaaaaaacacaatcaaagactattggagtactccctaaacctcacaaaaagtgaacacaatagtacttcataaaccacagaatgaaatagcccatcacttaacacagcagaacccaaaaagggtgacaagtggccggtgcagtgaaagtgattcatgcagggttcttcctcgtcctgaaatacagtggagacttcagtatacaaattggaaataaacacttttcagggatcacaagtgttgatgatttcaataatagcaaaaatatatagtataaattgaaacttaggtttgccatcatcttagtccgttgctcatccgcatatcttggtttgccctcctctccatcagcatttaatatttgggttgccaaatgaagacagtgttctaaatttctttgcgctttcccacttcatgtgcctagggcacatctcttgtttttgtttccatttcgattgttcgtgctcgcattggtattgaggtcggttaggagatttcagttcagcataattcagttaatatccaactattccattttagtgccgtctacggactagtaaatgcctaacggaggttcaatgaatcgacggcatttggaacttccgttggtggtacatagatcatgaatgtatacaatttatggctcatgccatgaccctctgagtaaaatataagttttatatgcatacaactagtacaaattaaagcgtcccatgttgttggtaataactgaactaaatcattcgataattggacaggcagaatcaaaatagtgaagaaaatacagtgcagtgctagcagtcagaattttcttattcctggctgtcctgtttgtctgactaaatggatttaagaatttcacttcagattgaaaggtcaagttcagccagattactccaaggacaccaaggttgaataataagatcggcaaaagctaaggccaacaaaaaggaaatagactgcatgtaatggcaattattgtgtgcaagttagagtggaaggcaatgcggtaattacctttgaagattcaggaacttgatgcacttccttccatcagaattccccaagttcctgaatctt

SEQ ID NO: 12937 - DNA, 853 bp, Setaria italica
  Peptide Sequence Number=SeqID_78911
tgcatctggtggaggaaccgcagatagatgcatacgattttggaatacgaccacaaatacacacttgagctgtgtggacactggcagtcaggtctgcaatctcgtgtggtcgaagaacgtaaatgagcttgttagcacccatggatactctcagaaccaaataattgtttggagatatccaacaatgtctaagcttgccactttgacaggccatacatacagagtattgtatttagctatttcccctgatggacagaccatagttactggtgctggggatgaaacactccggttttggaacgtgttcccctctccaaagtcccagagttctgacagtttaagttgcataggaggaacatcatttgttagaagctacatccggtgacactgaaatgtagctttcttgagctcgtaagtttattgcagcatatgttgatgatcatcgacattatttcatttgcaacacccatgccaccaggtcatcaaccatgaaagctggccaattttttgagatggcaccacgcaatgcgatgaactggcttgcgaatccaggcatggctcttttgatgagagtgtacatatttatcagcgcaatggtgctgtaggagtgaaaattgctgaggcttctgagcatcagcattgttccaattgataagaatacgccctcttgtttttgctccctttgcgagtcaaacctcggcctggagctgtttctgtaatgtgctaggagttaacctattgaaaacatttactaactcatgacgcccatttcatccatgttctcatgctgtaaaatgagactattctggttcttcagattcattgttactgtcttgaaaaggacagatttgcc

SEQ ID NO: 12938 - DNA, 981 bp, Setaria italica
  Peptide Sequence Number=SeqID_78912
ataaatctgaggtttgtgggctcaagtggtcttacgacaatcgccagcttgcatctggtggcaatgacaacagactttttgtttggaatccacattcagtacaacctgtactgaagtatactgagcacacggcagctgtcaaagctattgcctggtcaccccatctccatggtctgcttgcatctggtggaggaaccgcagatagatgcatacgattttggaatacgaccacaaatacacacttgagctgtgtggacactggcagtcaggtctgcaatctcgtgtggtcgaagaacgtaaatgagcttgttagcacccatggatactctcagaaccaaataattgtttggagatatccaacaatgtctaagcttgccactttgacaggccatacatacagagtattgtatttagctatttcccctgatggacagaccatagttactggtgctggggatgaaacactccggttttggaacgtgttcccctctccaaagtcccagagttctgacagtttaagttgcataggaggaacatcatttgttagaagctacatccggtgacactgaaatgtcatcaaccatgaaagctggccaattttttgagatggcaccacgcaatgcgatgaactggcttgcgaatccaggcatggctcttttgatgagagtgtacatatttatcagcgcaatggtgctgtaggagtgaaaattgctgaggcttctgagcatcagcattgttccaattgataagaatacgccctcttgtttttgctccctttgcgagtcaaacctcggcctggagctgtttctgtaatgtgctaggagttaacctattgaaaacatttactaactcatgacgcccatttcatccatgttctcatgctgtaaaatgagactattctggttcttcagattcaatgttactgtcttgaaaaggcagatttgccctgtattcgcttgtttcacattcagatccatcaat

SEQ ID NO: 12939 - DNA, 268 bp, Setaria italica
  Peptide Sequence Number=SeqID_78913
tccacagaacagtagaagcaccaacagcacaagctcctccacatggaagcgtctgaggatcctctggggctcggcggcggcgacagaggtagaagcaagtccaggactatagatggcaacgggcacattacccgtgggtaaagggtttacaaacccgcactcgtgaggcaaaccctatgcccgcacccgcacccacgacccgtcacgggcacgaacttgaacccgcgcccgtcacccgtgggcacacctgtacccgccagccagatca

SEQ ID NO: 12940 - DNA, 387 bp, Setaria italica
  Peptide Sequence Number=SeqID_78914
ggtcgtagctgcgcgacgatggcggccgccacgggctccggcacgggcgcgccgcggcggaggcccatccagccgagcaggtccgggcccgtgcacaggtctatcaccgtgtgcgtccacgcctcgtcctcgtacaccgcgtgcacctgcaccacgccggggttgcccgcgccggcgagctgggccagcttgggctccacctgcgcgagctcgcggtcgaggtcgtcggccagctgcgaacggtccacggacttgacggcgaaggcctcgccggtggcgcgggacgtgcagcggtggaccacaccgaagcggccgcgaccgagctcctcgccgatctcgtagtccctcttcagctctgcactcatgcttgatactccagtaatttct

SEQ ID NO: 12941 - DNA, 423 bp, Setaria italica
  Peptide Sequence Number=SeqID_78915
tcatacgcagcaaacttctctgcagagaacctgctcaggtcgaacacccaccatccgcttcataagccacaagaagaatgtgtcaaagaaggatatggaagatattgataagaaacagatcaaatccagctccaaaccggaagttatcatcaatccacaggtcaacagtgatttgactatggatgatggagatgatgacatcctttatcccaagaagcccattgcagatgctaatatggatgatggacttgatgatgtccttcgccccaaggagcccaccacagatacggatacaaaaccagagaaagttaccgaacttggaaagcccttaaaaaagaagaaactgaagataaatgtgcacaggccagtgggaacaagggtcaagtatgatgatgagggcaacatcatcccacctctcgcatc

SEQ ID NO: 12942 - DNA, 426 bp, Setaria italica
  Peptide Sequence Number=SeqID_78916
acaaaggaatagtaccaaggagttccataactttagtgctggtgctattgttggtaagcgcaagggtattgagctagagaaggaacacatcaacagcttgaatatcttggtgtgcacacctgggcgattagtccagcacttcaatgaaactcccaatttcgattgttcacatctccaggtcaccaggcatatcttgttctatgataatagtgaatgccaaatttggagattttagaaaatctaaagtgctcttgattttttttttcatatgggaaacagatgttggtgcttgacgaggcagatcaaattcttgatcatggtttcaaaagtcaggttgatgctatcatttctcagattcccagagttagacaaactttactgttttccgctacacaaacgaagtcagttaaagaccttgcaaggtta

SEQ ID NO: 12943 - DNA, 371 bp, Setaria italica
  Peptide Sequence Number=SeqID_78917
acaggaaacaatgcaattattcctgagttatggatgcttccacattttctcccaattcatccaggaagacctcatctaccggccttcatggttgcaaaatattgcaatggcttatttaaataagttcgtggaaccagtgtcaaattggtggccttttactaatctacgagaaagagctatgaaaaaccttatggaacatatccactacgaagatgaaaccagcaactatgttggcttatgccccattaacaaggccttaaatatgatttgctgttggatagaaaaaccaaattctaaagaattcaggcagcatcttcctaggattcaagatcatttgtggcttgcagaagatggaatgaagtcaaaggtgt

SEQ ID NO: 12944 - DNA, 497 bp, Setaria italica
  misc_feature (1)..(1): n is a, c, g, or t
  Peptide Sequence Number=SeqID_78918
nttttagttttttttttttgttttttttttttgtttttttttttgtttttttttttttttttttaacgtcatgaacatcattcattgtcattgattcgagaacgaaccaggcgattggtgattatcatgtagaatttggtaatcttgcaagcacagttcagtaatttagtaatactacattttaaatacttttgtacgtttacaatcagatcacgcatataggctaacaccttacaatatccattggtacttgcatcctgaagatcttaactgaccaaaagggcccactttaccctctttttgcaagaagtcggcgacgaaattctcctagagcccagatgggaaataagttccggtagttggtgtaattgaagaaaagtgatgagttgaagttgccaacgacttcttgttggggaaattccccaccctccatctgcatgttgattaattcttttgcagctcggtataatggtgttgggtcatattcgatctgtcca

SEQ ID NO: 12945 - DNA, 491 bp, Setaria italica
  Peptide Sequence Number=SeqID_78919
ccatcctatagttagtattgatcgagcaagccctgcgctgcatcatgtggaggctaaaggttggcgagaggccaagcgacccattgctccgttcgccaaatgacttcctcggtagggaggtgtgggagttcgaccctgacgcaggcacattggaggagcgcgccgaggtggagaggctgcggcaggagtacacccgcaaccggttcacgcaacgggagtgcggtgactttctcttgcgcatgcagtatgcaaaacagaaccttcataatacaaaccttccagtcatcaagattaaggaggattcagaattaacggaagaaactgtgttaattgtgttgaggcgtgcccttagtcaatattgttctttgcaaggacctgacgggcattggcctggtggttacagcgggattttgtttattctgccactcatgatatttgcattacatgtcacacaatctgtgaatgaggttttatctactgagcacatacgt

SEQ ID NO: 12946 - DNA, 441 bp, Setaria italica
  Peptide Sequence Number=SeqID_78920
ttataagactacaaagtctggtgtgctctcttgcaaaaccattaagacctacgttgttcataaaattcaaatttgagtttttgtactaggatgaaagacaaccaatgggacttaaaatgtttctttgtttagtaatgtcatattacgacatttaagactaactttgtagaaattgactctgaaacttttttagagaaaatattttacacatagtaagttatagaatatgaatagcaatacgctcatttcttgttagatgtcgaacaaggttgtaagaagcaagacgaattacctttgacttcattccatcttctgcaagccacaaatgatcttgaatcctaggaagatgctgcctgaattctttagaatttggttttactaatctacgagaaagagctatgaaaaaccttatggaacatatccactacgaagatgaaacca

SEQ ID NO: 12947 - DNA, 2731 bp, Setaria italica
  misc_feature (266)..(266): n is a, c, g, or t
  Peptide Sequence Number=SeqID_78921
accaatacctaatccgatagttagtattgatcgagcaagccctgcgctgcatcatgtggaggctaaaggttggcgagaggccaagcgacccattgctccgttcgccaaatgacttcctcggtagggaggtgtgggagttcgaccctgacgcaggcacattggaggagcgcgccgaggtggagaggctgcggcaggagtacacccgcaaccggttcacgcaacgggagtgcggtgactttctcttgcgcatgcagtatgcaaaaacngaaccttcataatacaaaccttccagtcatcaagattaaggaggattcagaagtaacggaagaaactgtgttaattgtgttgaggcgtgcccttagtcaatattgttctttgcaaggacctgatttaatagaaagcaaatagtactagatgaaaagtactaaactccaactcagaagaaaatttgtcgtagctacattagtgtagtacatccgtacagttgcaaataaattaaatcagcactatttgtgccattaggactgacatacgtatacacatccatactgttctattttttttttttagtttctcttgtggttgctatgtctaaagtgtgaacaattgatgaatatgcatttaaattttgggcattggcctggtggttacagcgggattttgtttattctgccactcatgatatttgcattacatgtcacacaatctgtgaatgaggttttatctactgagcacatacgtgagatatgtcgctacatctacaatattcagaatgaggatggtggttggggcacacatactcttggcccaagctccatgtttggcacttgcgtaaactatgctacattaaggctcctaggagaggtgcttgatggagaaaatgttgcattatccagagggcgtgcatggattttatctcatggaagtgcaactgcagcaccacagtgggcaaagatatatctctcgattataggagcatatgattggtcaggaaacaatgcaattattcctgagttatggatgcttccacattttctcccaattcatccaggaagattttggtgcttctgtcggatggtttacatgccaatggcttacatttatggaaaaaagtttgttggacctatcactccaacaattctggcaataagaaatgaaatatacaatgtaccatacaatgagatcaactggagcaaagcccgcagttcttgtgctaaggaagacctcatctaccggccttcatggttgcaaaatattgcaatggcttatttaaataagttcgtggaaccagtgtcaaattggtggccttttactaatctacgagaaagagctatgaaaaaccttatggaacatatccactacgaagatgaaaccagcaactatgttggcttatgccccattaacaaggccttaaatatgatttgctgttggatagaaaaccaaattctaaagaattcaggcagcatcttcctaggattcaagatcatttgtggcttgcagaagatggaatgaagtcaaaggtgtatgctggttgccagacctgggaaactgctctcatagttcaggccatttgtggaacaggccttaccgaagaattttgttcagctcttcaaaaagctcacgagttccttaaaaatgcacaggttactcagaacttgcctgattacaaaagctactaccgcgaacgaacaaaaggagcatggactctaaccaatggggagcatgtttggcctgttcctgatactacagctgaatcacttaaggcagtattgctgttgtcaaacattaatccagagcttgttggtgatccaataaaagaagaacggttgtatgatgctgttgattgcctcctttcttacgtgaacaaagatggtacgttatcatcagcagaatgtaaacgaacaacttcatgggtagagttcatcaatccttcagagagttttcggaatatcatcgtggactatccatatcctgaatgcacatcgtccttaattcaagctttagtattgttcagagggatatgccctatgtatcgtcatgaagagatagaaaaaattattaaaaagggtgcatcattccttgagaaaactcaacgaaaggatgggtcctggtatggctcttgggctgtatgtttcacttatggaacgttctttgctataaaaggattagttgctgcaggaagaacataccataacagtttgtcaatcaggaaagcatgcaacttcctgttgtcaaagcagctaattacaggtggatggggagagaactatctcagctgtcaaattgaggagtatgtttgtagtggcagtccacatgcagtgaacactgccatggcaatgttagctttactttatgctggacagatcgaatatgacccaacaccattataccgagctgcaaaagaattaatcaacatgcagatggagggtggggaatttccccaacaagaagtcgttggcaacttcaactcatcacttttcttcaattacaccaactaccggaacttatttcccatctgggctctaggagaatttcgtcgccgacttcttgcaaaaagagggtaaagtgggcccttttggtcagttaagatcttcaggatgcaagtaccaatggatattgtaaggtgttagcctatatgcgtgatctgattgtaaacgtacaaaagtaatttaaaatgtagtattactaaattactgaactgtgcttgcaagattaccaaattctacatgat

SEQ ID NO: 12948 - DNA, 410 bp, Setaria italica
  Peptide Sequence Number=SeqID_78922
gtacattgtctccagcttttggttgagtggcagtcaagatgtcttagggtactcaggtttattatacagaacaggttccctcatacaatgtctggtagtggttgtgcttgcgcatgagcatcaaggatgaaagttcatactgtttctttgaaggctggagacatcgaattgaatcttgtcattggttggcttactgacggatgcccagaaaagttctattttgtgatgcaccatgaatgcaatttttttccatcttgaggaggtagagaaccaaatagggtcatgcacttcgttaattgtataactgaaagagataatcattgccttatttttaaagttaggtaaaagaggtcttaatcttgactaactggttggagttttttctaaaattcttaatttatacgcccgat

SEQ ID NO: 12949 - DNA, 498 bp, Setaria italica
  Peptide Sequence Number=SeqID_78923
taccttacctaaccttagtacctttacctaagtactaacgtaagttaacttcttgattcgtacaccgtgtcttcatcgtcggatgagtggatatcggcgtagtcatcttccgtccacgcttccctcagcctgtgccgcgtcgcaccttggtaccagctctggtattgcctgtacgcactgtttgtgtgcggctcgttgttcttgtccaagttctgctcgaactgctcccattcctgaatgtatgcgtggtggaacgcggcccactcggagaccttccgtttcttctttcgatccacgttgtgtaactctatactagtcgaggtcgcctgtggtggccaaatctgcctcatcccaaattgacgtgctactcgatgtggcaggtggtacttgacagcatagaagcaaataagagggcacaccatcctataaatatcatcgtccgtcgcacacatgaagctaaggggaaaaggaagtggatcgtctccgtcgtaaggacta

SEQ ID NO: 12950 - DNA, 633 bp, Setaria italica
  Peptide Sequence Number=SeqID_78924
tttttttttttcttaaacaactttgtagctaatactcttcagtgctatcacttacaaaaaattttggcttagatgagtgctttgtacaagtactaaactacgatatgatcctatcgatggttcatgctacatcatgtatgcagattattgatatctaatcatataaactaggtatcaaggtcttggtgcagcaattcacaatatctcacatgcttccgttttggatcggccaaacacaatgtacctgttgtttgcaacattgtcgtatgcgaagtccctcaggaacagagggacaaacttgaggaagattgcgagctgagggaagggcaggttgaggtactccattatcctcagcactgcttcagacttgatgtaggacctatccttctcgacgagaacaacgctggagatgtcgtcgggggatcttcctgacctctgcaagagcttcctccccgactcgctctgcaggggcacgtacctgatgctcctgttgtggtcgtgctcccgcacgaaccggacgcccccgttgcagaggttgcaaacgccgtcgaagagcatgatgggcctggtgtcggagggctggaagaactcggacgtaccgtaggaaccaaaccttaacaaataaggaaagaa

SEQ ID NO: 12951 - DNA, 452 bp, Setaria italica
  Peptide Sequence Number=SeqID_78925
ttttagttttaacccttttttcccccgttttacttttaaaatttttagtttctttacttattaccttacggtttactttgtcattggtggaacagatgcatttctcttggaagcactcttcaggaattcagtttggggccaccttgaactgccactcagtcctgacaatgaggaatcaatatgccaggtcatgagagatgcctgcaaatctgcccttgatgcttatcacaccacaatacaagaggatgaagaacaattgcaaacagaaaatttgccatcaagacttcatattgcgattggagtaagggcaggcgaaaagaaagtactgcagcagattgatgatattttcaaacagagggaggaggaattagatggcctagaatactaccaggaaagaagactcaaggatcttggtttagtcggtgacaatggtgaaattattttttgggaga

SEQ ID NO: 12952 - DNA, 808 bp, Setaria italica
  Peptide Sequence Number=SeqID_78926
tatccagtgaagagttgccttcgctttcttggtgttttactggaggttttggccttggtggtcgcccaatctttgcagataaaggtgatgaccccatctgaagcttgtttgttcgccactgcattggtggaagagggggaagcggcggtgcatcttcagatgaaccatttccttgtgcacttccataagttggttgagcaggaaggacattcaatgactgctgcattggaccattgagcatccaaacaaagcttgaaatgatcgacggtggaacatctctggagtcaggagctagtggatctccaaaaacttcagtactgctgttgcacgaattaggtggttcttgatgcacaactggatgcaattcatgcttttccttggtgtttaccgttagttctggagttacagccaccgtggatgagctgcacagcggcacttgaccgttttggacaacaatttcggagctgctgagaactgcaccttgtccaaaaagtaggttctagatgtaaatagtactgtttatcatctggcatggcatcttcactgtcgattactgactcggttactaccttagatagatcagtatccatgaatgtttctgacagtgtcatatgctccacttcaggggtgtagctgtcggtgatcttacatgcccctgtgtcatcttcatctgcgagagtgagtggagttatcaggcaaggatcatcagattgcttggatgaaaccggtgaggagttcatgccatctgaaactgcttgctcttctatgtactcagcagtttcatcatccaatgcatatgcatcagtta

SEQ ID NO: 12953 - DNA, 477 bp, Setaria italica
  Peptide Sequence Number=SeqID_78927
gtgctgtcattccacggcgtgctgacctacctgctgagcgtggtgtcctcattgttgctgctgctacacacaggcaaaagactctgttcttcttcttactacagaccgagtatggtgacatcttcaaggtcgaccttgaacatagtggggatactgttactgagctcaggatcaagtactttgacactgtacctgtaacatcagctatctgtgtgctgcgatcgggtttcctcctctttgctgcttcagagtttggcaaccatgcactttaccagttccgtgacattggccgggatgcagatgtcgagacctcttcagcaacattgatggaaacagaggaggggttccagccggtattctttcagccaagggcactaaagaacctcatgcgcatagacgacattgagagcctcatgccagtcatggatatgcgtgttgcaaatttatttgatgaggaaacaccccaaacttccccta

SEQ ID NO: 12954 - DNA, 1593 bp, Setaria italica
  misc_feature (1)..(71): n is a, c, g, or t
  Peptide Sequence Number=SeqID_78928
nnnnnnnnnnnnnnnnnnnnnnnnnnnnnnnnnnnnnnnnnnnnnnnnnnnnnnnnnnnnnnnnnnnnnnnaggttttctattttttttcctgactttgaattattagtgttttataagctctgagaagtctgaatcatacagcagcatcacctgctctcgagacaactgaccatctaccttattaattattcccagcaaaacacattccaacaacaatggtggccatggtaatgaaatcccatgagcaccaaaaagtgaaaagaaatattgcaaaatagttactacggcactaatactacaggcggatcacaaatgcgcaaagcagctcttgcaaagagctcacttatgttatgaagaacaaaacatcctgctaaattgtagcaataccaaatgatcataagcacaagccaatcaagggttcctagcttggaaatccttcatgaaggcgacaagcttctccacgccggcgagcggcatggcattgtagatggatgcgcgcacgccaccaactgacctgtgtcccttgagctgaaccatgccctccttggctgcctcagcgatgaattgcttctcaaaatctggccccttggccagagtgaagggcacgttcatcagcgaccgcactgacttctccactgggcagatgtagtacccgccgctggcgtcaatggtgtcatacaggatgcccgccttgtgggcgttcttcttctcgacctccgcgaggccgccctgggcgagcaggtcctcgaagacgagaccgcagatgtagatggcgaagcagggcggggtgttgtagagcgaggcgttgtcggcgtgcgtcttgaagtcgagcatgaccggcgtgatgggctgcgcgttgccgatgaggtccttgcgcacgatggcgatggtgacgcccgaggggccgacgttcttctgcgcgccggcgtagatgacgccgaagcgggagacgtcgacgggcttggagcaaaagttggaggacatgtcggcgacgaggatgccggacttgttctgcggcaccgggtagtccttgaactcgacgccgtggatggtctcgttggagcagatgtggaggaaccttgcctccgggttctgcttgatggcgtcgaagggcgggagggcggtgtacttgccgtccttgccggaccaggcgacggaggcggcggagaacttcttggcctccttgaaggccttgtcgctccaggagcccgagacgacgaagtcggcggggtcggtggggccggcgcagaggttgaggggcacggcggcgaactgcgtggtggcgccgccctggaggaagagcacggcgtgggtgtcgggcacggcgaggagcgcgcggaggtcggcctcggccttcttgatggcggcgtcgaactccttcccgcggtggctcatctccatgatgctcatcccggagccgtggtagttgacgagctccgcctgcgcccgctcgaggacgttgagcgggagcgtcgccgggcccgccgcgaagttgtagacgccccggtccccggccccggcgacgggggaggacgccgacggcgccgccaccgccgcgcaggagatcttggcggctcgcgcgggaaggtta

SEQ ID NO: 12955 - DNA, 1216 bp, Setaria italica
  misc_feature (1181)..(1216): n is a, c, g, or t
  Peptide Sequence Number=SeqID_78929
accaactagacatatccactgctacctagtcaagtcttctgtactcggaagaatcagccaagcttccacaatgggggctctgcctcgcggcctgcttatcggcgtctgcgccgtcctgttagcggccgtgctcgcccatgctgcggagcccgaggccgcctccatggtcgttggcttggccaagtgcgccgactgcaccaggaagaacatgaaagctgaggcagcgttcaacggccttaaagtggctgtcaagtgcaagaacgccgacggcatgttcgagaccaaggccctcggcgaggttgacaagtccggcgccttcagcgtcccgctcgcagcagacctcctccgcgaggacggcgagctgaagcaggactgcttcgcgcagctccacagcgccaccaaccagccatgccccggacaggagccgtcctggatcgtcaggccgtccagggatgacgacgacaagaagaagaccttcgtcgcggtggccggcaagatgcactactcatcaaaagagtgcgcctccgcgttcctctgtgaccatttccacaagaagcccatcatgatccctcacatccccaaggagaccatcgtgatcccccacttccacaacaagccggtgcccgagtacaagccgccgacgcccgtgccggtgtatcacgcgcccgtgccagagtacaagccgccgacgcccgtgccggagtaccactcgcccgtgccggagtacaagccacccactccagcgcactcccacccgacgccgatctaccatcctcctgccgaccagaagacccagaaccccgagacggaccctgagaagttcaagaagctcctcccgttcatcaagaagaaccccttcttcttccccaagttccgcaagttccctcctggcaaggtggagatcaaggcttagagagattggtgggagctgaattgaagcatatagtattatatagttggtttgtcggcatctactgttacgtaatgctgcatggatccttaccacttttggtctcatcagggtgtttcgttagctcttacaggcctccagcttataggaataaagcatttgctctgaggatatgtgcctggatgaaactaccttaacttattagataaatatatataagtttgcgctttttcatccaggcacatatcctcagagcaaattaactaactannnnnnnnnnnnnnnnnnnnnnnnnnnnnnnnnnnn

SEQ ID NO: 12956 - DNA, 347 bp, Setaria italica
  Peptide Sequence Number=SeqID_78930
ggcttcggtggggattttcatgtggacatcctgccgcagcagcaggggggcagcgccgagcagggcggcgacaagacggccacagaatgggtcagggacacggtgatcgtggaggagaggagcgacgccgaggtcagcgaggccgagccggaggaggccgagcgcgaccgcaacggcaatgccgctgccgccgtcgcctccaactccgacgaccagccagcgccagctgtcgagacgaagcaggcccaagacgacgccgtggtgaccacggccgccgccgcgacgaccaccgcgcaacccgctacggagaagacggcgactgagaccgaccggccagaggagaaggc

SEQ ID NO: 12957 - DNA, 272 bp, Setaria italica
  Peptide Sequence Number=SeqID_78931
ggtacccgacgcccaggaaatcctcgtcctcgtcgctggaggagacgatggactgcacgaatgcgatgccgaagaagctgaggaggtagatgagcgaggcgatgaggccgaagatggcgagcatctcggcgagccccacggcgtggagcggcgtggagttgcggatcttctcgcgccaccggcgcatgaggtaggcgagcgacgccgcgaacagggccgagaagatgaggttggtgtgccggatcggcagcggcagcgcgtcaccggcctgg

SEQ ID NO: 12958 - DNA, 487 bp, Setaria italica
  misc_feature (135)..(135): n is a, c, g, or t
  Peptide Sequence Number=SeqID_78932
ccacggcatgtgaaagctctcctgtccggccatccgctgagccttatcttctcaccgctcattctcgcaagcgcacctgcgcgtggtagggatgggcagcgcctcggccctcatcttcgagcgaccgctcgttcnccttccccaagccggcgtggccgcacccacggctccagcttgccatggtgatggacccgaagaggaaatgaacgagccatggcctccccgcagagaagccacgagccccaccatcatgagcctctccgtcgaccaccacccccacgacgccgttatgaatgaatgctggagtcggcggaggtgaactcatggaggcggccggcgggggagaagatgacgagcgcgacctgtgcgttgcagagcacggagagcttgtaggctttcttgaacagcccgttccgctgcttggagaagcgcacctgccggctggtccggtcctcgatccgccgtagctccacccgctcgcgcttcc

SEQ ID NO: 12959 - DNA, 699 bp, Setaria italica
  Peptide Sequence Number=SeqID_78933
tcttactaaagctgcatggaacctatggtcgtggcaatgctactatcatgtacactgcaataatgtttcgaaactttcttcttactgccgcagaatctcgtttcagaacgtagttgcttcaggtttaatttgggggcagtccattcaccttcgccatcagttcgttcctgataactgccagagcgtcgatcactgcttcctccaggcctcttagctcatcagtattcagctcatttagatttgcttccatggcccattgaccaacggtaattagcagatcgggtaacgagcctgtagctgactgctcattctgtatattgttgttgatccttgagtcttgtgcttcaatgttgagatcatttaccgtggtgggaaggtcccagtgacgaccgaatatttcttcgatgctggagtcggcggaggcgaacttgtagaggcggccggcgggggagaagacgacaagcgcgacctgtgcgtcgcagagcacggagagctcgtaggccttcttgaacagcccgcaccgccgcttggagaagcgcacctgccggctggtccggtcctcgatccgccgcagctccacccgcccgcgcttcctcttcgtccccttcttctcctgctgtagcaggtcaagctccacccgccgctccattcctttcgccccaacagcgccaaccaatataccaacctcgcaattgaact

SEQ ID NO: 12960 - DNA, 738 bp, Setaria italica
  Peptide Sequence Number=SeqID_78934
gcaaattgcaacacgcacttgcagtcaagaacattggatcattggtacaaggcaaatgcggtcgacgatacatgcatgccgaatgggattcttagcacagaaaaacgaccagctaaaccagagttacacaaagtaaatcccactttttcttatttagagcattttctcctctttctggccacggataggaagcaagcgcactgcacactgtgacacgaccgtgaagaagtcacagctactgccgcagaatctcgtttcagaacgtagttgcttcaggtttaatttgggggcagtccattcaccttcgccatcagttcgttcctgataactgccagagcgtcgatcactgcttcctccaggcctcttagctcatcagtattcagctcatttagatttgcttccatggcccattgaccaacggtaattagcagatcgggtaacgagcctgtagctgactgctcattctgagaaagttggaggacaagcaagaaaactgtcagaattcacagaaacccagtacagatttgacatacgaactgtgtaatcttcagataccaattcccaactcccaaaaggaattctgatactgaataatttgtatccacatttgtgcaaaggcattgcatgagctagaacagaaagtgaatttgcatatagattgatactagtatactggtcatggaagaaaaaacaaccaatacagggtagtttcatttttagaatcatatgatcgtctag

SEQ ID NO: 12961 - DNA, 942 bp, Setaria italica
  Peptide Sequence Number=SeqID_78935
cgaaccagctaaaccagagttacacaaagtaaatcccactttttcttatttagagcattttctcctctttctggccacggataggaagcaagcgcactgcacactgtgacacgaccgtgaagaagtcacagctacctggataaatggatattcggtttttaattcccagaatatgtagttgccgctgcatggtttatatgtttgtagcaatgctactatcatgtacactgcaataatgtttcgaaactttcttcttactgccgcagaatctcgtttcagaacgtagttgcttcaggtttaatttgggggcagtccattcaccttcgccatcagttcgttcctgataactgccagagcgtcgatcactgcttcctccaggcctcttagctcatcagtattcagctcatttagatttgcttccatggcccattgaccaacggtaattagcagatcgggtaacgagcctgtagctgactgctcattcgtggtgggaaggtcccagtgacgaccgaatatttcttcgatgctggagtcggcggaggcgaacttgtagaggcggccggcgggggagaagacgacaagcgcgacccgggcgtcgcagagcacggcgagctcgcgggccttcttgaacagcccgctccgccgcttggagaagcgcacctgccggctggtccggtcctcgatccgccgcagctccacccggccgcgcttcttcttcaccttgctcgccttctccggctgcagcagctcaagctccgccctcctcgcggccacctcctcctccattgtttcttccgcccaacaccagtaaataaccaaactctcggagtgagctcgagcctgccacttctcgccgctgcaaggagacgggcggcaggtcgctcggcacctagcgaggaaggatatgactagagaggatgggaacagatcaaggcggccgag

SEQ ID NO: 12962 - DNA, 1786 bp, Setaria italica
  Peptide Sequence Number=SeqID_78936
ctagtacaattgccattgaggaagtcaaggctgctgcactaaaaggagaagcaccacctggtcttccacttaaaggagtagggcagagcacccaaaatttagattctatggccactgatggtggggatccaaaaccgactgatgctttggctggtgagctttgggctgtcaagaaggagagaatacgacggtcttcgattcatggaaaatcacctagctgggacttgcgttctgttattgtcaagagtggtgatgactgccgtcaggaacatttggctgtgcagcttgttgcgcacttttatgacatatatcaagaagcgggtttgccactttggctgcggccttatgaagttattgtgacttctgcttatacagcactgatcgagactattcctgatacggcatcaatccattccataaaaagtaggtttcccaatatctcaagtctccgtgactactatgtggctaagtatgaagaaaattctgcaaatttcaaacttgcacagagaaactttgtggaaagcatggcaggatattcaattctatgctacctactccaggtcaaagatcgccacaacgggaatcttctgatagatgaggaaggacatattattcacattgattttggtttcatgctatccaactctcctggtggtgtaaattttgagagtgcaccatttaagctgacaagggagctccttgaagtgatggattctgatgcagagggaactcctagcgagttctttgactacttcaaggtgctatgcattcaaggtttcctaacttgtcggaagcatgcagagcgcattatacttcttgtagagatgttgcaggattctggcttcccgtgctttaaaggtggtcctcgcactatacaaaacttgaggaagaggttccacttgagtctcactgaagagcaatgtgtatctctggtgctctcgctgatcagtagcagcatggatgcttggcgcactcggcagtatgattactaccagagagtattgaatgggattttgtgacatttgcccacaggagcaccagactcttttggaaaccattttccttgaatccttgggccaaaccatgggatggcataggtcaatttggggctgatctatatgctcatcctatcttggtttctgggagtgaaccaggtaattgagcactgtcgtttcctgtggtgtggtatcgctgtgcattggccaactatgggaaacaaaacggtgcctgcactgtactgcatgtgattggcccccctctgacagagttgagaagtgtatagtcatcggcagttatctagttagtgcttcgtgctaggaggttgggactgggtggagctctatttggtgtattggaatttggaacccaagctgcattgctgtacagaccgttgattgacgtagcttggacaggatgtaggtgaggaccgagccatactttcagaaaacaagtgtaaattataggcatattgggagctggggatcgtctgaagataagattagatattgtgcttttggaattgttaccctgatatcctttggcatccctatagcaccagagtagatgatgtgcttgctgcatttgtatattaccattactgtacagggcccatacaataggagctttcccttttttggtgttctttttggttaaggttattccttttcttgtgggtgttcgaagaaacatctaggtgctaacttgttgactagcagtatgatcagtgtttggatatatttttttatgcttctacaaattgcaattctagaaaaaaaaaaaaaaaaac

SEQ ID NO: 12963 - DNA, 566 bp, Setaria italica
  misc_feature (53)..(53): n is a, c, g, or t
  Peptide Sequence Number=SeqID_78937
cacaaccaccatgctgattggcaagggctctacgagcgtatagaacaccttcnccaacatgcgcgccgctctcaccacaaatttttgaagccaggagaagttccttgagactatttgaatcttctccagacttcaatactcttctaagcagatccagtgcagttaaatcatcatctgatgctaggtagcacaatgcaacattgtacgaccactctctattttccagaacaccaggcaatagtgcctcaaactgacgagctagaggtttcaactgcccacacatggacagtgcaaaagtaaggtgatgcatcacagttggatccctctcaatcctcctaagattgaacttcatcaaaagaattaataaaagaagaatagcttcttccagattgttctgaggtacaaataaaccatccaattgaaatcgaagtttgggagggctagcttcacaaccactgtataacagaaaaatagcaaattccttctgtattttagcaatggtctttgcatcaaggttccagttagtaacaagcgccctcctatatgaagagacagtttcaagagga

SEQ ID NO: 12964 - DNA, 1496 bp, Setaria italica
  Peptide Sequence Number=SeqID_78938
ctcaattctcgtgcagattccaatccttcctccagatacagagtgagggagataatttccaggaagtcttcagtgctccaagcctgctgccatgtgatgccttcaagttttccaagtcttcgatcgtgatctagatgatgaacaccaagaagattaagctgcacgaccaccactttgggtcgccgctgtacgacccccagatgtttccggccaccgctgctgccgggctctccttccacccggggctcgtgggctccttgccgcagcagcatggcggcgccggcggctggctgcaggaggagtacagcccaacgccgaggactgtcctcgcgacgcagggcagctgcgtcggctccgaccccgccgcgttcttcgccgccgagcacctgctgggcatggcgcggttcgactgcactctcggttcgacggcgctcccggcgatgacagcgaccaagacggcggcgccgttcgtccggtcgccggaggccgagcagctgtaccgaccgctcgacccgctgctgctccgcgacggctcggtgaggacgtactacgtcaggccgcagcagcgggacgccacggaggcacctcctccactcaagctgccattgcagcagcagcaagagcgagggcatgggctgtacggcaacggttccaccggcaggctgctcggcggtggcgaacccaaagccccctccttttcacctcatgccacggcgaacacgcttatccaggcgatggagtcgccgggcatgcagagcccaattgagaacacgctgtccaggagttgcagtatcggtgcaccggcgagccacaccgggaacgtcgtcgccgcggccgggcacggcgcgccgagcaagacgcggatccggtggacgcaggaccttcacgagcggttcgtcgagtgcgtgaatcagctcggcggcgcggacaaggcgactcccaaggggattctgaagctgatgaactctgatggcctcaccatctaccacatcaagagccaccttcagaaataccgcatagccaagtacatgccagcatcgacatcctccgaagggaagcaggagaaaagagccgcgggaaatgacgcgcagaatctcgaccccagcactggatcgcaaatcactgaagcactacgcgtccaggtcgacgtgcagaggcgcctccacgagcagctcgagatccagaggaatctgcagatgaggatcgaggcgcagggcaagaagctgcagaagatgttcgaggagcagctcaaggcgagtaggaccgtgatggagccgcgggaggagctccagctccaggacgccggcggcatcggcgccgccgccttccccggcgtcagcgagcaggagggggaggacgcgtttgacgacgtgcagctgctgtccgtggcgagcagcggctacaacgatgccaggttcccgtcgaagataagctagcctgcctgttctggctctgccagttgctatgcttttgtaatagtaggtattttattagta

SEQ ID NO: 12965 - DNA, 208 bp, Setaria italica
  Peptide Sequence Number=SeqID_78939
gtcaacgaagattggggtgattgagtctcttttggggaaggttgacacctttgatccaccaacaattgcagcaaacggcttcttcgggttggcaacagcgccaacaagatagtcaagttccttctgcatgaggaagccagcaacagcaggcttcaaaaacttggtaactccctctgttgaagcatgggctctgtgtgccgtaccaaag

SEQ ID NO: 12966 - DNA, 427 bp, Setaria italica
  Peptide Sequence Number=SeqID_78940
aggtaatagaatcttcacatttacaaggctcagggatacgctgtaggaaaatgtgaagatcataccaccaccaaggatgaggatgtcaaccttccccaaaagagactcaatcaccccaatcttcgttgacacctttgatccaccaacaattgcagcaaacggcttcttcgggttggcaacagcgccaacaagatagtcaagttccttctgcatgaggaagccagcaacagcaggcttcaaaaaacttggtaactccctctgttgaagcatgggctctgtgtgccgtaccaaaggcatcgtttacatagagatcagcaacagatgccagcttcttggcaaactcagggtcattcttctcttcctccttgtagaacctaacattttctaaaagcagaacacctccatctggtaaagaagcagccaactt

SEQ ID NO: 12967 - DNA, 676 bp, Setaria italica
  Peptide Sequence Number=SeqID_78941
atctacacattctacaaggcacagggatatgctgttggaaagtctcttgtggaggaagacaaacttgagcttgcaacctcactgattgaaaaggcgaaggcaaagggcttctttgggttggcaacagctccaacaagataatcaagttccttctgcatgaggaagccagcaacagcaggcttcaaaaacttagtaactccttctgttgaagcatgagctctgtgtgccgtgccaaaagcgtcatttacataaaggtcagcagcagatgcaagcttcttagcaaactcagggtcattcttttcttcctccttgtagaatctaacattctcaaggagcagaactccaccttccggcaaagcagcagccaatttctcaacttcctcaccaatgcaatcattggccatcacaacctatttatgcagaaacacgagcagcaattagttagttcagagacatcagaaaacacaataatgacccaatgtcagatcacagcatacgtcgactccaaggagctcagacaagcgtggaacaagaggcttcaagctgtacttcggggtgacaccttttggacgaccctggaaataacagcagcaaattacatcagaaaaagaaaggcacaaatcatgcttcttgctaaacataaatgcttgctgccatgttactaatcataagaaac

SEQ ID NO: 12968 - DNA, 1503 bp, Setaria italica
  Peptide Sequence Number=SeqID_78942
cacaggggatatgctgtttggaaaagtctcttgtggaggaagcaaaacttgagcttgcaacctcactgattgaaaaggcgaaagggcaaaagggtgtttctcttctgcttcccactgatattgtagtagctgacaagtttgcacctgacgctgagagcaagattgttcctgccactgctatccccgatgattggatgggtcttgatgttggccctgatgccaccaaaaccttcaacgacgcgttggacaaaacccagactattatttggaacggtccgatgatggttgtgacaccctttgtggttgtaagctcagccaacttcttcgcaatggcctcagtgcctgcagcaaacttctcaaactcaaacactcccatcggaccgttccaaataatagtctgggttttgtccaacgcgtcgttgaaggttttggtggcatcagggccaacatcaagacccatccaatcatcggggatagcagtggcaggaacaatcttgctctcagcgtcaggtgcaaacttgtcagctactacaatatcagtgggaagcagaagagaaacaccctttgccttcgccttttcaatcagtgaggttgcaagctcaagtttgtcttcctccacaagagactttccaacagcatatccctgtgccttgtagaatgtgtagatcataccaccaccaaggatgaggatatcaacctttgccagcagagactcaatgaccccaatcttggtcgagaccttggatccaccaacaatggcagcaaatggcttctttgggttggcaacagctccaacaagataatcaagttccttctgcatgaggaagccagcaacagcaggcttcaaaaacttagtaactccttctgttgaagcatgagctctgtgtgccgtgccaaaagcgtcatttacataaaggtcagcagcagatgcaagcttcttagcaaactcagggtcattcttttcttcctccttgtagaatctaacattctcaaggagcagaactccaccttccggcaaagcagcagccaatttctcaacttcctcaccaatgcaatcattggccatcacaacgtcgactccaaggagctcagacaagcgtggaacaagaggcttcaagctgtacttcggggtgacaccttttggacgacccaggtggctggcgaggatgaccttggcgcccttctcgaggaggaacttgacggtggggacggatgcgcggatgcgggtgtcgtcggtgatcttctgggcgtcgtcgagcggcacgttgaggtcggcgcgcacgaacaccttcttccccctcagatccgcctccccgagggtgcccacgctcctcttggtcgccatcactccctgcaacgccgcgaggatcaaacccgtgctcggagcccgacggcgacggatccggggcgcagcaacacgaccggcggggaagactcaccgtggattggaagaaccggatcgaggcgaaggataacgcgatgatgagatcggtggtggtgatg

SEQ ID NO: 12969 - DNA, 498 bp, Setaria italica
  misc_feature (372)..(372): n is a, c, g, or t
  Peptide Sequence Number=SeqID_78943
gcgcccgatcccggcctcccgcgccgcgcggaagaagccagcggacggcgcgccggggtcgctgccgatgaacataccggactggcagaagatcctcggggtcgagtaccgggaccaccacgcgggcgagtgggagctcgatggggaggacgacggcggctatggcagggtgggcagcggcggttcggagatggtgccgccgcacgagctggcgtggcgcagccgggccgcgtcgctgtcggtgcacgaggggatcggcaggacgctcaaggggcgcgacctcagccgggtgcgggacgccgtctggaagaggaccggcttcgaggactgatgaggagccgatcggcgcgctggcaggagagcttggcccgngttcggcgcgcggtcgccggtttgctctaggtagcataggttagaaaatgagcactactaattgcttatctcttgattttctttttcttcttcctcttgttttcttcctttgccttgcgttaaggg

SEQ ID NO: 12970 - DNA, 2075 bp, Setaria italica
  Peptide Sequence Number=SeqID_78944
acctcataaacctatctaatctatctatccatccgacttccccgccgccgcgcgcgcccaatcgtaggctgcgccccccatatacctctgcttccgagccagcaaaccctagtcggcgccgcccatggacgtagagaccgacgggcgattcggcaacaagcgcgtgcacaatcgcctcggcccgggctccggcggcggcccgtcatctaccaccgggaaggtctgcaactactggcgtgccgggcggtgcaatcgcttcccgtgcccctacctccacagcgagctccccgaggcggcggcgccgcccaagcgcccgtctggacccggggggaacgtctggcgcaaccccaactcagggggacgaggaggtggcggtcacaatagatgggggaggggccctggaggcggcagcgggactgcggcccacaggccgcccgacaggccctgcaagtacttcctcgccggtaccgattgcagctatggcgagaggtgccgctatccccacagctactgcataagcgatagtatcacaatgctcaccctgctcaagggccacgagaagggtgtcacgggcattgcactgcccaccgggtcggacaagctatattctgggagtaaggatggaactgttcgcatgtgggattgccaaaccgggcagtgtgccggtgtcagccctatgggtcgcgaggttgggtgtatgatcagcgaaggtccatggttatttgttggaatacctgatgcggtgaaggtctggaatacgcaaacatcagcggtaatggatcttacaggaccaactgggcaagtctatgcactcgctgttgccagtgagctactctttgctgcaacacaagatggtaggattttggcatggagatttagtgctgcaactaaccgttttgagccagctgcttctcttgatggccataagcttgctgttgtttcattaatagtaggaggcatgaggctttattctgcttcaatggataaaacaatcagagtgtgggatttggcaacattgcagtgcatacagactctttctgatcataccgatgttgttatgtctgtgctttgctgggatcagtttctattatcttgctctttggatcaaacaataaaagtttgggcagctacagagactggaaacttggaagtaacatacacacacaaagaggagcagggtgcacttgctctcagtggtatgcctgatgcacagtcaaaacctgtgctactatgttcattaaatgacaatactgtccgcctatatgatctgccatcgttcagtgataggggccgaatattctccaaacaagaaattagggcaatacaaatgggtcctgctggtttattttttaccggggatggaactggtgagctgaaggtttggcaatgggtagatcgagcccagacctaacgaacataatgtgctagaatagtttcactcgtgtatttcatgaggaagttctcgcaaatatgcataatgagttgtggttggcggccagttcttttttgtgatatgccctacatttattcgcaaaggatacaagattcagttgatctggctggcagttcatgctggcacaagcagagtctgctagactgtagttttgtcctggtatgaatttcaagatatggaaataattgcttgtaatttgtaaagcactggaaccagcaagtatctgatcattgcttggaggtgctgacagtttcaaaaggatatgctaatataaagggtttgttcagctgcatttgtacacgaggaactggtggtttttctcagaaggccattcttcattgtttgaggactatgggcatctttctttttcagaactgttgaacgatcacttttttgctaaactgatcatttcagttcttgtaacttcattcggctcggtgagtggcagcaagggcagctcaaagtattcgggagctcaaggcaaagcttgtgtaccaatatttatctagatttttgtttggatagcagcgggcaattgattgcataatttgttctctcagattcagcaacaaatacaaacaataccatcaacaaataccccgctgctatccaaacaaaatct

SEQ ID NO: 12971 - DNA, 414 bp, Setaria italica
  Peptide Sequence Number=SeqID_78945
atttgcaatcagtcaaaaaaaaggatcattgcatcaccatggatcttcttatgctattaacattctctgtttatgctgatctgttggagttaataaaattgatgaactttgcagatgcatccaccgttggtcggaatgcatccaactggcttacctctgcctactgatgcaattgaagagcctgtgtatgtaaatgcaaaacaatacaatgccatattaaggcgacgccaatctcgggctaaagctgaatcagaaaggaagcttgtcaagggccgtaaggtaaatctttgtaactatctcctgcagtgcgatatgaactggattcttttaattagctttttctgtccatgatgctagagcaaataatcaagcaaatttcttcaatccaccctccctacttctacctgaagatcg

SEQ ID NO: 12972 - DNA, 1339 bp, Setaria italica
  Peptide Sequence Number=SeqID_78946
ccacgcagccgcctccaacccctgctctcaaatttgaggtccaaaccaccctcccatcgccacgccgccggccacccctcctcctcctcctccctcgctccgacgagccctccgccgccaccgcatcccgcaggccccgcgtcgggtctggtgcgggtggagggagagatccacccgggcccgcgagttggttcctccccccacgtcggaaagtttttgtgtgcttcatccatgaagagctgaagacatcgcatgaatagtcccagttagtctgccattgctctgtgcttgatcttcgttgtgtcgtgctttgccttgcgaaggaaggaatcatgacttctgttgttcacagtgtttcaggtgaccacagagctgaggatcaacatcaacagcagaagcaagctgaacctgaggatcagcaagaagcaccagttactagttcagatagtcaaccaacagtgggcacaccatcggattatgtggctccctatgcccctcatgacatgggccatgcaatgggtcaatacgcctacccaaatattgacccatactatggaagcctttatgcagcttatggtggacagccaatgatgcatccaccgttggtcggaatgcatccaactggcttacctctgcctactgatgcaattgaagagcctgtgtatgtaaatgcaaaacaatacaatgccatattaaggcgacgccaatctcgggctaaagctgaatcagaaaggaagcttgtcaagggccgtaagccttatctccatgaatcacggcatcagcatgccctgaaaagggctaggggagctggaggccggtttctcaattcaaagtcagatgagaaggaagagaactccgactccagtcacaaagagaagcagaacggagttgtgccccacaagagtggccaaccgtcaacccctccttctcctaacggtgcatcttcagctaatcgggcagacagtcatgaatgaggcttcgaaaactcacatcccaagagagttaagcccctgacgctagatatggcaaacatttttgtacagtaattgctagcgggcaacagcaagaatggtgttggttgtggtaggacatgttccatagaaaaaacatagacaagtcagacaggttttgcagtttggtttggtcctcagtttattcaccttttctgtacaatttgagtagcattgtgttctcatggatagcttcagtcagttattcagaaaaagcctttgtagcatatcggcccattgtttgcttgcttggaaacttgggtgttcataacctgctgttccggacgttcatttgggtaatccctggctatgtgtatgttgatgacaat

SEQ ID NO: 12973 - DNA, 641 bp, Setaria italica
  Peptide Sequence Number=SeqID_78947
cttgtcgattgccatcctgccgagctgccgtccatcccccagaccctgaacggagcttccgtcgtcagcgttcagaagtcggcgactgctggtgacctcattgtggagctttcatcaggaaaagaggttgccgatatcattcctaacatccatgaaattaaaaactgttcaggcagaggagttgtatttacagggccagcacctgagggatctggttatgacttcttcacacgtttcttctgcccaaaactaaacatagatgaggaccccgtttgtggcagtgcgcactgtgttttagcacccttttggggcgcgaagctgggaaagcagaaactgacagcatttcaagcatctcgacggagcggaatattacacctggagttggaacctgcaggcaggagagtgcgaattcagggagaagctgtcgctgtgatgactggtaccctcctagcctagcagctctccgtgcatgcttccattcatgaaacacaatagtcaatgaatctgctggcaaatctttttgtcctgctatgggattgtttaaagttattcagtttcgggaataaaagatcctgaacttttcttgtggactggaataaagttggagtgaaatcgtgatgtcctaaattaccagctcaaaa

SEQ ID NO: 12974 - DNA, 356 bp, Setaria italica
  Peptide Sequence Number=SeqID_78948
aagaactaaggtagttactactaatagaacaaggttacaaggttaccggactcgggttacttgttctgcttctggttctggagctggaggaggtgaagctggtttttcttcctcctctggctcttttttgtactctatcgccagcacagccttttccttgtcatcgtgggagcatctcttacgtactcctccatagtctgtaagaatgatgctggaggctgttcaatttttaagaacttctcaccacgcccaatgtgtatagttttacacacttcgtaaaattctgagagtctttcagcctgtgcaacccaaaacaaaaattgatattggtgagcctaacatatcaacgatcaatg

SEQ ID NO: 12975 - DNA, 1784 bp, Setaria italica
  Peptide Sequence Number=SeqID_78949
gggggcgaaggggttgccgaacgggttcgcggggttctgctgcatcggcatcgggtggtggtggacggcggcggccgccggcggcggtgccaccgccatcgtcatcatctgctgctgcagcaggaaggcctgctgctgctgcgccatggcggccatctgcacggcgtggggcgccgcgtacccgctggaggcgtagaacgggtcctgcatcgccggcgccatcgtctgtagcatcggggcgggggccgccggggtggcgtcccaggggttgtagctcgccgccggctggctcgctctccggttcgcgtcgtcgtacaggctgtcgagtgtcagcaagtccagaccaccggccaattttttgcttgaggcaacggcggtttcatttgaacttggcgcggtgacaagggccagttcccagcctgtcactccgttttcaaaggtaggagcggctttaggaacatcatctatcgggacgattgccagcgccaaggcgttctgctcttctattgcagtcgcagcagggctaggttcattcagacccagcaaatctggttcaggtgctggtggttcctctatgacaggttcaggttccggctcgggttcttgttctgcttctggttctggagctggaggaggtgaagctggtttttcttcctcctctggctcttttttgtactctatcgccagcacagccttttcctttgtcatcgtgggagcatctcttacgtactcctccatagtctgtaagaatgatgctggaggctgttcaatttttaagaacttctcaccacgcccaatgtgtatagttttacacacttcgtaaaattctgagagtctttcagcctggttagttgctcttttgtatatgtcaagtgccctaatagcatcgtttctttgcatctcaaagaacttgtcaaccagattgattgttccatcactaatggcggtgtagatcttaacactctctaaagcaaccatagaaagtgcatgctggattataatattgtaagacgatgctccttgtggctggcaagcaagaagccgaaaaagaagctgctgtagtggtggcagatgatcaagcaaagcaacagtatcaagatcccgagttctcggtggatctgtttctacatcatacttcagcactcggaaacattcgagcctctcctctagatataaagcataaatgcgcacccatgcagaataatcccaagcttctgcactggagtcatccttaaagtaggccatgttgagcatatgggacctagatctgccataattgataagctcttcacgaaaagtgggatcaacttctcgaagagcacgatgtatgacaatcaatgtcttcagtgcaaccgcccagttgcgtgttttcgaaaggcgtctggcaagggcatgaatgcagtatgctacatctgcccgtggccttgcagcagaaatggaaagaaaaatttctcttatgtacttctcctttgatggacgctcaacatggttagtggccttgacaattgcaatgtccaaatccttataatcactattcacttttgccaagctcacagtcgttgtgtccttgagggcaccaaggtacttcctgagggttggctgagttccgccaactgccattctccttaacttagttgatatcctaattggcctccgcaacggataatcctcagaagaaagaagcaggagtctccggggaggagagggccggagggaagggaagccgccttccctatgcggaggcgataggagaggagtgagcccgttcttggcgaggagaggac

SEQ ID NO: 12976 - DNA, 435 bp, Setaria italica
  Peptide Sequence Number=SeqID_78950
agcgcagagcggtgggagcatgctgaggagctcttggctgagatggtccgcagtggttgtccacctgatgaagtgacattcaacacaataatcgcttctctgtgtcagaaaggcttggttaatcgtgcaatcaaagttgttgaacaaatgttagagcacagatacatcccggatatcatcacatacaattgtatcattgatggtttatgcaacataaagtgtattgatgatgccatggaaatgctgaggaatctgcagtcctgtggatgcaagcctgatttagttacctataacactgtattaaaaggcttgtgtagtgttgaccgctgggaggatgctgaacaactcatggtcaatatgatgcacagtaattgttccccagatgaaatgacattcaatacagtaatcacttctttatgccagaaaggatttctt

SEQ ID NO: 12977 - DNA, 482 bp, Setaria italica
  misc_feature (105)..(105): n is a, c, g, or t
  Peptide Sequence Number=SeqID_78951
tacatgcagactacatggcagatgacctgcccatacatccgacgaatatggagatgcaccatatccaccggcagaatctccaagtccaagcgagagctcgtcacncttcagcaactctgatgctggatcgcacagcactgtcagcactgatagtagcgacagcacaaggaattcgaccagcactgaggagtacgagtacctgtttggtgcctcagatcaaatgtacccgggagcacctgtggagaacgaatacccgacgtattcccgttcgagatccagcttgaataccagctcatcaggaggggtggcggacgatgcggagaggtttgccgagcacaagcctcagggtggtggtgccggagggggttgggttgtgggcgacgagagcccgtccttgttgtatactgacagaagtaaacatcaagtacgtagactagttaagtttaactagtaccaagtattagggacagtgttaagtaata

SEQ ID NO: 12978 - DNA, 2798 bp, Setaria italica
  misc_feature (2778)..(2798): n is a, c, g, or t
  Peptide Sequence Number=SeqID_78952
gtggaggcacagccgcagccgccggctggggcgaagggggtctgcgcggtgtgcttcaggcccaccacgttcaggtgcaagcagtgcaaggccgtcaagtactgttccttcaaatgccagatagcccactggagacaaggtcataaagatgaatgccatccacctagtgttaatacaaggcctgatgatgaagggagagttgaacaggaaagagctgctgaagagaatgtatcagttggtgtaaaaccgattgctgaaacaaacaaaccagttactattggagatgaaacttctgatgaaaaccatagcttgaagagttcaataggtgaaggtaaacacatgcctttagaagatttatgcaccagcacagaggttcctggaggtcataaatccaacggcacagttgaaatccctcaaaatgttccagtatctgttgacggtagtaagatggcatcaaatactgaacatgcaacttttgttgaagatggttcttccagcaaggacttaaatgaagtgttgccatgcaattctcaagctactgacccaaagacaagtggtcgtagcagttctttcaatggagaatcgtaaattaattccaaggaacaccataaggctcaggatgccagtatcattgaggattgttctcagacaagtcataacagagaacttgaagatagtggcaatccccgagctgctgcatccgttgtcttggagaccaaaagttctaggaatcctattcgtgtggaacttgagaggtctaaaacaaaatctgttgggaatgacaacgttcaaagcacaaaacctgtgctaactgcatcgactgctgaaaaagctacttccattcgtggtggatgttctgtgatacctattccatctaaagtgtctgataattgttctgatagaagttctaaaccttcagagagatcgggttcaacagcaaataatctcgcaacatctctgaagaaaattgtcaggcagcaaacagcatcaaaagttgtgagacattatccatcagaactgacactctttccatatgaactttttgtgaagctctacgacaaggttgagttgcacccctttggtcttcataaccttggcaacagttgctatgcaaatgctgttcttcagtgcttgatgtttactcgaccacttacaacatatcttttgggaggacttcattcaaaaaaattgctccaaaagggaatggtgcttcatgtgcgaatttgaaaaactcattgtggagggcaaacgacgcaagactgctttatcaccaactgggatactctctcatttgcatgacattggcagtagctttggtcctggtaaacaagaagatgctcatgaatttctcaggtatgcaattgatgccatgcaatccgtatgcatgaaggaagctagaaaaggaggtgcccttcggtcagcagaagaaactacacttgtgcaattgatatttgggggctatctgcgatctaagataaaatgctcaaggtgtcatattagttctgagcaatgtgagcgtatgttggatcttactgttgaaatagatggtgacatcagttcactggatgaggctcttgtgcggtttacatctacagaagtcttggatggagaaaatagatatcactgcagcagatgcaaatcctatgagcgtgctaaaaagaagttgacaatagaagaagcaccaaatgttctgactattgcactgaaaagatatcagtctggcaagtttgggaagattaacaaagccatcagatttccggagaccctgaacatggttcgttatatgaacccagagactgatgacagatcgcctgtttacagcctctatgcagtggttgtccatcatgatgtcatgaatgctgccttctctggtcattatgtatgttatgttaaagatacacagggaaagtggtttaaggcagatgacagccaggtgaaacctgtatctctagacaacgttatgtcaaagtgtgcgtatatgctgctgtacgcaagatgttcaccaagggcgccaagctctgtgaggaaagtgatggttcaagacccagcacgcccgaagaaggccaagcagaaggtagttccaggagggacaccatttggaggttccttcagcagacaccaaggtggtcacctacatgcagactacatggcagatgaccttgcccatacatccgacgaatatggagatgcaccatatccaccggcagaatctccaagtccaagcgagagctcgtcactcttcagcaactctgatgctggatcgcacagcactgtcagcactgatagtagcgacagcacaaggaattcgaccagcactgaggagtacgagtacctgtttggtgcctcagatcaaatgtacccgggagcacctgtggagaacgaatacccgacgtattcccgttcgagatccagcttgaataccagctcatcaggaggggtggcggacgatgcggagaggtttgccgagcacaagcctcagggtggtggtgccggagggggttgggttgtgggcgacgagagcccgtccttgttgtatactgacagaagtaaacatcagtcgagcagtaagttaacagaccagtataggcagttagataggagcggacatgaccctggagaaaccaggggcggcgttctattgaggagatcagctagggacaggaccgcccaaacattttattgatgtggagggtttgggctgtgtagaggaataatatgatgtagcctgtaatattatcccgttgcaatgtttaaaaagagaagaggaatgtggtagcnnnnnnnnnnnnnnnnnnnnn

SEQ ID NO: 12979 - DNA, 338 bp, Setaria italica
  Peptide Sequence Number=SeqID_78953
gtccgcacgaccgcacgcccacgccttgaccgccggcgccgcaaaccctctttgtcggcggcgggatggcgaaggtcagcgagtccgcggcggaggctgcgtccaccgccgccgcccctcctcttacttccgcttccgcgccgccatcgaggccgaaggcgaagcaccggctggagatcgaggggtaccccgtggagggcctctccatcggcggccaagagacctgcgtcatcttcccgacgctgagcctcgccttcgacatcggccggtgcccgcagcgcgccatctcgcaggagttcctcttcatctcccatgggcatctcgaccacagtcggggg

SEQ ID NO: 12980 - DNA, 301 bp, Setaria italica
  Peptide Sequence Number=SeqID_78954
ccctcctgatactaaagctattagggacatctgtatactgcctgggggttgtgctgtttttgcatcactaggcaggaagttgtctcttttcaggtctgtaaagaatgtgtgctagttttatttctcaatatggtccccgtaacatttagtctgatatctgatctttgtgcttatgttttactatatcccagcgtggcaaccaacaatgttgtccttcaatacgatctgccggtgattctttgaccttgcaatttcacaaaactttcaagtacttttatgctcttcacgcattgattcagaa

SEQ ID NO: 12981 - DNA, 515 bp, Setaria italica
  Peptide Sequence Number=SeqID_78955
cacttctggaaggggacctggagttggtgctgaacacatccttacaaagatcaacatgtttgctagacagagaatgcagaaaatccacctccctcctgatactaaagctattagggacatctgtatactgcctgggggttgtgctgtttttgcatcactaggcaggaagttgtctcttttcagcgtggcaaccaacaatgttgtccttcaatacgatctgccggtgattctttgaccttgcaatttcacaaaactttcaagtacttttatgctcttcacgcattgattcagaaaccactaccaaaatttgttcctgcatatatttcttcctaaagtatttaaatactgcacatggtcctttctgttactgagggctgggtatctgcaagtcctttttatttgttctcttggtgtagctctagctcttggatattggaaaatcactttacattcagttcagcatacgctttaacctttagaagtaattaaaaaggtgcttggtaatcaatcacttg

SEQ ID NO: 12982 - DNA, 381 bp, Setaria italica
  Peptide Sequence Number=SeqID_78956
aatattaaaagcacattggtttagtataatttctcgtatgtgagtaatcttcgctacacaacatatggtgcacaattctgatgtgaaagtggtcaagcatgatagtagggttcaatgaaggccaatgctaattaattatctgtttgccacattaacataaacaaaggctaggatgcatcacacagtttgccaccaattttaaatcatgtgatctatcaatccgacacttgggttaactgttgcgtggaaagtacaaataccatctgttcaatgattggcccagcatcaagttcgggagtgacaaaatggctggttgccccaatcaacttcaccccagcattgaaggcctaaaagatgatacttattcacgttttcataaaa

SEQ ID NO: 12983 - DNA, 289 bp, Setaria italica
  Peptide Sequence Number=SeqID_78957
cttgtcgtcgggcgaagacatcgacgctgtgtatgttgccgccgcgggaggcgatgcactcggacagcttggcgacgatgcccacggtgtcggggcactggaatagatggatgccgaggaggttgcccgcgggcacggcggcggagaccggccgccgcgccaaggacagcatctgccggtcgatcgatctacctatccttccctgacgagcagatggatgcgacgggatgggatgcccatcagcggcggcgagcagatgagcctgattccacctcgtgaaccgaaatac

SEQ ID NO: 12984 - DNA, 635 bp, Setaria italica
  Peptide Sequence Number=SeqID_78958
tcctttctaattctaatttcttagttattcttctttgtcttccctttttgtttcccagattgttggttcggttaagtagtgatatggaataccatgcctccgaagaaatcgttgcacatgattatcttctggtctatcatggttgcttatgacacaactaatgtcaactggaagcctgccttcttgccatctatacaacaaatcaaacaagcaatggtcctgctttgaagcaaggaccgagatcttgtatttggggtcaagatcaggcactcgtacggtcgacctctgcgcaccgaagcaatgggacaggttgaggaaatctttgcgcaggtcatcacgcggccagagcctcgggttgtaggtgaactcactgcgggagtagaagacgggcttgtcgtcggggacgaagacgtcgactctgtggatgttgccgccgcgggaggcgatgcactcggacaccttggcgacgatgccgacggcgtcggggcactggaagagatggatgccgaggaggttgccggcggcggcggagagcggccggcgcgccaaggacatcatctgtctgtctccaaaaggacgaggcatggcatggcatggcagaatcagatattcagatgagatgatgcggttggtgg

SEQ ID NO: 12985 - DNA, 1514 bp, Setaria italica
  Peptide Sequence Number=SeqID_78959
tacctttgagcaaatgcagaagaggctgctgcgttgccttatctgtgtactatgcagtaactctaaactgttttcttgtcatgcgcttttatatatgcttaccatgaacccaagtgtccaatgaataatttgttgctactgctcaagtacgctcatcataccaaaccagagtaaaacatgcatcatcacaaaaagctagcgagcgattgcgcagatacagaaaaatttaatcattttgcttattttgtgaaaaataatacacatcacaccaatctgtaagaaaaattagctcagaatacaacagttttcttcagttcatatggaaggacacggagctcgcagtatgacttaatagcctctgctaggcattgcttctcaaggttctcagacttcacaacaaaactctgtagtgtgtctctgtgagaaactcgctcaaccatttgttcaatgattggcccagcatcaagttcgggagtgacaaaatggctggttgccccaatcaacttcaccccagcattgaaggcctgtctggaaggatggcctcccttaaatgagggaagaagcccatgatgaatattaataatatctttaccatatgcttttaaaaagctttccgacataatctgcatatatcttgccagcacaacaaaatctgtgccctgaatcaattctagtatctcttgctcccttttgttcccaggcgtggtgggtaagtagtagtatggaattgcatgcctctgaagaaagcgccgcacatgattgtcttgcggtctatcatggttgcttatgacacagttaatgtcaactggaagcctgccttcttgccatctgtgcaacaaatcaaacaagcaatggtcctgctttgaagcgaggactgcgatcttgtatttggggtcaaggtcaggtactcgtacggtggacctttgtgcgccgaagcagcatgacaaattgaggaaatccttgcgcaggtcatcacgcggccagagcctcgggttgtaggtgaactcactgcgggagtagaagacgggcttgtcgtcggggacgaagacgtcgactctgtggatgttgccgccgcgggaggcgatgcactcggacaccttggcgacgatgccgacggcgtcctgggcgaccaaccaaatggaataattaattaattatggcggaaaggagacgagggacgacgacgtacggggcactggaagagatggatgccgaggaggttgccggcggcggcggagagcggccggcgcgccaaggacatcatctgccggtcgatcgatctacctatccttccctgacgagcagatggatgcgacgggatgggatgcccatcggcggcggcgagcagatgagcctgattccacctcgtgaccgaatcacgcgccgcggttggtggagcagtatcggttggcgcttccctcctgcactgcactgaacgtggggacaaagatggcatccaggacctggagatcttcctccatggttccaggttccaggttccagccatggacgcc

SEQ ID NO: 12986 - DNA, 265 bp, Setaria italica
  Peptide Sequence Number=SeqID_78960
gtgcttgaaccgcgaagcagccggctgacggctgaactcgccggcgccggtcccgcctggcaacgaggagatggcgctcatcggcgccacgctcgttgccgctgcagcgggagcccgccccttcctctcctcagccgctcgccgctctcctgcgcggcctactcggccgccggtcccgccggcggcggcggcattgaagactcccctctgtcgcggaggtcgtttctcgcccggttcccgagcgtcgcgcgctcgccgttaccga

SEQ ID NO: 12987 - DNA, 672 bp, Setaria italica
  Peptide Sequence Number=SeqID_78961
ctgcttctaacaaagaggcgtttgaggctgatacagagtattggaaacaggttgtttcagaagtatatttcagtgacttcccacttaattggtcaagtattcgtaatataatggacatgaatgctggttttggagggtaagtaaagatgaatttctgctgctacttctcttaactagttaaatttactctgtatgacatggaaatattaatgctcataatgcatcatgtatctttctattatttctgatacattgagcaccagggaattaacagaaatgtgacaagaggcttttgactttcaatctgaaggtttttgttagtgagatgttgataattcgtgatagaccatagcatgaaggcttgaactgaattatccttgcttcagtgatggcttaagtggttactttttatcgaattatattacttagtgatacgctggtactgaagatcttaatttttagttggatgcatgctggtatgcataacgatgaattgctatcaaactaattggagactccatttaatgatgggagtgcttatcaggcttgtgttgaaccaggtttgcagcagcactcattgatcaacctttatgggttatgaatattgtaccaattgatcagccagataccctaccggttatttcaacagaggtttgattggagcatatcatg

SEQ ID NO: 12988 - DNA, 1827 bp, Setaria italica
  Peptide Sequence Number=SeqID_78962
tggagctgctgtcgtgggagctctgcgaggtggggaagggggtggtggccgcggactacatcccctgcctcgacaacgtgaaggcgatcaaggcgctcaagtcgctgcggcacatggagcaccgggagcggcactgcccggagccgaggccgaggtgcctcgtgccgctgcctgacaggtaccggcgtccggtgccgtggccgctcagccgtgacatgatttggtataacaatgttcctcacccaaagctagtggaatacaagaaggaccagaactgggtcaggaagtctggtaactatcttgttttccctggaggtggaactcaattcaaagacggtgtgggaagatacatccagtttattgaacagactatgcccgccattcattggggaacgcatacaagaactgtcttggatgttggatgtggtgttgccagctttggtggatacttgcttgacaggaatgtcattactatgtcatttgccccaaaagatgagcatgaagctcagatacagtttgcattagagcgtggaattccagcatttctagcagtgataggaacacaaaagcttccgtttcctgataatgcatttgatgttgtacactgtgcaaggtgcagggtccattggtatgcaaatggtggaaaaccgttgttggagcttaatagagtgctaaggcctggaggttatttcatttggtctgcaacccctgtgtatcgtcaagaaaaaagagaccaggatgactggaatgcaatggttactctgactaaatcaatctgctggagaacagtggtaaaatctcaagttctcaatggaattgcagttgttatatatcaaaagccaacatcaaattcttgctatgctgagagaaaaagcaatgaaccccctctatgctccaagacagatgggtcacgttttccttggtacgctcctctcgatagttgcattttcacaacttccgcctccagtttggatgaaagaaccaactggcctgttccatggcctgaaagacttaatgtcagatatgcaagtgtgcctggtgattctgcttctaacaaagaggcgtttgaggctgatacagagtattggaaacaggttgtttcagaagtatatttcagtgacttcccacttaattggtcaagtattcgtaatataatggacatgaatgctggttttggagggtttgcagcagcactcattgatcaacctttatgggttatgaatattgtaccaattgatcagccagataccctaccggttattttcaacagaggtttgattggagcatatcatgactggtgtgaatctttcaacgcctatcctcgtacctatgatcttctccacatgagtaatctcgttgcaagtcttacaaacaggtgtgacatcattgaagtagcagctgaaatcgacaggatcctgagacctggaagatggtttgtgctgaaagacaccatagaaatgataaaaaggacgcgaccagtcctcaagtctctgcactatgaaactgtcgttgtgaaacagcaatttcttgttgctaaaaagagtttctggcgtcccggtaaaccagcttccagatcaggatgacatagatcatactttcaggagagtcatcaacgaacaacaattctttgattctttgagttctaatcagatagattctttatacggcacagacactggtcagtagatggttacttatcggtacagtaaatacatacttctgataagaagttgagctaaaacattctttttttgtcaaagcaacataacaagggtgttataagcttacattagtaggctagttctgacaaatgcgcacacgggcttg

SEQ ID NO: 12989 - DNA, 259 bp, Setaria italica
  Peptide Sequence Number=SeqID_78963
ccactagtctccactctcccagcagcgatgttcctgcggcggctgagaacctccgccgcggcgctaatgacggcggcgtcctggccgccatccgcgccgagctttctcacgagctcgcctcctccgccccgtccgctcccccatccatccattcccaggacgcaccggacttcgtcgccgtaccggatgccccgcgcgtgcaggatgtactcctgcaccgccgggacgattccgaggaggtcctcgtgtcggcgctgct

SEQ ID NO: 12990 - DNA, 262 bp, Setaria italica
  Peptide Sequence Number=SeqID_78964
ggaaaggcaatctaaatgttgcaactgaggtaagtgaaaagaatcgcagtgacaaaacagtttaaaacattgaagaacaatcacaaattcagacttattttgtatggcaaccttaggtttttcaaatagccccgtcccttcacgtggttgagctcaagatagcaaagggggatactctggagtttcaaaagttctacagaagtctctcgacgcaactgaaggatgttgtgtggaagtgcgatggcgaggtcgagggcaacag

SEQ ID NO: 12991 - DNA, 338 bp, Setaria italica
  Peptide Sequence Number=SeqID_78965
ttatgaaactataagaatgaagctcaagtggcaatatcaaatatacagctactgtgccgtatgatgtgcacggacctttagcactaagaatgttattcctgccctcctttggatctttgaacagttttgtttactgagtcttgtcatcaatattcaattgcggagaagtatttcttgaatctcaacttacgtgcctttttgttgtttttggatttttaccagcggatcaccattgctcagatactggaagatccttggttcaaaaagggatacaagcctcctgtttttgacgagaaatatcaaactagcttggatgacgttgatgctgcttttggaga

SEQ ID NO: 12992 - DNA, 250 bp, Setaria italica
  Peptide Sequence Number=SeqID_78966
cttgttcagttaaagcacttaaaccgaagtcagatactttgagatttccagcacaacatcttcgccctcaacctagtactcgctctcgcttctccttcacttcttgagacctcctctcgtctgtcgatcagcctgcgcccagcgctggaaggtgtttgaagaatagcttgaaggttcagaggaaccttcgtctgttataagatgtatagggctaagagagctgcattgtcaccaaaggtgaagcgccgtg

SEQ ID NO: 12993 - DNA, 257 bp, Setaria italica
  Peptide Sequence Number=SeqID_78967
ggtcggtcggcgccgagagggggcgtggcgaggcgcgatccggccggggagtaagctgttgagagacccatgaggaggaggaggaggaggaggagcagagccgcagaggagtggatactgggcggatggataggagaggcacacgggcggagagctttttgaaaccattgctaccaacggaaggttgaaggaggacgaagcatgcaaatattttcagcaactgatcaatgcagttgattattgccacagtaggggag

SEQ ID NO: 12994 - DNA, 456 bp, Setaria italica
  Peptide Sequence Number=SeqID_78968
ctgttgagagacccatgaggaggaggaggaggaggaggagcagagccgcagaggagtggatactgggcggatggataggagaggcacacgggagggagagggtggaggagatcggaaaggattaggccggtatgctgttgagtcgtaccttgagcagatcttgtcccatggatttttccacgctgacccgcatccaggaaatattgctgttgatgatgtcaatggtgggaggcttatcttctatgactttggaatgatgggcagtatcagtcaaaacatccgagaaggattgcttgaagtattctatggagtttacgaaaaggatcctgacaaagtttgtttctctggacataatagcctgtagacgataatttagaccctgtgaagttctgcagtgttgaatcatgtattcttgcaggtgcttcaagcaatggttcaatgggtgtccttgttcct

SEQ ID NO: 12995 - DNA, 1076 bp, Setaria italica
  Peptide Sequence Number=SeqID_78969
gctgtttgccaattgatggcaggtgactttctgtacatttcagtagccagtacccactcgggactggtcgagtggctttacatacaaatttttagattcattcaattttcattgctctgttaaggcaaagtttgatttggagcatttgctagactctctttcatgtgtttccacatctttatttggtccttgtggatgtgagcatgaataactctcttttatatgtcagccgggcatctgactttggtctaatgaagatagatgacactggaagagttatttcattcagtgagaaaccaaaaggagatgaattaaatgcaatggtaggtttgatttttttccccagccaactgtaatgtagttcttctgctacacagattagaaacagtttttagttgtctcaatgtgtcaccaggtagtactgcacaaacgagagtgagcatcacaataaaaatgaaacaaaagttcatgaggcattacttattcatttttgcagcaagttttttttaatggctacggaaggggagagaatcccccacctgattttcattccattggccccaaaaacggcccgttagatagtcacagagttacagcatttccatatggtttacattgccataacaaacagattacaccatgtattgcatacggcagcttcgtttcatatgttttttgcagcaagttgataccacggtgctaggcttatcaaaggaggaagcagaacagaaaccctacatagcgtcaatgggggtctatatttttaagaaagacatactactaaaccttttaaggtcagatggcgtttccccactgcgaatgattttggttctgaaataattcctgcttcagcaaaagaaatcaacgtaaaggcatatcttttcaatgattactgggaagatattggaaccatcaagtccttctttgaagcaaaccttgcccttactgagcagcccccaaagtttagcttctacgatgctgacaaaccaatgtacacatcacggagaaatctaccaccatctatggtcaacaatagtaagatcactgattcaatcatttcccatggatgtttcttg

SEQ ID NO: 12996 - DNA, 1027 bp, Setaria italica
  Peptide Sequence Number=SeqID_78970
aatttgtttgaggcaaagaaggagtataaaagagagacaagattcacctcacaatttcctccgaaagaaatcataacaaagatagaagaagtcttgtcaaagccacttggatttgacattcagaagaaaaaatacaagatgcggatggagaatcccaaagcaggtaggaaaggcaatctaaatgttgcaactgaggtaagtgaaaagatcgcagtgacaaaacagtttaaaacattgaagaacaatcacaaattcagactttatttttgtatggcaacctttaggtttttcaaatagccccgtcccttcacgtggttgagctcaagatagcaaagggggatactctggagtttcaaaaggtactattctcgagcaattctctctgcggttctctttaagttggggcactgaatcagtaccgagattaaccgtgctgtacaacagttctacagaagtctctcgacgcaactgaaggatgttgtgtggaagtgcgatggcgaggtcgagggcaacagcacgttggcatgaagcggcctccaaacttacacatgccggcgctggctttccttgtacatagcttctcttccggatgatcagtgtccattgcagagtcggttttgcaagcaagttcttggttcatttgtcgatggcgagtaagctccgatgaaacaaccgtcttcaaggctgttgcggatgagctcactggcgcgttgtttagtccattttatggtctggaagttagatgggatgggagccacaatcaaggctgtagtagtgttgtagtaatgaggtacatcagacggtgtaaagggagtaccaattgttaggtcaaggcttcaagtttagtccccttcaatttgttctatgctgtgttacttcaaataaacattacttctagatgtatgaggtgaacacagatagcttgtgccctggtctttgtgcagtgcgcatgatgctgagagcttgcactgttgcacaccttaagaccctatttgtgatggaggaacggctgttgaggtgaaactag

SEQ ID NO: 12997 - DNA, 746 bp, Setaria italica
  Peptide Sequence Number=SeqID_78971
aggatgaaaacaatcattgcactatacaaaaagatctctaaaggtaaatagccagcaagaaggacaaagaggattactccacaagaccaaatatccgcagtttcgcccccagcacaacatcttcgccctcaacctagtactcgctctcgcttctccttcacttcttgagacctcctctcgtctgtcgatcagcctgcgcccagcgctggaaggtgtttgaagaatagcttgaaggttcagaggaaccttcgtctgttataagatgtatagggctaagagagctgcattgtcaccaaaggtgaagcgccgtgttggaaagtatgagctcggacggaccatcggggaaggaacatttgcaaaggtccgttttgctaagaacactgaaaatggggagcctgttgccatcaaaattcttgacaaggagaaggttcagaggcacagattagttgaacagattaagcgtgaaatttgcactatgaagttagtaaagcatcctaatgttgttcgactgcttgaggtgatgggaagtaaagcaagaattttcattgttctggaatatgttacgggcggagagctttttgaaaccattgctaccaacggaaggttgaaggaggacgaagcatgcaaatattttcagcaactgatcaatgcagttgattattgccacagtaggggagtgtatcacagagacttgaagttagagaatttgcttcttgatgctgctggaaatctcaaagttatctgac

SEQ ID NO: 12998 - DNA, 1835 bp, Setaria italica
  misc_feature (1758)..(1758): n is a, c, g, or t
  Peptide Sequence Number=SeqID_78972
aacatttgcaaaggtccgttttgctaagaacactgaaaatggggaggcctgttgccatcaaaattcttgacaaggagaaggttcagaggcacagattagttgaacaggaacaacgtggagaatgaattttcttccttggatgttgacgtgtcagcatgggagcataggaagatgaaactccaattaagaaacgattctatatctacatatttacatgccatcgagatatatccacatggtggtcttccggttgaagtcatactaccaactcaattaagcgtgaaatttgcactatgaagttagtaaagcatcctaatgttgttcgactgcttgaggtgatgggaagtaaagcaagaattttcattgttctggaatatgttacgggcggagagctttttgaaaccattgctaccaacggaaggttgaaggaggacgaagcatgcaaatattttcagcaactgatcaatgcagttgattattgccacagtaggggagtgtatcacagagacttgaagttagagaatttgcttcttgatgctgctggaaatctcaaagtatctgacttcggtttaagtgctttaactgaacaagtgaaggctgacggtctgcttcatacaacatgtggaacctcccaactatgttgctcctgaggtgatagaagatggaggctatgatggtgcaactgcggatatttggtcttgtggagtaatcctctttgtccttcttgctggctatttacctttcgaggatgaaaacatcattgccctatacaaaaagatctctaaagctcagtttacctgcccctcttggttttcggcgggagctaagaacctgattaccagaattctcgatcccaatcctacaactcggatcaccattgctcagatactggaagatccttggttcaaaaagggatacaagcctcctgtttttgacgagaaatatcaaactagcttggatgacgttgatgctgcttttggagactcagaagaccggcatgtgaaagaggaaactgaagatcagccagccacaatgaatgcatttgaactgatttcactaaatcaggcactgaatctggagaatttgtttgaggcaaagaaggagtataaaagagagacaagattcacctcacaatttcctccgaaagaaatcataacaaagatagaagaagctgcaaagccacttggatttgacattcagaagaaaaaatacaagatgcggatggagaatcccaaagcaggtaggaaaggcaatctaaatgttgcaactgaggtttttcaaatagccccgtcccttcacgtggttgagctcaagatagcaaagggggatactctggagtttcaaaagttctacagaagtctctcgacgcaactgaaggatgttgtgtggaagtgcgatggcgaggtcgagggcaacagcacgttggcatgaagcggcctccaaacttacacatgccggcgctggctttccttgtacatagcttctcttccggatgatcagtgtccattgcagagtcggttttgcaagcaagttctttggttcatttgtcgatggcgagtaagctccgatgaaacaaccgtcttcaaggctgttgcggatgagctcactggcgcgttgtttagtccattttatggtctggaagttagatgggatgggagccacaatcaaggctgtagtagtgttgtagtaatgaggtacatcagacggtgtaaagggagtaccaattgttaggtcaaggcttcaagtttagtccccttnaatttgttctatgctgtgttacttcaaataacattacttctagatgtatgaggtgaacacagatagcttgtgaaccc

SEQ ID NO: 12999 - DNA, 2655 bp, Setaria italica
  Peptide Sequence Number=SeqID_78973
ggctcgtcccgccaaaaccccgagccccaaaccctagccagggcgccatgtccgtcgcgtccgcggcggcttccctcgtcgcctccacctcgctctccgtccccgaccacctccgcctccgccgcttccgcctccacccgcggcccccgcctcccccgctcccgtgcttccgccggcgatcgcggggctgcgtcgcgcgcgccgtcctcgaggaccgcgcgcccccgcccggccgaggaggacgccaagcgctacgggctcaacgggaacgggagcggcgtcgggtacgacgatgccgccgtccaggcgtacctcgggagcaacgggaacggaaatgggagcgctagcgctagcgggagcggcaacggcgcggcggtgaagcagaagcagcctgaggagtcgacaccgataagcgcggccgtggttcccgtaccgccgggggatgatgagaggcgcaggaaggagagggtggaggagatcggaaaggaggatgcctggttcaagcagagcagcggggatttgcctgaggtgtctgttgctcctggtggtcgctggaatcggtttaaaacttactcgacaattcaaagaacattggaaatatggggcttcgtttttacatttatattcaaggcttggctcaacaaccagaagttcacctacaaaggggggatgacggaagagaaaaagataatgaggaggaaagttctcgccaagtggctaaaggagagtattttgagattaggccccacattcatcaaaatagggcagcaattctccaccagagtcgatattcttccgcaggaatacgtggatcagttatctgagttacaggatcaagttcctccatttccttcagaaacagctgtaaaaattgtcgaagaagagctggggtcatctgttaatcagatatttgatcgatttgattttgagccaatagctgctgctagcctcggccaggtccatcgggcacgtctgaatggccaagagattgtcatcaaagtgcaaaggcctggtctgaaggagctttttgatattgatctgaagaatttaagggtaatagctgaataccttcagaaagtggacccaaaatcagatggtgccaagagagactgggttgctatttatgatgagtgtgcatctgttttatatcaggaaattgactatacgaaggaagcatttaacgctgaaaagtttgctgagaacttcaaaaaattggattatgtgaaagttcctgaaatttactgggagtacactacacctcaggttttaacaatggaatatgtcccaggaattaaaattaacagaataaagcagttagacaagttaggagtcgatcggaaaagattaggccggtatgctgttgagtcgtaccttgagcagatcttgtcccatggatttttccacgctgacccgcatccaggaaatattgctgttgatgatgtcaatggtgggaggcttatcttctatgactttggaatgatgggcagtatcagtcaaaacatccgagaaggattgcttgaagtattctatggagtttacgaaaaggatcctgacaaagtgcttcaagcaatggttcaaatgggtgtccttgttcctactggtgatatgactgctgtcagaagaacagctcaatttttccttaacagctttcaagagcgtctagcagcacaaaggaaggagagagagatgacaactgcagaattgggatttaaaaagcaattaactaaggaggagaagtttgaaaagaagaagcagagacttgctgcaatcggagaggatcttttggcgattgctgcggatcaaccatttcggttccctgccacattcacatttgtggtcagagcattttcagttctagatggtattgggaaaggccttgatcctagatttgatatcacagagattgctaagccatatgctaaggaattgctaagattcaatgaagctggtgttgaagtagttgtaaaggatgcaaagaagagatgggaaaggcagtcccgtgcattttataatttgttccgccaacctgacagagttgaaaagcttgcacaaatcattgagcgtttggagcaaggtgagctcaagcttcgtgtcagaacactggaatcagaaagagcatttcaaagagttgccgctgtgcagaaaacgattggatatggaattgctgcaggtagtttggtgaaccttgcaacaatgctgtacttcaattcaatccggggaccggcaacagtcgcgtactctctttgtgcgttcttcgggctacaagttgttgtcggccttatcaaggtgaagaagttggatcggcaggagagactgataaccggcactgcctgaactatgcgtccgtcgtcgatcggtgagaactgacccgtcatttttcagtgttgcccggtgtctccaccgtcccatttttttttggggggtgtttctctactgcccaattttccccaacgcgatgtagcataaccacggccaacggcgtataatagttgtatgtaggtgcggtgtaactgataaagatgtacatagtgtataatagacgtttttacatgtattgtccgcttccattgttgcgtaccgagatacaagattttgtttcatatgtggttcagggtgaatgacagatttggtggtttcagtttgttctctgtaaaa

SEQ ID NO: 13000 - DNA, 261 bp, Setaria italica
  Peptide Sequence Number=SeqID_78974
cgctgtaccagcggctgcccacgagcgagacgctgcccagggacctccacccggtcttcttcctcttcgtcgccgcgcccagcgtcgcgtgcctcgcctgggccaggatcaccggcgagttcggctacggctcccgggtcgcctacttcatcgccatgttcctctacgcctcactcgccgtgcggatcaacctgttccgggggttcagcttctcgctggcgtggtgggcgtacacgttcccgatgacgagcgcggcgatcg

SEQ ID NO: 13001 - DNA, 3239 bp, Setaria italica
  Peptide Sequence Number=SeqID_78975
ccggctgctgcagctcctcgcgcagcagttcgaggacacgctcgtccgcatcctgctcgccgccgcggcggtctcgttcctcctcgcgctcttctcctcggccggggaggtcacgctctccgccttcgtcgagccgctcgtcatcttcctcatcctcgtcgtcaacgccgccgtcggaatctggcaggagaccaacgccgagaaggcgctcgaggcgctgcgggagatccagtccgaccacgccgcggtgctccgtgacggggagtggctccccgcgctccccgcccgggaactcgtccccggggacgtcgtcaagctccgcgtcggggacaaggtgcccgccgacatgcgcgtcgccagcctcgtcacctccacgctccgcgtcgagcagggctcgctcaccggagagaccgcttccgtcaacaagacctcgcacgccgtgcccgtcgaggatgccgacatccaggccaaggagtgcatggtcttcgccggcaccaccatcgtcaacggctgcgccgtctgcatcgtcgtgcacaccgggatggccaccgagatcggcaagatccacgcgcagatccatgaggcatcgcaggaggacgacgacaccccgctcaagaagaagctcaacgagtttggcgaggcgctcaccaagatcatcgggctcatctgcgccctggtctggctcatcaatgtcaaatacttcctcacatttgagcttcacggatgggtgcccaggaacattcgcttctccttcgagaagtgcacctactacttcgagatcgcagtggcacttgctgttgccgccatacctgagggcctacctgccgtgatcaccacatgcctcgcgcttgggacaaggaagatggcagccaaaaatgcactggtgaggaagctgccgagtgtggagaccctgggctgcaccaccgtgatttgctcggacaagactggaacgctgaccacaaaccagatgtcagtggcaaaacttgtggcaataggtgattcttcaggggaagttaggagcttcaaggtggaagggacgacctatgatccccgggatgggaaaattcatgactggcctgctgggagcatcgatgtgaaccttgagacgatcgcaaaggttgcagctgtgtgcaatgatgccagcgtggcacattcttcgcatcagtatgttgccactggaatgccgaccgaggcagctttaaaggttctggttgagaaaatgggtctgcctggaggaaagaatggaccgtcattggatccgtctgatacattaggctgctgcaaatggtggaacaatgttgccaaaaggattgccaccctcgagtttgaccgcatgaggaaatcaatgggtgttattgtgaggaccagttcaggaagcaatgcactactcgtgaagggagctgttgaaactttgcttgagcgaagtagccacgttcaactgaaggatggtttagtggtgccattagatgagaaagcaaaggaaattgtcttggcaagcctccatgagatgtcaaccaaagctctacgctgcctgggttttgcatacaaggaggatttagcagaatttgcaacatatgatggcgaaaaccatcctgctcataagctcttgctggatccagccaattatgctgcaattgagactgacctaatttttgctggtcttgtcggcctaagggaccctcccagggaagaggtctatgatgctattgaagattgcagagctgcaggcatccgtgtcatggtgataacaggggacaacaaagaaactgctgaggcaatatgccgcgaaattggcgtgttttcacctgatgaggatatcaccttaaacagccttacagggaaggagttcatggcacttgaggacaagaagacactgctaaggaggaaaggcggccttctgttctctagggcagagccaaggcacaaacaagagattgtgagattgttgaaagaagatggtgaagttgtcgccatgactggagatggagtcaacgatgcccctgcgctaaaactggctgatattggtgttgctatgggcattacaggaactgaggttgccaaggaggcctctgacatggtgttggctgatgataactttagcactatagttgctgcagttggtgaaggaagatcaatttacaacaacatgaaagctttcataagatacatgatttcctcaaacattggtgaagttgcatctattttcctaacttctgccttgggtattcctgagggattgatacctgttcaacttctatgggtcaatcttgtcaccgatggcccccctgcaactgctttaggtttcaatccgcctgacaaggacatcatgaagaaaccacctaggagaagcgatgattcactgatcactccctggattttgttccgctacctgatcattggcctctatgtgggaattgcaactgtcggcatttttgtcatatggtacacacatggatctttcatgggcattgacctcactggagatggtcacactcttgtcagttactcacagctttcaaactggggccagtgctctacttgggacaacttcacggtttcgcctttcactgctggaaccagaagtttcacctttgacaacccatgcgagtacttccaggcgggaaaagtgaaggcgacaacactctctctgtctgtcctagtggcgattgagatgttcaactcgctcaatgctctctctgaagacagcagtctgctcagtatgcctccttgggtcaacccatggctgctcgttgcaatgtcggtgtcgttcgggctccatttcttgatcctctatgtgccgttccttgctacagtgtttggtatcgtgcccctgagcttgaatgaatggctgctggttctgctggtcgcactaccggtggtgctcatcgacgaggttctgaagtttgtgggcaggagtacaagctcttcaggtcccaagaggctgtcgaggaagcagaagggcgagtaacgctaacattggttcagttctcagttactaaaccaaccaattgatcatgtaaagatgattctcaaaggatgttcgttaaacaccaaacttttcaatacatagaaattgcaggaaactagttctcaaacaagtacccgtttttttttttcagcaaaagtgctgtttcttgcttgcttttctcctaatgcctaaaggcaacaaattagcttcctagttcttaaattttactggttataattggcaacctaattatacctagtagaaattaaaa

SEQ ID NO: 13002 - DNA, 1525 bp, Setaria italica
  Peptide Sequence Number=SeqID_78976
ccaatgttcctccatattactccctccgttccaaattataagtcattccaactttcttggagagtcaaactattttatattgaccaaaattacagaaatgatcacaaagatttatagcaccgaatagatatactaaaaaatatatttaataaagaaactaacagtacttatttgacatcatgaatattagtattttattgtataaatttggtcaaacttgagatgttttgattctccaagaaagttgaaatgacttgtaatttgaaacggagggagtgcacaacggagggagtagacagcatgtggtatgctatctttcgcagaagctacaaaagggccgcgatggcaccagctcagtttgatcagtaaacaaagcctgcatggctggcatgcaggcatcaactgggattgaacctaggagttaataatagtaaggcagtgaatcaaaatatgcgccattcgcttcaaagtggatgaaatctgaaaccacctcctccgttttgctattgggccaacatatattgccttgggaattcaatcttctccattctggggagcctccccgtgcatacacttaacgaaggtacgaagttccgggaagtaggcatctctctgcaaaagggatggaggctgctggcggtatgtaaagaacgaggcatgatggcgatcaggatcattcctaggcttcgttgtgtcaaggatttgagagtacatgtcaccatcaagacatggaagtgcactctctatacatagagacagcccatgatcccatgctgcattcacaacctgccaggttaatccttctggatccgcacatgcttcatcattctcctgaactgtaaactctggcccataacaaactagcttaagaatcacagaatgcttcttgagcattttgagaactggggagtatccatctctgtttgtaggattgtagaatcctgctgtaagctctgcagcatggcttgcagttctgtaccaccaatagatagatggaatcttcacaagtatttctgctccatcaaatgcaagagtagcaagtgagagcacctgatccacatgatctatgaggactccagaataccagttgaggaaaaaacgtccatagtagctgtcataatcacctccatcacaaaagaagccagtttcacgtggtcttgaattataatagccagcattatcaggcccacgtgcccaaaacaaatgaccccgtgacgctgctgattgccgtaaattcttttgcatgtacctgtcataacactgaaactcaccgataccaggatatttccagcccattctttctgggcatgaagggtatcttagctcccctgaagcacccaatccaatttcaatagcagagataagaccctcttcagataggtttctgaattccatatggaagctcctcatgaaatcaaaatagacctcaatgccagttctccctctaaggactcgttctttgtcaaccccccaagaaaggcattctgtgtttcttctgccttcgcggtctgcgaaaaatatgtcc

SEQ ID NO: 13003 - DNA, 137 bp, Setaria italica
  Peptide Sequence Number=SeqID_78977
gtgtattaactggttgggatcagatactccattgcagtcttaagaagaccttgactggcaattttgagagatagaattgcactttctacagaagagaatgatgctgcctaaagaggtttttgtcctggtagtactgg

SEQ ID NO: 13004 - DNA, 398 bp, Setaria italica
  Peptide Sequence Number=SeqID_78978
tatcggtctcgcaactagttcttgtaagatgggggcagacttatgttgatcttctccaggatttgatggaaaagaccattactctcgcccttgctacaggccacaagagatttagcgcgtcactttctaagcttgttgagaactatgctgaactgttggccagtcaaggtcttcttaagactgcaatggagtatttgaaactgttgggatcagatgagcattcacatgagctggcaattttgagagatagaattgcactttctacagaaggttggcacaaacttatagaatcacttgatttggttttcttgctgtttcctgttggtttaattttttatgcattttcactggtttatagattcgcattattgtgttgactgttgagtgaggcatttgct

SEQ ID NO: 13005 - DNA, 596 bp, Setaria italica
  Peptide Sequence Number=SeqID_78979
cgccgaatcggctcgcttcaggggctgagcagggggagctttgcatctgggatctcaagaacccagtcgagccagtagtgtacccaccactcaagcagagtgttggttccagcgcccaagcagaaatctcttgtttatcctggaatcccaagtttcaacatatattagcaaccacatctactaatgggatgacagttgtttgggatttaaggaaccagaaaccactgactagcttttcagattctattagaaggaaatcctctgttcttcaatggaacccagacatgtccacccaactgattgttgcatcagatgacgatagctcaccctcactgagagtttgggatgtgaggaagaccatttcacccgtaagagaatttgttggccattcaaaaggcgtgattgctatgtcctggtgcccttacgacagttcgttcttgcttacatgttccaaagacaatagaacaatatgctgggatactgttagtggagagattattagtgagctaccaaccagcgataattggaattttgaccttcactggtatcgaaaaattccaggcgtcatagcagcatcctcgtttgattgggtaaaa

SEQ ID NO: 13006 - DNA, 473 bp, Setaria italica
  Peptide Sequence Number=SeqID_78980
taaggaaccgttacctaggtacagaggcagtaggaccaagagaagggactggtggagtagaatatggctggtttatgccatcaaccaatcaaggctttgttcagaggcctggcttgagtcctgcgcagccctcaagtccaacacaggcacaggcacaggcacaggcacaagcacaggcacaagcagctcctcctgcacctcccccgactgtgcagacagctgatacatctaaggtgtctggtgaattgaggcctgttattgcaacattgaccagattgtttgatgagacatccaaagcccttgggggttcacaagctactcaagcaaaaaagcgtgaaatcgaagacaattcaaggaaaatagggcatgtttgccaaactaaataagtggcgacatatcttccaaaatgtttcatcaaaactcattcagctgtgcagtgcacttgatagtagtgattttgccacggcgatgca

SEQ ID NO: 13007 - DNA, 529 bp, Setaria italica
  Peptide Sequence Number=SeqID_78981
tcttcctaggtattttgtattggtaaaagtacctatttacttcttcgtccctttgtcttactaggccacaagagatttagcgcgtcactttctaagcttgttgagaactatgctgaactgttggccagtcaaggtcttcttaagactgcaatggagtatttgaaactgttgggatcagatgagcattcacatgagctggcaatttttgagagatagaattgcactttctacaaagaaaagaagaatgatgctgctaggagttctttgtctggtagtactggcgccagttccccctatgtcacaaatcatagttatatcacccaagaccagcctcagaatcttcaccagcaggtacaatcgtataatctgcatagtagcacatattcagatggttaccctcaacaatctaatgcagcctttgcatacaacaacccatatcaacctcaaccacaatctcaaatgttttgtttcctacctaagttgtctaaccgtaattactaagtacttactttacttaagttaactttaa

SEQ ID NO: 13008 - DNA, 1731 bp, Setaria italica
  misc_feature (1642)..(1731): n is a, c, g, or t
  Peptide Sequence Number=SeqID_78982
aaccattactctcgcccttgctacaggccacaagagatttagcgcgtcactttctaagcttgttgagaactatgctgaactgttggccagtcaaggtcttcttaagactgcaatggagtatttgaaactgttgggatcagatgagcattcacatgagctggcaattttgagagatagaattgcactttctacagaagagaatgatgctgctaggagttctttgtctggtagtactggcgccagttccccctatgtcacaaatcatagttatatcacccaagaccagcctcagaatcttcaccaggtacaatcgtataatctgcatagtagcacatattcagatggttaccctcaacaatctaatgcagcctttgcatacaacaacccatatcaacctcaaccacaatctcaaatgtttgttccaccaagtgcaccgatcagctctcagctaccacaaggttctgctcctgtacaggcaccaccgcaaacagtaaagacatttactcctgcaaacccaatgggtctgaaaaacgcagaacaatatcaccaacctaataccttgggttcccagctttacatgcctgctgcaaaccagccatattctactccaccagtcccttctcttggtcctactgcctctgtaccaggaacggtccctaaccagatgtttccccattctgctgcaactaactcaacggccaggtttatgccatcaaccaatcaaggctttgttcagaggcctggcttgagtcctgcgcagccctcaagtccaacacaggcacaggcacaggcacaggcacaagcacaggcacaagcagctcctcctgcacctcccccgactgtgcagacagctgatacatctaaggtgtctggtgaattgaggcctgttattgcaacattgaccagattgtttgatgagacatccaaagcccttgggggttcacaagctactcaagcaaaaaagcgtgaaatcgaagacaattcaaggaaaataggggcattgtttgccaaactaaatagtggcgacatatctccaaatgtttcatcaaaactcattcagctgtgcagtgcacttgatagtagtgattttgccacggcgatgcacctccaggtaatcttgacaacaagtgactgggatgagtgcaacttttggcttgcggcattgaagcgtatgatcaagacacggcagaacttcagaatgtaaacctgtgtggctttctcctgcagccagtcctgtatacacattttctgcttgtcagagatgttagttttagcaattcagtgggttcgccagcacaggggtgttatcctgcttctttgttcaggtctcccgattctgccttaagcttggtgaaagtggtctgttacttcggtgctgttatacattttgataatagttttctttttcgacatttcttggtaagatgatcaggtgttggattgatggttttggatgttaattgtatgaggcaacttagtctgtgttatagctggttgattatcttttttaactttaaacacttttgacagtggaagaactctatgatcaaaatacgatggacaatggcctgttcttttgtaccgcgaacagaaatcaataaatttctcagaatcttagattttttatattaaaaaaaaaaannnnnnnnnnnnnnnnnnnnnnnnnnnnnnnnnnnnnnnnnnnnnnnnnnnnnnnnnnnnnnnnnnnnnnnnnnnnnnnnnnnnnnnnnn

SEQ ID NO: 13009 - DNA, 2665 bp, Setaria italica
  Peptide Sequence Number=SeqID_78983
cccggaccgcttcaaccgcctctcctggtcgcgcccgggcgcggtggagggtgactcctacgcgctgggcctcctcgccggaggcctcagcgacggctccgtcgccgtgtggaacccgctgagcatgatcagctccgaggggaaagcggaggatgctatggtcgcgcggctggagaagcacaccggggcggtttgtggattggagtttagcgagctcacgccgaatcggctcgcttcaggggctgagcagggggagctttgcatctgggatctcaagaacccagtcgagccagtagtgtacccaccactcaagagtgttggttccagcgcccaagcagaaatctcttgtttatcctggaatcccaagtttcaacatatattagcaaccacatctactaatgggatgacagttgtttgggatttaaggaaccagaaaccactgactagcttttcagattctattagaaggaaatcctctgttcttcaatggaacccagacatgtccacccaactgattgttgcatcagatgacgatagctcaccctcactgagagtttgggatgtgaggaagaccatttcacccgtaagagaatttgttggccattcaaaaggcgtgattgctatgtcctggtgcccttacgacagttcgttcttgcttacatgttccaaagacaatagaacaatatgctgggatactgttagtggagagattattagtgagctaccaaccagcgataattggaattttgaccttcactggtatcgaaaaattccaggcgtcatagcagcatcctcgtttgatgggaaaattggtatatacaacctagagttctctggactttatgcagctggtgatgctggtggtgccccagcatgtccaagagctccagctccaaaatggttgaaatgccccactggtgcatcttttggctttggtggtaaacttgttgctttccatccagcagcacccacccaaggcgcacaagcgtctacttctgaggtgcatgtacacaatttggtgattgagcaaagtttggtgagccggtcaactgaatttgaagctgctatacagaatggtgacaagagttcgctgcgtgctctgtgtgaaaaaaaatcacaagaatcattatctgatgaggagagagaaacatggggcttcttaagggttatgtttgaggatggggatgttgcaaggacaaaattacttgctcatcttggctttgaaccgcctcaggcaccaactgtggattcaactgatgaactgagccaaacattggcggatacacttaatcttgatcatggcacagcaaccgataatgcggatgctcaatttcttgtcgataacggggatgattttttcaataaccctcaaccttcagaggctagcttagctgaagaatcaatttctacaaatggtgaacagatagagcaggaaatacctggagatgttgtgccatctgatccatcaattgacaagagcattcaacatgcattggttgttggagactacaaaggtgcagttaaccagtgccttgctgcaaatcgtatggctgatgctctggttattgcccatgctggtggttctgctctatgggaaagcacaagaaatcagtatcttagaaagagtatctcgccctacttaaaggttgtttctgctatggtgggcaatgatttaatgagtttcgtgagtacttggccactaagttcgtggaaagaaactcttgcgctactgtgcacatttgcgcggaaagaggaatggaatgttttgtgtgacacacttgcatctagactcctgagtgttggagatacactagctgcaactctctgttacatctgtgctggaaatattgacaaagctgtggaaatatggtctcgcaacttgaagtctgaagatggggggcagacttatgttgatcttctccaggatttgatggaaaagaccattactctcgcccttgctacaggccacaagagatttagcgcgtcactttctaagcttgttgagaactatgctgaactgttggccagtcaaggtcttcttaagactgcaatggagtatttgaaactgttgggatcagatgagcattcacatgagctggcaattttgagagatagaattgcactttctacagaagagaatgatgctgctaggagttctttgtctggtagtactggcgccagttccccctatgtcacaaatcatagttatatcacccaagaccagcctcagaatcttcaccagcaggtacaatcgtataatctgcatagtagcacatattcagatggttaccctcaacaatctaatgcagcctttgcatacaacaacccatatcaacctcaaccacaatctcaaatgtttgttccaccaagtgcaccgatcagctctcagctaccacaaggttctgctcctgtacaggcaccaccgcaaacagtaaagacatttactcctgcaaacccaatgggtctgaaaaacgcagaacaatatcaccaacctaataccttgggttcccagctttacatgcctgctgcaaaccagccatattctactccaccagtcccttctcttggtcctactgcctctgtaccaggaacggtccctaaccagatgtttccccattctgctgcaactgtcgcaacggccaggtttatgccatcaaccaatcaa

SEQ ID NO: 13010 - DNA, 685 bp, Setaria italica
  Peptide Sequence Number=SeqID_78984
accaaacctcaaccaataagtggaactctatgtacatttatttatacagcagtcaggtctctaaatcattctcctgcctgtgttgttcaacggaagcagtcaggctaggaccattgtgctcgatatagtcatccgaggcttcatcctcgtcatcagaagaaagaagggacgaacccatccattgcttgaaaccgtcgtttatgcgccgctgcatctctggagtcacttccattttggactctagcatctctagacccacattgtgggtagcgtaatcgccctcgtcaaggacaactgcggctttccttctcaaggagaaggctgtgccaccgtataaaattgccaaaccccaggctgtaatttcatagcaccagaaaagtggaacagagcatgtacttcctaaggccagcaatgttgatcctagaacaattgccatgagaccaaatactactgcaaaaactgcattaagtatagccaggcaacgaacaccacctcttctagaagcacagaagttattctcaacaatgcagatcatgggatgccttcttggagcagcatatgcaacagacattccagctaacaaggtaggtgagggaggcgccgaagaggacggcggagggtacgaagacgaccatccagtagaagtcggcggcctcggcggtggtcatgtagaaggcgcccccgc

SEQ ID NO: 13011 - DNA, 293 bp, Setaria italica
  Peptide Sequence Number=SeqID_78985
cggcggcgacccgctgctccaggacatcctcacgtactggggcaagccgtactgaggaaggccggtggcaggtggtggttaccagttgggatcggggtggctcggcctagctgccggcgatgaggccgcgtggagccctgatcgaggacagagcaggaactcgatctggttatagctactgagagtggaattaagctgtgtatatgcgattaatcttggcgctgggatttttgtgtacttattattagtagtgttactaattaattttgctctgctccttaaaaaaaaaaaaa

SEQ ID NO: 13012 - DNA, 349 bp, Setaria italica
  misc_feature (330)..(349): n is a, c, g, or t
  Peptide Sequence Number=SeqID_78986
cgattccattcagtgagttcagcttggctctggagaaggccctgggcaaacatggaagccagccaaagcaagttgtgaggttctgagatgaaagatgagtgttgtcaagtgttttaggcagagcgacttggagttgtatgtactctggacacagcagcttagctagatttctgtgcgatcgagttcatcttgcaatgaaataccagttgtacacccaggttgatgtcacaatctaaccggacgagtttgttttatttttctttccttttcattttcttgtatctttccagtctggaacgtatctttttaatataatcggcaggagaaagnnnnnnnnnnnnnnnnnnnn

SEQ ID NO: 13013 - DNA, 373 bp, Setaria italica
  Peptide Sequence Number=SeqID_78987
attttcttatatatatgcttccctcttgaggtgttcacttccttactttattaagtaatctgtatctgaattgatgcagagggacaggcctggctcagaggaagcaaaaggtaagctcaaacaacttggcgcagatgaggtgttcacggaatctcagctagacatgaagaatctcaagagcctgctgggtgctttgccggaacctgcattaggatttaactgtgtcggaggaaatgctgcttctctggtactcaagtttttgaggtaacgtgttgaatttgacaaagttagaatttttatttcatgccatagccacaatcccttgttctttaggcaaggaggcaccatggtgacatatggcggaatgtccaag

SEQ ID NO: 13014 - DNA, 1673 bp, Setaria italica
  Peptide Sequence Number=SeqID_78988
cgatgaagtataggccggcacttttatatggaaccaactacccacccacctaccatcttgggctggaatgctggattgggctgggctttaaaaggaagaagaggaaggaaggaagaagaagagggaggaaggaagaagaagaagagtagagtagagaagccaagccaagccaagggtaccgaaccgacgacatggcgccgccgtcccggttgcttccggcgaccttgcagattctccgccgccgctgcgcctcccgcttctccaccgcctcctccattgtctccccgccgtccaaggccgttctctacgacgagcacggcgcccccgaccaggtgctccgggtggcggacgtgccgcccgtccacctcggcgaccgcgacgtctgcgtccggatgctggccgcccccatcaacccctccgacatcaaccgcatcgagggcgtctaccccatcaggccgccgctcccaggcgccgtcgggggttgcgagggggtggggcaggtccacgccctcggccccgccgtcaccgccccgctctccccaggcgattgggtcattccatccccgtcctcattcgggacatggcagacgtacatcgtcaagaacgagagcgtgtggcacaaggtccgcagcgacgtgcccatggaatacgcggccaccgtcaccgtcaaccccttgaccgcgctcaggatgctccgagactttgtgcaactcaatcctggtgatgccattgtccagaatggcgctaccagcattgtcggccagtgcgtgattcagctcgccaaggtacatggaattcacaccatcaacattataagggacaggcctggctcagaggaagcaaaaggtaagctcaaacaacttggcgcagatgaggtgttcacggaatctcagctagacatgaagaatctcaagagcctgctgggtgctttgccggaacctgcattaggatttaactgtgtcggaggaaatgctgcttctctggtactcaagtttttgaggcaaggaggcaccatggtgacatatggcggaatgtccaagcgacctgtcactgttcctacttcatatttcatttttaaggatatttccatgcgagggttctggctacagaagtggatgaactcagataaggcagaggattgcagaacaatgatagactacctcttgggcctagtgcacgaaggcaaactcaaatacgagatggagtcgattccattcagtgagttcagcttggctctggagaaggccctgggcaaacatggaagccagccaaagcaagttgtgaggttctgagatgaaagatgggtgtcaagtgtaggcagagcgacttggagttgtactctggacacagcagcttagctagatttctgtgcgatcgagttcatcttgtaatgaaatagcagttgtacacaaccacgacgccgggccacgtctggaggtttcggcgaactatgagtgtggatgttggtggatgccatcgtggcgagcagagtggtgaggtcgcgttgagatcctaatccaaccggtagggtgtggcagttcttgagttgagtggctactcgtgttgatgttacaattcaatcgggtgagtttattttgtttttctttttgtgaaacaagtttacttatcattatcactgcgtataccataattagctagaacaaaaaaaaaaa

SEQ ID NO: 13015 - DNA, 1891 bp, Setaria italica
  Peptide Sequence Number=SeqID_78989
aggtactgttgcaaggtataccttgcagcagagtaaaagacattaagcatcctaaatccaggtgcaaaacttgcccaatttgtgtatcatctttcgtatacatgcacgtgatttttgctgcaaacaagcacatttgtaaaacaaacattgaccaggaacatttatttcttcgtttacttgtaaacatcctctacatttcctttgtaacaatgatgtaaaagcttgtcgagaaccgactgtaggaaccatttcgaatccactcagcttttcttaagaactgacggtggaaaccatttcatattctcttgtcttcctgttcttcgaacaaaggaagaaagcacctccaagccgctgctgaaagaagagaaccactgacagtagcattgctccacaaggtatcacaatgtcccatgcgaggctgaagagatcatcatgagggctagcatacatgtaagatggtctcaagctcggcacaaaatgctgtctcctgaacacatcatacacatgaggcagagcgcggatcatggtgcttccgatgtaaaaccctggggaaagggctctaactttggaatctgaggaagcattaaggatcacttgagggagcaagaacccatcgagtattaatccaccataagatacaaggtcctcccagaatgcatgtccaactggcttgatttgtactacctgccttagcattcttcggctgtgattaaacctcatgtgaacaacccaagtaataactcctccagtgatgtacagtggcaagcatatccagagtactttcttctcggcagcccatgactcagctttgcttacatccacagaccgtgcagaccatgccaactgaagaagtcgcaactgtagcagaaatgttatcatggtaatgattcgcaccataacttcattcacctcaagccaaccaccgcctgcaagcgggaaggtctgtttgttgctgttcttgaagagagcctcaaagttaagtacaagagggatcatgtaacccaaagccagaacaacaagcatcgtgattgacatggcaggaagcgcttcagggaccttgttgacatgaaacagctgcacagcgatgaagatgcatgccagtgtcatagagatcaacgccatggtgctttctaagtccattctccatattgattcatccacttggtctatgaacatcccatatgaagcaatatacagtgtttcaaagaaaagagggtcagtcttcttcctcaagcttctgatagttccctttacatgctgtgctacttttgcatccaaagaagaaaactgagcagtcaccagaatttcacaatctgatgagacattaagctctcgacaagcgatcatgcaaagggagcctgtcttagtatcataaacaccctccgctgagatatgtcgacgatggaatgattctagagaccaattcccaacatagtagatgtcgtagctgacattaatcagtctctgcttcatcacgcctgtcacatgatgagaaaagggatccggagccaccaaagagtttccatcaaacaacattgacccaagtgtgataggcgatgcatatccagagccacctcctttctgcacaaaaaacctgaaaaccaagtcccggtacgaactgctgtctgggaacttccctttcctgtccttgttcaatccagacttcttatagtgcttcatcgcctcatccaccttagtgtaattatacttcaaaccagcaagattgcccctgtagttgtgagtgattgcactagaacctgcagcaatggcttcaccacttttcagactcgtattccagaccagaccagcagcaaagctccgctgctgtaacgaccacactgccgggaaccagaagctcatcccaattccacattcacccactgccaaacaa

SEQ ID NO: 13016 - DNA, 567 bp, Setaria italica
  Peptide Sequence Number=SeqID_78990
tggtagatcggccaagcaaagattagttagacagccgcttggccaagtccaagcaactcgcctcatgcttcccactggatggataatgcatggtatcaggagaaacacacaagcaagaaagaaacttttccagccggccgggctgcgggcatcacctaaccaacgtgtcacgcttccaacagccattctggaatgattcacatcacgtggaaacgcccgttttgcaggtgaaaaaacaaaaggcagacctcgatgcatcatcaacgtacacagagacaggttaggctcgactgtgatctcgtcttcaccttttcgtgcctgcctttacacttgtcaaacaggacttgttcatgcgtttccttccacctccaacattctccagtctaccagaggcggctgctgccaaccaaactttggtgttatcatctcatctcacttttcagatccatcctttttccatggctgccagaaactcctgtaccgcattcaagaacaagggtataggtaaatcagtcaactttattgaaggaaaaccactttctagtgaccgatttctacaccacgcca

SEQ ID NO: 13017 - DNA, 425 bp, Setaria italica
  Peptide Sequence Number=SeqID_78991
gactcttatagccgttctatgtgggattttagcttccaagcattatataaggttaaaatctgctactgtactatgtgccgtgatgctttctatccacactgatactgataagtgataaccttttgacaacagaagttgtagccttaacctttgcatcatatgggtttgagcatgtgtttttttttgaaatatttgtaggtttccctgcactctacaagcttgtcaacaactctaaaaataacaaatacggatgacaagcctttctcattcaactcagcactccacacttatttccgtgtaagttgcagttttcctggaaccattttttttgtatttcctttgtgaaataccctaccttgttcttaaggcatcatctacggtgatgccttggcaatgacaaggcgtacccaaggtgccactaggac

SEQ ID NO: 13018 - DNA, 390 bp, Setaria italica
  misc_feature (341)..(341): n is a, c, g, or t
  misc_feature (355)..(355): n is a, c, g, or t
  Peptide Sequence Number=SeqID_78992
ccctagccatggtgttgctgctcatcgtctgttgaatggcttgtcttggaaacctgcgcttcagtaggcctgctacaaagattttgtctgtgtggaaaacgcaaagattgaaacagtacaactggagccgaaacaatcctgggtggcagagcagaaacttgaactactctgaagataatatcttgctgcaactgcatcaagcagtatgtgatgcaaatggcattcccccaatgatatgatgattactgcgttgcaaatgcacaattcgaactacacgggctccgttgaaatggaagggagtgcccattttgatctttgacacgccttctgccactgaaacnttgtttttttttcngtttgctggttaagcattgtgattaatcatgtgta

SEQ ID NO: 13019 - DNA, 1039 bp, Setaria italica
  misc_feature (1022)..(1022): n is a, c, g, or t
  misc_feature (1030)..(1030): n is a, c, g, or t
  Peptide Sequence Number=SeqID_78993
aaaacaccaccgaagtctcagcttctcctactaaggggccgcacaggcatcttcacctttggggccaaacagaaatggcggcttcttgcgcctccacgctcccttcactctccttcgtctccaactcctattgcaattcacctcggcggttcaggcgctctgcagtggtggccatggccagcgtggggcagaaggtgtacgcgcccggcgtggcggtgtcggagggcaatggcgggctccagaaaatcgatctcaaatccccgcacggaagcgaggctgagatctatctgttcggagcatgcgttacttctttcaaagtccctaatggcaaggacctgctgtttgttcgaccagatgcagtgttcaatgggcagaaacccatcagtggaggaattccacattgtttcccccagtttggcccaggtcccatgcagcagcatgggtttgcacggaatgtgaattggtctatcacagattcagaagtcaccgaaggagatccagctgtaactttggaactgaaagatgactcttatagccgttctatgtgggattttagcttccaagcattatataaggtttccctgcactctacaagcttgtcaacaactctaaaaataacaaatacggatgacaagcctttctcattcaactcagcactccacacttatttccgtgcttccataactggcgtttctgtgaaaggtctgaaaggttgcaagactctcaataaggatcctgacccgaaaaatcctttggagggcaaagaagagagggaagaggtgacctttccaggattcgttgactgcatctaccttggtgcaccaagtgagctcatcctggacaatggattgggtgacaaaattgccatctcaaattcaaattggtcagatgcagtgttgtggaatcctcacttgcagatggaggcctgctacaaagattttgtctgtgtggaaaacgcaaagattgaaacagtacaactggagccgaaacaatcctgggtgcagagcagaaacttgaactcnggaacctnttttttttg

SEQ ID NO: 13020 - DNA, 505 bp, Setaria italica
  Peptide Sequence Number=SeqID_78994
atcgcaaccccgccgccgacgccgcaggaggagacgcgccgaggagagaccgcgaggaggcgaccatgagggccaagtggaagaagaagcgcatgaggaggctgaagaggaagcgccgaaagatgaggcagagatctaagtaagctgatggagatggatggtggtggtagtggcatgcttgtatgcatatcttcagatgcgatagcctcgtggagagatgtctcctagccatggtgttgctgctcatcgtctgttgaatggcttgtcttggaaacctgcgcttcagtaggcctgttatcgttgttctagttatatcgagagttttgcactgagacaaatctgtcgttttgtggacctgttatggagctttgtttgctgctaatatctaccagcctattaagtaatatctgtgttggttcacaaaaagtttaaaaaaaaatcggtatttgaatggttaaaaaaaaactaagaagaacacgacaacgagggagtaggacgaacggac

SEQ ID NO: 13021 - DNA, 225 bp, Setaria italica
  Peptide Sequence Number=SeqID_78995
ttgggtcaaagccaatgacatagtaagtcattccaagccacacagcgcattccaagaatgatattgggatcttgagcacccatgtaggcaatgcataagcccatgatggatagaagaggaggtccctctgcttatagaatatcggcagctttgcaatgctcatggcaagctcagcgaaaccattgaacaaatgtgtgactaggccaaggaacattgcctcccagg

SEQ ID NO: 13022 - DNA, 1068 bp, Setaria italica
  Peptide Sequence Number=SeqID_78996
gagcctcgagttcaggaccgagatacctattttgccattgcaaatcatgtcctcaaacaattttggcctacaaaatactttttgtcatgcagctttgccaaacaacgtagggacacatgttgatggctaaaacaagaaggtttctccactcctagatgaaaaaatggaccatctagtgcaacatgttgctgaagttcactgcatccatttagataaagataaaccatagatcctaagcccaggcaaacacgcatttaacatgttgctgaagttcactgcatgacactggaaacacaatttataccacagaatcgagagaaagtatagtgcaacttgaaggcgatcctttgtccatttctccactcccttctttctcacaaccaaagcagttgacgcactaatctcattttctcctatccttggccctcttaagtgtttgcttccccttgttcttccacttttggttgcctcctggcatacggctctcctgaatttcccgtaccttgcgcatcctgtagctcttaagatattgatccgatagcagctcatcaaccaaagttgttttacgctccctccttgtcatcctacccgagtagaactcagatgcaggctcaacaactgtaccaacttggaagtacttgggaagggccttggactttcctgccctcttgaagtgcctttttgggtccattacatgcctcagctgcaaaatctcgagatctttcttcaactcgggagtgatggtcggcgccggcatgtcgaaccagcccttgccggtggtgtccttgacgctcttcctggtgagcttgttaaccttcttggggtccctcggagacacgaacagcccgtccacgagctcgctctggggcttccagagcgacccctgcgcggtgctcggcttcggtgccggctcgctcttgctgctacagctcgtcgtcgctagggaaggaagcttgggcgcccatgacaagccgatcggcgccgccgtctcggacatcgctggcctgccgctgcgagttcaggtgtcgggtttaaccgccgcggcggctgggatggaggtcatcggac

SEQ ID NO: 13023 - DNA, 581 bp, Setaria italica
  Peptide Sequence Number=SeqID_78997
tagaatagtgatgcggactctaagaaatgattatgcaaaatatgctcgtgatgatgatgatattgaaactctggaaagagatgtcaatgaagaatctggatggaagcttgtacatggtgatgttttcagacctcctagaaatctagttcttctttcatctcttgttggtattggcacacagttggcagcacttattcttctagtaattttgctggcaatcatcggaatgttgtacattgggtacgcacttaatttacaatgttgcttcataaaatttcttttctctttacgagcagcttctagcaaagccagcattgtagcgaacctgccagaattggccttgtttattgatactttgccatccaaaggtcatatatatttgagtttataaacataaaatatactacattgcatattcctagaagtagaacctttaaacagtatgattttgttgtccttgtgccgcagccttatcccagacatgtaatgtttgaagacttcttatgaaatccagactcatttccttgtttggttccttgttctttaactacttaaagtggttcgttgaaaaccttgcaccc

SEQ ID NO: 13024 - DNA, 1558 bp, Setaria italica
  Peptide Sequence Number=SeqID_78998
tgatgcggactctaagaaatgattatgcaaaatatgctcgtgatgatgatgatattgaaactctggaaagagatgtcaatgaagaatctggatggaagcttgtacatggtgatgttttcagacctcctagaaatctagttcttctttcatctcttgttggtattggcacacagttggcagcacttattcttctagtaattttgctggcaatcatcggaatgttgtacattgggcgaggagctattgtcacaacattcattgtttgttatgctcttacttctttcatctctggatatgtcagtggcgcactatactcacggcatggagggaaaaactggatcaaggcaatggccatgacagcatcacttttcccatttatgtgctttggaattggcctagtgcttaacaccattgctatattctatggatcattagctgccataccattcggtacaatggtggtcgtattcatcctgtgggccttcatctctttccctcttgcccttttgggaaccgttgttggtagaaactggagtggtgccccaaacaatccgtgcagagtaaagactattcctcgccctattcctgagaagaaatggtatctcacaccatctgtcattgcccttatgggaggactgcttcctttcggtagtatcttcattgaaatgtactttgtcttcacatcattttggaactataaggtgtactatgtttatgggttcatgttgctggtctttctgatcctcataattgtaaccatctgtgtgacaattgttggtacatatttcttgctaaacgctgagaactaccactggcagtggacttcattcttctctgctgcttccactgctgtgtatgtttacctatactccatatattattaccacatgaagaccaagatgtcaggattcttccagacaagcttctacttcggctacactctaatgttctgcctaggtttaggaacactgtgtggtgccgtaggatatcttggatcaacattgtttgtgaggaggatctacaggaatataaagtgtgactaaatgaagaaaatgacaaccccaatttggatgagtggggagaaactgcatacaagagccttgtttctttgaggtttgaggatcattcattcatctatcctgcagccgagaagccagggcatttttgtggaatatatgattttcgggacagctgcaagcccttctcttgtccttttttacttcacttcgatcctgcttggggcggtgataaattttcatgttgaattagttatatagcagcattgtagttgttgagtagtagctctagtatatatcacaattgttatccttgaacccattgaaatctgtatttatgggtataaactgtatcatccacattaccagatgtttgatgataaacacaattccaaaagatcactaaaaaaaaaaattacaatgttgcttcataaaatttcttttctctttacgagcagcttctagcaaagccagcattgtagcgaacctgccagaattggccttgttattgatactttgccatccaaaggtcatatatattt

SEQ ID NO: 13025 - DNA, 1244 bp, Setaria italica
  Peptide Sequence Number=SeqID_78999
cctcccacataatatgccccaattaaagcctcgacacaatcagagatggttttggaacatatccatctgtgtcccttgtcacacgccttgcctataattatagatttgtcatcaatcctatgaatatcctcagttacaacctcagaatttactgggcattcacaaggacatggccaaatagacagctgtccaggtgcaagccatcgacgaggatcaaatgcagcatcacgtatgtaaccctgtatcttgctttcaataccaagcttatgaagtgttgcattacatataatttcttgccttctggacgacaactgcccctcatgcttattaggaaatgtgaggaaaagatgggaactcactgcatacttaagtacagaatccccaataactctaaacgctccatagagaagtcctcgcagcatctaagggttgtaagagcttccagaatcaggaagcttgatatatcagaacctgtgtatgcaatttcacttcttaattggctggctagcattagtgactcaatgcgatacatcagggatggaaacaaatagaatactctcaaaacatcaacaggtaaatcaaggggaatcagcagctctggaggcatgtgaacaaggctattcgccctattttattttccacacggttgccttcatctctgatcttggaagaaagaaggttgtgaggattatgagtgggtttcaacactagcaatggctgtgagggatgatgaagaaatacgctgtacttcttctcaaagtattctgcaaacgtccggaattttgcttctttcttatcagaagcaccatcaaatgtgctactcgcacataaatcagatacatcaagagaagtatatatcttccctgtgtgaagtgctaggactaccatatttctaagatcatcagccttacatgacttgttggccaaatgaatcagatctccaccattttttttcaggattaagtttatcaatcaggttctgttggtcctccgaataaatgctcctcataagtccaacggctgtagctgctacttcaatcacactccagttaatgcaaacgcttttagcagaatccagagtaggatccacaggtaaaagcaaatacatatttgctttgtcccacaggaatgtattatctttcttgagaataaactcccttgcggttttggatgcttttgatccagtgaacagttttccaaacaaaccattaaagagaagtgcttgaaatagttttgcttgttcc

SEQ ID NO: 13026 - DNA, 245 bp, Setaria italica
  Peptide Sequence Number=SeqID_79000
tcccgcacttgcagtgggtttcgctgcgttgtgttcacccctctgtttctgtcgccgcttgcggcgacgactaggcgagcgccgccacccttcgccacgttttcgccggcgacgagcacccaccaggtcggttggctttggcagttcagaccggccgcgcggccatggcttccgacggaatcgcccccagagatgtatgtgttgttggagttgcacgcaccctatgggtggtttccttggcgcct

SEQ ID NO: 13027 - DNA, 350 bp, Setaria italica
  Peptide Sequence Number=SeqID_79001
aaaaccaccagtacttattgagaaagatgaaagcctggccaagtttgacccagtaaaactgaagaaactccgtccaagtttcaaggagaatggtggtactgtcacagctggaaatgcttctagtataagtgatggagctgctgcattagttttggtgagtgggcagaaggctcaagagcttggcctgcaagtccttgcaaggatcaaaggatatgcagatgctgctcaagccccggagctttttacaaccaccccagcacttgccatacctaaggctatcgcaaatgctggattggagtcatctcatgttgatttttgcaagggcaacagccgaaaaggcttcattaatc

SEQ ID NO: 13028 - DNA, 929 bp, Setaria italica
  misc_feature (17)..(17): n is a, c, g, or t
  Peptide Sequence Number=SeqID_79002
tgggtggtgccgaccancgggttcccgccgccgcgtccgccggccggtctttcctcctcctccgcccttctgccggccgctgcacgtgtggggccaccctcccacggcggcggtggaggctccggcgacgatgctgccggtgtggccgcggcacctggcgccgccccggccgtgggtggacccgggctactggcaccagcagtacaacgcgggcaggacgaagtgggctccgccgcaggcagccgcagcagtgacgcaagggacgccgtgcgtgcctcctccgcccgccatggtccagctgcccaggtttccgcaccccatgtacagcagaccacccgtgatggtgcctccgccgccgcccccgccgacgacgacaactacaaagctcgccgagttgcagcttcagctcgacgcgcacccgtccaaggagagcatcgacgcagccattggagacgttttagtgaagccatggctgccgctgccgctgggtctcaagccgccctccctcgacagcgtcatgtccgagctgcacaagcaaggcatacccaagatcccaccggcgtcctccaccggctgatccatcgatgatgatgtggcaactacgtactcgtcgacatgtacaataataaactagtggctagctagtgtagcagcaatggatatgattggcttgatgagcctgtcaatctacgtcgttattgactagtttttgctctcagctaataatacatgcacactacctgtctactagtgatctactagctgctagctagctaggcctatttgagagttgagagcttcttgcgtatgtaatgtattctactcgaccggaacgggactgatgaaactatatgatccgtgcatctgtaataaataaacggaattatttattgacaaaaaaaaaaaaaaaaacctaaaagagaactgcc

SEQ ID NO: 13029 - DNA, 470 bp, Setaria italica
  Peptide Sequence Number=SeqID_79003
tacgtacggtttgacggttcttcggttgcaggcgtggtggctgccggagtcgtcgtcgtctcggacggaggcgaagcagatccctcgccgtcgccggcgtcagcgtcgcatgggttgggcaggtggcagacgttggggatgatggtctgggcctggccgaggatgaggccgacggggctgggcgcgagcttggacgcggcgcagaggcagggcgcctgcgcctgtaggaagctccggagctgggagcagcagtcggtgagcgtcgccgagctgacgccgaagacgtagccgatgcacggcgacaggctgagcggcgccggcgggcagctgggcagcgccgggaacgcctccggctgctgctgcgccgcggacagcgtcgccgccgccgtgaccatgacggcgagggcgagggtcaccgggtggagctgccgcaacgacgacatgacgggacgcggcgaggtgtcttcggt

SEQ ID NO: 13030 - DNA, 1000 bp, Setaria italica
  Peptide Sequence Number=SeqID_79004
taggagctttctcccaagtcttaaggctattcaccgagactttcaaccaatcatcctggtaaccaacaagcatagaaggtgaagggaggacggcgatggttggtctgacacggtgatatcccttttgatgctccagctctgaagtgcctcggttactactggtcggctgaggtgggctcattgaatctccaccaatggacaaagtgtttgatggctcccggatatcaccggtggagtactgaaaagagtatgcatctcccgtagctgcagactcaggtggattgcttcggcccctgcaccaatcaatcacagataatgggccatccatgtttgcaaaggcagttttgagagctgtccttatatctgactgcaacaagctaaacatggatgactctgaaacctcagcataaagtggatcaactaaatcaacaccagcacaatccttcgaatggcatgttcctaatagaccaccacagccagcatgaaccatcgaaggatcacaagaaaaacccacgtctcttttgctcatccagagaaagccagaaaaaggaaccatccccatcatccatatcaagtgaaatatcaacaaatgaagtagattgttgaacaagcagcgccatggcaaagagaagatccacaacaggctgcctttgcatagactgacttgggcttgcaccagttaatgttttagcagacaaagactcaagagagtttgcccctttaggagtaacaaccggcctccaaactcccacactttccattaaggatctgtcatgtgtttcatgctcaacatcactagatagccttatgggcataacttctttttttcttatgtcatacttgggggtgagatctgatttattgctgacatctgtctgcataaaactggacatggcgccattaaaatcagcagacgctttgcgtctcaaagacaacagggtatgcctaattctgcacatggcagcctggaatgtgatgcattcaatttcagttgcaagag

SEQ ID NO: 13031 - DNA, 835 bp, Setaria italica
  misc_feature (1)..(46): n is a, c, g, or t
  Peptide Sequence Number=SeqID_79005
nnnnnnnnnnnnnnnnnnnnnnnnnnnnnnnnnnnnnnnnnnnnnnactagagaaaccgagtccagaataacacacatggaatggatggcttgctacagatcattatacagtacagtacatagcatcacctcaccacgcagtacaacactcaaacaagcaactaccagctgcagcgtacgtgcttcctcctgcttccacacaaattattcagaggagaagctgaagcctttagcagctaacctacaatcctacggcgacgagcgaaaagagagcacgaaatacggtaggtaacagactaacagtacatgcaccgtttacacacactaaaggacgtggcacgaaatcacgtcaatacgccatgtacgtcgtcgtcgtcgacctgctgtagaacggatgatgagccgccgccgccggcgagggcatcatcacgccgccgagaggctgtggaccggcagcggccgcatccgtggcgatcctgaagcccagctccctctcggcgaactggatgaggccctcgatctcggagtcgtccacgaacccgttgtggttgcggtcggcgctccgaatggcgaacagcgcccgcaggccggagaaccacgcgccgcggcggcggatcgcctcacggagctccttcctgctgatgcggccgtcgcggtcggtgtcgaactgcttcagccagcgcttgaactccggcaccgtgatcgccgtccggtgctccttgcccgggaacaggcacctcgccgctgggggcaccgctgccatggccatcgcttccgccgccgccgcctcttggccggagctctagctttgcttgtggtactaggaagctagcag

SEQ ID NO: 13032 - DNA, 414 bp, Setaria italica
  Peptide Sequence Number=SeqID_79006
cattcacagaggaatcattgatgagaatcaaagctacgttcagagttggagtccaagatgcaggaacttgactcaagatccaggagcttgatgagttagcttcgcaaagcgattacgacagaaggaaccttcagcaagagaaggaaaaggtgtgtgatggtttatttgctattctgcagctttctccattaagaattttgaagtttgtgttctctgcagccttcatgcaacaatgatacccctttcattatgtatcttcccgagattaaggatggtagggtcatagagaaatttggatccatttactcattgaagagtcatctataagattatcaccaaaacactaaccaataggttgctaaaggggatcaataaagtagtggtgacaaaatcaactagcttttaagttttatt

SEQ ID NO: 13033 - DNA, 1083 bp, Setaria italica
  Peptide Sequence Number=SeqID_79007
accaacgcacgcatcggaactggccagacgcggcgtggggggggggcgggccaaaaccctcttcctcgcacgccccgcctccaccgaccgccgccgccgccgatcgccggaggtcattgcacgctaaccttctatctgaaaatgggctctagttcagaagatgattatgaaattagtgattctgagattgatgagcgtgaagcggaggtttatgaacaattaaaatcaggaaacataaaagtgaaagatcgtgaggcctacagttgtccattctgcagggacaaaaggaaaaaagattacagcaagagtaacctacttcagcatgccacaggagtaggttcagctgctaatcgacaagcaaaagacaaggcaacccaccgtgcccttgccaaatatttgaaggatgaatctgccaggtcatctgagccacagacacaactgaccgtgcttatagagcctcaaaatctcggaaacagagatgatcagtttgtctggccctggatgggtgttctagttaatgtgcctactgagtggaagaatgggcgccaagttggagagagtggaaatcggctgaaggagcaactttcacacttctgcccacagaaggttattcctttgtggaactatagaggtcatacaggcaatgccatcgttgagtttgccaaagactggactggcttcaaaaatgcactagcctttgaaaatcatttcgaggcagagggttatggcaaaagggactggaagctgaagaagtaccgagggtcagagatgtttggatgggttgcaagggttgatgatcatagatgtcaagggcctataggagaccatttgcgaaaaaatggtgatctgaaaactgttggtgatcttgaaaatgaagggatcctaaaactgataagcttgtcgctaatttagcaagccagatgaagtgcacaaggtaagaaataaattaagggtaagtaaggactaataggtttaactaaataattagatttaagttgctggggttcttctggattctcctgctttagcattgacatgaaatgctgctgtaatttcagaatgtgaacagcgtcatggacctac

SEQ ID NO: 13034 - DNA, 1924 bp, Setaria italica
  misc_feature (1846)..(1924): n is a, c, g, or t
  Peptide Sequence Number=SeqID_79008
aaaagttaagactaacctttaagtaggaaactaataagaaggtacaatacaggcaatgccatcgttgagtttgccaaagactggactggcttcaaaaatgcactagcctttgaaaatcatttcgaggcagagggttatggcaaaagggactggaagctgaagaagtaccgagggtcagagatgtttggatgggttgcaagggttgatgatcatagatgtcaagggcctataggagaccatttgcgaaaaaatggtgatctgaaaactgttggtgatcttgaaaatgaagggatccgtaaaactgataagcttgtcgctaatttagcaagccagattgaagtaaagcacaggcatgtgcaagaacttgaatccaagtgcaatgagacaactgcatcgcttgacaggatgatggagcaaagggagcagctcctccagaattacaatgaagaaattcgcaagatccagcaaattgctcgtaggcattcacagaggatcattgatgagaatcaaaagctacgttcagagttggagtccaagatgcaggaacttgactcaagatccaaggagcttgatgagttagcttcgcaaagcgattacgacagaaggaaccttcagcaagagaaggaaaagaaccaaatgaaaactaagcatcttaagatggcaacaatggagcaacagaggtccgatgagaacgttcttaagcttgtggaagaacacaagagggagaaacaagttgctctggaaaaaatcctcaagttacaacagcaactggacgccaagcagaagctcgagttagatatacaacagctgcagggaaaattggaagttatgaagcatatgcctggtgaggaagattctgaatcaaagaagaagataaaagaactcagtgaggatctacaagataagtatgatgaaatggaggcaatggaatcactgaaccagactctggttatcaaagaaagaaagagcaacgatgagttgcaaaatgctcggaaggagctgatagctggctttaaggagctttctgttggccgaacaaatataggtatcaagagaatgggcgaacttgatcctaaagcattcggaaatgcttgcaggaaaaggttatcgaaagatgatgcagaagtcacttctgctatcctttgttcaaaatgggaagatgaaattagaaacccaaactggcaccctttcaaagttgtattgattgatggaaaagaaacggaagttctttcagaggaggatgagaaccttagcaagctgaaagaagagcacggcgaagaaatctatgtgctggtaacaaaggcattggttgagatcaatgagtacaatcccagtggccgctaccctgtaccagagctgtggaacttcaaggagggccggaaagcaaccctgaaggaagccgtccagcatgtcatgaagcagtggcggactcacaagaggaagcgttgatccatttgtcatgttgggttcttctgcctgagctctgctgtgctggacacttgaactaggcagggtgtcgacggtttaagttaactcctaatggtgatattgggtgtaggctatggtttactaatattagatttaagttgctggggttcttctggattctcctgctttagcattgacatgaaatgctgctgtaatttcagaatgtgaacagcgtcatggacctactgtccaacttgccgaagcagaggcatgttagagctttctgttcatgcatcttagatgtgatgggcaatgcttggcaggcatatgtccctgcagcactcttgaacggcaaaagtttctgtcagtagttatttaagtatgctgatgggtgatatcaatgatggaaaatttaccnnnnnnnnnnnnnnnnnnnnnnnnnnnnnnnnnnnnnnnnnnnnnnnnnnnnnnnnnnnnnnnnnnnnnnnnnnnnnnn

SEQ ID NO: 13035 - DNA, 1073 bp, Setaria italica
  Peptide Sequence Number=SeqID_79009
ctacaactgaaaatgggtttcgattcctatgtgcatgtgtccaatgcattggtatcaatgtatgcaaagtgtgggagtattggtgaagcacgagccatatttgagagcatcgcctgcaaagacctcatctcatggaactccatgatctttggatattcacagcatggccttgctgaacattgccttgatttgctgaaagaaatgcaagggcacataatgccggatgcaatatccttcctaggcgtgctttcgtcatgccggcatgcatgccttgtagcagaaggccgacgctgcttcatggaaatgattgagcatggaataaaaccagagctagatcattactcatgtatgattgatctccttggtcgtgcaggactgcttgatgaagcgtgggatcttatccagacgatgtccatgcccccaaatggtgtcgtatggggctccctgctagcttcctgtagagtgcacggaagtgtttcaattggcatacaggctgcagagcaccgtcttaagcttttaccaggttgcgcggcagctcatgtgcagctagcgaatttgtatgcaagctttggctgctggagtgatgtggcaagagtgaggaagacaatgaaagaaagagggctgaaaacaaacattgggtgcagttggatagaagttggcaacaaagtttacactttcacagcagaaaacagatcaaagagccaagtaaattatgttctggccattcttgattgcttgcggtcacatatggattataagtgtgatatattgattgatggtctggattgggactgagcatatcaagtcaagttaggacactctataaacttaaaagatcacggcttgccttgttcaactaggcactttataggaaatgacaaggtcactcgcacctcaaatatcttgtaaaagatcactcgatgtaacatgcaagtataacacctgtgtgtaagcattttgtaagaatgtgatttgctcagtttactttctgttgaatggtcaatgatacccatattcattttatactaatatattttgacaaccgaaacctccatttgaaagaatgaaaaaaa

SEQ ID NO: 13036 - DNA, 368 bp, Setaria italica
  Peptide Sequence Number=SeqID_79010
agcagaagtagacgggtgaacgaagagcagagtccaggaatagaacatagtaagaatgcaaggaacagaggaagctctcaggctgttacgacaggacgagcattcgaatccatccaccagcgctcaggaagggagcgccagcacgggcggccttggactcgttggagcgaatacgcgtcggggacgagcgatgtgctgagagctgaagcactgaacgtgcgcacgcagggcagcagggaagggatttgcacatttagctcccaggatttgcactttcttgttggcgtatttgtaggcaggtctgcactccatctcttctttttggttggtccgtgctagctcgtcagactttctacagttgtttttag

SEQ ID NO: 13037 - DNA, 521 bp, Setaria italica
  Peptide Sequence Number=SeqID_79011
tttttttttttttttcttttaagttcaacatcaccttaaacgcatatatttcttagcatctgcttcattccatcaggtttagagaagtactaaaagaatattagacactgggcatgtctctctatcatctcactctcaccaacgattgtatgccagcaaaaagataataaaaactcgtgctacagcagaacacaggtactccatttggcctatgtgatttcagctagcgctcggtgaagcgttgcatggtcatcatcttcacttcggcgaagcgtttcgcgcagttggacaagcacgaggcctcgctcctgctgaagctgcttccgatgctcccagtaacgcatttgtcccagcaagcaagcgtcagctttgccacgagctcatttgtcaaggccttcgttctctcctcctctatgagcgccttgaggcgcgggttgttgagggccgaagcatccatggctgtcctccttcctctctcgagttctgcctctgctttgggggactgctgcctacaacgaatt

SEQ ID NO: 13038 - DNA, 368 bp, Setaria italica
  Peptide Sequence Number=SeqID_79012
gtcgtagcgcgccgactgcacggtgctgttgaactcgggcttgatctcgaacttggcggcgtagtcctcaaggtagtcgatgaactggcggcgggtggggtacttgggatagtggtcggggaagggcattctcgggagttcgcagaacttgtcttcggtaagtggagcttgaggcggttgtacgttcgcttctgccatagcgaggcgatgcagtcggcgcgctcgaggatgacgtaggggacgccctgctcgcgcaggcacgccgccacggcgaggcccgagggaccggcgccgatgatgatggggccgttcacccacacgcagcgaggggagaagaggctgtccatgcggtcagtaggaaggagcac

SEQ ID NO: 13039 - DNA, 173 bp, Setaria italica
  misc_feature (161)..(161): n is a, c, g, or t
  Peptide Sequence Number=SeqID_79013
ggatggccacactgtcgttcagaacatagcacactggtgaggggaaagggaatgttttgagcgtctcactaaatagtgtgtttcgttggcttggtatatgcttgtctgtttaggtggcggtggcaacagtccccgggtgagagcgacagatcacccctttnttcgaaccaaac

SEQ ID NO: 13040 - DNA, 1246 bp, Setaria italica
  Peptide Sequence Number=SeqID_79014
ttttttttttttttttttctagcttggcattttttctcattcagaatcttgttatttaactatccattacacattagatgggcggagctcctggtttcacccaatcaccccttcccctggaataagcccaaacaacaaaccatcatacagcttgacagattccttcaagtacaaattcttgaccttcaagaagcaccacagggtcagcagtgaatcagaaccagcctggtggctggtcccaactcgctcgactttgagcagctccccaagtttgctcagcccgccatataggccactacagaacctcatgagatgcttgacgtcgtacatcaccgggaagaaggtcttggtgagctccaggaactcatccaaggtgttcggcatttcccggccggtgagcagcctgagcaggtagccgaagtcgtgcccgctgtggaaggtgacccactggacactgtcgctgagcacgagcccggacgtcatcatcagctcggaaaagcgagtggagtcgaccccctccgcagcgaagcggtcgaagtcgatcccgctgcggcggagtaggtcgatggagatgctgctggaggggtcggtgcgcgggtcgaagccccggaagttgaactgccagatgcagccccgcccccccgtgccgcgcggcgggagcgcgccggcctcgttggagagggtgaggccaagctggatgagcttgagaatgttgacgttgccctggagggtggcgtagttgacgtcgctctggcaggagtagctgccggtcggcttcaccacgatgccggggaactccgtgtccatggcgacgtacgggtacgcatcgatgacgtcgcggatcaccgcgaactcctgctccaggttatccgcccagacctcgcggatctccacggcgtcggggccctctgcggcgggcggaggggcagccatcggagcagcaggcgcatccaagagctcggggaggcttggggcggaggagcggcgagccggcaaggtggttccgacaacagttaggattaaggtttccgatgtcggcgggagggggcgggcggcgcgggtcggtggaggcaataagaggaggggaaggaggaggagggggaggaggcggaggcggaggcggaggcggagacggtggagggcgttgagccccagtgtcagaggcggcgagagcccatgggaggtgacgtgcggttgctgccgatgtgcgaggcgagaagacgtggggggcggatctatcgggtcg

SEQ ID NO: 13041 - DNA, 463 bp, Setaria italica
  Peptide Sequence Number=SeqID_79015
tttttaggtcttacgagagcttgaccttcgtcgactcaagcagcagcgggcctccatcgactccatcaactgcttgtggatggtggggggcgggccggctatggcaaccggcggccatcgtccgtgagagctggttgatgccgcaaccattggagacgcccaagggtaagctccactgatctccaatatccatatttccattccacgcggtcgtcgtccccatcgatcgagcacgacctgggtcggtcacttggtcatatgtggtctgtatgtgtttgccttactcgatctggggcatatttcgtcgtcatcctcgcgttgcttctaactcagatcaaatcgtcaccatcctgctacatccccgctactcctccttgtggcatgaggacaaggagatctagagtagagcaagcacctggtaaataagtatagaaactacaaaggtagcggcgatctaacaaaa

SEQ ID NO: 13042 - DNA, 454 bp, Setaria italica
  Peptide Sequence Number=SeqID_79016
aaaaagtgctgccagaatggttgggtgaccttactgctctcaagaaacttcagatccggtattgtagcggtatcaactctttgccacagagcatacagaagcttaccaagcttaaaggactagctatttaccactgccctgaattggcagagtggtgtaaattagagaagaacaagaagatgcttgctcacattaaagtaaagtatatctttctgatgaatgatcacctcgtacaaagagtgaagctccatggaaaacgaattaagcggtcatgtggaagaactatttgattataatatttgttccaaagcatgtgttgcatctacatttctcacagcatggtcaattagttcagtgttgattcagaggtacaatttctgaatagggaaaagtttgtacttgactagtgactaccccatcgtatcatttggaagaaggaacttcagccttcaac

SEQ ID NO: 13043 - DNA, 635 bp, Setaria italica
  misc_feature (594)..(635): n is a, c, g, or t
  Peptide Sequence Number=SeqID_79017
ttaagttatagtcacacttatatagttatatttgaatctttgaatcgcatctgcttttagctttttatgtacgaacaattttatcactgaaagttattgataaaataaacaaaacattgatgggttgatgtctcctgcattgctcattgcaagatcagaatatctaacttccatctttttaacaggaattgctgcagaaccatttatttactacttccgctctcaaatatatgacatttaggacaagctagctagttcattttttaactaattaacttatcctaaatatcatatatataagaacggagggaatatttgatatttctgtgtcatttattttgcagtatatctttctgatgaatgatcacctcgtacaaagagtgaagctccatggaaaacgaattaagcggtcatgtggaagaactatttgattataatatttgttccaaagcatgtgttgcatctacatttctcgcagcatggtcaattagttcagtgttgattcagaggtacaatttctgaatagggaaaagtttgtacttgactagtgactaccccatcgtatcatttggaagaaggaacttcagccttacnnnnnnnnnnnnnnnnnnnnnnnnnnnnnnnnnnnnnnnnnn

SEQ ID NO: 13044 - DNA, 250 bp, Setaria italica
  Peptide Sequence Number=SeqID_79018
agattttggtctgtccaaaatctttggtaaagaactgacacggacatcacaaagtcctctaggaacatggtaagttgaatgccgatcatgggaacatatccattttttttctaatcacaaaatgcacacatgtattacaacattgttgagtgtggtgcaatgcagtggataccagccaccagaatacattgagcgaggtgaaatctcaaaaaagtttgacatattcagtctgggtgtcctaatgataaag

SEQ ID NO: 13045 - DNA, 2832 bp, Setaria italica
  Peptide Sequence Number=SeqID_79019
ccaacagttattttggcttatgtaagcttgaccttcgtcgactcaagcagcagcgggcctccatcgactccatccactgcttgtggatggtggagggcggccggctatggcaaccggcggccatcgtccgtgagagctggttgatgccgcaaccattggagacgcccaaggatcaaatcgtcaccatcctgctacatccccgctactcctccttgtggcatgaggacaaggagatctagagtagagcaagcacctggtaaataagtatagaaactacaaaggtagcggcgatctacaaaatacaactatggagctcgaggatgtaacgtttcaagtattgaaagatgtaacaaatggtttctccgagaaacagaaacttggtgaaggagcatatggagtggtgtacaggggactgactaaaaatggagaggaagttgctgtcaagaagcttcgtgatgtcaatccagatcttgatgataagcagttccaaaatgaattttataacctcatgaagctgaaacataataacattgtgcagattcttggttattgctatgaaatagagcaaatatctatagaacacaatggaagaatagtgcttgctgaaaaaacatacagagcactctgcttcgagtacttgcacaatgggagccttcaaaagcatatttctgatgagcactgtggacttggctggcacacacgttacaaaattattaaggggatatgtgagggcataaaatatatccacgaggaactggaaaaacctctttaccacttggacctaaagcctgacaacatactgctagataaggacatggtgccaaagattgcagattttggtctgtccaaaatctttggtaaagaactgacacggacatcacaaagtcctctaggaacatgtggataccagccaccagaatacatcgagcgaggtgaaatctcaaaaaagtttgacatattcagtctgggtgtcctaatgataaggatagtatcaggacctgagggctactccaaaagtcaaaacatgccttatgatgagtttattgatcaagtacaaaaaagctggaggaacatgttgcaggaaacttggagtgattccttgctagaaggatattgccaccaagtacagagatgcacccagatagcattaacatgtttggagaaagatagccaggaaaggcctgacataatgatgatcatcgatatgctgaataagattgaagcagacactgtcaagcttcgccagaaaggatgtcacggaactgttcctagcatgacaatgcttgatacggtgacgaagatgagaacagaacaactggatatcacaaatcaataccagcatttcaactcgatgatgactagctcgaggtgcaatgaccaggaatttgttgatacacggaaaaaacattagatgcaggtgaaggacaaattgtagggaggacagaagagaaaaacaaaataatggctgctctactgtccatgaaggaaaagatcatcgtccttccaatatatggtattggaggcattggcaagacaacctttgccaaattgatttacgaggatacaatgttcaaatatttctctcgggcatgggtttatgtatccccaagatttgatttaaataaaatcggtaactccgtaatttcacagctatctgtaaaggagagcaaaactaatgaaaagcgtgagatggataacatcctcacgaaaatactttctaacaagaagattctgatagttttagatgacctgtgggaggacaatccatttcaaatgaaggatttgaaggcaatgctaagtcttggtgagaacaataatataattgttttggtaaccacacgcagtgaacacattgcgaagaacatttgtgttactcttaaaccgtacaagatacgacctttgacaaatgacatgtgctgggatataataaaacaaagaagtcactttgaaactagagatgacagggaagagttgatgggcataggaagggagattgccctgaagtgtggaggtgtggctttagcagcacaatctcttggatatatgttgcagaccatgaaatctgatgaatgggaaaaagtgaaagaaaatgatatctggaatgaacatatttcaaaggatgtatgttcgccaaatcatgttcttgcatcattgaagctaagttatagcagtatggatccatgcttgacatcatgctttacctattgtgcagtatttccaaaaggtcataagatagttaaagatgatctgattcaccaatggatttctttgggtttcatccagcccaaaaaaaatactctctcctatacagctatgtgagaagtatattgtgcagctcctgggattatcattccttcaacattctgtgttacccactacccttggagcctatgacaatggctttacattatacaaaggagtcacagtgttcaccatgcatgatcttgggcatgacatggacagattagacatggccgatgaaattctggatggtagcaaacaaggcattactgtggaaagcagtggtcgatatgtattgcttactgattgtagtaagcctctgaaatcgtctactatatcttatacttctgatgaatgatcacctcgtacaaagagtgaagctccatggaaaacgaattaagcggtcatgtggaagaactatttgattataatatttgttccaaagcatgtgttgcatctacatttctcgcagcatggtcaattagttcagtcttgattcagaggtacaatttctgaagagggaaaagtttatttcatgatgtacctttgtactttgatgtacctttgtacaaatgatacaattggggtaga

SEQ ID NO: 13046 - DNA, 1559 bp, Setaria italica
  Peptide Sequence Number=SeqID_79020
tgtaacagtcagatctgacaaagcgcctttggatcagtggaagttgtttctacgacctcccttccctgagtactttacacatcacgtgttgcactgatccgacatggagctccaatatgctaagccaattcctgttcaacatcatgtcacggtggtacacaaattctaatgatttgtacataactaaggtcatgaaaagacaggttattaacgatttgaaactacagtggactagagatgctgggagttctgtggaggatgtggaagtactgggaaagcttgtgccaccaagtagtttgagggaatttaatatgacaggttacagcagtgtgaggtttcctgcctgggttatggacattacgctttatctcccaagtcttagcaagattgaattgtgggatatacgcaaatgcaacagcttaccaccacttggccaattaacaaacttgcaagagctagttataggtgtaatggatagcattacgataattgatggggatttctgtggcggtgcaagagccttccctgaattgaggaaattttgcttatgccgtatgcgaaacctcaagttgtgggagacaatgtactcctatgacatgggtagtgtcaagaaattcatgttcccaaaccttgtggaattgttaatacgtgattgtccagatttaagactgaaaccatgcccacctggagctaagagatgggaaatagagagcagcgataatgtattatcatcatggggagagaggggagcatccagtgtgtcctcctctgtttcactaacaaacgtgattgtgacagtgaaatcaagcaaggtgcctttggatcagtggatgttgcttcaccacctccgtgccatcactgagttaaggataataagttgtaccgatctgtcatgcaactcattagacataattggagacctctcatttatcaaatcattgtggctagaagataatactcagccagaacttccgaaatggttgggtgacctcagctctatccggaaaatggacatcacagggtgtaaagagctgtctgatttgcaagggagcatgcgacatctgacatccctccaggagctatctttgatagattgtccaagaataaaagtgctgccagaatggttgggtgaccttactgctctcaagaaacttgagatccggtattgtaggggtatcaactctttgccacagagcatacagaagcttaccaagcttaaagtactagctatttaccactgccctgaattggcaaagtggtgtaaaatagagaagaacaagaagatgctggctcacattcaagtaaaggtatatgtcccgccatgctatctaccatctcctacttatctttcactgactgctcttttgtcaactctgtaacgaatttgtcaactctgatagacaaaagtctagatttacttgaacattggctcatattccatttattctgttcgaatcggaagtatgtcattcagcacataagaaccccaataagattaagactgaatgaactgcactgcattcccagtctactacaatttcctaacataaagaacaatt

SEQ ID NO: 13047 - DNA, 495 bp, Setaria italica
  Peptide Sequence Number=SeqID_79021
ggagcctagctacctgcttcagccacagcatccacggaccttaagacaataacttacaaccagcaccaactctggaaaaaatgggtgacccgtcgcctttgatctcgtcaaatagaacatcaggtagcaagtaggatcagagggatattttccagttcatcatcaaaaaaggctagtgggtacttgggtgcaaagaaagtaagccgcttcagcacagcacccgtgagttggtaatctgtcattagaagagtagttcagaatatctgcaacaagctaaagttttcggaccaaaggactctggatatgatattctaaacacctggaacagacttacctagtaacaataactaagtgcctacatgaaggcgtccaactttgatcgcttaagatgttgtggtctgaaatcttccaactttaaactggaacttgacttgacctcattcaagaatgaatcacccttttctaatcttattgaatccataactgcccaaagga

SEQ ID NO: 13048 - DNA, 4357 bp, Setaria italica
  Peptide Sequence Number=SeqID_79022
tttggtttccttcttcctacctttctttgtaattctaattttacctaaccttctttgtctaacggtctaatgtgtttcctgcacgaaccttgcaagaagtcgtccaaggtactcagtggctcttggagcatcacttagagtatcttccaatgagccaagaaccaatgcaaggccatcaatgagttgccctttgctcaacaaattatgtcgaccactgctaaggctgacaaaaagtttagccagcaactccctttccatgtcttttctctcaaaggaatcatttacccaaattgatacaacattaggatagaaacttggagcattcaactcctcaatacacaaagcaacctccttttcatcttttgcactgtaatattcccgaatggccgagatggatttttctctcaaatcatcgtcagaatatgatttttttcctgaacggccttcctggctggcaggcctctgtgaaggcccagcagattgactagaagctggtgttctaccagaggttcgatcagccagagagttataaccattagaaccagacactatccttcgatggtcaacaacagaaggaagttcagaatttgatactggtggttgccctcttatagacatacccctagcaaggccaccctgtgggccaagagtgataggctcatccttgactgcacgctgaggaagaggtgttctactgtcaaattgatgcctttcctcaaaccggatatcttgtgaaccaccaaatgaacgcgaatgtggaggcattcctcgaatgctcccttgttgggaacttggggatgctaatgcagatgagccgcgggggccataatccataggaggtgctcctcttcttggaagagaactaacagatggaccacgtcctagcctgctcgattgagcatgcctttcttgagctgcatccctgtgaacctcctcgatcttcttgggaccttcgaccttacgcctctgttgccatttgtttttccgcaggtcaattgaatctctcaacataaacctcacacgagaagacaacttctgacttgttgacatcttgtacattatatcaaaataggcatccatgtgttcctttgcctttacatggtctatcatctctccaattgtactcatcaacttgcatagggcttcaatgttctcctcatcaggatcatcataatttccaaacaatttcttaatgcattcatgcattatacgttcagtcaacatcctctttttgtacaattctccaatcaacctaatgtttcccaacatgcgccttcgagcacggattctcttttcctccctttcttctttggtttgttttatctcaccttcctcttctgttttatcagcctcagcttcttctctttcacctctctcaaactcctcttgacatttgtttaaaagcaatctcttaaatgtaatcttctcattgtcctcactgaaatctggcaaggcaccagccaaatggaagcaaaaattagcatacatttcacagaaggttggttccatcaaagctttgtcaaatatctgtgaaatgactcctgtaagagttgctacgttgtcaatgttgacttccttcacttgttcaaaaagtttttcaaagttttgcggcgtcagcttgttaagaatggctttcaactgcctctgcttcgcctcttcctcatcagaaactttgccaacaacatactttctctctgctttgtgcatcgcttgcatgggtgtgacaggagaaggcatcagacctttttgctgccatctatcagcatcagagccactgcgaggaacttgaggtccaacggaatgcatgggtcctagaagaagtccaccacctggttgaccacgtgggttcctcaaaacaccatgactacctcccggcccgccccggtaattgacaattgatggtccatttgccaggtccatgtcacgaccaggactgagaggcactcctgatttagtccacctgtcatcagccatggcagcaccacggcggtcaccacgagaagttggccggtcagaaccccttccaggactagggtgaggttcacgatcaaccacataggactttcctgccaaattattcattattgcattgacagcttcattcatctgaaatccaacaggaagaccagtacaatggtgttgcaaagttaacaagaagtccctcgagtatttctttctgccgttagcttcagttgtatctgactctaatacttttgtgatgccagactgatttccagaatcagattgcagctttggagtagacatgtctgctgcatcttcccaatcatcaggctcaacttttttcttagaatcatctgcagatgaactggcctccgtttctggctcatcaggcagcacaggagttgtatcaactgttgaagaactatctgccccctctgcagtgcccataatatcggacttctcttctggtcccttgtatgcattataaagatctgaacttccagcggcatcagctttagaaagcatttcctttctcttcttcttcttcccagctgtggattttgtcctagtgatctcagcactaggtttttcccttgatactggtcgaatagaagcagtgggcgcagcagtagattgatcacttgacatagtttcagatttctgttgcccctctgatgaaattagagtaacattagaaacagctaggcctgtttccggactaatatctgagtcaccatcaatgacaccttgaactgtaggctctgaagtttcggaagttgtcacagccacaccaccgccatcaagaacatgcgatgaagtctcagaattcttggatgagctaccttgttgctcaggtcctgatggtgttgactcttttggtaagtgttcctgatcagttacatgaggtgctgcatctgaattacctgtatgacaagtcactgctgatgcctgttcagtcatgtccacagcacatacttcaggcgatttacgttcagtggcatcagaagaaatattatccttgataggatctgtggtaactttgggagttcccttgttttcatcacattcaacagcggaaacagcaacactttctgctccttgaggttcgctggtaccctcggaagctggtcgtgcaggactcctatctgtcccaggaatatcagcagcatttactggtgtgctgtcagcttcagctataccagctttactttcaggcagcggagctgctgcgcctgatgatgagatggttaaatccagctctttgttgaggttcttagtttcttggcgatcaccactatcatcttcagcggatgaagctgaatgttgtggttcagacgaatttctggcctcctttttaatggcaattttcttattatccttaaatgacccagtcctttgaatggattctttgttcttcccatcagctccagacataggtaaggctgaatttgcagttaccgaagtttgtggttttgcaccctgagttggcaagcttaccacagcaggatgcttctctgggactaatggagctttactctccttctcatgggctgatttatcagaaactgtgatcccagaaacaacttcattatccttctgccgacttgctgcagcatcctcaacaggccttggcttaggggcatcagatttacctggtggcgcagttatcgtgaccatatgagtcccagatttttcagcctgcaacccaccagggtgcggtttacctgtcatttgggagtgcccagataccggaggccctgcagatggactgacatatggaatcgcttgcccagactgagtgacgggataattaaacctaggacccgaggatccagtaggaacctggtttacaccagttgtaggagggtaataaatccctgactgattgtaagaattcgacggctgatgaaagaagccgatatgaggagcatagctaccaacaggctgggactgggattgttgtgtcaagttaggcgctgccctctgcccagaagagtccatcctcttatcaagcttcaactcttcatgagtgtctggatgagtaatttttacggtagtcttccgaggagcggcaacaaacttattctgttgctgaggatattgtgggggcatgttcataggaatgttacccaactgaggtgggaattgatggccaactgaagtaacataactcataccctgcccttgatgcatcattgcttgctgttgcaattggtgctggatagtcggggcatatagctgctgcgggacttgcggtgcattactgcctgtcaatcccattgacatttgtaatgagctaggtacaacttgtggctgcagttgtggaccgtgaccaccaaactgtaatggaactggtgctggctgatggtgaaaggggatcgacatttgcacccca

SEQ ID NO: 13049 - DNA, 337 bp, Setaria italica
  Peptide Sequence Number=SeqID_79023
tttactatacaaagcccttccagacagccagacctaaactatctgactaagccactatacagcacccgcgctccaccatatctgttctcataaaaaaggggggaaaaaaggaagaagactgcagcagcaccttcatgccctgcgccctccccgttacttaaccctggttaacatcagaccaacaaagcattagactgactgcattagcgtccaggcacaagatcacaggacaacttccagctcacctctcatcagaaatcatagtccttgaggtccttcttggagtcagccaactccatctctaccatgcactcctaacggactaaccttggtctta

SEQ ID NO: 13050 - DNA, 574 bp, Setaria italica
  Peptide Sequence Number=SeqID_79024
aaaatacaataagtaccttagaaggtaccttacttaggaagtacaagccaaactccatctctaccatgcactcctcctggctgagaggcgggagcccattcttgtggcgcgtgtagttgtgcttgtgccacccgctcttgcagtgctctctgtatagcttgtcatccactagtacatcgcactccttgcaccttctctgctgcttgccttgtgcgctgccctgggtttcagtagaaatgctctgcttctgcattgtctcggttatctgcgcaacagcatcagactgctttgcaggcgctgcttgcagcacttcaacattgtcatcctgctccacagacaggccacctctgcatgcgctgagacggataggacttccaccctcccttgcacatccttcaaccgctcctcacatgagtgcagaatggaaggctcaatctcacacacctgtaaacacatcactcacagttacatttcgtagatcaatgataataaggttcagtatgagacatgtgcagttaggcttcatcagcaaatgaaaacaagtaaaacaggctaagtacagtttaatgttaag

SEQ ID NO: 13051 - DNA, 1455 bp, Setaria italica
  Peptide Sequence Number=SeqID_79025
tttaaggctatctgctcatcatcacaaaccaaacagccacaaaggatattcaataagtaacaagcaacgtttcaacttcatatagcgtgccgtcacagaacagccatggagcattccattcggctttactatacaaagccttccagacagccagacctaaactatctgactaagccactatacagcacccgcgctccaccatatctgttctcataaaaagggggaaaaaaggaagaagactgcagcagcaccttcatgccctgcgccctccccgttacttaaccctctcatcagaaatcatagtccttgaggtccttcttggagtcagccaactccatctctaccatgcactcctcctggctgagaggcgggagcccattcttgtggcgcgtgtagttgtgcttgtgccacccgctcttgcagtgctctctgtatagcttgtcatccactagtacatcgcactccttgcaccttctctgctgcttgccttgtgcgctgccctgggtttcagtagaaatgctctgcttctgcattgtctcggttatctgcgcaacagcatcagactgctttgcaggcgctgcttgcagcacttcaacattgtcatcctgctccacagacaggccaccttctgcatgcgctgagacggataggacttccaccctcccttgcacatccttcaaccgctcctcacatgagtgcagaatggaaggctcaatctcacacacaatagaaggctgagtgccagattcatcctttgatatgactgtagcattccattcagcaaccttctccataaggcctgcaaagttgggctttggtgcagtgaaccgcaccctcagcggtgcacgctttatggggaagtgctctatgagcttcttgataacttttagagcctgttccttggatgtgaggtttgggtcgacggcgaagtgtatctcgtgcatgaggcgctcgatcatggtgatggtgtaggggcggcgggtctccgggttgatcgtcttctccatgacgatggtggcgatgtcgcggaactggctagagagctgcgcctccctctccttgccggagacctggagctcccctttctccagaatctcgatgcagattttggtctggtcgtcggtgccgaaggccttgatgagttccttggacttggcgaggacgcccttggagacgttggagtagacggtgtgggactggagcacctcgtcgaggtccttctcggtgcgggaccgccaggagagcaccttgttggggaagcaggcgatctcgaagcgctggccgtgcttgcgcaggcgcaccaccgccacgttggtgaggcgcttctgccccaccggctgcaccagcgtgcgcgacatccccggcgcggcggcggcggcggcggcggcgagggggaggcagtgagtgaggtcgggaggaagagacgagacgagacgagacgattagggccggcgg

SEQ ID NO: 13052 - DNA, 262 bp, Setaria italica
  Peptide Sequence Number=SeqID_79026
gctccactcgccgccgcagccgcagccggagatggaggacatcgaggacgtgctaggcccggccggcctctccggcggcggggcgcctccggggctccgcctccctctctccacggtcgcggtcaagcccaagcgccggtcgtccagggtcgcgcagacaccgccccagcccgaggcccggattcctggcacgcagacgatatacgtcaagacgttcgggtgctcacataaccagagtgacagtgaatacatgtcagggcag

SEQ ID NO: 13053 - DNA, 243 bp, Setaria italica
  Peptide Sequence Number=SeqID_79027
gttagttctgggaggctgatgcgcatgaatccactacacttgatcatataaaagaagaggaacctgcaggctttgatttgtcccatctgacaagcattagctcattgacagatctccacattttccgcccagtgtccttctgattttggtctctagcgcttcgaccacgccacaattccttgacgatgtacattatctcttcagcatctaccagaacttgctcagctgtcccatatgtcagct

SEQ ID NO: 13054 - DNA, 1205 bp, Setaria italica
  Peptide Sequence Number=SeqID_79028
gattgcatagataacattgataccaaggtggcgctccttgcagcctgcgtccgcagaggtttaaaggtgctttctgcaatgggggctggagctcgagctgaccccaccagaattcgtgttgcagatttgagagaatcaagcaatgatcccctctctcgatcagtgaggtaccggcttaagaaggaacatggaattgaaggtggaataccagtggttttttcattggaaaagccaaaggcaaagctacttccctttcaagcttcaaaagaagaggaaactccatcagattaccagattgtgccagggtttagggttcgcattatcccagtgctgggaaccatccctgcaatatttggtcaagttatggcgtcctatgtggttactcagcttgctggattagattttcaaactgagccagttgttaacctggatttggatcattactgtatacttcatcagcgtcttattgagcatgaggagctgacatatgggacagctgagcaagttctggtagatgctgaagagataatgtacatcgtcaaggaattgtggcgtggtcgaagcgctagagaccaaaatcagaaggacactgggcggaaaatgtggagatctgtcaatgagctaatgcttgtcagatgggacaaatcaaagcctgctggtgcgtcaaacttaatacttctcaagttcagtgaggctgatgcgcatgaatccactacacttgatcatataaaagaagaggaacctgaattctactctatggtcacgcgtgtgctgaaacgggctgaagtggagtttggtttatgagtgggtcatctatctgattgaagttttgttgctgcggttcggttataaccttggatcaacaagtagatcaagcacttgattcagttctgcgcgatccatttcgggaatacctgatgagcatgctacgatgaaaacgatgtgcaggtttggttttctgcagtcgaaccatgagctttctgtcctcatggaatcgtgccacttgtcagctatgtatcaattttccgcgtgaatcttatcatgtaaccaggcaaaccaaagatttttttttcttgtgatctgatggggcagagccagtttgatgcgattcggatcgtgtcgtgggcacccccgtgtacatcaccgatgatatgcgaggaaattcttgcagagtccagcagagaccaggggttctttggttcttt

SEQ ID NO: 13055 - DNA, 313 bp, Setaria italica
  Peptide Sequence Number=SeqID_79029
cgcacccgcccgggccgccttctcttctccagcgtccgatctcccactcgccgccctcaccgcagctctctccgctcggtcgcttccccacctccgccttccccgcgcgcgcgctcgccacctcgccctcccctccctccacgtcgcgcgcgccctcgcttatataagcgcaggaggagcgcatggcggacgcgccggcgagccccgggggcggcggcgggagccacgagagcgggagccccaggggcggcggcggtggcggaggcggaggcgtcagggagcaggacaggttcctgcccatcgccaacatcag

SEQ ID NO: 13056 - DNA, 922 bp, Setaria italica
  misc_feature (1)..(71): n is a, c, g, or t
  Peptide Sequence Number=SeqID_79030
nnnnnnnnnnnnnnnnnnnnnnnnnnnnnnnnnnnnnnnnnnnnnnnnnnnnnnnnnnnnnnnnnnnnnnnaaactattattattaccatttgattcatattcatatatcttgaatcataaatgtagcaaatagcggtctaatatgagccatagtggccacaatagtaggcaatagcgaacaatagcggccgctaagtccaaacatgctatcttgggtccgctaccttattgccgctaccgctatagcggccgctattgcgagcgctacaaaagctatttaccttgcaggcaagtcgccgatgcggtacggtggcagctcgaccaccggtgcgtccagctgcgacgactcttgaactggcaggtagcctttgtcgcagagcatggggaacgccgtgaggcagcggaagcaggcggcgctgccgaggcgcagcgccagcgtgggcacgccgagcccccgcgccacgcccagcagcgtcagcaggtgcgagtcggcgacgaggcacgcgacgtcctccgcccgggctcgctgccgctccaacagggcggcgaggcgctctcggaacggcgcctcgcacgcgcggttcacggagacgatgtggtccatggtcgcctgcaccgtgtccgggctgtccgccggcatgccgtcgtcggggacggagacgaagtcgtaggcggggtgggcggacgcgtcgggcgcgttgaagcggacgtggaagacggtgatggagaagccgcgcgcgtggaggaggccggcgagctggaacatggggttgatatggccctggtacgggagcgggaagaacagcacgcgccgccgccggccgccagcagcggcggtggccatggcttggatgggtttcttggcttcagcagtggtcgccagcaggttggggccgagctagaggataagatatgaacaat

SEQ ID NO: 13057 - DNA, 623 bp, Setaria italica
  Peptide Sequence Number=SeqID_79031
ccgggttgttctcatcaagcatttctttggttttcttgatatcagtagcaatcttctgaacccttccttctagcgctgctagtttctcatgaagtttgcttgggtacttgttaacagcagacacaggtttagctgaccttccctccccacctgcagcagctttctcaaaaactctaatcttgtctgccaatttgctcttttcttcctgcttcttacactcctcattattcttttgctgttccctcgctgcaccaggaacatcaattgggtccaccacatggacagtgaacactgggatgacagaaccatttccttcttcatcatccttctgggtagcagaaaaatctgcagcattggaagaagcttctcctgaatcagcattttctccagggatctcctttaccaatttgatattgagcccctctttcctcccactgatttcttcacctgcctttgcctttgaatcagagccctctcttcttccaccaatctcttcactctgcctcttcatattagcaccacagatctctgtttttccttttatctcatcacgttgcttcaccacatgcgcaccaaagccatctcttttcccgctgacctgcttggcctttgcatcaaagagt

SEQ ID NO: 13058 - DNA, 931 bp, Setaria italica
  Peptide Sequence Number=SeqID_79032
tccgcggcgccgccgcgggagctcgggaccccggacaccaccgcgcaggtccacccgggcctcttcacaagggccgtcctcgccgcgtccggcgccgaggtcgtcaccggcgaggtggagcgcgtcgtggtacgggacggccgcgccgccggcgtcgtggtgaaggggcgcgagcgcgacggcgtggtggacgccgacgccgtggtgctcgcactcggcccctggtccgggcggcttgaggtggtcagcgaggtgttcgacgtgtccgggctcaaggcgcacagcatcgtgctgcggccgcccgagccggagaaggtcacgccgcactgcctcttcctcagctaccagccggagcccggcgccaagatgctcgacccggaggtgtacccgcggcccaccggggaggtgtacatatgtggaatgaccaaggacgagaacccgccggatgatccggcgacgatcacaggcgaacccgactcaattgcaatgctgcacaagatcgctgggagggtgtccagccaactgaagaaggaagagggtgcggaggtggtggtggagcaggcttgctacctgccgtgcaccaccgatgggctgccggtcatcggggagatgccgggggtgaaggggtgctatgtggccaccgggcacagctgctggggcatcctcaatgctccggccactggagcggccttagcggagctcatcctcgatggcaaggccaagatcgtggatcttgcgccgttcagcccggcaaggtttctagggaggaggagccggtgtggagcctgactgtgtaaggtgcttggtgtcaattgtgaaggttcagacttggaactgaataagaacacacactcgtgatgggagttgcaaaacatgtatgagtgaagtagtgaataaataatggatacttgcttttctagtaaaaaaaaac

SEQ ID NO: 13059 - DNA, 790 bp, Setaria italica
  Peptide Sequence Number=SeqID_79033
tcttctacgaattcttttgcaaactgaaccaacttgagcttgtctaaaatatttattaaacgtgagagtcggcccttggcatgggtatccatgagctggttgtattcctcggtaggaatttctgaaagtgtttttccaagcctacaccaagttatcatgttatcaatcttctttgatgatccaacaacttgtagaaagagttcaagaggcatttcttttgtagctgcttccattgaaaataacaggtatgattgattaaagctcttatcataatggccttctttggcacaaccaaacgcactgcaccaatctggagaagcattgacatatgcccacagaaatttatgcaaaagctttgcccgaatcatctttgcattaatgaatccattagcatacatagcttctagtagtaatggtttataaacattaactctgcgtgaaatcctcagaccaggtatggcagtcatatgttgattttgcttcactttagctgctgcaactgcacgagattcagtatcaaagttcctttgcctgatcctaaattgatccacaagttccggtgacaattctccaacagaagaatgcagtactacatcaatgagacgactgcgagtataatttgtgaccaaaggaacactaactttgatacatttacaacttccctctttctgaagcttattcaatgtgcgagtcaatgtcttcccgtccattaacttctgatgatcaacgccatagaaggattctgcacatgttaaagaagaagaaatttgtactaaaggtggagttacat

SEQ ID NO: 13060 - DNA, 604 bp, Setaria italica
  Peptide Sequence Number=SeqID_79034
taccaatttagaagaactgtatatatgatatgatcagtgcccaagggacaaaaggcagtaacacttgttgagatcggcaaacgtcttggacacaacaattccaaaaggctccataaacgagtatcatccatgctcaaaaagttcaatctaacttgggaagcagaagttccagacaagacatcacagtaccgagtttggacttcaaaaacttctcactctacaaagctggtactgctctgcaaaattttggggcgctgtcagaagattgtgatgattgtccagatttgtggtccctagttccatcgaaagaattggattcttctagcccacatggcaatttactcttgcttgaacaagagagccacgatgaaccaatcgaacatcatatccagaacgaccttgatgcttctgctagagtttgtcaattagttgaagaagataaagttgctttgggtcagaggaagaggcgtcggagccgtccattaacttctgatgatcaacgccatagaaggattctgcacatgttaaagaagaagaaatttgtactaaaggtggagttacataaatggttagagcggcttgaaagaaggacggaaaataatgg

SEQ ID NO: 13061 - DNA, 590 bp, Setaria italica
  Peptide Sequence Number=SeqID_79035
gtgggggtaaatgagcaggacgatatagaagtgatggatggtggggaacccatgttgtagaatctaccgtgggctagcttccgcaggtttctcctgttggctcgcactatccaacaaatcaacatacccaacgccaacgggtgggccaatgctgcaacgagcagtgttgtgaattgcaatggcatccttcagcttttgaaactgcaaatgtaatatggggttaggtgtaaacatccacacaagtaatacaatcagaatgatttccaactaaactgttgcaatgtggagagggcttgttcagaaattcgaaataaagtgcagttcatgttcttgcacagctttcgagatggaaaagatcgtaggggattgtatctactaaatcacaaaacatgaaaagtcacattaacaaaagccaccgaaatgtgtgaggaaacctcttatctcaaacaatatcatgcagcaacaggtgaggtgctcataccttagctaaggaacaggagaaagcctccagtagcccatcagctccacggtaaaaatggaagaaaggaaggactttgacattcagtcgtttgcacataggtttgttttca

SEQ ID NO: 13062 - DNA, 592 bp, Setaria italica
  Peptide Sequence Number=SeqID_79036
cggctcaggatttcgaacggcctccaaatccctcttcacctcacccttccagaaagtcccctcccgatccgaccgcggtgcctgcgtccgtatccccacgtctccggcactctgctgtgcttgcgaaccccggttggtcccagttggtgagaaacgccggatcgaattggaggccggcgccggctggttgcaggattcgattcttggcggctgcttgagcgcttgacggagcttggcgagctgggctttctctaggtgggaaaggttaatttgaaggggggatggggccagaaatgatagagcaggatggagggtaggaagaggaggggaaggttcaggaattctgtcaggcggatggcgatggagtgcctgtgctccggtgagcagctgaagggggctgatgagaccgtccggtcatctgattctacaatcacgaaagatttttcagccagtgggtactcttctcgaaatggagagattgagcagtaccttgataatggcaacatagaggaagctgagttgtcgctccgggaaggcatttgcctaaactatgaggaagcaagggcattgctaggaaggctagaatatcagg

SEQ ID NO: 13063 - DNA, 2783 bp, Setaria italica
  Peptide Sequence Number=SeqID_79037
gaggaacccaaccactgcctcgcgacaccgacagggagaagaggctcgtgctcctgccgcccgccgcgacacgctccccacgagatctccgcctcccgtcgcggcagatccacccagccgcacccccgccggcgtggtctccctcttgataccggagatggcggggatggaggccttcgaggcctacttccgccgcgcggatttgaaccaggacggccgcatcagcggccaggaggccgtcgccttcttccagggcgccaatctgccgcagcaagtcctcgcccaggtatggatgcacgccgatcagaacaagactggcttcctcggccgcccggagttcttcaacgcgcttcgcctcgtcaccgtggcgcagagcgggcgtcagctcacgcccgacatagtgcagtcggcgctctatggtcctgccgcggctagaatcccagctccgaagattgccactggacaggctcctccacagatgggtgcggctggggctgctaggccgcaggggagtgctgcgatgacgccaactccagggcaggttggagcggttgccgccgcaccaaggccccaggggactggcgtgatcccgacttctactcaagttagcatgccacaggtgaaccctggagctgctccaagaccccaagggatcaattctataatgccggctgcaagtcagggtggtgctctgcaggcaactcaatttgccggaccaagggcaatgcaatcgcagcctcctaacatgggatttaatcaacagcccccttcaagtactggtttcatgcggccacctcaggtgggagttccggcatcatcacttcaagctcaagcgcctggaaccaatcaaggtccacttggtggaggcggcatgggaggatctgtcggttggcaaggtagtaatgtcgcctcagcgggaggcattccgcaagctacaccaggagttgctccttcacagacaacacgaggtggatttggcctaggattgcctggatcagtgggcatggctcctggacagcaggtgcaagcaatgtcctcatcgccattgcctccgcagagcaacattgctgtttcacctcaggattcaaaagctttggtactgtctggaaatggccctgccagtagctcaggatcaagcacagacatcttctctgctcttacacagccaaagccaagcgtatctgcacctgcacctcagacaagctcgattcccagctcatccagttttatgtccacaccaactggctctcagaacctgactaatcttggacagcttggttctttgcaaggtagcagccaacctcaacagactcagcctatcaccaagcccaatcttcctgtttcagctgcacctgttgtttctgctggggtttctaattcagcttcccagtggccgaaaattagtcaatctgacatccagaagtacatgaaagtctttggggatgttgatagggacagagatggcaaaataactggcgtagaagctcgtactctgttcctcagttggcggcttccaagagaggtcctgaagcaagtgtgggatttgctgatcaagataatgatggcatgctttctctgagagagttttgcattgctctttatttaatggagaggcaccgagctggaactcctctgccccggcacttcctgactcacttaggcatgatgagacgttgttacgagctacaggcttgccttcaacagcatataatggtccatcatggcaacagaatcaagcagcaaagaggccctggagtacctggtgtgcctactggtggcgtgcggccacccttaccaccacatttgcattcacaggctgatgccactagcagatcagggcagccaagatctcacatgcccggtatggataatcatgtggtaactcaaggaagcaaagatgacagaagcggaatgaacacagctgtgcaggaggtggcggatgctcctaagaaggttgaagtggagaagcaggtcctggactccagagagaaactggagttctaccgcacaaagatgcaagatcttgtcttgtataaaagtcggtgcgacaataggctgaatgagatcacagaaagggcatcctctgataagcgtgaggtggaatcattggctaagaaatatgaagagaagtacaagcaagtggcagaattagcttccaaactggcagttgaagaagctgcatttcgtgacgttcaggagagaaaagttgagctgcatgatgcgttagttaaaatggtacaaggcggaagtgttgatggtttgcttcaggttcgagccgatcgaatccaacatcaattagaagagatggagaaagctcttagtgaacggtgcaagcactttggactccaattcaagtcgtccgctactgttgagcttccttctggttgggaacctggcccacaagagggaaccatcgagtgggatgaagactgggataaatttgaggatgaagggtttggtattgttaaggataatggtacgatacatgaaaacccagtttctgctgaaaatacaaaagtaccatctctttgggatgatggggatgatatgtcccctgttgcatcttctaatggtcatatcaaggatgaaagacgttacagtggtggtgaccgagtggctgagagtgaaataggatatgattttggtgatgattccgtgaggagccctggtagtgctggaaggagtgcctcaggaagtccatttaaatcttcccgcttaagacaagaccaaacctacaaacaagaacttactaagtaccttaattactaacctaaagttactta

SEQ ID NO: 13064 - DNA, 559 bp, Setaria italica
  Peptide Sequence Number=SeqID_79038
ccgcagtcaagtagtccgcacgcagcacgcccctcctcccttccaggcttccaccccttcgccgcctctatcgtcgcggctttatcccggccgcctctctgctcccgcgtcggcgacgagcggccaccgggctgcgtctcggccaccgcgaggccccaccaccctgatcttctatcccggtggcgcggccctggcagacgttgtggtcccccggcgcaccgtaccaggtcccggctgccgcccgttgccccttggcggccgccggtagacacggtcctcccagctgccgccctgcgctggtgccggcgctctgtgccctggtcgtggatcccacctcccggccgtcggcctgcacccccacccaagccgccgccccacgcctctcccggccacagtccggcggcctgcggtagtagtggtcaaggtaagcagggccctgcatccccacccgaggcaccagactccaattggtagagatgaacgtggcagtgccaccaccaccaccaccacatcttcggctatatgaatttgccaagaccgccctcatactaaaattttt

SEQ ID NO: 13065 - DNA, 1777 bp, Setaria italica
  Peptide Sequence Number=SeqID_79039
cgaccgcgcaccaaacccaaaagcgcagccgcattccctccacctcccccgctctcgcgcccctcccctccgcgtcacccggagcggcggcggcggcggccgtggtggcgggcgccctccctcccggggcagtggcggtggctgcgtaagggtttgttttacccggaacagggaggctctggcgggagtgtgtacggccgcttcgtgctgggggcaggcgcggagcgagatccgggccggaaggtgcggggggtctcgagggtggcgccgtggcgtcggcgtgatctgaaatgagattgggcccagaggcgcggtattcgcagcggaggtgccggccatgaccaccaacaccaagcgcgcctacaagctccaggagtttgtggcgcactcgtccaatgttaactgcctcaagattgggaggaagacctcacgggttcttgtcacaggaggagaggatcataaggtcaatctttgggctattggaaagcccaattcaatattgagtttatctgggcatacaagtgctgtggagtccgttggttttgattccacagaagtttttgtggctgcaggagcagccagtggaacaattaaattatgggatttggaggaggcgaagattgtccgcactcttaccggacataggtcaaattgtatgtcagttgatttccatccctttggggaattctttgcctcggggtcattggacactaatctgaagatatgggatataagaaggaagaattgcatccatacatacaaaggtcacacacgaggggtgaatgctattcgattcacacctgatgggcggtgggttgtgtctggcggtgaagataatacagtaaagctctgggatctgacagctggaaagttattacatgaattcaagtgccatgagggtcagattcagtgcatagatttccatcctcatgagttccttctggcaacaggttcagcagataaaactgtcaagttctgggatttggagacttttgagttgattggatctaccggacctgagacaacaggtgttcgatccatgacattcaatcctgacggaagatccctgttatgtgggttgcacgaaagcttaaaggttttctcttgggagccaataagatgccatgatactgtggatgtgggatggtctagacttgctgatttgaatgttcacgagggaaaacttcttggttgttctttcaatcaaagttgtgttggaatatgggttgttgatctgacgcgtcttgagccatatgcaaccggtacatcaactaaactaaatggtcattccgaattgaagactgtgtcaagcggcactatgcctttacaaaatgacactggttcaaaggcaaacattgggcgatcatcagttttgcaaaattcagagaataacctaaaagcttcttcaggaagactgtcggtttctcaaaactcagattctgcactaaaagaaacaaaatcgacagcctcaagcggattggtcccaagcacaccacaacgggctggagttggctccaataatagatcttttggaaattcagcctttgcatctggtggtaccaccttgaagagaagttcgttgaggagtcacaatgcctctagtgttagcaatttcagtaaatctgatgtagtgcctgtgattgttccaagaactagctcaggaggggagctagctactgattctagaagtgatgctgctgatgtggcacctgttctttctaaggcaaccagaagggttgatcctgctactgattctagaaaggaagtactgatgtgg

SEQ ID NO: 13066 - DNA, 928 bp, Setaria italica
  Peptide Sequence Number=SeqID_79040
agaagattcacagcaacaagattcttgcatgcaagataatttggcattgtcatggagatcaggaagttcattaggtgctgaattaataacaagccaggactccgatggcctgatgaatgttaccaatctgctttctgttgatctggttcctggtgacaagcaggaagattctgctcggcataagttcgttgtggatgaaaaacctgcccgtgttccccttctgtgacaaaggatgctgtcttgttacattcaagtcaagcgacctgcagtcaacttgcaccctctggtgctagtaatgatgataaaccgagtaatgcagaagataatgtgcaatgtacttgtagtaatgaagtatcccaaactggagtcagggataaagaagtcaaactgaatggaatggttgatcttcccatgagcacaacccgaacttttaaaagaaaaagaaggcaaaacaatagtcgtgctaataatcctgtcagtagtgaggtaacaaatatgaatagggaattgcagtctaagtcaaatggagatattgtatattctccaaattcaaggaatgaaattaacaaatcagatggagatgagcacttgccattggtcaaaagggcaagggtacgaatggaaagacgtacacccaaggatgccacagctgatgaacatgaccattcttatgacaaaacagagccagctaaacatgaagatccatgttataagcatgctacgcctgcaatatctggaaacgatcaatcagctgatgacatacctcctagcgtagatgcttcacccaaaataaagctccctatgccatcaggagtagttccggattattgtaataataataaagaataccaaccaaaggttttgacattggatgtagaagctgctttgcctccatcaaaacgccttcatcgtgccttagaagctatgt

SEQ ID NO: 13067 - DNA, 256 bp, Setaria italica
  Peptide Sequence Number=SeqID_79041
gatgtcgctttcggcacaatccttgaagcgacagatgcacggagggatgcattccttcccaggaacgacgactccaatccaaagctaacagatgaagatgatgtctttaaaccagagtaccttgtgacaccatggttccttggcttttggatcagcccagcctgagtgctagctgagctggtaacagttgatgccatgtctgagttggcgggccgaagttctgttagatttatatatacgagagagcagtaagttt

SEQ ID NO: 13068 - DNA, 2365 bp, Setaria italica
  Peptide Sequence Number=SeqID_79042
tgcggaagggggcggcttctggggccgcgacaaggagtcgtgcctcgcctgcggggcgcggtactgcgcggggtgcgtgctccgggcgatgggctccatgccggaggggcgcaagtgcctggactgcatcggccggcccgtggccgagtccagacgggacgcgctggggcgaggctcgcgcgtgctccggcggctcctcagcgcggcggaggtggagctggtcatgaggagcgagcgggagtgcgtggcgaaccagctgcgggcggacgacgtgtacgtcaacgggtcaaggctgtcgccggaggagctcgtggtgctgcaggggtgcccgtgcccgccgtccaggctccggcctgggttctattggtacgacaaggtgtccggcttctgggggaaggagggacacaagccccattgcataatcagcgctaatctcaatgttggaggttcgctagatcaaaaagcaagcaatggaaacaccgggatattgattaatggacgagagattacaaaatctgaactgcaaatgcttaagttggctggagtacaatgtgctgggaaacctcatttttgggtgaatgctgatgggacttaccaagaggaaggccaaaaaactgttaaagggaagatctgggataagcctatagtgaagcttcttagtcctgtcctgtcattgccaacacctaacaaagccgctaatcaatgtggtggagaagctgttcacatggtaaatcgacccattcctgactacctggagcaaaggacagtccagaagcttttgttggttgggtcaggggcaagcaccatactcaaacaggccaagttcttgtacaagaacaaaccattttctgcggatgagcgtgaagatctgaaacttatcatacaaagcaacatatacaactaccttggtatattacttgaaggccgtgagcggtttgaagatgaagatttagctgatagaagaagaaacagtcagcgtgacacttctagctctggctgtggtgaatctgggtcctgtgatgaagttactgaatactcccttattccacgcttgaaagcattctctgattggattcttaaggcaatggctttaggtaatcttgaagacatcttccctgcagctagtcgtgaatatgcaccacttgttgaggaactatggaaagatcgtgctattcaagccacatataaacgaagaagtgaactgccattccttccacctgctgccaattattttcttgacaaggctgttgatatttctcgaacagaatatgagctctctgatatggatatactgtatgctgatgggattacatcctcggatgggctagcatcaacagaattctctttcccacatatgtctttgggtggacagggtgctgacgagcctgatccacaggacaccttgctaaggtaccagctaatcagaataaacagcagaggtttgcatgagaactgcaaatggctgcaaatgtttgatgatgtgaggcttgttatcttctgtgttgctgctagcgactatgatgagtactatgaggatgccaatggtaccattgtcaacaagatgatagagagcagacagctgtttgagagcatcgcccttcatccaacgtttgagcaaatgggtttcctcctactcctcaccaagtttgatctcctagagcagaagattagcagctccccgctaacctcatgccattggttcgacgacttcactcccctgatcagtagcagcctgctcaacggcagcagcaggagcacccgcagcggcagccagaccagctcgacgctgccccagatggctgcacactacatggcgacgaagttcaagaggctgttcgactccctcaccgggcggaagctctacgtgtcgtatgtgaacacgctggaccaggagtcgatccggtcggcgatccgctatggccgggagatcatcaagtgggaggaagagaagcccgtgttcggcgcgagtgagactgtttacagcgaggagccaagctccttcacccattgacctgatcccccacccaccttttggtgtgtgcagagaagagttgtaaatatctgtgcatttcctccagcccctttcttagagttgtactcccattccttttgttcgtagctgatcatcggcttttgtatggctgttagttgtttcgcaagtagaatgatgaggtgcgagaagaccggcccattctgattcttgtaaattgtattacaagttgcttgcatttgatttgatgcatttggctggcgcaagtcccattgctgagatgtttttgctggagatgcatcctccgtcgttgagacgcatcatcttcaattgctctagagaataacctgtgcgagtgcgaacacatcttggatg

SEQ ID NO: 13069 - DNA, 405 bp, Setaria italica
  Peptide Sequence Number=SeqID_79043
tgtaccaggccgtagacaactggagaccatttggcatgaacttttccccaactcccttaacagcatgtgcctcgagctcaatagcctataaaagaacagataaaatcataaagtacaatgaccgcaatggaaatgagcacaacactttaagacaaaagtttaaagcttatatgcgcacactccatgaatttcaaatcatcaacacagtttatcctatgatattaaggaaaagatactggctacatacattcttactctgtaatttccaatggataaagtccttttttaccatgtggactcaatcactcaacaaagcatattaatccaaacactgaatcaagaagggcagaagatgtagcagccattcaaatcataatggtaccagtgaaacaagttacacagacc

SEQ ID NO: 13070 - DNA, 1692 bp, Setaria italica
  misc_feature (1)..(33): n is a, c, g, or t
  Peptide Sequence Number=SeqID_79044
nnnnnnnnnnnnnnnnnnnnnnnnnnnnnnnnngtgaaactccgaattggataccttgtttggacgggaatgcctgagatgcaaccggccatttcagccgatgtccacaagtgcctgccgccagttgattcaccggccacagtttagccttaacgttatgctagtgtgttacagccttactggctattccgtagcacagatagtactattcacgtcccatttcttcaaccaaacaaccaccacaaaaatgtttgatcgtccactagtctcctgcaaaatatcagatatggcggactatgctggtttactccaccgttgcaagtgtcagcctctcaggatagctcagatatgaccttctcgcacttcccttccaaaatcttcacggcttctgtgaatagcacctccgggggcagagctccagtggactcaatggtaaatatgaaatggtctctaacacgccttagttggattttatctccagatggtcccataacacattgcctacagagcgtgcaagcccttggctttgcaacaattgccctctttctaccatcacccaggtcttcaatgtcgaaaacattaactgggcacttcttcactagctcctcagcatcgacaccttcaatttgattgagaatttcaacctcagggagcattctgtaccaagccgtagcaactggagaccacttggcatgaactttcccaactcccttaacagcatgtgcctcgagctcaatagcctgtcctgccccaagcctggcaatagttatatctttaaacttcacaccaagaggcttttgtaatatatccttttggctttgactgaaggaagtgaaagtcttctgtttgtccccagactgcccaggagaagccatgcttaattggctaccttccggcaaccactctagttcaccagatttcactgtaattcgctgagaacccttttttggacatgaaacatgcagtttataaacaatagtgttcctttcatttgggacatcattttctgagatataatcaaaaagccttggatctgcatcaagtggaataagtcctaatctatgtgaaagaacctcatctgctataactgaggtgttgtcagccatgaagattttctcaattgccatagtcggaacctctgagatgaggattctccggaaagcattagcaattgatgcatcaacaccaatcatatcaaactccatatcatcttcagttagacgttttatatcaattttgaagttcttgcaaaatttctccactgacacactattatcaactcccgtcgcagcataagtacccgagtattggaaaccttgagtatggataggggcatctgcattgcacacgacacgggtgcgctggagctcaaggtgatctgggagcttattttcttgctgatccggcacatcgcccacctgattcttggatttgggctccccctcttctttggcatattgtcttactcttgttttgcctctttgttcactcttatacccctgctatgtcctgatggctgatggcgaggcggaggtggcaggggagtccgccgccgtaggaatcgagccgttgccggagtaaaaccctggacctggaatcttggagagagcacgcgggagccaggagcaacggcggcggtccgcagtggcggcggattcctgcgggagattcccctttgatttttcttttctg

SEQ ID NO: 13071 - DNA, 347 bp, Setaria italica
  Peptide Sequence Number=SeqID_79045
cctaactgctgaagaatctgcacatgcccaagactacaattttgatcaccctgatgcatttgatacagaacaacttctggaatgcatgggacagctgaaacgtgctcagcctgtaaatgttcctatatatgatttcaagaagcaccgacggtgctctgaaacctttaggaaggtagcaattacttgtaaacctgccagcatgataaagttgcctttcctttgtcaatgcatcagatgtcatcattttggagggaattttagtctttcatgatcagagagttcgcaacctgatggacatgtaaaattttttgtggacacagatgctgatattaggctcgctcgaagaa

SEQ ID NO: 13072 - DNA, 1796 bp, Setaria italica
  Peptide Sequence Number=SeqID_79046
acaagacgggctccgcctcgactcgcgccgcctctcctcatcctcctcctcgctcccgtccccgccctccgccaacggcaacggcaacggcaacggcacggccgacaccgccgccaaagggttcgtctcccccaaggcggacggggccagggcgccccttcgtgataggcgtgtcgggagggacggcgtcggggaagaccacggtgtgcgacatgatcatccagcagctccacgaccaccgcgtcgtgctggtcaaccaggattcattctaccgtggtttaaccgaggaacagtctgagcatgtgcaagactacaactttgatcaccctgatgcattcgatacagaccaacttctggagtgcatgggaaagctaaaaagcgggcaatctgtgaatattcctatatatgattttaagaatcaccggcgatgctctgaaagttttagaaaggtcaatgcatcagatgtcatcattctggagggtattttagtttttcatgatcaaagggttcgtgatttgatggacatgaaaatttttgttgacacagatgctgatattaggcttgctcgacgtataaggcgtgatacagttgaaagaggtagagacgttacctcggtgcttgagcagtatgggaggtttgtgaagcctgcattcgatgattttgtccttccttccaagaaatatgctgatgtgatcataccaaaagggggagataaccatgttgcaattgatttaattgtgcaacacatccgtacaaaacttggtcagcatgacttgtgcaaaatctacccaaatgtctttgtagtccacacaactttccagatacgaggaatgcatacactgattcgtgacaggaacattacaacacccgacttcgttttctactcagatcggctgattcgtctggtagttgagcatggtcttgggcatttgccatttacagagaagcaggtcgttacaccaacaggatctgtttacatgggagttgacttctgcaagaagctctgtggagtgtctattgttcgaagtggtgaaagcatggaaaatgccctgcgtgcatgctgtaaggggataaaaattggtaaaattctgatacatcgggttggagacaatgggcaacaactcatataccataagcttcccctggatattgctgaacgtcatgttttgcttttggatcctgtgcttggtacaggtaactcagctaatcaagctattgagcttcttataaggaaaggagttcctgaggaacggatcatttttcttaatctcatctcggcccctgaaggcgtcaattgtgtctgcaagcgcttccctcgtttgaagattgtaacctcagagattgatggcggcttgaatgaggaatatcgggtcatcccaggacttggagagtatggggaccgctacttcggcacagactaatcgatgattggaaccgctgtagttggcagtgtgaaaagatactcgagttagagctaacatcaccgtgacagatatactggtgtttggttggttatggtatactggaagcaaacgcggaaaggtttctgggagtttgctgaaaccgtgtggtcttgtccattatcacatgactcggtaatactgttggttctcttggtgtgtgacatacagaatcgggtttgcattttgaagctcctggctgaatggacctgttcctcgtcagttacaggcctgcgaaatgtatttgagtaaaccctgtttcccggcttccaacagatgccgtgcgatctcagctgtgattcaactgagtttacgaatgaaaatttcaaaaaaaaa

SEQ ID NO: 13073 - DNA, 300 bp, Setaria italica
  Peptide Sequence Number=SeqID_79047
aaccgttggtcaggctggatcggcgccccttcattcatcggcggttcccgtatccagaagtcctcaccagtgccaccatcctcgatgaggagcttggtggtatgcagctgctaatggaagcctccgatttctcctccagtacggtaaaattgagtatgaatctcatgcacaccgcctcaattgagaagatggaatcaatgaaaatttatcaattgagaagatggaatcaatgaagagaattagacccaaataacttaagaacaaagaacgaaagaaaaggaaagaacaaagaaaaagaaa

SEQ ID NO: 13074 - DNA, 632 bp, Setaria italica
  Peptide Sequence Number=SeqID_79048
cgaacagcctgcgcttcagctggacgcgcgcggcgccgccggccgcggccgcggccgcgcggttgatcctgcgcaccatggcgcgcacctcggcggagatgacgggggacatgcagctcacccggtgcgcggagaggagctgcacggaggcgacgcgtcggaggttgcgccagtagggcccgtagctggccatggagagtgagttgccgccgaaggacacgagccccgtcgagggggagcgcgggcggttggcgaagcacacgtcgttctccgtgaggcactccctggcgcactccggcgaggacaccaccacggcgcggcgggaccccatgcgcatggagaacaccgggccgtggcgcgcggcgaggcgtgccagcgccgcgtggaacggcgtcttgacgaggtggaggtggccgaggaacgggacggctggagggctcggaggcagccgccgcgcagccttgttccccttgccatttcccttgccgccgttgccgccgccgccaacacgggccacgaggtagtggagcacgaagaggaaggcgaaggtgaggacggccacgtaggccttatccatggctgtggaacaggagaagcggtggttgacgagcttctgaatgattgatcgcaac

SEQ ID NO: 13075 - DNA, 2577 bp, Setaria italica
  misc_feature (2560)..(2577): n is a, c, g, or t
  Peptide Sequence Number=SeqID_79049
ttttctttttctttttagtttttgttttacgtttttatttttgtttttgttttaactttttgtttttagaacttgttctcttccccgatggatggggttcctcactctctctaggagctgccagagcgactactagcgagggagggagggggttagggtttcttctcctgatcaggggttaggggttagtttcgatttcgaggatgcggaagcgggatctggggatcctactgctcgccgccttcgccgtcttcttctccctccaccacgagggcgacttctccttccgcgagtcctggtaccacctcgccgacgaggacttccccatcaagtacgaggccgaccgcctgcccccgcccctcatcgcggacctcaacggcgacggcaagcccgaggtcctcctccccacccacgacgccaagatccaggtcctccagccgccccacgcccgccacatcaacgatgacacctccttccacgaggcccgcctcatggccgacatctccctcctccccgacaacgtccgggtcgcctccggcaggcggcccatcgccatggcggtcggcaacgtcgaccgctcctaccgagccggcgacgtcaggaagcaggtcctcgtcgtcgtcacatccggatggtccgtcttgtgcttcgaccacaacctcaaaaagctatgggagcagaatctccaggatgacttccctcatggcgcacaccaccgcgaggtcgccatctccataaccaactacactctcaagcatggagatgctggccttgtcatcgtaggaggaaggatggaaatgcagcaccattcggcagatcttttcgacgaatttatgatgccagaagaccaccgcagaagcaccgatgaaaaacagggctctgagactggcactgcagacctgcgccattttgccctttatgccttcgctggacgtactggcgagcgaagatggagccggaagaatgagaacatccagtcacagccatcagatgcttcagtgatgataccacagcacaattacaagcttgatgtccatgccctcaatagtcgtcagcctggtcagtttgaatgtcgtgaattcagagaatcaattcttggcgtcatgcctcatcattgggataggagagaggatactaccctacagcttgcacattttagaaggcataaaaggaaacaagtgaagaaaacacaaggaaaggctgctattaatagtgtgaacaagcccattgaacacaatccacctggaaaggatgcttccaatagaatagctagagtgcttgggaaggctgcagatattgctagctcaaataaagtcaggaagacacagaggacgatgtacattccgacaatcactaatcatactcaagtatggtgggttcctaatgttatcgttgcacatgaaaaggaagggatagaggctgtccatctagcttctggacgtacaatatgcaagcttcatttaaccgaaggagggcttcatgcagatattaatggagatggagttctagatcatgttcaggttgttggtggaaacggcattaaagagcagacagttgtaagtgggtcaatggaagtgctgaaaccgtgttgggcagttgctacatcgggtgttccagtgcgggagcaactttttaatgtgtctatctgccattacaaccattttaatctgttccatcatggtgacttttcgagaagttttgggaggaaatttgatacgactggtttagaggttgcaactcctatcctggtccagacagatgatgggcataaacacaggagaggaagccatggagatatcgtctttttgacaagccagggagaggtgacttcgtactctcctgggctgcttggccatgatgcggtatggaggtggcaagtatcaacaggggcaacatggtccaatctcccatctccgtcggggatgatggagaacatagtggttcctactttgaaggctttctcattgcgttcctatgaccgaaaagaggtgatcatcgcaggcggcgatcaggaggctgtggtgctatcaccttctggtggcatactggccataatcgagcttccggcgcctcccacccatgcgctgatcatggaggatttctcgggcgacggcctgaccgacatggttgtggtgacatcggggggagtgtacggattcgtgcagataaggcagcctggggctctttttttcagcacgctggtggggtgcctgatagttgtgatcggggtgatatttgtgtctctgcacctcaactcgtcaagcagcggtaaaccgagggcttcttcagcggaatacagatgatgttgagaaggaagtgtgttacttatttgatagaagactttgcatatataagcaaaccaaaccaaaccgggggctagcgaatagaactgggggtatgcatgttacgggctattttgttttagcctgcaccaagtgttggattcatgttgttgtatgatagaagagagtatcttttttccagaactattccatccaatatacttactaatgatactatactactagtagcagttgctctgcctaaaaaaaaaaaaaannnnnnnnnnnnnnnnnn

SEQ ID NO: 13076 - DNA, 426 bp, Setaria italica
  Peptide Sequence Number=SeqID_79050
aatcaatcaaatcctggtgcccagaaatagatgcaaggatctattacttcagttactgaaagttttgctctatctttatttctggggtcttgtcggtatgaatatatcttacctgcctgctagaaaaagaaaatcctttggaacctgttatttcacgtacagatcgtaagaaaacttgaattagttctaggagaagtatgcaatctgaatctcaatcaagatatacgagatgttattgccttatcagttatcattattcagagatcacatgttacttttgaagcaaaatgcctcacactgtatacccccaaaaaatagatataacttacattctctcatggtctggatcctgaacctggccttcagctaaggagagagagggagagggtgtagagagttacccaattgtaagctaaacgggccctt

SEQ ID NO: 13077 - DNA, 854 bp, Setaria italica
  Peptide Sequence Number=SeqID_79051
gctttccctttgtggaagcgatcctgatgcatggtatgattcaaggtgtcctagggacactcgacggactaccggacttatactgttttaagcgtgtttcgtataattgctgttccaactgtgattagacgtacttaagccaatttaagttgaacggttctgccataggtactcttcactattgtaactgcaccataccatttactaatttattcacgcattctcgtaatttaatcatacataattttagtaatttcaccggacattctcattggtaaatatttctagtatatgaaaaccaacatatttctgtaaagggttagtatatgatgaacacccagatatttctgtaaagcttggtttcctgtttgatgacctgtagtccgagttagtttagttgtgcgaaactaattttttgaatgatattgtaatttaaactgcccttatagttaattctgaaatgctaccacacaattctcataatttctttcagtgagagtcaatggtctccaggtgcacaacactattgtaaatatatcataccatttactaatttattttcataaattatcgtaattttattgatggatccgtgctaatcacttatctgaattgtgtttcctgaaaatcatatagttacaaaacatagtaaaacatagttagcccatgtctacagttacaaatctgatactcaccggatacaaatctgatactcaccggagatttcaagctccaagctcatctcaattttacaggccacatcactttacctctccattgttcaagatttatggtagtacatgtgaccgtccatgtgaagcgaaggagagtgcactcatccgtgctctagctta

SEQ ID NO: 13078 - DNA, 647 bp, Setaria italica
  misc_feature (591)..(647): n is a, c, g, or t
  Peptide Sequence Number=SeqID_79052
ctacgcgctctgcctcgccaacatcatcgtcatggtcgtctggctctcgccggactccggggccgccgcctcctccgccgccaagtcgttcctccgcctcagcgacgacgaggacgaaggcagcaccgggggaagcgccggcgccgacgacaagtgctgcgtctgcctcgccggcatgcgggaggaccaggcgctccgggcgctgccgcgctgcggccaccgcttccacgacaagtgcatcggcaagtggctcaaggcgcacccgacgtgccccgtctgccgggccacggccgtgccaccgctgcaggacggcggcggcggcgacccgctcgatgacgacattattagccctgtctagcacgctagctagcttcgtctcaatgattggtgcatcttgtctaacaaatttgtggtgatttgttggggaaatttgctgaacttgtatagttatccaaatcgttgtcaaacatccattggaattgttagtagtgatgtgtaaatacactcgtgtttgtgcactttggggaaaagcaaagccttgttctcttcatgaaaggtgcaatcattgaacaggagtctgttactaaaagnnnnnnnnnnnnnnnnnnnnnnnnnnnnnnnnnnnnnnnnnnnnnnnnnnnnnnnnn

SEQ ID NO: 13079 - DNA, 393 bp, Setaria italica
  Peptide Sequence Number=SeqID_79053
tgtaataatttctggagtcaatgcagctaggcattctgatggaaaatcgttaattattcttgagagggaaagcagttatatagggactcttattgatgatcttgttacaaaagatcttagggagccctatcgcatgctaacaaggtgcataatttctgtagaaaatattcttattattgatgcttaaagaaccgatgccaaaaattgttataggctcctatgtagtaagcctaagtagtgttgtgcaatatttgcatttttttattttttagtagatccaatatgagcggtccaagtgagaggtgggaatccctcattaccttgtccaccttttaattaggctaaattgacctaaatcagcacaggagggatgagagaactcccaccctcaac

SEQ ID NO: 13080 - DNA, 1228 bp, Setaria italica
  Peptide Sequence Number=SeqID_79054
ttagaagttgagggcttattcttctctggccagataaatggaacaacaggatatgaagaagctgcagctcagggtataatttctggagtcaatgcagctaggcattctgatggaaaatcgttaattattcttgagagggaaagcagttatatagggactcttattgatgatcttgttacaaaagatcttagggagccctatcgcatgctaacaagccgatcagaacaccggttgttgcttcgagcagataatgctgatagtcgtttgacccctttgggacgagatattggtttaatagatgacagacgctgggagctttatcagtcaaagcaagctcgcattaagcaagaaaaagaacggttgaaatctacaaaagtaccaggaggtgaatttgctgctgaagttagtgcagtatccaaccaaccagtaaaggattcatctacacttgaagctatactaaagaagccacatgtgcaatataagcttcttgataagcatggatttggaaatgaaaatttatctcgaattgagaaggaatgcatagagattgatatcaagtatgaaggtttcattgcacgacaacagagtcaattacaccagattgtgaaccaagaacacaggaaacttcctgaagatttggattaccactcaatgaaaaatctgtcaattgaagctcgtgagaaactttccagggtacgtccgcaaacaataggtcaggctagcagaattggcggggtgagcccagctgacatgactgttctcctcatctggatggagagcaaccgtcgcatggctaaccacaggaggcagcaagaccagctgagagcagctgcggtgaaggttgatgattcttcagaggaagtggcccgtgccagcactgcataggagaatctccaggcaactgaactggaagcaacaagtttggtgaggtactcggtaaaaattatgcaggaggtgcaaaataatgcatgtggagtggatatgatggggctatttcgacgacctgaagaaatgtagtggtcctctggcccttcctgttgtggagcggatatgctggctttaggaactagaatatctgatcggcttggccagttacaattgtagagagtttctaatgctatttgaatcagaaggcagattgtaaagaatgacaaccacgaaaatgcggtatgataatagagagctctcaccgttcatcctggtagcaaaaaaaacgagagaattacct

SEQ ID NO: 13081 - DNA, 1040 bp, Setaria italica
  Peptide Sequence Number=SeqID_79055
ccgggccaagcgctccggcggcattgcctccctcgtctccccgtgccccgtcacgcccgccgtcctccccaccccgcgcctctccccctcccgcgagggcctcgctgacatggcccaggcgcagtggggcgtcgacggctacggctccatgaagggcctcatccgcctccgcagctccccacagccggccaaccccaacgccactgctgcatccgacgacgacgaggaggggaactctagtggcagtgacgtcgaggagcacgtcgaggtggagcgccgcctagaccatgacctcagccgctttgagatggtgtaccctgggagaggggaggatgctgggggctacgtgtttgaggacgacgacgagtatgaccaggatgcgcatgtggcacgcctcgaggaggagaacctgacgctgaaggagaggctcttcttgatggagcaggaggtaggtgacatgaggcgccgtctggaggcgcttgaggcacggttttcacaatgcaacgagcatgatgcagagagggttcatctgggatctggcgagggtggaggtgaaactgcagcgaagcagggtgctgtgggtttggaagagactggcaaccacgatgcagaggagcagggtgctgtgtgcggttcggagaaggctggtgaaactgatgcagaggagcagggtgctgtgtgcggttcgaagaaggctggcgaccacgatgcaatgacgttgggtactgagaagacagacgaacacaagatacagatggttgattcggctctggagaagaagatgggtgaggacaatgttgaagtaagagattaggctcgaggcctggcggtgacgactggtggaacatggagaagagaattcagtactggtttttggtgctgtacatacgtgttgatgacggattgaagggatgcgacatggactggacatgttttggggacaggacatgttgcgtaaaaatgtatcctggtatttgagtttatttctattgttccttgttacgacgtatcctttgcagaccctgtagagctctgcttag

SEQ ID NO: 13082 - DNA, 628 bp, Setaria italica
  Peptide Sequence Number=SeqID_79056
tatggtgtctgacaacttgtttccagacagaatcagttcgttaagattcaccatggtaccaacctcagttggaagtggcccggataatgaattatatgataagtctaagtaccaggaaagtcgaggaagttttaaaacctctataggaattgaaccattgagtcgatttgttgagagatcaaagacaaacacattcttaagttccccaagtttgatggaattggcccctctaagtttccatagtatgcataaagcctattcaactgtgtaagatttcctagtgacgaaggtatgaggcctgacaagctagtgttgtaaaggcctaacacacccaagtttcttagctgaccaatgctctctggaatctgtccagatacagaagtatttcccatcacaaatactgtaagaccaaccaaatttccgatgtttattggaatattcccagaaatcatattgtctcccaaataaagactttgcagagttgatgacaggtttgcgactgaattaggcagttgcccgctgaaagagttgttgccgagaataagaagctgaagctgggagctgtttgccagtgaagtgatgaattcccacccttgactgtcgtttgcttctagtccttgtttgttct

SEQ ID NO: 13083 - DNA, 259 bp, Setaria italica
  Peptide Sequence Number=SeqID_79057
aaggcaatcaagatcggcttgccaaggcaacggcagcaggccggaggcgtgctcaggcggggacgcggggtgcggattccttccgccacagcctcctactcgagcccaagcaaacaccacacagattgcaaggcacggcaagccgccggcgggtttccttccccactaggaagatcatcatccaacccagtcgatccggcgccgccgccacgggcggggcagacaccacagggcaggtgttagagtgaaaccatggcta

SEQ ID NO: 13084 - DNA, 2026 bp, Setaria italica
  Peptide Sequence Number=SeqID_79058
gaatgacaatacagcattatgtcaaatacttggccaacaactgttgtaactgcagtgcatgcacgagcacagttcaacaaacgtaagagcaaatatgaagttctgaccacattcaagccacaacaaatctaacacgctacaggtgacccaaaaattgatttacttgttcatgaaccttccatctccgactctagagagaaacacaacccctattctccaatgagagcacgggaaaaccttaggcgtctggggatgctggagcctacaagcttctgtagtcaaggacagtcacttcctcgtcaggagcatcaaggtcgttgtaacttcgtagacggcgaggatcatgacggaaatttggaggcatagttataataggtgccgggccacccatcatcggcccgagcattcctgtgttcccatgaggtgcaccattaggttcaaacggaggtggcccttgctctctcatcatatgcattgctatctctggaggtgcaggaacaaatggtcccaagggaccagcaccaggtacaggcatcaatattggtggaggggggaattcggcaacaaaaggagcattggagccccgtccacggaaagcatcaaacatctgatcatcaggcccatcacggcttggagagcgatcacctctaccatatcggcctccctctgccttatcattgtccttgttattgccacggtcaaatctcagacgactgtccatgccaggtttccgtcttcctctgtctggtgcagactgttgcataactggcgttccacctggtgcattaggatcgttcatgtagttttggaaataaagatcctctcgaacttttgaagtcgactctaacacaagctccgggtgcttgagcctcaaatgcttgtggacaaactcaggagcatgaaaaagtttagtacagcccttggctccacagccatatttccatccatacttttcatccctgattttccggacataaggctctaaaacttcaacagctgctgcatcaattttatccttggcagttagtatgaccagagggtcctgaccattcagtctttcctgccagaaagtatccaacttcttctcccaatcagcagcattgacatcagatgtgctagaagtcttattgtctactctcacatgacgaaggccttttgcctcatgtgactctgaggtgccatagtaatcaacaccatgaatacgccataaataggtcagaatagtgtctaggagctcaacaccttccaggcctttgacagtcgttaagcctctgattataattataggtcccatggatccaatatgtgatttgtcgccatctgacttgtcatgatcaccactcaaaagtacattgccctcaatgcccttctcagcatcaagcttacgcacaagagctagagtttgctctatgtcagcttgaattcgacgtgattcggaactaactggatgagctttgggggcaccagaaagagaatctgttcccttagaggaatctttgccctgctttcttctcttgtcaccatccatatcgtcgtcagaatttccatcaccaccgcttcctggtttacttgctgcacctgcagttattccagggcctaggtccagagttccattttgcaaatcaagaaagaaatcctttgacataaccttgcaacgttcgttcctcctttcaataacagatactaagttggttgggtggtacttgtcttttaaccagtcctcattcttgtggagttcaaaataagcacgtttttgagtagtgatatactcagttctatattcttgatacctgcgttcagcttcacttggtgaaatatcatcctctagaacttgcatgaactgtttgtatgtcatcaaaccttccctctgggtgatccctggaccatcattggccgccccataccctgaatcatgccaatctggagcacgattcggatatctgccatggttcctgtcatcgtcatacccacctctgcctccacctcgctcgtagtcataacctcgcctcctatcgtcgtacccgta

SEQ ID NO: 13085 - DNA, 765 bp, Setaria italica
  Peptide Sequence Number=SeqID_79059
ctgatcttcgttatgatgcccgacacagtacaggttttacacggactaatcagcctttcgtgtatatttgacctccgccagttcgccgtacggctcccattcgtactgttatagttatatgcagctgcaagccttggaggagaaaaggagtaactgactgatggtatcttgacaacatggaaggggacaatgaagctgatttggtagcggctccgcgacacagaataccttgagttgctaaaacacatgactgatgtgcctctgcggtggttcgcccagcggaatctctccaattgaccatttttccttcaaccagatactatcatcctgattttcatttttgttgtcctcaacaggagcttggttcaaggcacttgtcggagctacgatcccacttagtaaatcttgtgactgcctatcaatgtctctgtgatggcttgaggaggcagactgctgatagcctgcaggaggcttggggaaattgccaacattggacatgcttgagcccgcagatggttgttgtgatacctggcttccaaatgaacccgaaactccaaatttcatatcagaacggccaaaagtaggtgcaggaaatgctggcaggctcgcctggacaggttgaccaaagagagtattggttgggtttcctggtgcagttctgggcccaggtccaaagttatttcctgctccaacttgactgaaactactaaacactggtggtccactagtttgcggaaccccaaatgacgggttattcttcacttc

SEQ ID NO: 13086 - DNA, 290 bp, Setaria italica
  Peptide Sequence Number=SeqID_79060
agtgagcccatttgactccactgtcttctaatcctgtcctcatagtattaaacaaaaggatataccagcattttaaaagtgcaaaagcgatcaagcttgcagagcatcctatcctcaaagttactagagaacattgctttaagacattaactattaacccagttcctagtactaccacacgtaaatgcaagttgctctcctacgcgcattcacatgctcagttccaccgtccatgtaagattaccaatgctttggaatatgaggtttcagggtcaaactcatattccaaa

SEQ ID NO: 13087 - DNA, 275 bp, Setaria italica
  Peptide Sequence Number=SeqID_79061
cccggccccttccctttcctttcctcctcgtccatcgtcctagtgctcagctcatcagctcactgcactgcagcagtaacaagtaacacaacagtttgcttcgccgctaagaattgcaaatttcaattccatccaacatccatggagggggacggcaatttcagtttctagcagcagcccgtacgtgctcctagcttcatggccaccagccgcttcctcttcgtctccctcctcgtcttcttcaccggtgccgccgttgcgcagatgcctggttt

SEQ ID NO: 13088 - DNA, 555 bp, Setaria italica
  misc_feature (5)..(5): n is a, c, g, or t
  Peptide Sequence Number=SeqID_79062
cagcngtgatcaatgatgaagggatgtatgatcatgccaaggcagtggctcagagcttgctcggggaagagaacgtcaaggtcgcgccgcagttaatgggagcggaggattttgggttctacgcgcagagaatggctggcgccttcttcaccattggagtcggcaacaagagcaccatggtgacagtccattccactcactgccccactttgtgattgatgaggatgtgcttcccataggagctgcactccatgctgccgtggcaactgaatacttgaagaagcatgcatcagcctgaaaatgaatgcgaaaaattggcttgtttggatactttgggcatcatgcagtatgcttttcgtggaggtgagcagagttttcgtttctttggttccccaatcctactggtttttaatgatctgaaaatccagaatgccattactacttctttgctgtaggctattcaagatagaaagtaggtgttcagatgctcaggagtcaggacctacaagttaccctcactgatggaaagacaatgatgtattagacatatataat

SEQ ID NO: 13089 - DNA, 1152 bp, Setaria italica
  Peptide Sequence Number=SeqID_79063
atggacgcgctccccttgcaggaattagttgattgggaatacaagagccaggaaaaaggaaaaatgcatgcgtgcggacatgatgcacacacagcaatgcttctgggggctgctaagatacttcaagatcataagagcgacttaaagggtactgtgaagtttgtattccagccagcagaggagggtcagggtggagcatactatatcttacaagaaggtctgcttgacgacgtgtcagctatctttggcttgcatgttgatccagtccttccagtaggcgttgttgcatccaggccaggaccctttgctgcaacagcagctcgattccaagcaactgttactggtaaaggtgggcatgctgcactaccccaccaagccttcgatccaattgtagctgcatcaagtgccatcctcagccttcaacaaatcgtctcccgggaaatagatcccctccaaggcgcggttgtatccgtcacttttgtgaagggaggcgatgcttataatgtcattccagagtctgtgacctttggtggcaccttgaggagcatgacaaatgaaggtctattgtatctcatgaagcggatcaaagagattgtagaaggacaatcagccatacatcactgcactggcaccgtggacttcatggagggcaaaatgagaacatatccagctgtgatcaatgatgaagggatgtatgatcatgccaaggcagtggctcagagcttgctcggggaagagaacgtcaaggtcgcgccgcagttaatgggagcggaggattttgggttctacgcgcagagaatggctggcgccttcttcaccattggagtcggcaacaagagcaccatggtgacagtccattccactcactcgccccactttgtgattgatgaggatgtgcttcccataggagctgcactccatgctgccgtggcaactgaatacttgaagaagcatgcatcagcctgaaaatgaatgcgaaaaattggcttgtttggatactttgggcatcatgcagtatgcttttcgtggaggctattcaagatagaaagtaggtgttcagatgctcaggagtcaggacctacaagttaccctcactgatggaaagacaatgatgtattagacatatataataaataacaagatattccaaat

SEQ ID NO: 13090 - DNA, 588 bp, Setaria italica
  Peptide Sequence Number=SeqID_79064
tgtacgtcttgcgagctcgtaacgcccgtcccctcacacgcgcacagagagagcgagaagagaaaaggaagcgagaagcttgggaaggagggagccagggagaagagggagggcaaccgaatcgatgaaggcggagaaggcagcggtggcacttcccgagcccgctcaaggcgttccggcaccggaggtcgtcggcgagcgtggccgggcgggcgtgagcgcagcgcaaggtaccacctccagatggccggaaaagtgatcagcgggtggggtcggggtcatgtgatggccgggaatcgttaattattaattttaactatatgaggcggtggattagaggaggagcgttcgatctccttttctccttttgtggtggcgtgccgctaattccatgattaagttagaccgaaacgtgaaagcctgtgatctgggcgggatgtgtgcatatgctagtgggtgatgacctcctcccgcccagatcacaggcaacaccacccatggcgctcctcctctccccgaccgtctccttcctctccctccccctccgctccacgctgctcccgaggtctctccgccgccgccaatgca

SEQ ID NO: 13091 - DNA, 1566 bp, Setaria italica
  Peptide Sequence Number=SeqID_79065
agaacaagaaagaattcacatccattaacaagttcagcaactggaggcaagtgccaggtggtaattgcttcagataaatgatgggcagtatcaacatgaacaaatcggttgggcgccagccaccgcatctcttcatttagtaaacaaggcctgtatgcccttgatttactggttcgcgactggtgtacatctcacacgtatataagtcgattacaacagcaggtagcatctatttccaggtatcgaccttgtgtcatctcacaaatagatgggttataaaccatacagctcattttttgagtaaaaattgctgtgctccacctgcgaagacgagtgacattctaccaaggatgaaaatgagagaccaaactaattacacatgcacacattatgccacagacaggctccttagcctgtcacagttaggggtagggtagtccttggcccattgacgccgttggcgttccacatggcaatatcttccaagcagactcttatagtccttaaaaacatactgctcaagattctctctagattgactcccctgtggaaactgctgatcaaaatcttgtttgctgacaaagtactccaccccatgcttttgagtgacctttgatatgggaaagtaatatgtcttctgaagggaatacttgggctgtcgtactggaatgaatgcaagagaaacaataaacaataccactgcaaggtgcattaacactgttaggtttatgctggaaccaccctgcactgtatgctcccttctctgttgctgctgtctacctgttccccttgctctgtaggtatgctgggcacgaaacaaattatcatgggagccataaaagaaggacctgaatatctcatctggatcaaaatcttcttcatagttatagaagccatttcttgcttgcctcctccgtctggccactccctgcctcatggcattgggatattgctcgttaaattcatggtcctcaatggtgcctgtctgatcataagtcttccgcgactgatcattgcttaggcacttgaaagccttgcttaccaacttgaaagcatcctctgccccaggagccttattcttgtcaggatgaaccttcagtgataatctcctgtaggccttcctaatttcctccacagagcatctcctctctactccaagaactgcataataatccttcttcttcctgatatcctgaaccaccctaatattctcctcagtgtatacctgatcaacattaacaggaccaacagattcttttggtgttttggggttttcactagcttggcctcttctcgttttgtcttggcaagtagcactgttcaggataccaaacttctcagctgggctcaacaaatcatcaagtggaagacttgggtccaatctttgagcaattctaactaatttttctgcacgttgcttatccccagatgcaaatgcagattttgcaagcttgacagatctcaaggcctcatccttgttcccatccatgagcccaatcagctctggataaataggtcaaaaccccaacctgattaccggaagagaggcgaggcgaggaagaccac

SEQ ID NO: 13092 - DNA, 1175 bp, Setaria italica
  Peptide Sequence Number=SeqID_79066
tcttcagttaacagcactggcaacaatgcagtgaagagttgtactaattctacactctcagagacatgcagttaacagcactggcaacaatactgtgaagagtaacagttacattctctcatgcagtgaagagtaacaattacactctctgtgtagtcctttttttttccaaactacctagcacgttcaaagctcttactcaccagcctcattcagcacctcttaattccaaaaaatgcacttcgcactgatcaactacctgaacaggttaagatctgaatggatgaacgccgtgtgagatataaatggaacatttggatacaaccctgaaagtgcacacctcatgcactcgacaaccgtgaagatctgaatgaaggccattgtcatccagaaatatgccattggcttaccctggaaaactatgcttggactccagttgatcgcagtggccagagcttgtgagcctgtgtcgagcaggatagccaatatgatgtgaaaccgcaagaagtgcggcgaccacttccgcctcacaacaaagaagtatatggtcatgaagatcaccagaaaaagccacccagggagtagagccattgtatcaatgaaggcataaagcaggctaaatctttgcaagtatggatgaagctgatagatggcatctgcgtgtccccacatgttgtgcagtggcagaagatagggtacacatgctagggatctccaccaccatttaggtttggaagataactcaggatagctgaatgatgataaagatgcttgacaaccaacttgagttcttggatgcgatttgggggatggcagcagtggcttgatgcccttgatggtatcgtactttgcaaaggatgaagatagaacatgacggtgaaaatccgcaccagctctcaaagcgaaggatttctgctcacgacgaaatgcaggatcccgcaggctcagaaaagccggtctagcacgcaaagacggcctcgcgggagaaccataccggctcgcggcaggagcaccaagcagcagaggattcgcagtagccactccgtgacagggaaacatcgcgtgcgagcggcggaccagcaaaaggagaatcgaatccggatggatccccgctccgcgctagcccaggaggggacgaggacgacgatgggaggaggaagaaaggcgggttgcgg

SEQ ID NO: 13093 - DNA, 551 bp, Setaria italica
  Peptide Sequence Number=SeqID_79067
ggccttggcaggggcgacgatccctggcggtggcgcgatcgacctggtctccttccccgacggcatgggccccgacggcgaccgcacggacatcggcaagctgctccaaggcttgccggcggcgatgctcggcggcctggaggagacgatcaggtccaggaagataaggtgggtggtggctgacgtgtccatgagctttgtgctggagctggtccccacggtgggcgtgcgcgtcgccttgttctccactttctcggccgccaacttcgcgctgcggctgcaagttcccaagatgatagaggatggcatcatcgacgaaacagggagtatgaaaaggaatgagaggatccagctgaaccccaagatgccggccatcgacgccaccgagcttccctggatcagccttggcaagagcccggagtcacgcagagccatgattcagaccgtcctcaagaacaacccaacattcaggctcgccgaaaccatcgtctgcaacacgttccgggagatcgagtccgcggcgctgcccctcctacccataccggcgctgg

SEQ ID NO: 13094 - DNA, 374 bp, Setaria italica
  Peptide Sequence Number=SeqID_79068
ctcgccgccgccgccgccaccggacgcagccgccgccgccgccgccgcgatgctgtccctgtcgagggcgctcgggaggcgcctcttctcttccgctgccgcggcgtccgagtccgccgcggccgcgtcgacgtcagcggtgaggaaggcgcagaacccgctcgaggagttcttcgaggtcgagcggagcaccgaggaggacaagccccctccccactacggtcgtagttggaaggcttctgaactgcgtctaaaatcttgggatgatcttcagaagctttggtatgttcttctgaaggaaaagaatatgcttatgactcagcgacagatgctgtatgcagagaacttgcgttttccaaatccagagcgtattt

SEQ ID NO: 13095 - DNA, 465 bp, Setaria italica
  Peptide Sequence Number=SeqID_79069
ctcactcgcctccccctcatcccctccttccctcctcgaatcgaacgcttccggtgtccggattccctgatcggttgtgctggcaggacgcagccgccgccgccgccgccgcgatgctgtccctgtcgagggcgctcgggaggcgcctcttctcttccgctgccgcggcgtccgagtccgccgcggccgcgtcgacgtcagcggtgaggaaggcgcagaacccgctcgaggagttcttcgaggtcgagcggagcaccgaggaggacaagcccccctccccactacgaagctttggtatgttcttctgaaggaaaagaatatgcttatgactcagcgacagatgctgtatgcagagaacttgcgttttccaaatccagagcgtatttccaaggtgaagaaatcaatgtgccggataaagcatgtcttgactgagagggccatagctgagcctgacccagaggtctg

SEQ ID NO: 13096 - DNA, 553 bp, Setaria italica
  Peptide Sequence Number=SeqID_79070
tttccgttaacttttacttagtttcttttatttactttatttaagtccccttacttacagttacggtcgttaggggaaaggcttctgaactgcgtctaaaatcttgggatgatcttcagaagctttggtatgttcttctgaaggaaaagaatatgcttatgactcagcgacagatgctgtatgcagagaacttgcgttttccaaatccagagcgtatttccaaggtgaagaaatcaatgtgccggataaagcatgtcttgactgagagggccatagctgagcctgacccaagaaggtctgcagaaatgaagcggatgatcaacaccctttgattcatacgcttcctgtgggactaaggttgagaggataagtagcacttagaaagatttacttcgttgtgttgtatgtttgtcccaggagacgtgtaagaccaatccttttttttatgtccatggtatacttgcaacatgctttgttgacattagcatctcggttccaataattgagctttcttgtaatgtgatatgcatgtttgtgcctcattttgtctgtc

SEQ ID NO: 13097 - DNA, 600 bp, Setaria italica
  Peptide Sequence Number=SeqID_79071
ctgcaatttatcccattcagagaatctgtaatttatcaatatatagaatattctacaagtttcttcaccctgaatatatgcaaactcgtaatttagcatagtaccaccacagttcatatctgcttcgctctgactttgttgaaatggacaaagtcaaaggccacaacaacgctcccatccagcctcttcatgacgaacctctccgccagcaccgatccgccggcaaccttcccggcgtcctcctcctcgtcgacccagccgcccctgcactgttcccaccgcatcctctcccacatgctcgtgcaaaccccgaccatctgccccgtcgccgccgccctgaaccacacgtaggcgtcgccgtggcgcgagttcagagactcctgctctgcttccacgatcccgccgacgagcgccttcttgctggcaagcttcgagacgccgccgccggcgtccgggcgcaccggctcccaccgctgctccagcgtcacctcgtagaacgcgctgcgccccatctgctcgcgcggcgtgacgccggcttctttgacgaggtagaacggggcgtaccatttcccgacggccgccgccgtagctgccaccggg

SEQ ID NO: 13098 - DNA, 819 bp, Setaria italica
  Peptide Sequence Number=SeqID_79072
tgagttaacattgggaggtgaaaacatggcaggtgagaggaagaaagggtgctgtcccccgccgtcgtcgcatgactcggctgctgggcctgtgcacagaagcagcaacccccaccaggggagaggtgctgttcttccagtgatcggttggcctccagtccggtccttcaggagaaacctcacaaatggcagttcatctaagcaatcccctgaacgaccaaacgatgaagctggtgacaaggcgaagctaacctgcaagaggagcccgcttgtcaaaataaacatggacggcaatcccattggaaggaaaatagacctcgcagcatacgacaactatcagaagctgtcatctgccgtcgaagagttgttttctggttttcttgaagctcaaaacgatttggactgtactaaaagtggagagcaaggagcggaagagaaaatattttcagggttgttggatggaactggtgaatacactctagtttatgaagacaatggagggagcaggacaccagttggggacctaccatggaatgtatttgtttctatcgctaagaggttgagggttatgaaaagttcggagcttccccatgttctgactaaaactgcttctgggagggcagcagatcactgatatggggcccatcgtccagccattggatcatgcaagctgtgtcaatcaccggcttcctttagatgactccttttctcttgtagagataaatctaataagataaatgttaacaaactgcagatgcctaaatgcactgcacattttgtaattttccttcgattcagatatagctattcggcatagaa

SEQ ID NO: 13099 - DNA, 271 bp, Setaria italica
  Peptide Sequence Number=SeqID_79073
ggtttaggttcagtccctcggttaatttttgttgtcatcgaagcatgtgttctggtggctagctagtacttgcattggattgatccctttagtacatatattctgccgtctttggtgcatgacacatttggagtagaatgtgtcagttttcctggctccattgggcatttatagagttattatagactatatatcctgttactctcatgtggcataaaatcaatgcctcgttgaaccacatacatgcttaaaggtaaaaaaaaaaaaaaaa

SEQ ID NO: 13100 - DNA, 491 bp, Setaria italica
  Peptide Sequence Number=SeqID_79074
acgacctctccctcctcttctcctcccaatttctctcttttccatctgggtcgcgtctgcttcttcccgatttggtgccatcccaccacttcttgttggactccgtccgtcacacctgtcctcctcgcttccatcgccattgccgctctccctttctctctgctaaagccgcctgctttcttggaccggctcgggtcggggctcgacacggccgggcgtaaatgcccgtccgtgcggaggatcccagccttctccgctccaaatcttgtccttgttcccccccaattaagagcaggacaagattcttcgacgctccctaatcctagtagccagagatgacaaattcgtcctgactactcttgcccaggcaggctctccggcggcggctcagctctgggagccgccccactgctatgggcttcttgatctgcgcctgcctcctccagctcctgctcttggcgacctcttccggggtggcggcgcagtcgcag

SEQ ID NO: 13101 - DNA, 653 bp, Setaria italica
  Peptide Sequence Number=SeqID_79075
tacacaagcaccccttcaagaggcacttacacgcacagacaccaggatcaaaaagttgtccaagggaagaagaaaagcactcatacttgcaccagaccactcagagaaacgccactccaatcagtagagctggacacaagaccctgcaccaatcatagccatatcatataaaccaagggcagagcacccaagaacacagcaagagcaagcaggaacagcgacaagatgtatccttaccgcttcagcaatgtgctgatcggctaccttaacctggggacgctcctcgcctcgattccaatcatcggggcggggctctggctcgccaagggctccaacacgacatgctcctcgattctgcagacgccactcctcgtcatcggctttgtcgtgctcctcatctctcttgctggcttcgtgggcgcctgcttccatgtcgcttgggcgctgtggctgtacctcttcgccattatgctcctcatcgctttccttcttgggatcacagcgttcgggttcgcagtcacagcaggaggcggaggcacacagattccaggaaggccttacagggagtaccacatctcagactattcctcatggctccagcaccacatgcaggacatgaagtactggaggccagcccttgcctgtgtggttgg

SEQ ID NO: 13102 - DNA, 793 bp, Setaria italica
  Peptide Sequence Number=SeqID_79076
acatctcagtgactcagtgtatgtgaaatgttacaagtgagaagtaaaaaagggtggatcactaaaattttatctgtttttcatccttgagccacaggagcacctccgatagaccttcagttaagttccttggactgtaacccagttccgtctttgctttgtcacatgagtacgaccattgatgtctaagaacatgcacagtcgggtaactgattagtgggagctttccagtgatgcgagaaacaaaaactgaaatccaaccatatacttcaatcaaccagaggggtacatggaataggggtgcctttgtgtttgtgatgttagcagccatattgaaaatttgcttgaatgacagattttctccagtgaggagatatcgttcgcccactctgcccttctccatagctgcgatgtgcccactgacaacatcatcaacatggcagaatgattctctatcatacccatctcctatgtaaccaggcaagcgcccattaaacctctcgattaaaatgcgggaaacaaggtttccagttgtaagttttccagggccatagataactcctgggtagacaattgtgatcggcaccccttctgttgctgcttgcagtgcaatcctatctgcaagaacctttgatttctcatactcagtgcaaaaggctttctcggggtgcatctgtgtctcatctgcaacataaccatcagttgggccaattgcaaagaaggacgatgtgtaaactatcttcttaacagttggggttctcttggcagccgttaacacattctcaagtcccct

SEQ ID NO: 13103 - DNA, 302 bp, Setaria italica
  Peptide Sequence Number=SeqID_79077
tcaactggttccacttctccatatcctgggggtacgccttcgcgtcggcggggctgagctacgtccaggacaacgccggctggaccgtcgggttcggcgcgtgctgggccgccatggtgctgtgccttgccgtcttcttgcttggcacgccggcgtaccgttccaagcaacatgcggacggcggcccgttcgccgagaccgtgcgggcgcaggtggcgagggtcttccgccgcaaggacgacgccactagaacccaacggtgaacgcgagcaaacgctttgcgttctcttgcaagtacgtca

SEQ ID NO: 13104 - DNA, 412 bp, Setaria italica
  Peptide Sequence Number=SeqID_79078
ccgactcagtcgcactagtctcgacccccaaaccgtcgggatggtgagcgtggtgtacagccagtcggatctgctgcggaaggaggtgttcctcgtggagacgatggacaatgcctccagctccagggagtccatggcgcacctcaaggccgtctacttcctccgaccctctgctgacaacgtccagaagctccgcaggcacctcgccatgccgcgcttcgccgagtaccacctctgtgcgtgaccaatcactgatttgctatggaatttggtgcagtgggattttccttattcatttggttcttttacggtttgtgccttcgcagtcttctccaatatattgaagattccgcagattcagatactagctgattctgatgagcaggaggttgttcagcaagttcaggagttc

SEQ ID NO: 13105 - DNA, 489 bp, Setaria italica
  Peptide Sequence Number=SeqID_79079
cctgaatatcgaaagacacatggaaatgtaacaaaacatgtcgccttggtgagcgagatgagcagaatcgtggaggaaaggaagcttatgctagtttcacagacagagcaagagctagcatgtactagtggacaagcagcagcctttgaggcttcaaaaaattggtcgcaagctttctgagttcattagcttgagttgattttccgtaaaagctgtcacttccttgctaaacagtgaaagtgtatctgatattgaccgcttacgactagtaatgctctatgctttgcggtatgaaaaagagagttccgttcagctgatgcagcttttcaacaaactggcttcttgttctgccaaatacaagtctgggcttgttcaattcctccttaagcaggcaggtgttgataagagaacaggtgacttgtatgggaaccgcgatctattaaatattgctcgcaacatggctcgtgggcttaagggagtcgaaatggg

SEQ ID NO: 13106 - DNA, 2305 bp, Setaria italica
  Peptide Sequence Number=SeqID_79080
gttggatacaggggcgctaagttacatcgtgacttgctgaactgaatccgcctccacctccaccggatcccgccgccgccggtgctcctctcgtcgcgcgctgctccctccaccggaccccggcactgccccgagctcctcgatccgcccgctgccagctccctccaccggattccactgccgcctgagctcctccgccgagcgcaaaatttataccaaattcgaagaagaaccagccgccgcagcaacaatggtgctgatccctctcgtccgcgactacatcgaccgcatgctccacgacatcccgggaatgaaggtcctcgtcctcgacccccaaaccgtcgggatggtgagcgtggtgtacagccagtcggatctgctgcggaaggaggtgttcctcgtggagacgatggacaatgcctccagctccagggagtccatggcgcacctcaaggccgtctacttcctccgaccctctgctgacaacgtccagaagctccgcaggcacctcgccatgccgcgcttcgccgagtaccacctcttcttctccaatatattgaagattccgcagattcagatactagctgattctgatgagcaggaggttgttcagcaagttcaggagttctatgctgatttttgtgcgattgacccataccatttcactctcaacatacaaaataaccacatgtacatgcttcccacggtggtcgaccctccaggcatgcagagtttttgtgatcgagctgttgatggcattgcttctgtcttcttggctctcaagcgccgccctgtcattagatatcagaggacatcagatgttgcaaaaaggatcgcacaagaaactgcgagattgatgtatgagcaggagagtggcctgtttgattttagacgaacagaaaactcttcgttgttgttggtgattgacaggagggatgatcctgttacgcctctacttaaccaatggacataccaggcaatggttcatgagcttattggaatcgagaacaacaaagtggatcttaggggatttgccaatgtacctaaagaccagcaggaggtcgttctatcatcggttcaagatgatttttttagagctaacatgtttgagaactttggggaccttggtatgaacatcaaaagaatggtagatgactttcagcatctttcgaagagcagccttaatcttcagagtataggtgacatggcaaaatttgtgagcaactatcctgaatatcgaaagacacatggaaatgtaacaaaacatgtcgccttggtgagcgagatgagcagaatcgtggaggaaaggaagcttatgctagtttcacagacagagcaagagctagcatgtactagtggacaagcagcagcctttgaggctgtcacttccttgctaaacagtgaaagtgtatctgatattgaccgcttacgactagtaatgctctatgctttgcggtatgaaaaagagagttccgttcagctgatgcagcttttcaacaaactggcttcttgttctgccaaatacaagtctgggcttgttcaattcctccttaagcaggcaggtgttgataagagaacaggtgacttgtatgggaaccgcgatctattaaatattgctcgcaacatggctcgtgggcttaagggagtcgaaaatgtctacacccaacaccagcctcttctcttccaaacgatggaaggaattgtgaaagggcgattgcgagatgtggactatccacttgttggcaaccagttccagcagggcaggcctcaagatgtggtcatattcattgttggaggtacaacttatgaggaagcaagatcagtatccctttataatgcagcaaatcctggagttcgtttcttccttggaggttcggttgttctgaattcaaagagatttcttgaagatctgggggaggcgcaaaggatatcaaaatcgagcactataatatgagctaaatggtgcatcttctgtttgaagagtaccagagtatgataactgacagtgttgactccacttctgcatagaatcaaatttgtgtggtaaattttgtaacatagctctaggtgcatagttcatcgccatatacaaaataagcagatggtttttcctgtttttttcctctttttatgcagttgaagcaattatttgttcatgtcgataccaatgttgattgtgattgtactatttaggttttatacggaactcaaaggtcgtgtatgtaaaaaagttcagttccttggatttcagtttctctccattttacctttgatgaaattgtgtgaggaggttgtttattgttaa

SEQ ID NO: 13107 - DNA, 245 bp, Setaria italica
  Peptide Sequence Number=SeqID_79081
tcctgaaacacgtccacctcttccccttcccctgcctcgcccacggcctcgaccaccacggcccctccctcggccaccaggtgagtgtgcatctacaatttcaataaggccccgtttggttcattggaattgaattccatccttcatcgttatcatattcaaccaaaggcttcacctcatcagcaggcaaaggagattgatatccaacagaggatgtgtccagctccttctttgaaaagagttat

SEQ ID NO: 13108 - DNA, 322 bp, Setaria italica
  Peptide Sequence Number=SeqID_79082
aataagaagacaggctgctagcacagaagttatgcctgctgctgtgccttcaattgttttctttcctgtcttgctccatcttaacacgccatacttgtaccctatcattgatgccatggtatcgcctatccccaagctgagaattccagcgaaaggggcaagcggtcggtcatttaatccagatgacatccatttaggaagtgcacagcccagtaagagtgaaaaatggtcgtatcatctccaatattaagaaaactgcaaatgctgcaccaaatgccaagtccaagaaagcaggctgaaatataactgcaggagagaaatc

SEQ ID NO: 13109 - DNA, 412 bp, Setaria italica
  misc_feature (35)..(35): n is a, c, g, or t
  Peptide Sequence Number=SeqID_79083
ctattcctaccctacgcaccacagtttttttttcngtagtatggccgtagccttaacaatcctcgattcccatttcgccatggtacggtcgcacacactttcatcctttgccctctacttttcttttccataaggtcccgtttggatcattggaattgaattccatcctaataatcataatttagacacaaattaattaagctaatataattgtatgtagaatatatttgtatattattgttggccatataggagagatacttatgtgctgcacttctgctatagggaagcgagtcgaagagtgtgctataagttgcacattagaaacatagcatgaggatctatagaatcaatttccatcacccacccccatgaatttaagaatctaaactttggaaggttgtggaatgcc

SEQ ID NO: 13110 - DNA, 377 bp, Setaria italica
  Peptide Sequence Number=SeqID_79084
aagcacaggacgcccaactttattcattctcgatatctccactagaacagcacgccatttttccatttgttgctctaaaaacaacatctgagtcatccttccgtatcattggcttgtttgttggaacaacagtaacttttagtttatatatgctctcaaactcctggctctctgtagctgcagttccagtcatgccacatagtttgggaaactgaagaaagaagttttggtaacttattgatgccagagttattgtttcattttgtatagttacaccttcttttgcttcaattacatagttcgtagcaaggaagtgcttattgtggatgagttcactggcagagttatggtgggcaggcgatggagtgatggtctcc

SEQ ID NO: 13111 - DNA, 424 bp, Setaria italica
  Peptide Sequence Number=SeqID_79085
taggtacgtaacccccggttaagtcgaaggagagcgggaacgggaacgagaccgcccataataagaagagcggcgaccttcatgaccagagtagcccctgacagaatcagtcattaaaatgagaacataaataggaaatgaggaagaaaattaactgcaataaaagaaaaccacacctgactctagccctgctacgcatttcttctggcctttttcgtgactcagcagcaagaacaacagttatctcccgaccgaagaaacctggcgattcatgtgatactgggcctcagaggcatcataagggtcaacaaactccacaaatgcaaatcctcgaggctccccactataataatccttttgaaaggtttggtcctgtccgggatgtctacattccaaaggattattatagtggggagcctcagag

SEQ ID NO: 13112 - DNA, 469 bp, Setaria italica
  Peptide Sequence Number=SeqID_79086
ctcccacggccacggcctcgaccacgacctcgggtcggagcaggaacaggtgcctcgtcgtaatagccaccatcctgttggtaatcaggtcttgaccattgtagcctcctctcctgccacggcccctaaaacctctccctcttccacggggatatccgttgtccctattattactcaggggcatgatcatcctccccccaaccaccatcagcatattcattgtatccatttccacgtccacctcttccccttcccctgcctcgcccacggcctcgaccaccacggcccctccctcggccaccaggtgagtgtgcatctacaatttcaataaggccccgtttggttcattggaattgaattccatcctaataatcataatttagacacaaattaattaagctaatataattgtatgtggaatatagttgtatattatagttggtgatatgggagagatacttgtatgctg

SEQ ID NO: 13113 - DNA, 476 bp, Setaria italica
  misc_feature (320)..(320): n is a, c, g, or t
  Peptide Sequence Number=SeqID_79087
gtaatggagacagttctcttctggaaagatagatggttggagggaaagaccttggctgaaatagctccaaatctgttccagaatattcctaaggccccgtttggatcattggaattgaattccatcctaataatcataatttagacacaaattaattaagctaatataattgtatgtggaatatagttgtatattatagttggtgatatgggagagatacttgtatgctgcacttctactatagagaagcgagtctaagagcgtgctataagaattgaattccattctaataactataatctatagaatcaatttccatntccacccatgaatttaagataggcttatatctaaactttggaaagttgtggaatgccacattccaacataaattagcctactccattagatagattccaattcctaacaataagaatctcagaatcacgatgatcagtgaaggcgttcataaactg

SEQ ID NO: 13114 - DNA, 531 bp, Setaria italica
  Peptide Sequence Number=SeqID_79088
ggcgcctgggaggagacgcgcgatgtgcctcctttctccttggagaagcagagtagtcatctcggcgtcttggagcaggggagtacgatcttgaccgagggcgaccccggtagcgaggagagcgggaacgggaacgagaccgccctatatgaaagatgagagactatcagtaatttggtacttcaaaggaatttgcagacttgaattttcacaaagttcatcgcaaactgaagacaatcctgagatgctattctcagatttaaaggtatttaagcttatgcatgcatggtggaaacaaactgagctcatacatcatcataagcagcaatggatctagaaatttatgggtaggatgcaaacatattggtcctctggtttacagtgatgtttgataggcacttggtagtggtcatgattgtaccagaagagtaacgagcaaaatatataaacgatatgatgctatattaatgagatgcacaaaaaaaaggtgtaagatgggtaaataaaaccaataattagtcccaaccaatc

SEQ ID NO: 13115 - DNA, 563 bp, Setaria italica
  Peptide Sequence Number=SeqID_79089
aaggtggaactgaaatttccgacggagttccagggcacagtaactggtgacatgaacaagtgagtgctttgttccaacaagctatgcatctatggcaaatcatggccatcacatcattcattagtattctttttattcttaagaaacacatctatttctctacagtttccctagggccccgtttggatcattggaatttaattccatcctaataatcataatttagacacaaattaattaaactaatataattgtatgtggaatatagttgtatattatagttggtgatatgggagagatacttgtatgctgcacttctactatagagaagcgagtccaagagcgtgctataagaattgaattccatctaataaccataatctatagaatcaatttccatctcccaccccatgaatttaagataggcttatatctaaactttggaaagttgtggaatgccacattccaacataaattagcctactccattaaatagattccaattccttcaaaatgaaggaacccaaacgggaccttactaaattttggcaagcagacaacga

SEQ ID NO: 13116 - DNA, 420 bp, Setaria italica
  Peptide Sequence Number=SeqID_79090
ggcgatacatttacagatggaacagtgaaatatactatgacttcaatgaatgtccctgagcctgtgatgtccttggcagtttcgcctatatctaaagattctggaggacaattttctaaagctcttaatcgcttccaaaaggaggatcctactttccgtgtgggtttggatccggagagtggccagacaattatttcagggatgggtgagttgcatttggatatatatgttgaacgtattaagagagagtacaaggtggatgcgaaggtagggaaacctcgtgtaaacttcagggaaaccatcacccagcgcgctgaatttgattacttgcacaaaaagcaatctggtggtcaaggtcaaataataggtacgaagtttagtgggtacattgaacctcttccatcaggttctgatggtaaa

SEQ ID NO: 13117 - DNA, 460 bp, Setaria italica
  Peptide Sequence Number=SeqID_79091
aacaaaagtaccaacaaggtgtataattgtaatttatcaattaggtcccgtttggatcattggaattgaattccattctaataatcataatttagatacaaattaattaagctaatataattgtatgtggaatatatttgtatattattgttggcgatatgggagaggtacttatgtgctgcatttctatatagggaagcgagttcaagagcgtgctataagaattgaattccattctaataatcataatctatagaatcaatttccatctcccaccccatgaatttaagataggcttatatgtaaactttggaaagttgtggaatgccatgttccaagataaattagccttactctattaagtagattccaattccttcaaatgaaggatccaaaacgggccttaaggtagatcaggtaaccaagaaaagtacacattagttagattttatagcaggtt

SEQ ID NO: 13118 - DNA, 506 bp, Setaria italica
  Peptide Sequence Number=SeqID_79092
cgtttttaatcatatcctatccagctcttaaaccacgcattcataatcagtcagcttttgttaatctcttttctcaaaaacactaaatgcctgcagtaagccattcctcttaggccccgtttggatcattggaattgaattccatcctaataatcataatttagacacaaattaattaagctaatataattgtatgtggaatatagttgtatattatagttggtgatatgggagagatacttgtatgctgcacttctactatagagaagcgagtctaagagcgtgctataagaattgaattccattctaataaccataatctatagaatcaatttccatctcccaccccatgaatttaagataggcttatatctaaactttggaaagttgtggaatgccacattccaacataaattagcctactccattaaatagattccaattccttggaaccaaacggggcctaaaatcaattacaaggctatacaaaattagacaaaggttaa

SEQ ID NO: 13119 - DNA, 1284 bp, Setaria italica
  Peptide Sequence Number=SeqID_79093
tttgtccaatttctttttggacccccttattttgggggtttttcctcttcttggtttttcaccactggtttgaactgataaactgaataaataacatttcttcggatttgagccatcatgtctaagaaaagattgtatccctcaagtttgtactcaataaggggatctcgttgggcataaccattttcagcatcatctctactggcaggggaataggatctccgcttcttatcttcatcaagctcctttggcgggcgcctgggaggagacgcgcgatgtgcctcctttctccttggagaagcagagtagtcatctcggcgtcttggagcaggggagtacgatcttgaccgagggcgaccccggtagcgaggagagcggaacgggaacgagaccgcccataataagaagagcggcgaccttcatgaccagagtagcccctgactctagccctgctacgcatttcttctggcctttttcgtgactcagcagcaagaacaacagttatctcccgaccgaagaaaacctggcgattcatgtgatactgggcctcagaggcatcataagggtcaacaaactccacaaatgcaaatcctcgaggctccctgcatacattgattttattagacagtaggataagggaaattcatgaaaatgacaaacaaatatgagggggtgcaaagtgttcacaatggtgtcttccggccgtgttaccatcaaaaatttagtgtgccctctatggttttcagtgaagcacggtcaataacttactaacaattccatcaaaagggaagcacgtgttgcaaaaagcagttagacgtccaggctctagtgtccaaatttcttgtatacaactacatatggtgatcctcataaagagcatcttcataaaatcattctcttcaagttccccaatgtttgaaaagtcacaaaagtacttgaaatcaacttgacttgcttttatcttctcatatgtacccagccagtacatatctcttatcttcacttcaggaaattaattttctcaatgtatcaaatcttgtcttcatagaagaacttcatcggacaagactctatcttgccaagcaaatcaattgttagtaaggctaaaaggcattctttgataaaagaggagcttgtatttacttcaaggtttaaaaccaacacaaccctgggaatcatttgggggaaaaaaggtattcacacagggcaaggatgaatggatacacaggataaatttatgcattatatttgatatataatagaccgatggcatacatcagcaag

SEQ ID NO: 13120 - DNA, 1248 bp, Setaria italica
  Peptide Sequence Number=SeqID_79094
ttttttttcaacaaggaacaagacttcgtttttatattaaaaaaattgaaagaatgcactgctctaaacctttacgaaactacaattagtttacgacatctactgcaacgaaggaagcactgtaaagacgctaccctacaagcctagtcaaatatcaaaacctggctgcattccgacagagaatgtcaagcttataccaagtataatgttaaccgacaacacatgatacatcttcatatttggagcaggcatccaacaaacaaccagtcccggactggtagcaaacagcttaagcacctgccgcagcagcgtgcatcacaccgttcgcgttgccaccacgtcctcggcctctggatgggcctctcccacggccacggcctcgaccacgacctcgggtcggagcaggaacaggtgcctcgtcgtaatagccaccatcctgttggtaatcaggctgaccattgtagcctcctctcctgccacggcccctaaaacctctccctcttccacggggatatccgttgcccatatactcaggggcatgatcatcctccccccaaccaccatcagcatattcattgtatccatttccacgtccacctcttccccttcccctgcctcgcccacggcctcgaccaccacggcccctccctcggccaccaggtgagtgtgcatcttcatcgttatcatattcaaccaaaggcttcacctcatcagcaggcaaaggagattgatatccaacagaggatgtgtccagctccttctttgaaagagttatagtgatcatagagacatgccttgttgtctcaagcggaagtaggccttcctccaatggctcccacatatcagtaatgtcagtagatccagtggtggtattctgatggagaccaacgatcctcctcttgatcaattctgcaatcatgacagttttgttgatagcccttcccatggccttgaatacaacctcatcagaacctttgtcctggagcaaggcggtggcgtaggtgatgtagttgcgcatcctcccctgcgtggtgatgcggatctcattctccttgatgggcgcctcctccctcggcttctccaccctctggtaccggtccatccttctcccgcttctctctagctgcgcggcggttagggcccgggcaccggcggttccgtccttggctcgctggcgtcgatggcggtggtgaaggtaaccgccgggtggggtgggaggagaaggcctttatacggccgcctccgttc

SEQ ID NO: 13121 - DNA, 1180 bp, Setaria italica
  Peptide Sequence Number=SeqID_79095
ttaaaaataaacgaacttaaccaaaaaaggaaggaatcctactttccgtgtgggtttggatccggagagtggccagggatgggtgagttgcatttggatatatatgttgaacgtattaagagagagtacaaggtggatgcgaaggtagggaaacctcgtgtaaacttcagggaaaccatcacccagcgcgctgaatttgattacttgcacaaaaagcaatctggtggtcaaggtcaatatggtcgagtttgtgggtacattgaacctcttccatcaggttctgatggtaaatttgaatttgacaacatgattattggacaagcaattccttcaaactttataccagcaatagagaagggtttcagggaagcttgcaattcgggttcattgattgggcatcctgttgaaaatattagaatcgtactgactgatggggcttcacatcaagtggattccagtgaacttgcttttaagctagctgctatctatgcttttagacagtgttacactgctgccaaacctgtaatattagaacctgtgatgaaggtggaactgaaatttccgacggagttccagggcacagtaactggtgacatgaacaagagaaaagggatcattgttggaaatgagcaggaaggtgatgacacaattgtagtttgccatgttcctttaaacaatatgtttggatatgcaacagcgattcgatcagtgactcaggggaaaggagaatttacaatggagtatctagagcacaatattgtctcgcaagatgtacagatgcaattagtgaattcatacaaggcggccaagggcacagagtgatttgattctactggattgcaaaggaacaaattttgtttacagtttatgttaactcgaattctggggtcctttggacatcactaatagtaggcaatgattcatactgcatggtttgaagcaaaaatacaagtatgctgcaataatctgcaatccctctatacaattgtacaaacatattagcaaatgttggaatttgctcatattttgtttgtaatgattaccatgtagtgcactctttttcgaggcagagaaaacaaaatctagtgctgaacacctttgagttgtcatgctaccattagttttcacagatggtcttgtacaaaatattgtttggttatatagtggtgtagcctagtag

SEQ ID NO: 13122 - DNA, 1635 bp, Setaria italica
  misc_feature (1)..(30): n is a, c, g, or t
  misc_feature (1610)..(1610): n is a, c, g, or t
  Peptide Sequence Number=SeqID_79096
nnnnnnnnnnnnnnnnnnnnnnnnnnnnnnttttttttttttttttttttagttatggaggaacaacatgtatattccaatgacaggttcagataatactttatgtacattcaactatgccaaaatgccatctgctcaaggactcatttgtgcttttctacttctgttcctagttcctatgcctatatgcttcaaccaagagcaggacttctgaacttctgaatacaggattacagataatgtgattagttggatcaggcacttgacgcaccgaggagaccaagcgactaatgtagacataacgtattgcactatatactagcatatattagcaaacaaaaagaggacctcaagatcagtctgatgtacagaaggttacttctatagacatagaagactgtagaacacgagaggtatgaaagcattgtcgagctgtgctgtatatgcctccaataatccgctcaatgttacagctatcaaaagcgataaccaattctgcgaaagaatgtacccgctggaagctaagagtgacaccagaatagagcaggctgctagcacagaagttatgcctgctgctgtgccttcaattgttttctttcctgtcttgctccatcttaacacgccatacttgtaccctatcattgatgccatggtatcgcctatccccaagctgagaattccagcgaaaggggcaagcggtcggtcatttaatccagatgacatccatttaggaagtgcacagcccagtaagagtgaaaaatggctaacaataagaatctcagaatcacgatgatcagtgaaggcgttcataaactgatgcacaacacgcccaagagggtatatttcccaaattcgtatcatctccaatattaagaaaactgcaaatgctgcaccaaatgccaagtccaagaaagcaggctgaaatataactgcaggagagaaaatcagaacagcgacaagatgataatacttgcgcaaaagaatcctctctgttttgctctgctttgatatgctgtagaaccttctaactgatacacatatcacacatatccagtatgcacataaagcaagtcgttcatgtgaatcagtgaacatgtagttaataatccaaacaaaaggatgcactttaagaccttgaacaaggtgtgtccatgatggtactaaaaacattaacaccaccaacaacaaggtatagaatacagcagaaccaattctttttgtgtatgttccacagctgcttctgtccgttgcttccccttacagtaatcccaaaactgaagagaacttttgtatagcaatggaagtagaaaaaggccaagtaaaatcccctgaataattgtggtcatatcgcttctagttccaggtgtgtgaatgaatgcttttgatgacatggaaaaatccatctttgaaagtgtatgggccaacatatcaccaaagtaaagaacaagaccactggacaccagaagcgcctcccctgaaatatgcaacagtttaaacaatgaggggggaaagaaaggagaaaatctccaagtcaaggtaattgagcaatatgctgatagataacagaaactaaaaagatcacacaaggtaacagaacttgcataaactanaagatatataagttataaatttctt

SEQ ID NO: 13123 - DNA, 1649 bp, Setaria italica
  Peptide Sequence Number=SeqID_79097
tagccatggcccggcgttatgcctcctatctcctctcctccttccgccctttctccctcctcctccagccgcccctcgctgatgccccttcgccggcggccgcggccgcggtggcgtcggctcggcgggcgctgtcgtcggcgtcggccctgcgggcgcgggacgagaaggacgcggcgcggtggcgggagtcgatggaccggatgcggaacatcggcatctccgcgcacatcgactccgggaagacgacgctgacagagcgggtcctctactacaccggccggatccacgagatccacgaggtgcgcgggcgcgacggtgttggcgccaagatggattccatggacctcgagcgcgaaaaggggatcaccatccagtccgctgccacctactgcacctggaaggggtaccaggttaatattattgatactccaggtcacgtggatttcaccattgaggttgaaagggcactccgtgttcttgatggtgctatacttgtgctatgtagtgttggtggtgtacaaagtcagtcgatcactgtcgatcggcaaatgagaagatatgaaattccaagggttgcgttcattaacaagttggaccgtatgggagctgatccatggaaggttcttaaccaggcacgttccaagctccggcaccacaatgctgctgtacaagtacccataggattagaagaggagtttgagggccttgtcgatcttgtagacatgaaggcttataagttcgagggttctagtggccagaatgttactgcatatgatgtcccatcgaacatggcagatttagtcactgagaagcgacgtgaacttattgaagttgtttccgaagtagacgatcagcttgctgaagcttttctcaatgatgagccaataacagctcatcagcttaaggcggctattcgaagagcaacagtggcacggaagttcataccagtttacatgggaagtgcattcaaaaataagggtgttcaaccacttcttgatggcgtgatggactatctaccatgcccattggaggttgacaactacgcccttgatcaaaacaaatcggaagagaaggtattattggctggaactccagctgagccacttgtcgcattagcatttaagctagaggaaggtcgttttggtcagctgacatatctaagaatctatgatggtgtgatacggaagggtgatttcatatacaatgtcaatacagggaagaaaatcaaagttcctcgcttggtaaggatgcattccaatgagatggaggatattcaagaagcacatgctggccaaattgttgctgtttttggtgttgattgtgcatcaggcgatacatttacagatggaacagtgaaatatactatgacttcaatgaatgtccctgagcctgtgatgtccttggcagtttcgcctatatctaaagattctggaggacaattttctaaagctcttaatcgcttccaaaaggaggatcctactttccgtgtgggtttggatccggagagtggccagggatgggtgagttgcatttggatatatatgttgaacgtattaagagagagtacaaggtggattgtcgtaaggttagggtaaaccttcgttgttaaactttctagggtaaacctattcttacccttagttctt

SEQ ID NO: 13124 - DNA, 1311 bp, Setaria italica
  misc_feature (1)..(75): n is a, c, g, or t
  Peptide Sequence Number=SeqID_79098
nnnnnnnnnnnnnnnnnnnnnnnnnnnnnnnnnnnnnnnnnnnnnnnnnnnnnnnnnnnnnnnnnnnnnnnnnnngtttgtttgcaacgtagatgctcaaggtctctggaaacgggccgtggcccagcacgcaagcaaagcatcatgctacaagttcagggtttcaacagactgaaacaagcttccaacaccgagcgtacacgggacaggggttcttcgcgtcagatgacactagcagcacacactatcagtaagctggacacacactttctagcaatacaacactgccccgaagggctaactaagttcaataagtttggtccagcaaacagagccagtacaatgtaggcacggactgactgcatccatccaatagatgcaaaccagatgatgcgcaatcagtcactgcgggcaggggactcggcggacctggagcgggatccaggaggcgagcctgagtactccttgggagaccttcgatgcggaggggatccatcgctgtcaggtgggggcgacctcttctcataaccattttcagcatcatctctactggcaggggaataggatctccgcttcttatcttcatcaagctcctttggcgggcgcctgggaggagacgcgcgatgtgcctcctttctccttggagaagcagagtagtcatctcggcgtcttggagcaggggagtacgatcttgaccgagggcgaccccggtagcgaggagagcgggaacgggaacgagaccgcccataataagaagagcggcgaccttcatgaccagagtagcccctgactctagccctgctacgcatttcttctggcctttttcgtgactcagcagcaagaacaacagttatctcccgaccgaagaaaacctggcgattcatgtgatactgggcctcagaggcatcataagggtcaacaaactccacaaatgcaaatcctcgaggctccccactataataatcctttggaatgtagacatcccggacaggaccaaacctttcaaaaggaactcgaagatcctccgctctgacacttaatggaatattgcggaccaaaagactcccagaaccctccttccgccctcctccatatcccctcctaggaggggggcttcttcctctgccaccatatcccctcctagggggactgcgatacggggggctgtacctcctcatagttgtcaggtgcgtccggtgagagccggggagccgccgccgccgcggcggcggagaacgagagcgagagccgagaggtggtgggcgcaagcgatgtcgcgcgatgcgagtggaggaagaggaaagctcggag

SEQ ID NO: 13125 - DNA, 2334 bp, Setaria italica
  Peptide Sequence Number=SeqID_79099
ttaaccctgcaaaaacttgtaaatgaggcctatgtgatttccaccaccaagaacggatcacaacattatacaaaaccgtgggtacaggaacaaaaactcttgctacagcaaattctatttctgtacaactaataaaatgtgattgttatccatactatgaatagtatgcttggttgcagtgcaaaatttgccagcaggactcacaattcaagtaaaaagttacatactaagctgtgtcccagtagaagtctccacatctcactcatcatgaattgctcctcacatttctcatgcactgaaatgtcaactatcacatacagtgatacagtgcaagagaggatatacacatgggagattgccaccgctaaaatacagctttgcgcaaggcaacatttctcacaggtggatcatgatgccgcttgggcagcaccaagtttgttagcacctttgtccaatttctttttggaccccttattttggggtttttcctcttcttggtttttcaccactggtttgaactgataaactgaataaataacatttcttcggatttgagccatcatgtctaagaaaagattgtatccctcaagtttgtactcaataaggggatctcgttgggcataaccccttaagccaacagcttgttgcacaaacttaagtgcctgcaggtgttctttccagagcctatcaatattgcttagaattaggaaccgctcagcttctttcatcaagccaggagcttgcttctccacaatttcagctttttggaagtacgcttcacgtcctcgcttacgaagatactcctgtaaatcctcatagcttgaacttttgctctccaacaattctggtgtcaagtcatccaaaagatagcaatactgttgtagcttagctatgagcttgctgaggtcccaattttcctttggagtatcacggcctatgtttgcatctaatatgtcgtccattgttaattcagcatattccacaattagcgactcaagactgtcagatgctagtgcacgccttctttctgcatatacacgatctctctggctattcaacacctcatcatactcaaataattgcttcctgatgtcaaaaaagtagttctcaactttcctctgagcttcatctagggcccttgttaacatttttgattcaataggaagatcctcaactctgaatgcttgcatcagaccctgtatcctgtcacctccaaagatccggaagatattatcctcaagactaagaaagaagcgagagcttccaggatccccttgcctgccacttcgaccacgaagctgattgtcaattctgcgtgattcatggcgctctgtccctactacatgaagcccacctgctgtaatgaccttcttcttttcctcctctgtgtaaactttatattcatctgatatcttcataaatgcatttctcaaattcgctattacatcatctcgtgttggtcccttctcacatgagtaggacaaccgctcttctgcttccagctcagttaacgatttctctccccattctttgacagccacttcaactgcatctttgacagatgatgatgtttcttttgaaagttcgcatgggaacaagctttcgtttgtcttccatgtctttcttggtggcatctgcttttttgatacaatgacaccatccattggattgacgactcttggcataaggatctcacgcaacttcaacctggccatgaattctgcattgccaccaaggataatatcagttccacgtcctgccatgttggtggcaattgtcacagcaccaaggcgtccactctgagcgacaatctctgcctccctctcaacattctctggctttgcattcaggacctcatgaggaatcccagcttcacgcaattgttctgataaagattcactttgctcaacactagtggtaccaacaagcacaggacgcccaactttattcattctcgatatctccactagaacagcacgccattttccatttgttgctctaaaaacaacatctgagtcatccttccgtatcattggcttgtttgttggaacaacagtaacttttagtttatatatgctctcaaactcctggctctctgtagctgcagttccagtcatgccacatagtttgggaaactgaagaaagaagttttggtaacttattgatgccagagttattgtttcattttgtatagttacaccttcttttgcttcaattgcttgatggagaccatcactccatcgcctgcccaccataactctgccagtgaactcatccacaataagcacttccttgctaagaactatgtaattgacatctttaaggaagagctcc

SEQ ID NO: 13126 - DNA, 562 bp, Setaria italica
  Peptide Sequence Number=SeqID_79100
aggggaggacaggcgccgtggccgccgccaccgcaaggataaggaacggcgccaccactgccgaagatgctcgggaaaatggcacgcgtggggaaaaaaggtgcgagtgggcgcgcgagaatggattggggaaggaggtgcgccgcgtatatttacgggaaaattagctccggatgcgggtggacgtaaatttgtgggaggtttaggggatctgttggagcaacttttttttactattttccctcaattaaggttttaagagtagtttaagggagctcttggagttgctcttgctcaggccatggacgtcgaagtgcacagcgacgtcgtccttgccgctcccggcctgcagggcgctttgctggctcgcggcggcctggaaggcggcgtcaaagtctaccagtcccccaaaccctagcggactccagtccaccctccgccgcagcttcctctcccgaatcccccgactcccgaatcgtcgtctccttcagtccttctcccggccgccgccttccccctcccctcccctcatcttctttcttccgccccccccacccccgcc

SEQ ID NO: 13127 - DNA, 867 bp, Setaria italica
  Peptide Sequence Number=SeqID_79101
cggctgtagtcgaggtggcggcggtcgtcggaggcgtaggcctccaggatggcgagcatgatcttggtcatcctgtgcccgacggcggccgccggcttgggctcgccgtcgttggtggagccccggaagttgtagtacttggggacggcagggtcgtgctccaggaaccggtacaggttctggctgccgtcttcgaagtcgttctccctgaagacatggtggatgaagtgctttctcgcgagctcctttcctatctccaccgccttcttcctgctgcactccagatggttcacgatgccgtcgaccatgtcggcgccggagaagcagttcttcacgagcttcaccctgacgaacctgtcctggatcggcagccggtgccgcagcaccctcacgacgcccaccatggcgtcctcggcctcctccccctccttgccgccggcgtcgtcgtcgaacccgtacacgggcatccggggcgccgagtcggggcaccgccggcccgcgaggtcgcgcacgcggcgctcgaactcgccgctgttgcgcagggagttgagcacgacgagcccgcccaggagcttctcgttgaggaagatctggggcacccgggcagcggcgcccgcgcgggaggccagctcggcctcgcgctccgggaacacatccaggttgatctccacgtagggcaggccggactgccggaagaaggcgcgcacggcggcgcagtcgcggcagcccgagcgggagaagaagctcacccggcccttgatgtggccgcccgagaaggagtacccaccgtcgtcgttgctgtcagccagagagatgtcgtcgtcctcggcggcgatcgcgtccttgaggcgcaccgtgaccttcacg

SEQ ID NO: 13128 - DNA, 377 bp, Setaria italica
  Peptide Sequence Number=SeqID_79102
tttttttttttttgttaaattaataaaacttcatttatcggaaaaatagagaaaaatagtgtactttattcatgttgaacagcaatacaatacacaccctgcatgttagaggaaataaaataaaatgcacatcctcactggattgcagaaaatgacttgcctcccactaacaaaaccaagggggcaagttacaaaacaattccctggaggaccagtctgtaatgtccagcctctgcaactacatttttgctggaagcactatatggctttatctctctgaattcacacttgtccgaagaacgaagaacaactgcaaccgttcgctggctaattactctatagcgtggaagcagaaactctgacaggcttacaaaact

SEQ ID NO: 13129 - DNA, 1131 bp, Setaria italica
  Peptide Sequence Number=SeqID_79103
cgagatctccagcacgggagacttatcacaagagggccagcagttttgggagtgtgctgcctgcgaaacagaaggatgatgaactccctttgttctctgatatgcagaaagttgagagggagaacttcttactggaaccatcggaggactttgatgactcaatagcaaaattgagctacttcccggaagtaaaacttggtgttaacattcctgcccgtggagaaagccaggatttgcttaatgtggatggcgataaaaatgattgtgagtggttgttaactcctccagaaactccactttttcgatcattagatgatgaagaagaacaatctgtcactcaggtttctaggggcagagctcagagcaagcccatacagatttcgagatcatccacaatggacaatactcaaagagctagtagaagcagtgcaagcccaagtaggcttagcccatccccacgctctatggcgaggacaagatcatctagttcagcctctcgctctagcccaccacttgatcttcaaccaccaacactgtcgcgaagatcttcaacccctccggttgctaagacatcaacacctcctcgaaggtctccaagtcctgcctcaagaaggatgagtactggttcaagtgtcccaactttgaatggaacaagaggagcttcaccagtgaaacctaatcgcagatcttcttcaccaaagctgcagggatggcaatcaaatgtcccttcggcccttttgacgcaccttcaaaccttcgcacatctctacctgatcatccagtttcccgttcaaggggtggttctccttcgtcttttagtggactagacaagggttcaagaggtagaagacaatcaatgtctcccactccatctaggagagccagttcatctcacagtattgaacgggatcgaatgagctctcacagcaaagcttccgcaacgtcatctggtgaggatgatctggactctatgcagtctgtaccaattagctactctagtagcccagctatgaaaaaaagcttggctgtgatgaagaccagaactattgcatcatcaaagaatctctcaaaaactttcacccctagctctgtcccaaagcggtcatttgactctgcagtctggttgaatgg

SEQ ID NO: 13130 - DNA, 605 bp, Setaria italica
  Peptide Sequence Number=SeqID_79104
atatatgtcggtcattttgctatgcttttccatgttgattcaccatcctctggtcaagctggattcatgcaacctattggttcttcacttccatctagtatcaacatgggatctagatcaagaagtaacacttcatctaatctccgggagctggatcccttaatatttttggatgccttggttgaagtgctatccagtgaaaatcgtcaacatgcaaaagctgccctctctgctttgaatacttttgctgagacattaatctttcttgcacgtatgaagcacactggtatgctaaggggaggtcctagcacccctatgctagtgtctagtccatctttaaatccagtatattcgcctcccccaagtgttcgtgttgctgtatttgaggaactgttgcctcggttattgcattgttgctacagtagtacatggcaagctcagatgggtggtgttatgggtcttggagcattggttggtaaagtttctgtagataccctatgcatctttcaggtcaaagtcgtgcgtggtcttctatttgttctcaagaggcttccagtgcatgcaaacaaaagagcaggagggagacaaaaccatgtcctaaacac

SEQ ID NO: 13131 - DNA, 238 bp, Setaria italica
  Peptide Sequence Number=SeqID_79105
ggagctcgctaaggcatcagtgccagcaaggcagaaggacgccgtcgcccttgtttgctgctctgtgcttgccgtccaccaaaatagccaagctcgccacgtcgaggtgattttgctgtgcttactgctccatgtcaatcaggtcattctcgagacacccaaggtaagggcccaaaagaactgaataatgatgaacctggcacaagcaatttgcactgtcaaacattgagcgacaagg

SEQ ID NO: 13132 - DNA, 1014 bp, Setaria italica
  Peptide Sequence Number=SeqID_79106
ctcgagacaccaaggtgatatgctgtgcttgacggtctatccttctaatgcttgtacttaagtgtttgatgaaatggaccgtcaagcttataaatcattctttcagtctatgatgttgattgccttcgttaccatattctatcttatgctttgatttcgttctcttgatcaggaaatgaagagctgtggttactatgcttgcacatttcttattgcttaactaagacttggtactatgcacagcagtggctaattttgattgcctaatgactgataatgataatatatgtttggatcaatatactttgctaatcttccaaatgctctgaaactcctcagaacttgaaagaattgtcgttcatggtagttttgtctaattataggcctcatttcatctatatgcttgtgacattctcccatgcttttgcttgatttcttatgtaaacacgattcttttcttgtcaatattgtttctggtaggtaagggcccaaaagaactgaataatgatgaacctggcacaagcaatttgcactgtcaaacattgagcgacagaagggagcggtggtaacaagaagggatgaggaatggacagtctcagtcagagcaggaagggccggtgggaacaagctaaagcagagttgttcttcggcgacaaagttgagaaggttacattgtagatttacttgtttatgaattttgaggacgaaggtattttctactcctatgtacaaacactgagctcccgtgctgtggagggtcagccaccgcagggtgtgagtactcgtggtatagttataattgtacctattttctactatgtaactaaggatcttacatgtctatgcatcgaaagatattaattgatatcccatggctccagcgagtgcaaaaaggatgcttgccctttctgtcacctgacaccaaaataataagcaattgcaatgacatttaatattgtttgcaccataattacatgaatctaaatacttatgacaacgttaaaaaaaaaaaag

SEQ ID NO: 13133 - DNA, 604 bp, Setaria italica
  Peptide Sequence Number=SeqID_79107
cccaattatttgatgtgacatgaattttagtccagtcgggactaaagatcccaacacccctcgtaaagtttcaaaagcacgtgggtcgcagaccaaaaatagcaaagagagcttccacctttcgagtgaccttaagaatgttggcgtaggggggttcccgtgggcatggtggcactcgtcgaagatgaggagcgcgatgtcccgcagcgtgaagaagcagtggcggagatcgtcgaggaggatctgcggcgtcatgacgagaacctcggccccgtcgacggcgcggcgccaggtgtcggcgttccagtagtcgaccccccatctcgccgtagaattgttcgacgcggaggtccgtgtggtgctcgatcacccgcgcctgctggcccacgagcacgacggtggggacgaggaagacggcgaagcagggcggcggggcggagcggatgcggtgcgcgtaggcgcggaggagcagcaccgcgatgagcgtcttcccggcgcccgtttcgaggaacgccaccgtgttcccggccaccgcgcgctccagcgcctccagctggtaccctctcgccagcgtctctgggtcgcagggcggcggcggatcctc

SEQ ID NO: 13134 - DNA, 2451 bp, Setaria italica
  Peptide Sequence Number=SeqID_79108
gttctgtaaaaaacaatgatgcgtagcggaacagaatgacagaaaaaaagaaggtatgcctgccatcgcctcgcccccagaagaatcgaccacaaccacgaaccaccaggcaacattaactattttagtgtcaaacaataaccaatataaagaacctcaacacccacgtaccctaaatcctcagttagtagggaccttcctgtttggctcgaagacatacttgatcaaagaatccttgatggatagcagctcagggaactcagccttcagtttcgatgcgtccatctcgttgttgctcctaggtgcaactatgaccttggcctgctcttctagtgtgaagttggtccacttgaagtcaggattgatgtactttttgtacatctccagaatctcgttgtggctgacaacgccagggttggtgaagttccatatgcccctgcagtcccgcttcgccatctcgatggagataggcagaagctcatccaaaatcgtcatgctgttgggaatgttcaccaccttgtcgtaacgagctatctttgtgatgaagttacgagggttgcctaggtctgatgatataggcatcctcaccctaagagtacagacattatcatagtccttcaatagctcttcaaccattgctttagttttggaataaaaggagcctgtaaagttgggtgtgtcttcctctttaaagccgattccagacccttcagggtgcttagcatcatactcaaatatacagcctgtagcataattaatcatgagcaaaccctgctcacgacaaacatcagcaagattcaaggtgcctacaacattggtgcggatagtgtcctgtttgtgcgtctcacaccagtcaacatttggtctcccagtgactccagcagcattgaaaacatgagttggtttcacatttctaatgtcctccaaaagctgagaacgctcctccaagcgtcctttcccgtactcatatggtatcccttgcttctcacaaatcttcccaaggagtccaccaatccatccagtcctaccatagattaagaacttgtaggaaggcttttgaggggcatcggtggtgctctgggtactggctgcaggagctgttgtgctagcctccactggtgatgaagccagagacttgatttcctcagtccagttatgtctttcatcaacaccaggagtcatcaacatccttggatgagggagcaaagcaccagtgacatctccccagtaatcaggattggttgtgtaccactcaattgttttcttcaagccctcttcccatggtgtgcgctctgcccaccccaatttcttcagcttctgatcatccaagaagtacctctggtcattgaagggcctgttctcaacaaacctgatgactttctcagtatccaagccaaagagcttgcatatgtccttggccacatcaatcaccctcctctccttcacagtaccaatattatacacatgtccaacctcccctttgtgaagaaccacctcaaaagcttcagccacatcctcacagtagaggtagctcctgacattggaaccatctccatgaattggaaggggcagacctctcatggccaaaagaatgaatttgggaatgagtttctcagggaactggtttggcccatacacattgttcccccgagtggtaatcacaggaagaccataagacctaccataagccatcacaagcatttcagccccagcttttgttgccgaatatggatttgttggaagcagctgtgaggcctcatggttgccaaccacagcatcctcttcggtttctccatacacctcatcagtactgacatgaataaaccttctgatctgaccagtaaccttgcaagcctcaagaaggacgtgggtaccatatatgttgttctttgtgaactcaaaggaattgccaaaagaattatccacatgtgtctgagcagcaaagtgcatgatggtgtcaatcgactctgtgatcagaaggtagttcaccagatcagcacttgcaatgtcacccttgacaaacttgaaatttggtgaaggccgcgaagggttgaggttctttaggttggagcagtagtcaagcttgtcgaggacaacaatcttgtagtgtgggtagttcctaaccaggcggtttgccacatgcgatgcaatgaaaccagcagcgccggttatgaggatgttcttgggctcgtaggtcgccatctttgtctgctgatttctaacgagaagcgggtcgccgagatccgtgagccccgcggtggcggcagaaccgaaccgagccgagccggggagcgagcctgtgtcggagccgaagggacggtcgcgcgctggcggcgatgcccgcacgcgcgtcccggtgcggtgggcggctgcggcggggacgaagcgaacgcggccggggcgggcgatgatgccgcctgccgcgacgagcaacgggatggatcgagaggg

SEQ ID NO: 13135 - DNA, 624 bp, Setaria italica
  Peptide Sequence Number=SeqID_79109
gtcgctgctttgtgaatgactgtccatcaaattgggctgattggttatcttctgcagaatactagtataacacaagtacacattttgctattggaagatcccctttgaagctctgtatggataccactaaagcactttgggatatctgcggtcgaggttgttcaagttcctaagttgtcaaattggttgcagaatcgacaggtaatgaacaatctcatccaccagcatctacttcgagctaaatagcgtatgaaaaggcaggcagacaagaatcgatctgagcgtcattttgccgtgggcgatatggtttttctgaagctccaaccatatgtctaatcttccttagcacctcgctttaatatgaagctggcattcaagtattttggcccatataagattgttgctaaagtgggttgtgtagcatacaaattggaccttctagctcaatctattgcccatccagtttttaatgtatctcaatcgaagttggcgaatataccaacttctgaggtaatagctccactccctgatgctattgacatgcctcgtgtacctgagaaaatcttgcagaggaggtcgataactgtcaatactcacccaatggttcaaagtttttattaaaaa

SEQ ID NO: 13136 - DNA, 280 bp, Setaria italica
  Peptide Sequence Number=SeqID_79110
ccacacgcattcccaatcccaatcccaaccaatctgcctcgacgaatttggattgcttcccgcccgagccttccaatcgctcgcacgcttccgttcgcttcgcattctgcgcgcgcttaacctagtatttgatccgatttgatttaatttgattctgccgcgtggtccgattccgaggaggaggcgaggggagtggtggttgcgcggccatggcggcctcgtcctcggcggcggcagcggcggctctggacgcctggtgggcgatgtgaacaactcgccg

SEQ ID NO: 13137 - DNA, 856 bp, Setaria italica
  Peptide Sequence Number=SeqID_79111
gcaagatcaacaaaaatggaaaataatggagttaactgtccaatgtgaaggcttcttcaaaggatggagctgagctcaaagaaattagaaagctagggaagctgaggaagcttggtgtggttatccagaacaagaaagctcacctcacgaatctgctttgggcccttagcgacttgaaagaatgcatccagtctctttctgtcactatacttggaaccagaactgagggcactgccaccgaccaaaagctactagaaccacccttgtacaattacttgatacgacccccaaggttcttgagagcctaagcattgacggtgtcacagatattgtgcagcttctcacattgtttgctaaaggtagcgatgaactttccaaggtaactctgagtcgcaccttgttggaaaagaataatctgatccacatcgccatacttccaaattacaatgcctcaggctccgacacgatgcttacaaggagagcagtctcaccttcaagaaggaagatttcccacatctcaagaattttctcgttgagtgtctccacaagactggcatgatcaaatttaaaaatggagcaactccggagcttgagaagattgtgctattccgcaccaacataaagcatctttgtggcatcggtgcccttccaaaactgaaggaaactcgaattgaagggcaacgagttcctggttttattacctgaagatgggacaccttctgctgtgacagttgaagatgggacagcttctgctgagccagttaaacatgaagatgggacagcttatgctgaggcaattaccaggagcacgctcactttcagggaggaagaattcaaacatctcaagtacttcctt

SEQ ID NO: 13138 - DNA, 824 bp, Setaria italica
  Peptide Sequence Number=SeqID_79112
aggctgctatactatacatgctcagcatttggacacaggttggttcactagttcactgtcatggagcacaacactatgcacctgaccaacacggtagtacatgctcagcatttggacttggggcgcttcactatcatgacggtgcagtgcgtgtggtgcgcgcagtagtcgctcacgctccccaggaaagccctcttgatggcgccgtagccatggctgccgacgacgagcagatcggcgtggtgcttctcggccgcgttgcagagcacgtacctgggctccccttcgaccacctcgatcagagcgtgcaccgagttggcgatgcagacttggcgcgccctgccgacgacggcctcggccatcttgcgcaggtcggcctccacgcacctcatcgcctcgccggctcctggtccgccgaagctgacgacggaggacgccgacggcttggcgtggacgatgacgagctcggcgccgcccgccacgccgcccgccacgtggcgcaccgtccactcgagcgcgtagtagctgtgctcgctgtcgtccacaccgaccaccaccaccgtcttcctctgctgctgctgctgcttctggtgctccaccgaaccatccactgccgccgccggcggtggcggcggcgcaggatgagcaggctgagcagtcttggcctccgccatgtacgcgaaagaaccgaacagggctatcgatcgatcgagtcgaaacgagatcggttgcactggacacttgtgttagctaatgtgagagccgcgccaggtgagcagagacgaatacaagaagacgtagacaaccgaagttaggacgaatta

SEQ ID NO: 13139 - DNA, 276 bp, Setaria italica
  Peptide Sequence Number=SeqID_79113
cggcggagggccggctcctgctcggcgccgacgtccgcgccgggcatgaggctcagcgtcgtcgccggggcgcgcggggcgacggccgccatcttctgctccgccttgacgtactggctgagcacgccgcaggccagagcgaacctccggctcttgccctccgctgctgccatggccatatcaaccgagaccgaactgcgcttcttcgcttctcttgctcttcttggatgcggttgcgttgttcacctgaatgcttggtggtgctgtactgctgtg

SEQ ID NO: 13140 - DNA, 1414 bp, Setaria italica
  Peptide Sequence Number=SeqID_79114
gacgacgacgaggaggagttcgaggaagagggggacgacgagggctacgacagcgatgatgatatgtcaggtttggaatatcctggtgtactttattcaaacaaccctcgtgctccaagcaagaggccaggactgcaaactccattgatgaaagaaaactgggaaggaagacaacccaaagctcgtgataaatatggcagtccagaaaaatttaagtctctgcatcctaggaataaagtgggaagatcatcaacagatcttatgaacatggaaagtaaagtagagttgaaaaatgaaagcatttctcgaagtttgttccagaaactgcaagaagaatatgacttcgatgataaatggttaccgctggttgattacttgtgcacatttggactaaaggaatctcattttacttacatctacgagagacacatggcctgctttcaaattagtcaggcttcagcagaagaaaggttgaatttcctgctaaattccggggttaaaagcaaggatatgaagaggatactggttaggcagccacagattctggaatacactcttagcaatctgaagtctcatgttgattttctggtgagcattggggttccgagtacacgaatagggcaaattgtctcttctgctccttcgatgttctcttacagcgttgagcagtctctgaagccaactgtaaggtacctgattgaagaagtaggtattgaggagagagatgtgggcaaagtagtgcagctaagcccacagattctggtgcagaaaattgatagtgcatggaaatctcgatctctttttctatcaaaagaattaggtgctcccaaagatagcattgttaagatggtcacaaagcacccgcagctgcttcattacagcatcgaggatggaatcctgcctcgcatcaatttcctgagaagtattggaatgagaaactccgatattctcaaagtattgacaagtcttactcaggtgttatctttgtccttggaggacaatctcaagccaaaatatctttacttggtcaatgaccttaagaacgaggttcagtccttaacgaaatatccaatgtacctgagcttgtcccttgatcagagaattcgtccccgccaccgctttctcgtctcattgaagaaagctccaaagggtccatttcctctgagctcctttgtgcccacagatgagcggttttgccagaggtgggctgggactagcttggagaaataccatacattcagacagagcttgctgctgacaggttttgcagagaagtccgcaaggaaaaaattagtttcaagacggtagatagctagctggtgggaaatggttttcttttgagcccatgctcttaatggtaagatgatttattctacacagctcttccggattctttggagtttatttggattaa

SEQ ID NO: 13141 - DNA, 867 bp, Setaria italica
  Peptide Sequence Number=SeqID_79115
ttaaccttagtaagtactttagttacccttagatcaggccaaaatatctttacttggtcaatgaccttaagaacgaggttcagtccttaacgaaatatccaatgtacctgagcttgtcccttgatcagagaattcgtccccgccaccgctttctcgtctcattgaagaaagctccaaagggtccatttcctctgagctcctttgtgcccacagatgagcggttttgccagaggtgggctgggactagcttggagaaataccatacattcagacagagcttgctgctgacaggttttgcagagaagtccgcaaggaaaaaattagtttcaagacggtagatagctagctggtgggaaatggttttcttttgagcccatgctcttaatggaaatgggcttcattgctgacttgatactcgatgatcagtgggtctataatacatcactaactacagcttatattgtatggttcatgtcgcctccccttacatggtgtaaagtcttcgtcgcattcccatatcagttacaaatgagtggccatctaagagaactgcattatgccagaatggtttactcggttatctagttctaggggtatcttactttgattgctagttactattaactacatctgctgaacaaacatgtagaaaatagtagcctaacggtgtgtgagggccatacaggcagagccttctgtaccactgtaatcctgtaatgctgtttagccttgagattctcttttggtcaaggctgcttagcgtgaattacaaatgcacctgtacttcgtagttccaatcatttcttggtggggtgttaaaagacctctttctgacgtaccgtctgtaagttcagtctattaacgtta

SEQ ID NO: 13142 - DNA, 715 bp, Setaria italica
  Peptide Sequence Number=SeqID_79116
ccaccctctcctatggcctgaattccgagaccctccgccattcgccccacccccgaatccagcgtctcatcgatcgcctcggcgccgtcgcaaggagcgaggctccggttgcaggttcttggtttcttggcccgaacccaggtaagggaatatgatggacggtgaggggagtcaagggattaagaaggtgcatttcagggattcctcttcccaggtgcctctgattacctacaagaggcgccggcggcagaagccgcagcaagcggagccacagcagcaagcggagccacagctggagacggagccagagcaaaaggctggagatgtgccggcgcagcagactaaagatactttttggaaaagtagggatatgggatggaagtatggcataatgattgatgaaaatagacaacactggaagtgtatgtattgtggcctaattaggtatggtggtggtgtatctagactcaaacgacatctagctggtgatttagatgtcaaaatgtgccccaaagttccagcagatgttgttgaggaaataagggagcatttgcggaagaaacgagagaggcggaggaagcgagctgcacaaaatggtggcaacaatgtaaatgctaaaagcttttctgatgatgcaaatgcggagaaggatcttctacctgctgattcagtgctgccagctggaatgggcactaatgttcttgaagaagtcact

SEQ ID NO: 13143 - DNA, 295 bp, Setaria italica
  Peptide Sequence Number=SeqID_79117
aagtaatattttattaattaatgattgtatcaaaaacattcgattgcttgtcctcgttgccgcagaagaagagtgcatagaaaccgccggcgaccgttccaaacgcaacgagccaaaccacggcggcgacggcgccgggaaccacggcggcgactttggacgagaacatcagcgtgagcgccgaggtgaggagccagatggccatcctcagctgatcccggagcggcgagccggggcgggcgccctcgtaccgccggaggcagaggaacagtgcgaggaggtcgaggtgcgaaaa

SEQ ID NO: 13144 - DNA, 333 bp, Setaria italica
  Peptide Sequence Number=SeqID_79118
atcctttgaggagacgccggtgggggcggcgtcggtggagggcggggcgaagtccacaggtaggaagcgctcgacgcggccgctcttgtacacgcggatgaatccaggggcgtcgaggatgacctcgtcaccgccgccggcgccaatgtcagacatggtgtgggggggatcggaaagctgtgtcacggaaggggtcactctgtggttctagcagtctagctacttcaggacttggatctactcgcatttgactaagcgtgcggcggcgagccatcggcgtcgcccccttccgccgccgccgtcgcgcagccgtggcccgtgagtacgtgacgg

SEQ ID NO: 13145 - DNA, 1996 bp, Setaria italica
  Peptide Sequence Number=SeqID_79119
ttttttttttagtaaaaataatatattaagtggataagttggtacaattcatccaaacaaaacaaaaaaaatcaaatgatacaaccaaccaaacacacccgagcagaaaattgccttccatcgactacatgtcaacgctttcacagcatctttttaataaccagaaacttatgaccaaacacgatttctatcattccgttctattcttgcacaaatacaccatataataaaacagcatcacagattcctctccaaaaaccatgcatatcaactgatgccaggaatgactttgacacccctttcacaatacagcatggttcaaacaagggattccactcattcttttcacacatgcgccttcaataggaacttactatctagaccagaaatatttattgcaatagcaaatgagcttgctagtacatttcaggcatcttgactttgtgtttgtgtcaccacacacacatctcctcagcagtcgtcactacttcacgccaaccgatgccatgagatcctcgtactcagggtccgccccctctgttttctgagctgccgttggtgcaaaaggattgtagattggattgccaccctgcctgtctctgcttgcaaatggattcgcctgcgatggtggcctcggctggaatgggcgggaaggcaagaaatttgatggccccagcataggatgtgcttgtactgctggagggattcccgggaaacccgcaggtaactcgagatgagatggattcctggggaagcctccatgtaagtgttgaggtggatgaggtggagcatgcatccgagcctgacccattgcattcaagggcctgccatcacaaggcctttggaagccttgattgggactctgattgccaggatggaagaatggagcgccagggtgacttctgccttgtattcccatttgaccgcctgatgctgcaaaatctggagtaggtgcaggtgatacaacaggccgaaaggtaaaatcaccagcaactgggcgtggaggtctcaaagcggcaattggtgcctgaccggagcttgtgcttgcaggacctgatgcaggtgggcacgaaggaggcaccatgccaggagttggtccaactcgagagaaagctggaggtgggcctatggaaagtgggtagcccgactgtgttgatgacccaccaccaccaggaaatgctaccggggaaggacattgaggcgcaactgtagaaaaagactgaactccaccaggaggcctggaaactaatgttgctgaacaagtgaaatttgctaacgctggctgctggctgtggtacatggtgggcatatttgatggaggtgtcaatgcagcaggaccgtgcggtggagttgcgccaagaggggacacggaaataggtctcactggcacaaaattcggtgaagcttgaggaggccactgagattgtggcgtgatgggagaaaaagatggccatccaccagatgcgtggggtatttgaaggggtctaactggcggtggcactgaggaagatggtgtcatttgtgggcttacaattccaggtggttgaccaaaaggcccaattgaggagttagctcggaactgaggtggatgttgttgattgcttggcattgattgctgaggtccaggaacaggaaatggatttcttggcgtgctgttcatgtgaggaggatgacctgtgaagggaggcatactgaaagaaccagcaaacggttgtggttgcaatgaattgttaggtaatgtactcaaaacaggccctgaggaagtaattgatggagcatcagtctgaggagtggacagccaaggagcattttgtgattggtaatgaagtagacctgggggtgaaatggtattctgcacgggatttacatcggaggtaactgctgaagaaacagtagtagttgttggagtagatgttgacttcaccgacacaggagcaagaagcagctcaatcaacgcaactgcagtatctactttatcataagagtcagccgagac

SEQ ID NO: 13146 - DNA, 1169 bp, Setaria italica
  Peptide Sequence Number=SeqID_79120
agacaattagaattagactagaaggtaccaaggaaacaaggaaaataggaatttcttggcgtgctgttcatgtgaggaggatgacctgtgaagggaggcatactgaaagaaccagcaaacggttgtggttgcaatgaattgttaggtaatgtactcaaaacaggccctgaggaagtaattgatggagcatcagtctgaggagtggacagccaaggagcattttgtgattggtaatgaagtagacctgggggtgaaatggtattctgcacgggatttacatcggaggtaactgctgaagaaacagtagtagttgttggagtagatgttgacttcaccgacacaggagcaagaagcagctcaatcaacgcaactgcagtatctactttatcataagagtcagccgagacattgatgtataggtcttcataagcagctcgagcatcacttatgtcttgatgatgaatctcgctcttctctccattgattttcttagtcccatatacttgtattacagctccagtttcttcatgtagccgcttcagagtattgctctcaggtcctataagaactccaataatattatgtccaggatgcgcttctgccggaagagggatctttgtctccttaagtactggtttgtagttctcaggcaccttatatcccggattcagacggagtatttcaccagtaatttctcgtctttcaagttccaatagctcaacctttccctgctcattctctttcaaattgtcagaaccaacagaatttgtcccctttccagtggatactgaaccttcaattttacccatatccaaggttccggatttcagctgcttggtgatttgctccactcgagtctgctcatgcagtaatatgaattaatgacacctggtaggccaaagcccttcctttgcacacagcagggtcggtggtgaggtcaggcccccacctttgtctttctctgagcatgcctgctgttatcttccttggatgcagtaggtgtttcattcttggtagtggcaccacgagttacaagtgagccggctagcttgttctttggtatgacgaatccagcttttgtcccgaatattgaaatcttgggagtcaaagatagaggtgcggtggattttgctcgctgatgcttggcaggagaagattgatctagtttt

SEQ ID NO: 13147 - DNA, 187 bp, Setaria italica
  Peptide Sequence Number=SeqID_79121
agacatcctttgttgggaaccttggtttatgtgggaagcagattaactcggtgtgcaaagatgcacttcaatcaccatcaaatggtcctcagtcaccttccaactgttgctactgcactaataacaagtctggtagaattctttccattcttttactaagcatgtcatctgaggaaggtgactgagg

SEQ ID NO: 13148 - DNA, 271 bp, Setaria italica
  Peptide Sequence Number=SeqID_79122
ttttttggtaagttactgaaggaggcattgaattactgggagctggagctaagtggatgtggatttaaccgggggtggcagggcgcgctaccgctacatttttctgtgcgaactagaggatttgtggttctcctcaattgttatccctctttaaaggttcgctgaaactattacgcagacgccggttaggaagggttggaaatctatttggccactgttagtggccacatgttaagtccatatctagtttgaaagatgcacgccaatatga

SEQ ID NO: 13149 - DNA, 483 bp, Setaria italica
  Peptide Sequence Number=SeqID_79123
gtgagcaagatgcagaccctgcaattgaagggtgttagatgtgatagtcatagcaagagagtgattaatctgattcttgcatatcacagattagttgggccaataccacccgaaattggaaggttaaatcagttgcaaactttgtaagtttgttcctaaaaatgtcatttcttgacctttcatgttggtattcccattatatcatttgatgctacatataaatgtgtgtgtttttttggcgtagatcgctgcaggggaacagtctgtatggttcactccctcctgaactgggaaattgtaccaagctgcagcaattgtatctacaaggaaattacttaagtggatacatcccttcagaatttggcgatttggtggaacttgaggctttggacttatccagtaatacgttgagcggatctattccacgttctcttgataagctatccaaacttacatcattcaatgtttccatgaacttcctga

SEQ ID NO: 13150 - DNA, 1406 bp, Setaria italica
  Peptide Sequence Number=SeqID_79124
tttctgattatggttttatctagtttgctgccgtcttatgattcttcgcattgcagggttggaaatctatttggccactgttagtggccacatgttaagtccatatctagtttgaaagatgcacgccaatatgactcatcaatgacatctaggaaactggaatagcaatttgctgattttatatgcttcaccagctgattatcaatgggctctttcctaaggaaacagcccagctacctcttcattttgataattctgcaccttgttgctcatgaagcaagaacgctgagttcagatggggaagcacttcttgccttcaagaaggcagttacaaattcagatggggtctttctaaattggcgtgagcaagatgcagacccctgcaattggaagggtgttagatgtgatagtcatagcaagagagtgattaatctgattcttgcatatcacagattagttgggccaataccacccgaaattggaaggttaaatcagttgcaaactttatcgctgcaggggaacagtctgtatggttcactccctcctgaactgggaaattgtaccaagctgcagcaattgtatctacaaggaaattacttaagtggatacatcccttcagaatttggcgatttggtggaacttgaggctttggacttatccagtaatacgttgagcggatctattccacgttctcttgataagctatccaaacttacatcattcaatgtttccatgaacttcctgacaggagcaataccatcttctggttcacttgtcaatttcaatgagacatcctttgttgggaaccttggtttatgtgggaagcagattaactcggtgtgcaaagatgcacttcaatcaccatcaaatggtcctcagtcaccttcctcagatgacatgcttagtaaaaagaatggaaagaattctaccagacttgttattagtgcagtagcaacagttggagctctccttttggtggcattaatgtgtttctggggttgctttctttacaagaattttggaaagaaagatatgcgtggtttcagggttgagctatgtggaggctcttctgttgtgatgttccatggggaccttccatactcctcaaaagacatcctcaggaaactagagactatggatgaggaaaatatcattggagcagggggctttggaactgtttataaacttgcaatggatgatggcagcgtctttgcattgaaaagaatagtgaaaacaaatgaagggctagataggttcttcgacagagaacttgagatattgggaagcgttaaacatcgttatttggtcaatcttcgtggttaatgcaactctccttcatcaaaactgttaatacgtgcgtcccaatccaactgttcagacttttcatgcaacacttcatcgaggct

SEQ ID NO: 13151 - DNA, 1411 bp, Setaria italica
  misc_feature (9)..(9): n is a, c, g, or t
  Peptide Sequence Number=SeqID_79125
ttttttttntttttttttttttttttacttccattgtacaggttatctattgagtcatcttaagattacgtgtcaatgcacgagacaatatccttgccctaagatcaatggttaaaacacagacaatgtccttgccctaagatcgtttgttaaaacacagagcaatctccaggtaagttctcttattaacccaacatataacagcttgtagcacaggacggatacatacataggtatacagacgcacgcaaaaatgtcacccgttgaaccaaccggttggagaccaaacaccgcggcaatgcatttacacaatatctgcaaagaataaaggaatgcgccttcacgggaaatcagcggcagtgtggctttgtccaggagactactctgaatcgtagaaatcgctagggcatggtgtaattacatccgactccagcatctgtaccaccctgtgcattgtcggccgctcctccggcaaagagcttacacattgcttggctagagaaagcagagcatctaaggtctcaatctgcacaccttcacagttagggtcgacaatttccctctcccgattctcactagcaagaaaatttaaccatccaacaatgtttaatcccttctcaatgaatgatgcatcagtaggccgctttccactcagtatttcaagtaccaaaaccccaaagctgtatacatcagtcttctcagtggctctgccactttgcatatactctggtgcaaggtaaccaaatgttcctgcaactattgtagtgatatgtgattcttcatcctctaatagttttgcaagtccgaagtctgatacacgggcctcaaaattgccgtcaagtaagatgttgcttgacttaatatcacgatgtattattcgaggcgaacaatcatgatgcaaataagacaagccttttgctgctccgagtattatgttaatacgtgcgtcccaatccaactgttcagacttttcatgcaacacttcatcgaggcttccaccttgaagatagtcatatatcaacagttttgatgaaggagagttgcagtaaccacgaagattgaccaaataacgatgtttaacgcttcccaatatctcaagttctctgtcgaagaacctatctagcccttcatttgttttcactattcttttcaatgcaaagacgctgccatcatccattgcaagtttataaacagttccaaagccccctgctccaatgatattttcctcatccatagtctctagtttcctgaggatgtcttttgaggagtatggaaggtccccatggaacatcacaacagaagagcctccacatagctcaaccctgaaaccacgcatatctttctttccaaaattcttgtaaagaaagcaaccccagaaacacattaatgccaccaaaaggagagctccaac

SEQ ID NO: 13152 - DNA, 916 bp, Setaria italica
  Peptide Sequence Number=SeqID_79126
ctccccgacgccatcaaggctgagctcgagaggctcttcttggacaaggttatcgcgaaccttgggctgtgcgtgtctgtctatgatatccgatcccttgaaggagggtccatccatccaggagagggctgctcgatctataaagtttcatttcgtctgctgatgttcaggccatttaatggggaggttcttgttgggagaattagtggatatgatgataaggggttgcaggtttcacttgaattcttcaatgacatatgcatccctggacatttgatgcagtttggcacagtgaggggaccagatggtagatggatgctgcggactgaagataatgatgagctatatctagatctagatgatgagataaggttcttggtatctggcacaaagtacccgcctatcccaattgagcaaaaagcagatgacccaccattttccccaatgcagattgttggaagtattaaaggagatggtcttggtcttcttgcttggtgggcagctgatgaagaggagggggaggaggtggcagagcaatagcatcgtgttgcttcagggatatctctgtgtagtttacaaactcagcctactagcatgttaggtaattgcatctagtagcagatacggcattttagaatctaacctgacttatatgttttattgttttgagccatttcatgtaaaaactgcatatgaaaagtaggtcagattcttagggcaaagcatgcatgtactacccaattctgtgtcagatgtgtaatctgataatgcggggatctctcccaagagcagacccgcaacatggaagttcacttttaaccagtgtgcttggtgttacctccagcaagcagctgggtaaaagatatgggagtggtgaaaaccacacttgatgtataattttctgtgaagtgtaaac

SEQ ID NO: 13153 - DNA, 389 bp, Setaria italica
  Peptide Sequence Number=SeqID_79127
ctcgcaggagtggacaggtactacacgattccgtcgcctcattggttgctctcctgctcctgcccgcccggctgctcgcagaacttcctgccgtctccttctccacgggttgcgcgttccttagggtggaacatcgtcctgcacagattttggataagagggctctttggataaactcttgccacatattcaggagacgtttgaacgtccttcagcggcgtcgtatagaaagcagatcaactagaccttgatcctacatcagaagaggatgggtttcttctcattctttcttgtggcttctatgccaatcgtccaggtcctgctcattggtgtcgttggagcttacctggcctctggcttcagcaatgtcctgaccacaagtgctcgaa

SEQ ID NO: 13154 - DNA, 591 bp, Setaria italica
  Peptide Sequence Number=SeqID_79128
gaacatgaacaaggtcgtttttaccgtcttcaccccatctctgatgttcgctagcctcgccaagacggtcactctcgaggatgtcatttcttggtggttcatgccagttaatataggaatcacattctttattggtggatctctgggttggatagcatgtaacatattgaagccaccacagcacttcaggggcctgatcatggccttctgctcagcaggcaatcttggaaacctgctattgatcattgtcccggctgtctgtgatgaagacgggaacccgtttgggaaggatcggagcatttgccgctcacgtgggctctcctactcgtcattgtccatggctctcggtggccttttcatatggacatacacatacagcctgatgcagaagtcaggtaaactgtatcacaagatgcagtccaaaagcatccagtgctcggccgacagcgacgaggagcaagccaaacaagatggtccagccgcctacaatgacgaggaggcacctcttccgacgtcagttaagcctgaggagcagacggatgagaatccaatggaggccccgctcttgtcctgcgaaagcgaggtagccga

SEQ ID NO: 13155 - DNA, 2054 bp, Setaria italica
  misc_feature (2010)..(2010): n is a, c, g, or t
  misc_feature (2018)..(2018): n is a, c, g, or t
  Peptide Sequence Number=SeqID_79129
attctatgctgtttatccctccttttttttctaaatcctgcctttattttgcatttaatttttgaaaacgaaacatactacgttccaagcaatgtggagttatccttttcaaaatttcaacttacatgtgctggaaagtaataaaggtctcatcattgagaggtggcccaagcgtaaattgacagctcttgttttttctcttcaggtccttccagatgcttattctcccttttctttcttgaattgtattaccagggtggaacatcgtcctgcacagattttggataagagggctctttggataaactcttgccacatattcaggagacgtttgaacgtccttcagcggcgtcgtatagaaagcagatcaactagaccttgatcctacatcagaagaggatgggtttcttctcattctttcttgtggcttctatgccaatcgtccaggtcctgctcattggtgtcgttggagcttacctggcctctggcttcagcaatgtcctgaccacaagtgctcgaagggacatgaacaaggtcgtttttaccgtcttcaccccatctctgatgttcgctagcctcgccaagacggtcactctcgaggatgtcatttcttggtggttcatgccagttaatataggaatcacattctttattggtggatctctgggttggatagcatgtaacatattgaagccaccacagcacttcaggggcctgatcatggccttctgctcagcaggcaatcttggaaacctgctattgatcaattagtacccggactagtactagtagaatagaaagaaacgggaaaacccgttttaagggtaaagaacaaaagaaccaaaaacaaaagaaataggtaccaagaccgacctaacaagtcattgtccatggctctcggtgttttcatatggacatacacatacagcctgatgcagaagtcaggtaaactgtatcacaagatgcagtccaaaagcatccagtgctcggccgacagcgacgaggagcaagccaaacaagatggtccagccgcctacaatgacgaggaggcacctcttccgacgtcagttaagcctgaggagcagacggatgagaatccaatggaggccccgctcttgtcctgcgaaagcgaggtagccgacaagggattctggacaaatctcaaggacactgtccaccagttcgtcaaggagctgatggcaccaccaacaatttccgcgttaattgggtttgttgttggcctggtcccatggctgaaatccctaatcatcggcgacggagctccgctcaaagtcttacaggattccctccacctgatgggcgacggcacgattccttgcatcactctcatcctaggtggaaacctgacgcaagggcttcggaagtcggggctcaagcgcacggtgatcatcacgatcgtctgcatacgcttcgtgatcctgccgctgatcgggatcgccgttgtccatgccgcgtacggagtcgggttcctgtcccacgacccgctctaccgctacgtgctcatggtgcagttcgccctgcctcctgcgatgaacattggaaccatggctcagctgtttgatgttgcacaggaggagtgctccgtgatctttctctggacgtacctcgttgccgcggttgcgctgacgacatggtcgacgatcttcatgtccattctgtcttaattaagtcacggcatctggccgacgcatggtcgcattttgcgagcctgtgctgcgcaagcattcagctagccagggagaggatacgacgttggatatccctacctgtatagcgtagcagtataaatatgtaatttgcagtagactatgatcaattgatcatttaggtaattattgattgttgcattgtgtatttgtgttgatctgatggctgacctgttggttggcatagctcaaaccattcatggagatagggttgcattttttatctatataagttatctcaaaagaaagaatgaagaatggaattaaaaaaaaaacaaaaaanaaaaaaanaaaaaaactaaaaaaaaacgtaaaggaacgtaacgt

SEQ ID NO: 13156 - DNA, 511 bp, Setaria italica
  Peptide Sequence Number=SeqID_79130
ttcccccctggccgtcgtcgctccacggctggtcgtggggcaccctcgacatgggtggacagcgtcgcggcgtcgaacccgtgggacttgttggcaccgtggacaaagaagggccgtgacgactctggctgtgagcatggggaaaggcccaggtcggcgtcgagaacagagggcggcgaagggacggcgcgcgcgccagcccagaaccccgacgacgacgcgcacgctgtccgtctcttcaccgaaggcgtcaccggcgtcgccgccggtttcggactcttgcgccgccgcagacttcagcctccgcaccggcagggaaagcggcctctcccgcgcgccgtgctggccgtcctcgtcgtcgtcgctcggcgccgccgcgtgatctgcgaccacgacgagggggccgtcggggtggtaccgcgagttccacgccagcgagcgctccttggcggcattgccgtcggcgtcggcgttcctctgggcgaagacgccgtaggagatgacgaggccg

SEQ ID NO: 13157 - DNA, 304 bp, Setaria italica
  misc_feature (178)..(304): n is a, c, g, or t
  Peptide Sequence Number=SeqID_79131
tatatccttgcaaatttcaagtagaggatattaggttcaagctctttgtatagttcgtatatatcacagctaattcgggagagatgatacactaatagattcgttcgtttccgatgcaaaataaaagccagttgaagtcgaggctgctgcctttattacttaaaaaaaaaaaaaaaannnnnnnnnnnnnnnnnnnnnnnnnnnnnnnnnnnnnnnnnnnnnnnnnnnnnnnnnnnnnnnnnnnnnnnnnnnnnnnnnnnnnnnnnnnnnnnnnnnnnnnnnnnnnnnnnnnnnnnnnnnnnnn

SEQ ID NO: 13158 - DNA, 195 bp, Setaria italica
  Peptide Sequence Number=SeqID_79132
agcatcaaatgcagcacgcccatctatgaaccattgtaccacactaccatcttcagtcaggcccctaggtggtgcaaatgaaccaaaacggtgagggtgacaccagaacggggagaccaagtttcctctgtgcttgatgttggagaagttggtccccgagcggcatgtcgttgccaggtggttagaagtgtgtcg

SEQ ID NO: 13159 - DNA, 2336 bp, Setaria italica
  misc_feature (2327)..(2336): n is a, c, g, or t
  Peptide Sequence Number=SeqID_79133
ttgcaagagaacttaacagcatgtacagtaaacggaggctacttaacattcatgagaatgttaaagttctgcgctaccctgatcatttctcgactggcatatatttatggtctcaccatgaaaatacgttgtcgttgataatcaagtatgctatattggaggccttgatttgtgctttggtcgttacgattctcctgagcataaagttgcagattttcccccttcaacatggccaggaaaggattactacaatcctagggaatatgagccaaattcttgggaggatacaatgaaagatgagcttgatcgtactaaatatcctcgcatgccttggcatgatgttcagtgtgcactttatggtccagcatgtagagatgtagcaaggcattttgttcagagatggaactatgcaaagaggaataaagcaccaaatgagcaagcaattccattattaatgcctcatcatcacatggtaattcctcattacatgggtacaagcaaagaaacaaatggggaaacagagagtaaacagaaccacggcatggatgttaaatttaataggttaaactccttgacaacaccagcatcgtgtcaggacattccgttgcttttgccgcatgagcctgatcaccatgcatttccaaatggagattttggactgaatggtatgaatatcaacaatggtctttcagatcacccaaataaaaccaaacggaaccagccactgcccaaccgaaaggccaaactagatctttctttacaagatttacagatgaaaggatttgtggacaatgtcggttcccctgaggtttcagtgtctaaacactatgacacctcaaaaccagatacgcagaacatagataaggagtggtgggagacacaagaacggggagaccaagtttcctctgtgcttgatgttggagaagttggtccccgagcggcatgtcgttgccaggtggttagaagtgttggcccatggtcagcaggaacaactgaaattgaaggaagcatccacaatgcctatttttctctcattgaaaaggcagaacattttgtttacatcgagaatcagtttttcatatcaggtctttcaggagatgatacgattaaaaatcgtgtattagaagcattgtacaggcgtatacttagagcagagaaggagaaaaaatgtttccgggttattattgtaataccacttctacctggttttcagggtggcattgatgacggtggagctgcatccgtgagggcaattatgcattggcaataccggactatttgtagagggcctaattcaatacttaagaatttatatgatgtggttggctcaaaggcacatgattatatctcattttatggacttagagcacatggcaggcttggtaatggtggtcctttggtcaccaatcagatatatgtgcacagtaaattgatgattatagacgatcgcatgacattaattggctcagctaacataaatgatagaagcttgcttggatcaagagattctgagattggcatgattattgaagataaagaggttgtcagttctctaatggatggaaaaccttgggaagctgggaagttctccctcagcctacgactttctctatgggcggaacaccttggtcttcttccaggagaggttagttgcattatggatcctgtggatgattcagcgtacaaaaacatctggatggccactgccaaggtgaacaccatgatctaccaacaagtattctcatgtgttcccaacgatcacatccattctaggtaccaatttcggcaaagctttgctcatcggaaggagaagatcggccatacgaccatcgacttgggtgttgccctagagaagcaagaaactaagcaagatagagacctagcagatgctgaccctatggagcagttgcaggccgttcgaggtcatatcgtttccttccctttggagttcatgtgccaagaggacttgagaccgttcttcagtgaaagcgagtattatacatccccacaagttttccattagtttcccccctcatggagaaaagtacacccataggattagttgtacatgttatagggttattatggttgtagaactcttatgcccggatgaatgaatataggaaaaagaagcagattaagaactatatccttgcaaatttcaagtagaggatattaggttcaagctctttgtatagttcgtatatatcacagctaattcgggagagatgatacactaatagattcgttcgtttccgatgcaaaataaaagccagttgaagtaccgaaaaaaaaaaaaaaaaaaaacttaagggaactctagccannnnnnnnnn

SEQ ID NO: 13160 - DNA, 352 bp, Setaria italica
  Peptide Sequence Number=SeqID_79134
tgtccgagaatatttggcactgtcacaaatagatatagaaaatgcaacgacaagctaaagacaaatggggaaggtggtgcatcttacaattacctagttcatgaaacatattcaactctaagtgttgcatactaacataggaacatgcatctatattgattattaaagcagtttttttaccaacacatgtcatcaatgacaatgagcaaactggtagtcaagttcatcgacaactttcatcaagtagttcaccttattaccagaactagggcgtggaccttggtacaaagaaagacagaactcagggaaataagcaaatacaactgggatttgatgatacacaacaattttt

SEQ ID NO: 13161 - DNA, 655 bp, Setaria italica
  Peptide Sequence Number=SeqID_79135
gtatcatagcccttacggaaaacgaagaaacaaagaacctactagtactaatacatacaggaagaccacctctcctaacattggtttccaaccattgtagaactgcttacagttacagatcacaaatgcaaaggacacgtctttcagagtttcagcatcacaagccatggcacacctcacatgagctcctcctccttgcggaggtactccccggcgtccgcctggtgaagcacgaccacagcgttcgtgtccgccttcctgcagtcctgcgccgacctcgcagcgatgccgaacccgagcggcacgtcggccatggacatgacgacgaccccgtcccccgccttggtgttctcggtgatgcgcgcgagggaggactttggcacggagttgccgaagaggaaggagcgctcggtgtcgggcttgagccagacgcggcgccgcgcgtgcgccgccaggaggtcgagcgcgtggacggtgaggtggaacgagccgtggtgggtgaacttgccgatgggcgtccccacggcggcgaggcgcgggcgagcgacggtggtggcgcggcggacgagggactcggaggcgtagtagacgcggttcttgtggaggcggaggcagtagcggcccggctccgggtcgggccctccacggcgggacg

SEQ ID NO: 13162 - DNA, 501 bp, Setaria italica
  Peptide Sequence Number=SeqID_79136
gtttcatctgacgcttcctttgacctagcatcggaacatccggtggtctagggtttcctcccttcacttctagcaattgctccgacgctactaaaaagaggccatcggaacatccgatggtctgtgtttgactcagcttctttgtagcgtatcaattgctccgatgcttgctccgacgctattctgggggccatcagaacatccaatggtgcctgttttcctgaatttcttcggttctttgcttatctttggttgtggttgcttacttaggacctataataccttcaaagcatgttggggttaatgatcctgttgtcacattaatcaccaaaatcacaaagtaatggcctatatttgaggccatgatcgctacagatattcagaacatcaaagctggaggagacaaaatcgataagaaccaagcaaacttctactgacagaataaaatttgcgcaatgtgtttttctgccactgaaattgtatatcgaattatcgattgtg

SEQ ID NO: 13163 - DNA, 261 bp, Setaria italica
  Peptide Sequence Number=SeqID_79137
gttcggttcgttaggcgcggcgaccgcgtcccggccgagcggtggtagttcaccgccgcgaggtccttggcttcccactgctccttctcgcaatcgcgagcagcgtcgtgctgccagaagggctcatccgccgtggcggccgccgccggcagcgccgagtcgaacaggcaggccatgtccagggatgacgtgaagtcgccggagccggtctcgttgccgaggctctcagtgcagacctcgaggctcttctggctcatcagg

SEQ ID NO: 13164 - DNA, 776 bp, Setaria italica
  Peptide Sequence Number=SeqID_79138
taatttacggttttttacaaggacaaggccgctaattaaactatgcaagcatccaacaaaaagtggtgcaacaaccaatgccgcaaatcgtgcaggagcattggtccataagagtacaccaccaaatgctaggactgcaactaatgggcttgcctgcagtaatgggtgacccttcttcatgtatttgacaattgtgggaagctgcaccatgctccctaacgctagtaacacggccagcaaaacgaagtgatatggcatgcgatgaggtggttgtggaaggtatttgtaatggacgaggagaaattcgatggtgccgtacagagataccatcacgatccctacattcaggtaataaggtacattgcctatgagtttcacccttttcagcctaatgcttcctgttgtcttgaacaacaactcatcgtctgatcggctttcacggctaaacaccctgaaagcctcgaggaacactatcgccgtggcgtaccagaaatccggacccaggttcgtggagaacccgccgaggatgacgaccgtcgcccacgtgaacgcgagcgtgccgaggccgttgcccgccctctccaagagcgcgacggtgcggacgaagcggttcaggcatctctgagcagccagccatggcggctcgaccgccgttgatccttggggctgatctggcgccgtcacggcaatgctatgatggttcggatcggccacggcgccagccatccttctcagtgagcttcaattcggcagctagtctaaactgaaggaattag

SEQ ID NO: 13165 - DNA, 541 bp, Setaria italica
  Peptide Sequence Number=SeqID_79139
ctctaccgcccaccacttctcctccgctggactcccagtcccagctggccgcctcgtcaaagacgacatcccgcgataccacgacccaccgtgcttgaggattgtagagcctgtaggccttgcttccttgctcatagcctaggaacaccatcggcttgctcctatcgtcaagcttcttcagccccgactttgtctccttcacgtgcccgacgcagccgaaggtccggaggaaggagacgtccggcttgcgcccatgccatgcttcgaatggcgtcgtccccttcaaactcttcgtcggtgagcggttcaagttgaacaccgccgtgctcaccacctcaccccagaatgccgccagcatcttcttggctttgagcatgctgcgcgccaccccgacgatcgtctggttcctcatctggtcaatgctcaccatatattgctacatcaccaatttatcatcatccgaatcaaaatccataaaacctcgatcttgatgctcatcgaccacgtcatcaacaggatcatccatgtcgtaatcaataat

SEQ ID NO: 13166 - DNA, 459 bp, Setaria italica
  Peptide Sequence Number=SeqID_79140
tttaaatttttttacttttaacctttaactttactccctaaatatggtagttaggattggggaatgggtatctgctggagatgctccgttccctagaacaaaaataggttcttgcttccccttgcatctttggttcatttaccaggtccttgatatttttcttttgggaactcacggcagccctggtcatccttcagcttaaaaggtgcgggttttttaaccatattggacatcttttgggcaatatgcttcaggcttccatggttcttaagaggaatggtagcggtagccctgggccttgttggtcggttacattcttcctcctccctcccctctcttgctgtttttaagttaggcaactgggacacccaggattttttagggcctggacgcctaggtgttgccttgaaaaccatccaggcttctattgtggatgtcataatcctgactgagtacctg

SEQ ID NO: 13167 - DNA, 909 bp, Setaria italica
  misc_feature (21)..(21): n is a, c, g, or t
  Peptide Sequence Number=SeqID_79141
ggaggagaggggtcttgcggngccatgtacctctacagcctgacgctgcagcgcgcgacgggcgcggtgtgcgccgtcatcggcgccttcagcgggcgcgacacgaagaagtcggcggcctccgggtccgcctccacgcaggagatcgccgtcgcccggggcagcacgctcgacctcctccgcccggacccggagaccggccgcctccgcacgctcctctccgtcgacgtcttcggcgccatccgctcgctcgcgcagttccgcctcaccggcgccaccaaggaactacctcgtcgtcggctccgactccggccgcctcgtcatcctcgagtactcccccgaccgcaaccgcttcgacaaggtccaccaggagaccttcggcaagtccggctgccgccgtatcgtccccggccagctactcgcggtcgaccccaagggccgcgcgctctgcatcgccgcgctcgagaagcagaagctcgtctacgtcctcaaccgcgacgccgccgcgcgcctcaccatctcgtccccgctcgaggcgcacaagtccaacactctcaccttctccctcaccgccctcgactgtggattcgacaaccccatcttcgccgccatcgagcttgagtatgctgagtctgaccgcgaccccacggggcaggctgctaaccaggcacagaagctcctcaccttctacgagctcgacctgggcctcaaccatgtctcccgcaaggcctcggagcccattgacaatggtgccaatcttctagtgactgtccctggtggcggcgatggtccgagtggggttcttgtgtgctgtgacaacttcgtgctgtaccggaaccaggggcatccagaggttcgagctgttattccacgccgtgctgacctacctgctgagcgtggtgtcctcat

SEQ ID NO: 13168 - DNA, 238 bp, Setaria italica
  Peptide Sequence Number=SeqID_79142
cgagctcgccggccgcatcaggtcgggcgtgctcgagcccctggtggatcacttcacggagattctgatctggttgctgcaatgctacgacgcgcaggtccggagacgcctcgtcccgctccttcgccggcacaggatggcgctgctcacggcgccggcggtggccgcgctgctgctgctcttctggtccgcggcgtacggcgacgcacagctgccgtacaaggaccccgggctgccc

SEQ ID NO: 13169 - DNA, 448 bp, Setaria italica
  Peptide Sequence Number=SeqID_79143
acccgaaggtagaatcaaaggacgtgtgcgggctcgtcaagtgcgtggtgctcctcgtgtcggggcggcccctggtggtgcagccgtacgtggactacatggacgcgctggtcgccgcgtggctgccgggcacggaggggcagggcgtctccgacgtgctgttcggggactacgggttcacggggaagctgccgcggacgtggttcaagaccgtggaccagctgccgatgaactacggcgacaagcgctacgacccgctcttcccgttcgggtacgggatcaccaccaaggccgcgggccacaagtaggcggttggcaaatgttaggttttccttttttgctcttggtcatttcggtgttgagctagttagcgggaactgcaataattagcgtgattctttacaggtgtactagttaggaaataagaggttgattttggagcttacag

SEQ ID NO: 13170 - DNA, 374 bp, Setaria italica
  Peptide Sequence Number=SeqID_79144
ttccggcattgctcgacctcgcacaacttctggctttggctgttatctgttggtgctctgccccggctcgccgtgttgctttcctgggcgtccccacggtgtccctcgctcacatggggacggggatgaaactgctggcccgagtgagtcctcaacttggcaaagggagagcagaggatttcttgtattctttctgttcttgttcacacgggttttgtacacttgctgactccggcggctcccctcgtcgtcttcaccttgcaatcaccttgagcttgttgcgcactaaccgcggtaattagtgcttggtaataatccaccgccggtaattctcgccgccaagagcccgagaagagaaccggccgggatccatc

SEQ ID NO: 13171 - DNA, 727 bp, Setaria italica
  misc_feature (693)..(693): n is a, c, g, or t
  Peptide Sequence Number=SeqID_79145
gggcggtgctacgagagctacagcgaggaccccgggatcgtgcaggccatgacagagctcatcccggggctgcagggcgacgttccgcagaacttcaccagcggcatgccctacgttgccggaaagtgagtgaaacaaatcacggcacagaatccggtggtgtctatccatctgcaaccttctttgcatatgttctgaaatggctcgcccaaattaactgtgcaggaacaaggtggcagcgtgtgccaagcacttcgtcggcgacggcggcacgcagaacggcatcaacgagaacaacaccatcatcgaccggcagggcctgatgagcatccacatgccggcctacctggactcgcttcggaagggcgtctccacggtcatgatctcctactccagctggaacggcatcaagatgcacgccaaccacgatctcatcaccggtttcctcaagggcaggctcaagttcaaggtgaaaaaaaaaaagaaaaaaaaataaacttcaaggagtccattggtctgagtcacagcgtcttcagatgctcaattgttttgctctttgcagggtttcaccatctcagattgggagggtattgacaggatcaccagccctgcaggggcaaactactcctactctgtccaggctggaattcttgccggcattgacatggtaggcaaactagcagcagctttgcngcccatcttgttcctacttgttaccatggtcatg

SEQ ID NO: 13172 - DNA, 371 bp, Setaria italica
  Peptide Sequence Number=SeqID_79146
gccactgcccagtgccagcttcccccgtgcgccgctagctgtgtgcgctcgtcgctccccgccgcgcagcgcggcgcggctcgctcgtcgctccccgggaacggcctctcacgccgctccgccggctggtaatcggtctatatataggtggttcgtggtgatcagaaccacacaggcaagatggcgagcttgcacaagatcacctttgttctcatgttctgcctggtagccttgggaagagcagagtacctcaggtacaaggatccgaagcagcctgtgtctgttcgtgtcaaggatctgcttagccggatgactcttgctagaaaagattggccagatgaccaatgagaggaaatgccacagccgatgca

SEQ ID NO: 13173 - DNA, 2375 bp, Setaria italica
  Peptide Sequence Number=SeqID_79147
ctgagctttcccaccatttccggcattgctcgacctcgcacaacttctggctttggctgttatctgttggtgctctgccccggctcgccgtgttgctttcctgggcgtccccacggtgtccctcgctcacatggggacggggatgaaactgctggcccgagtccggagacgcctcgtcccgctccttcgccggcacaggatggcgctgctcacggcgccggcggtggccgcgctgctgctgctcttctggtccgcggcgtacggcgacgcacagctgccgtacaaggaccccgggctgcccgtggaggaccgcgtcagggacctcctcggccggatgacgctcgccgagaagatcgggcagatgacgcagatcgagcggctggtcgcgtcgccgcaggtgctcaaggacaacttcatcggcagcctgctcagcggcggcgggagcgtgccgcggaagggggcgacggcggcggagtggatgagcatgatcactgacttccagaaggcgtgcctgtccacgcggctgggcatcccgatgatctacggcattgacgccgtccacggccacaacaacgtctacggcgccaccatcttcccccacaacgtcgcgctcggagccaccagggatcctgaacttgtgaagaggatcggcgccgcgaccgcgctcgaagtgcgagccaccggcatccagtacgcgttcgcgccatgcattgcggtgtgccgtgatccgagagtgggggcggtgctacgagagctacagcgaggaccccgggatcgtgcaggccatgacagagctcatcccggggctgcagggcgacgttccgcagaacttcaccagcggcatgccctacgttgccggaaagaacaaggtggcagcgtgtgccaagcacttcgtcggcgacggcggcacgcagaacggcatcaacgagaacaacaccatcatcgaccggcagggcctgatgagcatccacatgccggcctacctggactcgcttcggaagggcgtctccacggtcatgatctcctactccagctggaacggcatcaagatgcacgccaaccacgatctcatcaccggtttcctcaagggcaggctcaagttcaagggtttcaccatctcagattgggagggtattgacaggatcaccagccctgcaggggcaaactactcctactctgtccaggctggaattcttgccggcattgacatgatcatggtgcccaacaactaccagagcttcatcagcatcctgaccggccacgtcaacagcggcgtgatcccgatgagccggatcgacgacgccgtgactaggatcctgcgcgtcaagttcaccatgggcctgttcgagaaccccatgcccgacaccaccttggccgaccagctggggaaggcaggagcaccgggacctggcgagggaggcggtgaggaagtcgctcgtgctcctccagaacggcaagcctggcgacgcgccgctgctgccgctgcccaagaaggcggccaagatcctcgtcgcgggtagccacgccaacaacctggggtaccagtgcggcgggtggaccatcgagtggcagggcgacacgggcaacatcaccgtcggcaccaccatcctcgacgccgtgaaggcggccgtggacccgtcgacgacggtggtgttcgtggagaaccccgacgcggagttcgtcaagaacggcggcttctcgtacgccatcgtggccgtgggcgagcaccccctacaccgagaccaagggggacagcatgaacctgacgatcccggaccccggggccggagcacgatccagacggtgtgcggcgccgtgcggtgcgcgaccgtgctcatcagcggccgccccgtggtgatccagccattcctgggcgccacggacgcgctcgtcgccgcgtggctgccggggacggagggacagggcgtcaccgacgtgctgttcggcgactacgggttcacggggaagctgccgcggacgtggttcaagtccgtggaccagctgccgatgaacgtcggcgacaagcactacgacccgctcttccggctgggcttcgggctcaccacaaagggcaaggcatactagacccggtgctctcctgcagcaggggatggtggattggtggtaggggtaggaaattgaattaaacagtgctctgtctggcgcagggacatgaactgggagttcttggttccttggccgtttgtcagttaattttggtgcatgctcagttctcacagtggagtactagcatccactccgctagatgggcgatctcattcttatatgatatattgctttgatcttttgctcaattctctcaagggctgtttacttgtatggttgcttatagttaaaacaagtataaatcatta

SEQ ID NO: 13174 - DNA, 1486 bp, Setaria italica
  misc_feature (49)..(49): n is a, c, g, or t
  Peptide Sequence Number=SeqID_79148
catccacatgcctccttactataattctattatccgaggcgtctccacngttatggtctcgtactcaagctggaacggagtgaaaatgcacgcaaaccatttcctagtcactgattttctcaagaacaagcttaagtttagggtcagttgctcattacagaggctaaagaattttccttttatatattttcttcagctacatgatcagattgaaacttttctgcaaacagggttttgtgatttccgactgggaaggcattgaccgcatcactagtcctcctcacgctaactattcttactctattgaggctggagttggtgctggtattgacatgatcatggttccattcagatacacagaattcatcgatgatctcacagcacaagttcagaacaaggtcatccccatgagcagaatcgacgacgctgtttacaggattctccgagtcaagttcagcatgggtctatttgagaacccttaccccgataccagccttgccggcgaactcgggaagcaagaacaccgggacttggcacgtgaagccgtcaggaaatccctggtgcttctaaaaaacggaaagtcctcgtactctccgttgctgcccctcccgaaggaaggccggtaagatcctggtcgccggtagccacgccgacaacttgggcaaccagtgcggaggatggacgatcacctggcaaggacagcccggcaacaacatcaccgccggcacgacgatcctggaaggaatcaaggccaccattgatcccagcacgcaggtggtctactccgagaaccctgacagcaccgtcctcgccgacaagtacgactacgcggtggtggtggtcggggagccgccgtacgcggagacgttcggcgacaacctgaacctgacgatcccggcgccggggccgagcgtgatccagtcggtgtgcaaggccaccaagtgcgtggtggtcctcatctccggcaggccgctggtggtggagcccgtacctgggcgacatggacgcgttcgtggcggcgtggctgccggggtcgggagggccagggcgtcgccgacgtgctgttcggcgactacgggttcacggggaagctgtcgcggacgtggttcaagtccgtggaccagctgccgatgagcgtcggcgacaagcactacgacccgctgttcccgttcggcttcgggctcaccaccaagggcaccaaatgaggccggggtcggatgatgggaacgggcgatctgtgtgagtgatttgtttggccgtgagggtttggaattggtggtggggatgggtacgcggcgcacacattaggcagtgttgggcttgtgggtaataacagtgagtggtgcatcattcttgaggcgattgttgttagcgtgggttgtttggaatgaacaataagatcaggagcgttgcagtcgctctgacatgcacaagcttgcgttcacttctgctgatgctctctcaacctctcggcatcttcgcgact

SEQ ID NO: 13175 - DNA, 321 bp, Setaria italica
  Peptide Sequence Number=SeqID_79149
ctttgccgaccttacccgacacggcaccgccggcgcccgcggcggcggagaggcgcgggggaggctgcgcggtctgcaccgctgcggcggtaggcggggtcgcggacggtgaggcgtcggagggggatggaagaagagcccgcgccgggttgtcctgcttggggagggaagggaggcggcgcgcggagcgattcctcttggaggaggatgacgaggaagaggatctcgtgaagaacggcagcttcctgccgccggatcgcttccccatggcgtcgcggcggcggcggcggcggcggcgtggcgcggcgcccggcacgggga

SEQ ID NO: 13176 - DNA, 625 bp, Setaria italica
  Peptide Sequence Number=SeqID_79150
tgatccgtttattctgcattgcagtcaattcctcgacctgcttctccccattgtcaccaagcaaattcatgtagccaaacaaaaacatgcctttatccagcatccttttgacaagcgccggcacaagatgcactccattttgcttagccatagagatgaaatctttcagttgcctgcactcctcgagagacaaataaatcttgaactggggcttgtataggacacactcatagagacagtaaaggcagtaaagcccagctaatcttcgaggtagagaactttcagaagtcaaatgaccgatacaatgcagaaagagggactgcatgaagagacaagagtttgccttaggtctgccttcatagatataagaaaatttcttctccttccaaactcgcttgaaatcagcaagtgtcgtgctgttttccttgccataatcagctactagctcatctatatccagcttgaatggagccatatccatatgtgcagggatggcccgaaaaggcgtataaccgacggggaccgggggctagcagcagacgacagtagccgcagaagcccgcggcgcggaggcgagacaaatacaagcggtgcagcaggggccgcaggagtgtctttcccggcg

SEQ ID NO: 13177 - DNA, 459 bp, Setaria italica
  Peptide Sequence Number=SeqID_79151
ccgggaacaaagagcgtgctacggcaaagtgggcatgtcgaattggacagtagccaagtatctatacactgcagatggaaggcgtgcccgcacaccggcaatagcctgagcctgtcctccccatcaaactcacacaaacacaccgcgcagtcgaacggctccttgttgccaccaataatttcacggtacgcgaacacaggcagcgcgtcaatgaacgcctgatcgagcccagagtcgtgcagatggaacagctgctgcagctgccggtccatcgccgcgtcccgcgcccctgtacggtgcggcgacgcagcagactcccccatgccggcaccacggccgtgctgcttcttcatcagtagcctcacgaggaggtggagaagcccggagatgaagaagatgaccgcaagaatcactatgatgaacagcaccgcagggctgatcttcccattgccgccgccg

SEQ ID NO: 13178 - DNA, 614 bp, Setaria italica
  Peptide Sequence Number=SeqID_79152
caaaaaggcaggccgtcctgccgccgcgagctcgcggcaacaccaccaccaccaaggcgccaaccaccacgtcaatctgtcgagacttcaattggcgaggacagaagtgtaaaggcaggggtctttgcagggccgtgcagcgctcctgcccgcgccgccggaattggtggccggagaagaaaagctgccacggcagcgggcggcgggaaggaggaggagaggcgtctcgaggattgcaggcaatgcccctgtcgcggcacacggtcgggaacgagttcgcgctcggcggccgcgacctctaccgcacggccgaccagcacgaccccgaggccgtcctcgatggcgtcgccatggccggcctcgtcggcgtcctccgccagctcggcgacctcgccgaatttgctgcacaggtgttccatggtctgtatgatgaggtgatgagcacgtctgcgcgagggcacgggctcatgctccgagtgcagcagctggaggcggagctgccactgcttgagaaagaatcctgccagagagactacctatatgttgtttctaacaggggtgttgattggcatttgaatccgagggtggagcagtggggttgtgacaagaggcga

SEQ ID NO: 13179 - DNA, 250 bp, Setaria italica
  Peptide Sequence Number=SeqID_79153
gccgccggcgagcctcgccgaggacgcggcggcggtcaggatccaggccaccttcagaggatacctggcgaggactgcgctgtgcgcgctgaggggcattgtgaagctgcaggctctggtgcgaggccagctgttgaggaagcaggcgaacgccacgctccgctgcatgcaggccctgctcacggcgcagtcccacctgcgggcgcagcgcatgcgcgttctccaggagcaccaccaccccgccgcccgg

SEQ ID NO: 13180 - DNA, 477 bp, Setaria italica
  Peptide Sequence Number=SeqID_79154
tgaaagaacttcacctgaaaatttcgtttcgttctttctggatgaaactaaagaaaaaaaactttcctttcatctttttgcggcgtggcccttgctgctgggagtgccatgtctggtgtggcttagggtgctgttttgtgtcgtcatgatcccatgcagcacagcaagcagggatctgatgctgcagtctttgtttgctccatgtagagtgctatgcaagtgctttcagcctttcactgtttctccctcggcctgattgtttccagccttgtcccctcccgatttgacagttttgttttaaaggatgggctactgatgactttattctctactaagacttcaatacatggaggtgttacctgaagatctcgggtaaaaatcaccatttagacttcgaagtcttgtatgaaaaacatgtggtagaatggggtcttgatttttggcaagtcagcctgcatagctgtatgctgtacctgg

SEQ ID NO: 13181 - DNA, 1616 bp, Setaria italica
  Peptide Sequence Number=SeqID_79155
gaagttcagtcatttttttgttcaagtggtttctgcttcaaatcaatcccatcaatctcttctcattcaacaaaaagatcactcaatcttacattgatggaccatgattgaaaataaacttaaataacaccatcatgtattgattcaacaaaatcaacctgccacacaggatggttggctaggtacacataaatcagagaaggatataaatcaggggagacatttatggtaaccccattgttctacacatcccttaaattatcccaaagaacagcaatgttcttcctggtttgtcataatgtttagccaaacatgttgggaagaggcctgactgccatgaatgcatcaaccatctcctcggtcacttgagctctagctctttgatgcctagcaaccagctcggataaaactgcgataagtcgttgcttcacttcaccagtcaacatccttccttctttgtactccttctttatgtgctcaagctcatcatcatcttcaaggaagaagtttaggtacttgattggaacgtccacatcaagattagctccaagttttcggtggagctctattgagtcctgcccacctgagaaggcatatttattcacctttgtctttatttgtttagcactatctgtaacatatattgcagtatttgcatcgctggctgacatttttgtgttctccccctgaagagcagggaaaaatcttgattcaatcagtgatggtttctgataacctattctgggagcaacatcacgagtcatcctaaagtaaggatcctggtcaatggcacatggaataaggcaccgcagttggtctctgccagagaagagatgaggaaatgaagaagggaaggatggaacggcctgtactggaggaaaggtacactttcctatgtgatcctcaggtgagaatccaaatatccctacagccttattgtatgtcacacatctggcaactctagccatattttcatagaaggcgcctccaacgaaaccaaaatctgtgaaaatgaaagttctctcaacatcgaaaccacatgctataatgtctttagcattttcacgggcaagccttttactttcctcaatagtcaagttcttccagtagaacttctcatcgtcagttagctgtataactaggggcaccttgaatgcttcctgcagatatttggtgaacatgaaggggatgaggtggccgaggtgcagcgactcagacgagggccccctccccgtgtacaggtagaacttctcgcccttctcatacagatccagtatgtcgttaaaatcccggtgggcgaagaagaggcctcggcggaggaagcagtgcggcgggcgtccggtgaggcgcgcgacgcggtcgacgagcccgtcgtcgatgcgctggcacccgaactggtccacgagcttgtcgtagtcgatgccgcccttccccgccgacacctcccacgggttcaccacctgctcctgctccccctccccctcctccttcctcacggcccccgccccttgctccgccgccgccatggccgcccgcagcgcagatctctcccccttgctcgccggcggcgcgaggggattaggggcagaacagagctagctaaacctcgggctcgt

SEQ ID NO: 13182 - DNA, 909 bp, Setaria italica
  misc_feature (897)..(909): n is a, c, g, or t
  Peptide Sequence Number=SeqID_79156
tcatcagcaggggaaggatggtcattatctaacatggaatcacatgtgctaggtttaacaagattttcctcagtttcatccttggttgcagttgtgttagcctgaagacttaactcctgactataatttgctaaggactgattttggtgaacagcactcaaacccttgtccacagttgaaaaacttgggggcttagacttcaaaatgggctggaaggaaaatgcacaatcatcgtgcaagtaatcttcagccttcttggggaccgaggatatcattgacttgaagttattaggcattagaaatggcaacttgccagttgtaggagaaggttgcgcaatggcattgggtagaaaaactggtgactcgagaagctcccttggactcacaccaggtggtattgtcacaggcgaccggattggcgcagaagaactgacacgagatgtgtcaattttcaggacaccaaaaccggcccttgcagccatcctctccgcaagacctccatgtgaggttgattcctgatttgccctaaaaagtggtgtgctgctgccattgtcactgaagatgctggagaatggacaagagctgaattcttcgttcaagaagcttgacatcactgttcttgggctgggtgaaggaagcatccaatcctccatcaatgctctgcggttgtcagttccggccatgctggtggcgaggtgtttcttatcagctgcgcaaaggaaaagcagggtgccacacatggaacatgatagcatagctggaaatagaaacagaattgactgaagatccaagcactcatttaacatataaacacatgagctcaggatatggacaggtacagatgaatgaggaaatggggcaacctttgacaaagatacgttacaaccagttttcaannnnnnnnnnnnn

SEQ ID NO: 13183 - DNA, 621 bp, Setaria italica
  Peptide Sequence Number=SeqID_79157
cgttggacaatcagctcgtcagctaccactgctccccacgagccacgaccccacccattctcgccatggatccgagctccgaaatcatagtggacactcccttcttccgcctctacagcgaccggcgcatcgaccgcctgatgggcaccagcactgtgccgcccggcctcgacgcctcaaccggcgtcacgtcgaaggacgtcgtcatcgacggcgacaccggcctctacgttcgcctctacctcccggacacagcctcccggtctgacgacagcaagaagctccccgtgctcgtctacttccacggaggcggcttcgtcacccagtcggcggcgtctccggcgtaccagcccttcctcaactccctggccgcgagggctggcctgctcgtcgtctccgtgaactaccgcctcgcgcccgagcacccgctgccggccggctacgaggactccttccgcacgctcaagtgggcggtctctggtaacggcgatccctggctgtcgcagcacgccgaccacggccgcctcttcctggccggcgacagcgccggcgggaacatcgttcacaacgtcttgatgatggccgcgtccgaaggagaggcgggcacgggcacggcggcgg

SEQ ID NO: 13184 - DNA, 379 bp, Setaria italica
  Peptide Sequence Number=SeqID_79158
gccgccgccgtcacgtccgggccgcaggaggaaaccagatacgacgtccgaggtctccattcgcaccaccgcgaaggagaagcacgcgcaggagctgttctccccacccctaaagcctggtggtctccgtctccgacgatgagcggcgcgccgcggctgtgcctgccgtcaagtccgacgccgacgaccggcggacaaacgcgaagaggctggtggtcgtgttcgagtctcttcgggcgtgctcgagggctccggggattggcctggggatgccgaacgaagggcctgagcaggaaggttgcgggcgcaggctgtgcccccggcaaggcggagctgttctaattgccgacccatcccgatggggcggaggtgccgggtg

SEQ ID NO: 13185 - DNA, 486 bp, Setaria italica
  Peptide Sequence Number=SeqID_79159
gccgacctcttctccccaccgccgccgcgccaagagagcgagcgggaggaaagcgcggccggcaagaggggcggcgcaggccttgaggtggcggcgtgggggatcgacaagtggtggcgcgcgcacgccgggccgccggaggccccgaggtacgcggagaaggcgccgcggagggtggccggcggcgcccgggtgagcccccggcccatccagcagcctcgctgaaggaccgatacagtgcatgtgcatcctgatcttggcgcaggaaaataggcacacaaaaaaatagttgtttccccccttccaaatttccaatcttttgctttggtgttagccttgcgttgttttggtttagctcgagatcgaactggaagatccactgcgctgcactcgtccctgtggtgtaaatatgatgatgtaataaattcagtgagactagctttcagctttgagtttcagccaggcacaaaaagatcgatgcacaaa

SEQ ID NO: 13186 - DNA, 684 bp, Setaria italica
  Peptide Sequence Number=SeqID_79160
actagtttagcgattcttaatttgacgtcaattttggctttagatattcggtggtatagggaagttgcaacatatctgtattatttaccctagttcggtatttgaaattttgaccagaacttaattcaatacttcctctgtcactacaccaaggttcttaacctttgggatatctatcacaaaattttgatttttgttcatgatagtgtattagtaaatgtatacattctcttttacataataatgtgtttggtccggtggattggttgaggtaagaaaaagttagaaaggcactagtcctctaatggaggctctggaaagctttttgcactaggcgattttttatttgcttgtttctgcaatctctctattctcctaggtgagttagagggattgcttgtaagggaacggctttctttctttcttctctctttaatacaaagatatgtagctcctgcatgtttgagaaaaaatttatgcctactccctaacaactgagctatcaaaaccaatctgctaactaccaaagctcctagctaacaaacagccaaatctccaaactaacaaatgtaaaggataaattcagcttatctctaagctgctgaactggctgggcccttggatgccgatccttctgctaccacagctgtcttctccacctttgaatgatagtagcccttaccc

SEQ ID NO: 13187 - DNA, 292 bp, Setaria italica
  Peptide Sequence Number=SeqID_79161
cgccccggcgagcaggtgggcgtgcagggcgtgcggcggcggcgaggcgtcggtgctgctgctgccgtgccggcacctgtgcctctgcaaggcgtgcgagccccgggccgacgcctgccccgtctgcctcgccgccaagagcggcgccatccacgtcgctgacggctgatgaccacacgcccggctcgccgtggcggcagttggctccgtaggcctcgtgctcgtcaacaacctctccagacgtgtagtgtaatcagtaggcagttagattagataggtttgatcgatcccg

SEQ ID NO: 13188 - DNA, 2520 bp, Setaria italica
  Peptide Sequence Number=SeqID_79162
tttttttttttttttttcgttcaaaacaaattggcaatagcctgcatttgttgcttcttacagatacaggtaccaaaggaaatggagatgcagataactttaacatccacaacatcagtactgagggtaatttcgggtccaagcatactgcttacataagcaatacatctctggtgctacccagaatgtgtcccatatctctaagggatgagtttggaagtctatatctactcagcctaattaacctcttggagcatatgccactcggcaaacagggacgcatattcacaacacgaacccactttttttcactagcttcaatgcctttggaggatccaagtatcatggggcaaacgattcacttataacaaatgcttggacaagacttcgggctgcatgcatctggtctggtgtgccagatattaaaacagcagtgtccattgcatcagctataggttcagcgactgctatcttagcttccgaaaactcacgaatcctatccaaacaacctccatcttcaccacagagagcaggaataactaatcttggaacaaagacctctgcagtcaagtttggcatcatggatgactgaccaggaccagaaaatccaccgagttctctatgctccgctccggggatatcaggtattgacattggatcaccaacatcacgaatgccctttattgtccaaggggcagagatcccatccaatggccgtcccataaaatctttatgaaacagagatgaagattcatggtttcccacatatggaccaaactgagaatctaacaaaccaaaaggtggccgcatattaggacccaatgcaggcattctgtctcggaaaagatggttacgaagcctagcagttatctgcattagagcttcttgaatagcgtcacagcccccgcttatctgaataacttcatcatcttctgggacacccatcgggatcttgtctttgctcagcactactataaatgctcctgaaagcttcctcatttcagttatgatgctacctcctttgcccagaaggcaaccaacttggttgggtgaaacaatcagcctacacattgcaggaccctccttatcagaggcaggcaacataagtttgcgctgcacatgcaaaatggcattctgtgcaggggagattccatcacccggatgcgcaggtccagatatacttatgatgcgatcatccgtttttggaacagtgtcaagaacttttatttcacagcctgtatcattttggatagttttaacagtgtttccacccttccctattacactgccaaccttgtcttttgaacacagtaacctaaaggtgaggggttctataggaactgaggcatggttgtgcatcggagcttcatgtatgataggaaaaggaccaatatttggttgacgatcaatggtatcaaaaggtccattggcttgggatggcccttgcaaggggaaatggaagttagattgcattcctgaaggaaaaccatctgactggctaaacaatgagcgcgatgatgatccagaagaatgaataccagtaactacatcagattccttgggtggatgagctaagagcaattcagctactgcattcagacctttccttactgagtcaacctctccattgatctggcaaagtctgtcattggatagtgcacatggtggaaggttgtcctttgaaacacggatttcacagccgttatcaactgacatttgcttaatcacactaccacccttccccaaaagccaacctgcttggctgtatagaaccaataatcgcaaagaaacagaagtgctcgcacccgatgcatccccagtttcattatcatcttcagctgcaaaaatcctatcgaagacaaataaaatggccttcagtgctgaaggtactgccctctccggttctgacttcatatctattgcaacaaagggatcatctttttcttccttactgtggtctttctctgaatcatcatccttttcttccttactgtggtctttctctgaatcatcattccttttcttccttattactgtggtctttctctgaatcatccttatcttccttactattttctttctctaaatcacccttctgctccttgctgttgtctttctccgaatcatccttttcctcattacggtagtctccctctgaaccatcttcttcccccttactgaggtttttctctggatcatcctttttctccttactgttgactttatccttctcatggtcaccacgggcagaaacagcaacacctccatcattctttccaaattgctctctactagcttctacatccttctcaattgcagatatgaaaataactctctcgtcacaatctaagactgctttatcaaccctgattctcactccagtctcttgccgtatctttgcaataatgctgccttctttaccaattacattcccagattttgaagcagggcaaagaatgcgaaaaaatgggaacaccaggctctatttttgaactgagatttatgtgaagaagaattgct

SEQ ID NO: 13189 - DNA, 1143 bp, Setaria italica
  Peptide Sequence Number=SeqID_79163
tgctggggcgacgcgtaatttctcccatctccctctctgcctgcgggcggcctgcctgcgtgctgctcgcttccgcgtcgcccagcacgagccccccacccccacccgcgcccgcgctcctccccttcctcgcctcccctcctcacccgcgcgcgtcatccatccccccttcccgtcttcccctccacctcgtcacgccgcacgggcccggcccaaatccctcgcccctcgcctcccacctcccggacgcgctctcgccacaaaccctaaccctatctcctcaccggctcgccgccgccgcgccgccggtcagtcgtcggcccactccgtccgaggtgcgtgaaattggctagtgcaaaggtgacccagctggagttcggcgtgtgtggtaatggaggggcgtgggaaccctccacttagcaccactgaagcagtgatgaagaagccaaggagtgttgcgtcgaggaagccaaggtccacggagcaactcgcctctgagtacaatggcatgtgtgcgccgtctcggaacatttcccaggatgatgacaccggcgtcgaagccggtgggcaccggaggaaagagctatacctaaatagccctgagatgaagggctccatgactcataagaatgacgtgtccaggaagataaggaaggaagacagatctggaggagactatgatggtcacagccggagcagcaaatcaaaggatgctgccagacgtggtgatggtgttcttgcactggagtgtactacaaggtctggatcccctgataacccacggttggtcccgagggatggcagtgtgcatggtgagaatagtattagaaaagtaaagctcaaagttggcgggattactcgaaccatacatacaaaaaccatccaagaagcgggtggtagtggcattcctgccacatcggatggctcttctcatcggcataagcacaaggattctggtgggcacacaaacagagatacccatggtaatcgtgttgaaggaaaacatggcaatcggcatgacatctcgccatcttctgaccttgttcgtaagagcaaaaggattcctaagaagaaaccacttgatggagattctgatgatgaagatggtgaattgcgctatctggttacactccgagggctaaa

SEQ ID NO: 13190 - DNA, 570 bp, Setaria italica
  Peptide Sequence Number=SeqID_79164
tggtctggcaccttacctgttccgaccactatcaagcgagatgccgcggggctcgtcgagcaggggtgcgagaggggggcggggaaggagccagggcaggggtggcggtaggagaaaggattctggtgggcacacaaacagagatacccatggtaatcgtgttgaaggaaaacatggcaatcggcatgacatctcgccatcttctgaccttgttcgtaagagcaaaaggattcctaagaagaaaccacttgatggagattctgatgatgaagatggtgaattgcgctatctggaaaaactccgaggggctaaagttgcaccagatcctatgacccctgggcatggagcttatgatgattctgttgatgatggtctcaagaaaaagaagctgcccaaggtttctaaaaacaagagcaccccatatgaagtggatgaggactttacaatgtcacggtttgtcagggatggtaggaagaatttacaattaggggatggcaatgagtctattgaagaggaggaatcgtgagatggatgaaaagagtgggactaaggagttgattcaccttcgag

SEQ ID NO: 13191 - DNA, 409 bp, Setaria italica
  Peptide Sequence Number=SeqID_79165
ggggttcggtggtacgaaaacaaagacaaaaggacgtgcatcacgggtgacaccagcgctcgcaaccgctgctgcaccagcgcaggaggtgggggaaaacggagaaaaaagacacggcgcggcaggcaaaatgattagccggatgacgcgcggggccgcgcgcgaaccaagcacgaggcgactgcgagagatctcggcgcgggatggagcctggccctgacatgcaacacatggagcgtgccagagccaggccgagacggacgcccgggtatggcaatggctagctagatgaggtgggtcaccacgtcacgtaccgcggctaggtagtgcaagaccactgcgcctgcatgactcactggcttgtcgtttatctggatgtcctcggcatgggtcgtcgccacatgggtga

SEQ ID NO: 13192 - DNA, 900 bp, Setaria italica
  Peptide Sequence Number=SeqID_79166
gctttcctgaacatgttgccaatacttgatcatttcacaggctaagcgccgttttactgctaaagtggcctttggactatcgatagccaaaccaagctgcatgtccaccccctgtagaaagaaaccaatgttcaggaaaaaaaaatgaaatatctaatatcaaatgtattggctagcaagagtacagataataataggactaatgtatcagacatgtcaaagtgtagatttgataaaccatgataaatagaatgctagtactaggtttcttaggctgttcccagcaacaaattgcaacttaagaagtataaaattgtgctattcaatacatgctgcttcagcagtaataggaaatatatcgttcaaaatcacatgcaggcataatatcttctgtgctcttttcttttcttttcttttctttctaagcatatgtccagtattctcatcggaaatatttttaaatggactgtagatttatattgtggaaccatttaagaagttgttcaaaaaaaaatccaattttccaagttgagaagacactccctgacccagagcttgcaggcttaaagctttgagatttccttcaacgaggtctactggaagttgcctcctgtgatccatatattgaaggggaatgtttcagcagatgttttaaaattcgaatggaagcctaacactaccagaaagctacccaaggtgtacagaaccttagttccggtggaatctgtggaagtacatgccgaattgcgcagtctaagtatccagctgccttcaagaaaacatcaacagtgacccttctgctctcttcagaaactcttggtgcatagccatcgccgtatgacctggggagaagcagggtgttggcctgcagcaagcagaccatggccatcaaatgcagca

SEQ ID NO: 13193 - DNA, 712 bp, Setaria italica
  misc_feature (651)..(651): n is a, c, g, or t
  Peptide Sequence Number=SeqID_79167
gacgctccccggccgtctccggggcccgccggcggcgtccttctggctcgacgccccgcaccccatggcttcacagcggcctgtttacctttgtcctcccctttccggcggcctttccgggattcgtcaggccacgagccaccgcccgaatcgaagcctccacctccacccagcaagggccaccgccaccactactacctccgctccccgtctctgcagtctctgcacgcgcgcacaaccgaagaaataaaccacgacgaacaccagtgagcgagacgaagcaactcttatcctttaaaacgttcgcagggggggaccagtaatcaacatcggaacaggagtgcaacttggcgtaacgtacggccaaattggcatacttttcgccccgaaaaggcgttgtttttttggtgtatcggcggcaagttgtgccatcggaaacccaaaaaaaaactcaaaagaaaacaccaggggatgcctgcgctagctagtgctaccggtacgcgatcgatcgagcaatgcctctgccgccatattgaaatgatttgttacattgattaaggctatcccaaagatcgtgaaatcgagctgcgaaatccaggggaaaacgaggagccacctaatcctttgacgacgcggggaacgtcaccccgngcttgctgcttcttgccgccgagcgcaggtacttacggttctagaacgccaggagataaaa

SEQ ID NO: 13194 - DNA, 1931 bp, Setaria italica
  Peptide Sequence Number=SeqID_79168
ttttttttttttttggtttacccaaggactaggttacccaaatacaaaattagtgaaactctgaaggttacagttcttgaaatatcattgaatctggcaaagctattgagggaccacacataaatcagaacgggcccaaagctatgcccttgtcgagaaaatgcaagcatcaggaacatcaggaatcaggatcaagaatgttaaatgaaccctttgacaaagcatttcccttatcagaagaaaaatcgcctgtacaatgctcttcagattatcttcaggccttcctaacaattggttggattttttttgatacgaaatttggttcaaacatactttgtacacttttaccatgctcagctttcgcatggcagatcttggtgcttcttgtttctctctaacgccaagcttttcgtctgaagaaaccattctgttgcatatacacctaatgacgtctgtcttctttgttccaaagtggatctaatggaggaagatcatagtcttcaggtgttagcgccaatgcaaaatctggtaagggaggcggagttcctatgaccttttcttgggtatacaggtcctggttgattcggaccttgcttgaagcatcttttgggatcttgtcaaacatatattttgctgttccgaatggagtagggctcctcgatgttggaggagttgcatggaaggcttccgaaacccttttgctttctttcagaaattcttctgaagcttgaagtgcggctattgccattccatgggatttctctgtatttccctcatcaagaatcaaaccatgaaaatagtatgctgcagcctttgcttcaacatatttccacttgacaaacagccggtgctttttcccccatccatcagagccaggaagatctggaatgctttcctgaacatgttgccaatacttgatcatttcacaggctaagcgccgttttactgctaaagtggcctttggactatcgatagccaaaccaagctgcatgtccaccccctgacccagagcttgcaggcttaaagctttgagatttccttcaacgaggtctactggaagttgcctccttagttccggtggaatctgtggaagtacatgccgaattgcgcagtctaagtatccagctgccttcaagaaaacatcaacagtgacccttctgctctcttcagaaactcttggtgcatagccatcgccgtatgacctggggagaagcagggtgttggcctgcagcaagcagaccatggccatcaaatgcagcacggacagcacctcgtaccaggcatctgccatggccgtctcctcagcattatcctcttggttagtccaagtgaattgcacggcgtgcctcaacatactaccttcttttaccaatcctagcagaacgggcaagtattcttcaagagcctgtaggagattggctgtactagatccgtgccgtgccgccgccctccgccttggcttcagcgccaccgccgactcttgcattgccatctcgacgacgcgcgctctcagagccgacagccgctccacaatgctcctgtccaggcgcccgccgagcgcctgggcgaggtcgacgctcctcggcacccggaggcccgggaggaacacgaccacgtcgccgacgctccccggccgtctccggggcccgccggcggcgtccttctggctcgacgccccgcaccccatggcttcacagcggcctgtttacctttggtttccccttcccggcggcctttccgggattcgtcaggccacgagccaccgcccgaatcgaagcctccacctccacccagcaagggccaccgccaccactactacctccgctccccgtctctgcagtcttgttcgagtgtggacgcaggcagatgagcgaagaaggcaatggaacttcttcctcctggtgagctggactcccggaggaagaagtcag

SEQ ID NO: 13195 - DNA, 985 bp, Setaria italica
  Peptide Sequence Number=SeqID_79169
ctgagcatacgggtctgatcagtgtcacagaaaggaccgtctcttctatataaataaatcaatttcgggaaacatgagtatgaattgtcactgtaaaatgtctacaaattctgttcatggaaacaacacttctgtgcaagcagcaattacaggtgcagcacggccatggatttcagcctgcaggacatggtgtcggcctctgtcgccgcgttttcccggccgatccggctccacctctgctcggtgtccgaaacccggcaggccgtcacgaaatccaggaccttgccaaagatcctgaacatctccacggcgtagatcctgtccccgccgacggcgaacgccgcgttggggtccatgggcgcgtccgggtgcgccgccgcctccttccactggagcgaggtgaggtcgagctcgaacagcttccgcaccaccttctcccggcggctcaccggcccgtggcggtcgcaccacgagacgcagagcatgaacagccgcgacgcgcagcacgccagcgtcggggcgtagtcccggagccgaggcggcgggcgggacgtctggacgacggcccagtagcccttgtccaggtggtaggcgacgagcgtgtcggactcgcagtacacgtagaacacccgaccgcagacggcgccggagcacgccagaccgacgtcggcggggaacccggcgatctcgacccacttgtcggtcaggggatcgtatatctccccggacaccagcggctcgtcccagtgcccgcaaccgccgacggcgacaatggcgagcctcggccggccttcctcgccctcctgcccgacggatttctcatgagacggagcgagctccgcggagtcagcgtcctcgttcagcatgtccttgagccggaggcgcctgagggagagccggtgcgggtcctcgtacacggcggaggcgcctcccaaccgggacttgcccgccggacattcttctcggcgcgggcgtggagaatgct

SEQ ID NO: 13196 - DNA, 828 bp, Setaria italica
  misc_feature (115)..(115): n is a, c, g, or t
  Peptide Sequence Number=SeqID_79170
ccgcctacgccttctcaccctccgctcgccgctacccgacgccccgcgctcgtcgacgccgccaccggcattgccgtctcctacccctccttcctcgccgccgtccgctccctcncgggggggctctggtccgccctcggcgtccgccccggggacatcgcgctcgtcgtcgctccgtcccgcctcgacgtccccgtgctggacctcgcgctcatgtccgtcggcgccgccgtctcgcccgcgaacccggcgtccaccgccgaggagttcgcgcacatggtcgcgctcgccaggccggtcgtcgcgttcgcggcccccgaggtggccgctaagctgccgaggggcctccggtgcgtcgtcatcgggtcggacgagtacaagaggctgtcgtccgccggaggcgcgtcgccgccgccgccggtggcggtgaagcagtccgacacggcggccgtgctgtactcgtcgggcaccacggggcgggtgaaggccgtcgcggtctcgcaccgcaacctcatcgcgctgatctgcacgcacagggcgaaccgggagaaggtcgagaaggaggctgccgaggccggcgaggagccgcccccacccacggtgacgctgctccccctccctctcttccacgtgttcgggttcatgatgctgctcaggtccgtggccatgggggagaccgccatcctcatggagcgcttcgacttcggcgccgcgctgcgcgccgtcgagcggtaccgcgtcacgctgctgcccgcggcgcccccggtgctggtggccatgatcaagtccgaggaggcgcgccgccgcgacctctcctccctcctcgtg

SEQ ID NO: 13197 - DNA, 381 bp, Setaria italica
  misc_feature (351)..(381): n is a, c, g, or t
  Peptide Sequence Number=SeqID_79171
caatgggttgtggcatacactgcagcctaacaagatggtgacgatgatgatgacgaaaaatgcatctaagtggtaagcttcagatgataaccaggcgatgactttccacgcgtgtaaatatctcggatgatcaacatgcctgttcagataagcagtgcctgagttcgcaagctagctgccgtgtgaaatcttgtgtgtggttataactgtaaggaaagaataatctgtgagagcagctggtgttgttcgtagctgctggagtgtttccgtccttttttgtctgcatgtagttgtaagcagtatggctggtggcgactgacgaaagactaattgttttctatatggttagtnnnnnnnnnnnnnnnnnnnnnnnnnnnnnnn

SEQ ID NO: 13198 - DNA, 1097 bp, Setaria italica
  Peptide Sequence Number=SeqID_79172
ttcttcaaggagtaagctgcaggttagagagcccaattgatttagtaaggaagatggctagtgctgttgcattgacattttctaaagttgttgatccaaaaaatcctctgtaccttgatgacaattgttgtgaaaatgttgattgggagtttggggttctctctccgaaggagatcaaagccccattacatgttgtagaatctaaaaataagccaaaatcacgtgaaaacaagagcaatgctggtgagaaaaaggcaaaagcagtcaaacaggatgttccagacgtcaaaccaaaaattgtggagatcaaatcaatagatcatgatcaaatatctgatactgttacgaatgagcaatttgaaggggaagaatgtgatgaggaaagcatgaacatcgatgcacacagtgattcatccctggagccatatgatctatcagatgatgacactgatttgcaaagaaattcagccacctgagtgatattgcagcagcactaagaaaacctgatgatccagatggtgttgaaaatgctcttagttctgctgaaaagcttgtgagagcatcacctgatgaacttcgccacaactcaggtgatcttgttagagcactggtgcatgttcgctgttctgatttggcaatggaaggagaggaagattctgctgaagaaaagagacagaaggcattagttgctttactggtaacctgcccatttgaatctctagatgttatgacaaaattgctatattcatctagtgtggatattagtcagcgcattttgattattgatgttatgactgaggcagcacaggagcttgcagaaactaaaattgtgaagacagaacagcgacatggtaacttgataactgacagttctccctcttggctggttccaagtaataggggacctcctggagcagggccttggagagaggtctctgaaccaggaacacctttaagttggtcacaccgctatgaaagagaagttccatctagatcaggtcaagttaaatcagggaaatctcgtaaatggggtcttggaaaagcaaaagacttgcaggttgagtggtctaaaaatagatttccttgtatgctgctgc

SEQ ID NO: 13199 - DNA, 901 bp, Setaria italica
  Peptide Sequence Number=SeqID_79173
cctatcccctgtgtgccttgcctatctcctgttgcgtgtctcaggttccatctagatcaggtcaagttaaatcagggaaatctcgtaaatggggtcttggaaaagcaaaagacttgcaggttgagtggtctaaaaatagatttcctttgtatgctgctgcttttatgctccctgtgatgcaaggatatgataaaaggtcacatggtgttgacttgctcaatagggactttgttgtcctcggtaaattgatatacatgcttggtgtctgtatgaagtgtatggccatgcatccagaagcatcagctcttgctcctgctcttcttgacatgataagatcaagagatgtttcgcaacatgctgaagcatatgtcagaaggtcggtgctgtttgcagcatcttgtatattgatatctttacatccatcatacgtggcatcatctctcatagaaggcaaccaggacatttctaccggcttagagtggatacgcacatgggctcttcaagttgctgaagctgatcctgatacagaatgcacatcaatggccatgacctgcctgcggcttcattccgagatggctcttcagacatcgcgtgctctggaatctgcggatcactccaagactggcagggccctacctactaagcttgatagcatcatcataccgtttggaaacatgtgatgaactgcacaagtagtggagggatgtatcctgttgtacagaagttatgcagcaaattctggttatggagtagagtaagcctagcttcccggatgtagcagttgttcatgtgctgctcctgtggcagtgcggacgctgcagagagagaaacttttcatttttgggatcatcagacgcaatgttattgcgttgttgttcttgagtgaaagcagcaagccagt

SEQ ID NO: 13200 - DNA, 492 bp, Setaria italica
  Peptide Sequence Number=SeqID_79174
ttttaccttttttactttttagttttaatttttagtttaattttttaaactttagttagttagtaaactagataattacccaaagatagtgttgagaactggtgagtagtgattaagagctttgtatgtcttgctgacaagtccaagaagcagctctacctcatcgccaagaagatccacctctgcttccgctgtttggaggtcgcaacatcgcccggtgaaagctgtcctgtaaatgagttcactttttttaagagaactcacttgttcagccaaatttgccaattgtttgtccaagcctctcaatctggacaaggatcttccaacctttatccaagccttatgtcatgaaaaattatggaatggagactcacaaaccttagaacagttgttcctaattttccacaggtaacagcttcaaaatccatgaacattgcctgaaatttagttgatggaatgaacatttcttatttccatttttcaggaggcacg

SEQ ID NO: 13201 - DNA, 2606 bp, Setaria italica
  misc_feature (662)..(662): n is a, c, g, or t
  Peptide Sequence Number=SeqID_79175
cttttctaggaacagagcttcctgcttgctagtcagaccgagatcactcaatgacatctggctctcccccatcagtgaatgcacgcctgggataagatctcacctgcccagcaaaaagtcacaaaattcagtaacagttacaagaacaggaaggggcagacacagacgacaaattatatgtacaactatgactcatgtatcctcttaataaggctcgctcagtgccatcactcaatagtcaatactagaaaacaacaataacccgatcagctgatcagctaaaaatgcaacgatgaactatagtgtctgcaaaaataactatccttgtacagtaaaagcaaaaaatgattggtcgtgccatgcagctatcagtgacctgtctctagtgtatggtactatctcaacttgctagtgacctgactacttgaaagccaccagggcaattgatgatacaagtctataacaattaacaagtgtagaagataatcaagaacttaacaggatatttcactatagccacatagataattcaaaaatggtccgataaaataattcaaattccaataagcgaaaggagccatgtgttcaaatatagaggtaccatcgaaattgcaaagtgatgtagccaaaagaaaaaggtactgcaaaagtattcagaaacnatagtgttttttcttggtgtttgtaggaaataacgttcctctgaatgtagaattgtatatacatcctgacggcacgttcaaagtggccatgagactagtgttacacgaactgacaggagtcagtgaaaatgaaacaccaacgtttcacaccacaaaagatggccacgggatcaacagttactatcatccaagcactacagtatttttcatgaacacgcaacatataattttagaagtgcatatttctaccctgaaatcttttctaggaacagagcttcctgcttgctagtcagaccgagatcactcaatgacatctggctctccccatcagtgaatgcacgcctgggataagatctcaccagtctatatgttcctggtttgaaagtcctgctgatgtctatgaaatcgaaaagatactgaagcttgtcggatttgagaaagcgccgtcctcggcgactaccatcaggcatgcggactaccactgtgactgccccctcatcattttgtagtggctcctttggtagtgaagcttgtttggctgcaagctcggactctaactcctcttcctcacgctgtttctttagcttctcctcctcttccttcttttgccgttcaagagcagcttctcttgctgcagcttcctctgccctgcggagctcagcctcctccacagccttcaactccttttctcgatcagcttggagggctgcaagatactcatcgtcctgctgttcccttaacaaccgctgtgcagttaatgctggtgatggaggacgtgctactcggggatagtgggttgatcgtccacgggttgggaaggaaaatggatacggtgctccttcaggaatcccaccaaacattgcagcctcaagcataacagcttcgtcatgctcttcggaagaaatgccaccccactcttctgaagggaaaccgccattatgctgatggtcattttgaatattatggggctgaggactcaagggaggactgtctgccatttgcaccacttccactggatcagtagttctgcctcggacacgtctagaacgttgcctaactaaaggttgttcgtcatcatcttcaatgtcctcctggaagttctctccatctacagtttgctcagaagttccaactttacctgtggtaagtccttgcctttcattcatcccacttgttccttcagtgtcttctttatcagataaatcaggagaaggctccgctacatgcattccctcttggcgcagagctctctctcgctccgctgtctccaaggacaaagaaactgcccgagcaagctcatcatcacctctgccacgtgatgtgttctcagtttcaccactatttagatcatttgtcatgccttcagcttccctttttgaagcttcaattgctgcccggatcatctcctcttctatatcattgttatagtcgctaacattaactggtggaggagcacttggcatgaaatggtttgggcgtgaagtgctgcttgggatattaggatcatgagcagacggtgttgatggcaagtcttcatcatcttcatcaactataacagtcccatgaacctctggaccatagaaagattcgcgtccagtaacatcctcaataaccggaccctgaccagaactgcctgtttgagtattggtgtccttaacttcaataggtacctgcctcacctccctaggatgtgtaacctgaggtccacgtccaaatatatcagcagcagttatgtcggcaaaacctggacccaaaagttcaaaagggttgcccaaagttctagggaacaaaggtctgttaaacatgggatcaagtggttcatccagctccatgtcatcaacactggcaggtacaggattttgattgattctggtggtggacctatccccctcattaaaatagcattcacagctccatttagatcgttaccatgttcctcgagcg

SEQ ID NO: 13202 - DNA, 273 bp, Setaria italica
  Peptide Sequence Number=SeqID_79176
gaagaaacggatgggaacgggccatgtggaggtgggccgttttcgccccgaacggcccatgtagccgtgctggtccgaaactgaataccgggcccgaccattcgggccctctatataggcattatagcccgatcctttgtctctgtcagtgcagcggataacgtactctgctccggccatggcttccttcgcctccctccgtggcgccatcctccagggccccctcctcgcgcctcgcctcgctgtccgccgcgcgcccacggccaggcgccg

SEQ ID NO: 13203 - DNA, 248 bp, Setaria italica
  Peptide Sequence Number=SeqID_79177
tcctgcgtcggccggacggccttgctccgcggcatcgtcagtgccttcttcctcgcgctgggagcttcgaccttcgctgtcttggtccgggtcggagacgctcgcatggcgcagatccgctggacccttggcttgggcttcaccgctgccttctcggcggcgtctgttgccgcgctcagcctcgcgaaccgggccctcggaggcttcggcggtgcagaatgagggcatttcagcatcgagctctgatt

SEQ ID NO: 13204 - DNA, 761 bp, Setaria italica
  Peptide Sequence Number=SeqID_79178
aaaaaaggaccaccgatatcattaacccaggcgagcagagcttaactctcaatgaaatcttatttcattttcaaacaaatatctaaatcaacattcaagacctttgcaagctgcatgccagaatcttatcatcattacaagtagctacacgggaagtaggggcaagttaaaagttgtgtatttcatctaaatatgatcgaaagatagtaagatacaggtgcataaaaccaagctttagaagtgtgtggtagtaaactgcacattcgcaatctgaggttgtgcagaacacatcacacacatgttgtacaagccatgcctaaagtaataaagttgacagaagatacaaattcgtgtgtcataataatttgaaacaaaaaaaatgtagaatacaggtatattttacacctgcaagataagtcgatgtcaacaagtttgacattgcaaagtttgttcatggttcagaggcaattaactcatatactaaacagcttcaagagatgatcccaaaacacagggtccacattttctaagaaaaactgactatggatacaaacacaataaaacaaagtgcattccaaaaggatttatgaagtgtattatgaaactttaccacaaaaaggagcaacaaatttctattctaactttctttgaatcatgcaagatagaacaatgcagagcacgcggcatgcctacatctctagcattcaccaacaggtaacgaaaacattgacaaaaccagtggctttgccatggaaccaaaa

SEQ ID NO: 13205 - DNA, 497 bp, Setaria italica
  Peptide Sequence Number=SeqID_79179
gccaagcgccaccgtaccatgcaaccacagctgcagtgaccagtactggtgttgctttccgcgggcgcgcgcgtggccggcttgcttgctttgcttcccgtggcacaggcctcctagctccacgccgaaaggaagcaaggatgacgacgaaggtgtcggcggcgctgctgtgcgcggcggcgctgctgctggtggtggcgccgctggcggcggaggcgagcgagctcaagctgggctactacaagaagacctgcccggggtggaagaacgtggtcaagtaccacgtcgccaaggccatcagggccaaccgcggcagcggcgccgccctcgtccgcctcatcttccacgactgcttcgtcagggtacgtgccgcgccgccgtcgtaactcaccacgcacaacacagctcctctccgcccatagctattagctcagttcgttcgtccgtgtagctagctacctagcctcacgccattgtccgaccagccacgttcgccg

SEQ ID NO: 13206 - DNA, 635 bp, Setaria italica
  Peptide Sequence Number=SeqID_79180
gacacgtcactctacagcaacagcactagctagtagttgggccatctgattgcaatgcagtacgtactagtagtagggtggttcattaatgcagtgtcttaatctcacttcaataattccgtcatctctcgattaccactagcttaagctacatatgacatgagtgaattacagacacgtacgtgcgtcgcagttcattttttcatatgatcgagctatccgatcgattgacggtgactggcggtgcagggttgcgacgcgtcggtgctgctggacccgacgccggcgaacccgcacacggagaagacggcgccgatcaacatcggcctcgcggcgttcgaggtgatcgacgacatcaaggcggcgctggaggagcggtgccccggcacggtgtcctgctccgacatcgtggtgttcgccgcccgcgacgcgtccagcatcctgagcaacgggcacgtccacttcgacccccccgcggggcgcctcgacggccccatctcccgcgccgccgacgcacagcgggacctcccggactccaccttcacaatcggcgagctgatccgcaacttccggcgcaagaacttcacggtggaggagctggtgatcctctccggcgcgcacgccatcggcgtcgg

SEQ ID NO: 13207 - DNA, 1576 bp, Setaria italica
  Peptide Sequence Number=SeqID_79181
agcaaggatgcctgtgccacgggaaggtaagcgccaccgtaccatgcaaccacagctgcagtgaccagtactggtgttgctttccgcgggcgcgcgcgtggccggcttgcttgctttgcttcccgtggcacaggcctcctagctccacgccgaaaggaagcaaggatgacgacgaaggtgtcggcggcgctgctgtgcgcggcggcgctgctgctggtggtggcgccgctggcggcggaggcgagcgagctcaagctgggctactacaagaagacctgcccggggtggaagaacgtggtcaagtaccacgtcgccaaggccatcagggccaaccgcggcagcggcgccgccctcgtccgcctcatcttccacgactgcttcgtcaggggttgcgacgcgtcggtgctgctggacccgacgccggcgaacccgcacacggagaagacggcgccgatcaacatcggcctcgcggcgttcgaggtgatcgacgacatcaaggcggcgctggaggagcggtgccccggcacggtgtcctgctccgacatcgtggtgttcgccgcccgcgacgcgtccagcatcctgagcaacgggcacgtccacttcgaccccccgcggggcggcctcgacggccccatctcccgcgccgccgacgcacagcgggacctcccggactccaccttcacaatcggcgagctgatccgcaacttccggcgcaagaacttcacggtggaggagctggtgatcctctccggcgcgcacgccatcggcgtcggccactgctcctccttccgcgggcggctgtcctcgccgccgagccagatcgtgccggcgtaccggaacctgctgtcggcgaagtgcgcggcggggcccgaccccgtggtgacgaacaacgtgcgggacgaggacccgagcgccgtggcggcggcgttcccgtcgttcctgaagaagctgaggaagaacaaggacttcctggacaacagctactaccacaacaacctggcccggatcgtgacgttcaactcggactggcagctgctgacggagaaggaggcgctggggcacgtcaaggagtacgccgagaacgggacgctctgggacgaggacttctccgatgcgctcgtcaagctcagcaagctgcccatgccgccccacagcaagggggagatcaggaagcactgccgcttcctcaaccaccactagcagcttccttcgttccttggatactactcctacgtactacatatacattatctgcaggctactacagctgaaactgtgattactgtctcgttcgctctcgcagatcgtcggtcgatcgatcggttcatcatttgattgttcattttgctgttctcgtctatgtgattctttcttctttctggtgttggagataatgtgattgatttgttgtatgatctttgtttgtatggacaaattacgaaacaagagtgggcagggtgtgtgcatgaactgctggttggactttggacaggatcggagtccaattttcatgtaataaggatggtccagggaagtaattaaagttttttttgaggattattagggaaaaaaaaaa

SEQ ID NO: 13208 - DNA, 1127 bp, Setaria italica
  Peptide Sequence Number=SeqID_79182
caccagtgagcaaggggatcctttacgtacacaagtccaggacctaccttgttggagatcaaacgaacggtggtagccaaaaaaagtgttatggcagtttgcactcattgagcaaacaatgattgaggcaccagtagaacagtagggtgccttgacagctggaaggagtgcgtgtaacagaggatatgacaaatcatgcagatcatgtcttgtatgttacaaatttaccttcagcaccttaaatccacgaatttagtatactcttgagcaccattgccagtctttgctctttccttcagcatccttttctttcaactttgtcatagaatccgagtcaaacacagatcaaccgatcattgcaccttctcgtttgtactttacattaccattcactgagtcaaacacagatctataagttgtcttagcaagatgccattgtttcttccagaactatgcattgttttgtcctcggatcctcccacgagccgtgaaagattccagtggttttgaggcagaaaagaccatttgtagaactcaatggtgatttacttggtcagtcgcactaatgatgcccatacctcatcagatggagggggtgggctgaacccagtgcccaggtatacggcttcctccaggtctgatgaaagaatcccacattctgcggacctcaatgagtgtccccatatcatagctacttccatgataataatggtagaactcaaaaggaagattgcttacagggtcatgatgtacatgcccttttccctcaactttatgacctacatgttctgttttctgactggcctggtcatttttctcacttatccctacatcaccctggttcttgtcttctgttggtccacttctaaattgctcagaaccatcttcgtgatgattttcattctgtggagccttccttgactcctcagcagtcagaatagcatccttaacagcatcagtccgagcagcagttgcagcttggcgctcctcttcctcaactgcagccttaacacgctcaaggtatttatcatcctcttctggaagaaaatgaccttgcttcttcattttttgaactcttatagaacgaagttcctgaagtttctcgaccattagggcaagctcgagct

SEQ ID NO: 13209 - DNA, 398 bp, Setaria italica
  Peptide Sequence Number=SeqID_79183
acaccttgcagctccagaagatgtaatcacgcaataatggatcgtattcgactgaggactcaggttacaatatataggacccgatcaaggctatctcaaccacctggacttatagaaacaaaatcacgggggagatgctgatcggggccacgcatgtggccgcgccaaccaggctattgctgtgacgcaggggcaagccaggctacagccgtggcgcccaagataggagagagaagggacttgctaacaagaattatgcatggatgccaggaagaatagttagtgttcaaggaaagatattagagaaaaaggcggaatctccctgatatagttgtatcacatgagttgggagaagaccgtggattgctatagccctggtcagggattgatgcctgcta

SEQ ID NO: 13210 - DNA, 1172 bp, Setaria italica
  Peptide Sequence Number=SeqID_79184
ggcgtacttattgagcgaggtggtgagcttcttgatcgagttcttctcgcgcttggcgaacgccttggactccttgcacggggtgaggccggcgatgtcggcggcggccggcggaggggaggtagcggcggaggagaggaggcgtggtggctgctcggacgcgcggtcgtcaactactgcggcagtgccgtggggacggtggccgcgaacgacccgtccaccagccagatgctcaattacgaccaggtgttcatcagggacttcgtgccatcggccatcgccttcctcctgaagggtgagagcgatattgtgaagaacttcctgctccacaccttgcagctccagagttgggagaagaccgtggattgctatagccctggtcagggattgatgcctgctagtttcaaagttagatctgtgcctttagatggaaacagtgaagcatttgaggagattcttgaccctgattttggcgaatcagccattggacgtgtagcgccagttgactctggtctttggtggataatactgttgagggcatatggcaaaattactggagattacgctctgcaagaaagggttgatgtgcaaacaggcatcaggctaatactgaatttgtgcttgtctgatggatttgacatgtttccgacattgctagtaacagatggatcatgtatgattgatcggcggatgggaatccatgggcatcctcttgagatccaggctctattctattctgctttgcgctgtgctcgagaaatgatcagtgtaaatgatggatcaaagaacttgatccgtgctattaacaataggctcagtgctctgtcatttcacatcagagagtattattgggtcgatatgaagaagataaacgagatttatcgttacaagactgaggagtactcccatgatgctatcaacaagttcaacatctacccagagcagattccttcttggcttgcagactggattcctgtgaaaggtggttaccttataggcaatctgcagccagctcacatggattttaggtttttctctctcgggaatctctggtcgattgtctcatctcttgctacccaaaggcaagcagagggtattctgaatctcattgaagccaaaatgggaatagaacaataagtaggaccaaattaattagtaccttacttactaaa

SEQ ID NO: 13211 - DNA, 282 bp, Setaria italica
  Peptide Sequence Number=SeqID_79185
gaataccttcaacagatggctgaattacagtaggctggccattttcagatttgaaaccagcggactccaagcgcagctcattcaaactctttattgcagaatctaagtcatctccagatgcttccagagctttttccagcaactggggatccatgtcggggaagagcgggatcagctggagcagaagcgcctcccgtcggccgcggcgcgggagggcggcggcaccatgtctgcggtagtctgtggcaagaggtcctcctccatcttcgccgacgagctcct

SEQ ID NO: 13212 - DNA, 1141 bp, Setaria italica
  Peptide Sequence Number=SeqID_79186
tgtgtgtaaggtagttgagcgtagcatttcatttaaacttgacagcagcatttcatctgtacaaccatgagacgatattctttctgatcatgttgctgaatatgctagccatggataaaataaatcatacaccgcatcatggggaaacactatatattggatagccaaattgcacgaaggcaacaaattttaaattaatattgtaacatgaaaattttggacccatgggcggtgaatccaccagtagcacactaccatatcaaggggcagctggtaaaacaagacatcttcatagattattaatctgaaggctgcctctatgcttagaagacatcaggattgaaacgcccaggcatggtgttgttctgctgagcctgcttgaggtgcattgtgagggcatagttgtttatctctaatgtcctcacttgttcctggtactgcaaaacaagttgcttcaagctttggacttcatgagacctctcatcaaactccttttggcgctcatgttgaatggcgaccgcccgtttcaggacagcattctctcgcagaacgactgtcaactgctccttgagcatcatgttttccttatgcaggttttgtgaagcttcagctcctgcacgctctacaatggacttctccaaagcttccaaagctctcgatgcacgagcccgtgcatcatctatgtcagaagcattagtcatctctctgacaaatagctcaacccattcagaaccattattacttgtctgataattatcaacggcaggtggatgttctgtagcagtatccacggcaccattaggaataccttcaacagatggctgaattacagtaggctggccattttcagatttgaaaccagcggactccaagcgcagctcattcaaactctttattgcagaatctaagtcatctccagatgcttccagagctttttccagcaactggggatccatgtcggggaagagcgggatcagctggagcagaagcgcctcccgtcggccgcggtgcggcggggagcggcgggacctcttggccgccgggtggtggaggtggtggtgggaggagtgtggggatggaggtgacggcgggaggagctcgtcggcgaagatggaggaggaccttcttgccacagactata

SEQ ID NO: 13213 - DNA, 444 bp, Setaria italica
  misc_feature (427)..(427): n is a, c, g, or t
  Peptide Sequence Number=SeqID_79187
tccctgcggcctgtctccgaccgaaccgatcgacatggctgcagctgtctccatgaagctctcgctcgccttcgtcctcctcctctccgggctcgtcgtgttcggcgagcaggttgctgcggccaggaagagcagggtggactgctcgctggtccggtgcatccagggcgggtacatcacctgcgacaactacccttaccagaagctggagggctgcatctgcgactgcgcgcccagggacggcaagaactgcaagctccacctccagtccggctccacccaagattgcggcaaggaggaatgatagctatgcagccgagctatgcgctcgccatgcatgcgcatgcctccatgtaataagtttcatgcttagagtgtctggctagatagttgctgacttgctgtccaataagatgtactgaaacgnggctgccggcccctcgt

SEQ ID NO: 13214 - DNA, 1353 bp, Setaria italica
  Peptide Sequence Number=SeqID_79188
ttgttgaagaacatacatgaactcactacattgtaagtacatcacgagcgccagaaaaggagcctggaacctgaactcgcacagcgacacggccactcagtgctggtactgcgagtgagcagccgcgatcagggcggcgccgagaccggacccgtccttggtcagcttcaccgccaccgacctggacgcctcctcgcccagcagctccaccagcgtgctctccaggcactgcctgaactcggtgtagtgctcaaacaagccgccgtcgatggcgacgaccgaccgccgctcgtcgccggggacggccctcccgatcttcctgaggatccccacgatccctgctgcggccagacgtgctgacctgctggtgacgacgtcgcagatctcgacgaccatcttcctcgtctcgaggcttgtgtccttgatcttgaagttgtctgccagtttctcggccacgattctcagatcaggcgtttcgtcatggtgcattgcagagatatcaggagtcctcagaatgaatcgagttttgagcttagtgtggttgactttgccaaagagcgtagactgtgaggcgattttaagaagcacccgcctcacgatttctccgaggtacattccagaaatcaacttctcgaagatctgctctcctgggtttaaactctcctcgtctaatgcctgatcatattctgtgattgggaggcaggatgagtagaagttaccccattccgtattgatcaccatgtttcctgatttaggtaactcgccctcaaactttggtatggcgcttgcctcttcaacatatgcagcatttgagccagttcctaatatgacaccgatgacgacatcctcatcgttgtatctaccggcagccagtgtcccaacggtgtcattgatcaatgcagccacacgcatgtcaacgccatgcttctccatggccgtccgcaattctgcgacgacatcttcgcctacagcatcatcgattgagaacgctttggtccacttgatgagagtgcctgacgcaatcgatgtttgtctcacagggaacgagaacgtgaaccccagctccctatgcttgtcttcaaacacatcgttacgcccttcgtccacgatgaccttggctagcgcggaagcaatgaagccgaacagctccgacgcgttgcctgacatgaggtgaggagggatggagacctccttcgactcacgcttggcgacgcgcttctctttccccgcgagctgcacgcgcaggacccggaagtttgttcccccgagatccaaggagtagaaaaaaccctcttcattccccgtggggaggttgtcgacgtaggagatgatcatcttgatcttgctgccgcc

SEQ ID NO: 13215 - DNA, 462 bp, Setaria italica
  misc_feature (435)..(435): n is a, c, g, or t
  Peptide Sequence Number=SeqID_79189
gctgctgctgctgctgctgctttgcggcacctcattgtcacctcctccttcttcatcatcatcgtcttggccgccgcttgacgattcaccgcctctgccgtcaccggccgctctgataactgcaaacctccttgtgtgggggtggtggatgctgctgctgcatctaccacctgaagaagaacaaggagaagaagctggcaggcactgcaccttattggagcccttgctgttgatgaataatctccctctcaggctcagactcagagaggcatcctgaaggggcagctgcaggttttggggatggctagccacaacattcatcatggaccgcaagcttcccctcggttctgttccaagggaagggaagaaggaaggaatctgaaggatcgatgaccccgagctgagctggctatgctttgctagcgaggaaggganctccctttctcatggggagagagagag

SEQ ID NO: 13216 - DNA, 645 bp, Setaria italica
  Peptide Sequence Number=SeqID_79190
actccaatacaatgcttgtaacaactctctcaacaaaaacaatgcatctcaaatcttgcttatgtctgtactccagaagagatttaataagaaaatgaactttgggtgtcaataacccatcttgcaaatcagctgcaaagtcctcaccaatatgtcgttgtatgcccctcttcgtcatctttgatataatttctgagagatcactgtatgcatcttccatatagtttctaacaaattcctcgaccttctcatccagtttttcaccccaaaaggataagcagctttccttacgtgattgtaaaacctcagcagcctttgctgccagccatactccaagattgtctatgcaatacaagaaagttgcgctcaattgttttatccttttctccgcattttccaaagatgaatcatgcagttttcccttcaggaattctaaatgctgagataatgtaaccaatgttattcatttgcacatcactcacagtggcataccagtcgtgaaccaattatataaggtataatcatgcataccatttagacccaggaaccagaataaactaatgtaggttacagagtcttgcagcacccttttaaaatttagtggacaaaatatgtgttgagagaaatcaaaccagagaagtttgc

SEQ ID NO: 13217 - DNA, 838 bp, Setaria italica
  Peptide Sequence Number=SeqID_79191
cagttgctgatggatcaaagcggattatcaagttacaagttggcacatccaggccctcctccaaaatttgtgtggcaacaattagatgcacctttcctctccgaaacgagtcaacaatctctgtatgttctttcctactctgatgttgcaaaccacaattctttcctgccatatatctaataatccagccagacatttgatgaatagtggacagaaatgactccaatacaatgcttgtaacaactctctcaacaaaaacaatgcatctcaaatcttgcttatgtgttgtatgcccctcttcgtcatctttgatataatttctgagagatcactgtatgcatcttccatatagtttctaacaaattcctcgaccttctcatccagtttttcaccccaaaaggataagcagctttccttacgtgattgtaaaacctcagcagcctttgctgccagccatactccaagattgtctatgcaatacaagaaagttgcgctcaattgttttatccttttctccgcattttccaaagatgaatcatgcagttttcccttcaggaattctaaatgcttcctttcaagtctgttcaagcaaccgatagcatggcaatataactcagatgatatgatggaatcatcatattggactacctttgtagtggcaaatggaatgtactgcgatagtgctgattcactttcaacagtgtacacctttgcattcatgagattctcaagctcagatattttcaccgagtagtcggaacgctgcaaagctaaggagaaaatttcacaacagagtttattaatgagagagaatgcacatataataaacaataatatt

SEQ ID NO: 13218 - DNA, 560 bp, Setaria italica
  Peptide Sequence Number=SeqID_79192
ttgtatcaaacctaccaggtgatgtaccacgtgttgatgggcagctggcagttgcgagggcattcggagaccggagcttgaagaagcacctcagctctgatccatatgtaattgaggaaactatcaatgaaaattccgattttctaattctagcaagcgatggtttatggaaggtaatggatatggatctcgtataaatcttacctgaaggatttatgtgattacctgattcgcagcatggtgtattgcatacctaagctaattctccgtgtaataatgtatgcgcatgagggatataatttgatcctggatgcaacttaacagggcctttatatcagcaacacctgtctttaaaataagccatgaaatttattaatcatgcggacaatgattcttctaattcttcaatagcatttgcattgtggacgtgagctaattgcttattttttcgacccaaactggccgatcgtgtagttaattacttttgttgcccccgtgtatgagttgcaaaatctctcgagtttgtgttttaccatttccagtgatgatcgaaatgcgag

SEQ ID NO: 13219 - DNA, 518 bp, Setaria italica
  Peptide Sequence Number=SeqID_79193
atctaatgttgttctacttcttgtgaagatgaacgtgagagcggcatctgatcagaagagtcatcaatcaccatatcgaagaggcttgatcttctctttcttctatgcacatttgtttggcgattgaaatacttctgtgcatggctagcaacttgagtaggagtcctcgaaataacgtaattacgggatataccacgccaatcacccttccctaacttattcaaaccaagtagaaactttttgtgctcctcttcagtccatgcctcgcctcgcttcttgtgcgggcgcctccccgtcggagccgtacccctcctccctccccccgccgccgctcccctccgccgcgagctgcgcgaggttccccatgctggcgctcttcctcatgggcttgtccccgatgcgcacgccgaagagcttgacgggccgcgctgtgcacgtgcgcgcgttgtgcccgtggtgcccgcactgcgagcaccgcctgggcccgtcgccgccgcccccaacgccggccgccgacg

SEQ ID NO: 13220 - DNA, 1138 bp, Setaria italica
  Peptide Sequence Number=SeqID_79194
taaacaaaagaaaaaggaaccctttaagaaccaataggaaaagacaagaattgcctctctggtctaccaatcggctttggaggcaagggggaagcaggcactccactgtttgcatttgagtcatcacccttcaggctcagttctgacatattgtaaaggtctttgacgtttaatggaggcgttgagtgcacggccacaggcttgactacctgatgtggagcttgtgctgcacctggtggcccatagtaaaaaggacataaccgtagcagggtactggaacaaatgctgggtggtagtatggaggaggaatcatcattggataaagatagggtggcatggcttctggcataaccacccctgtttctccagcacttgaacttgagggaactgagtcctgttccataagctgaggtgtaactactggagctgtaaccggaattggaacttgaactggtggtggaagtgaagcaggcgcttccacagacacaggaggaggcgccacggcagcaggagagaccacgggggcaggaatggccccaacaggctgtggatcatctaaatgttgttctacttcttgtgaagatgaacgtgagagcggcatctgatcagaagactgacaagaaacacacaaaaaaaacagatataatcaaatgatataagagaggcccaggaataaatacttcaagaatatggagttcatgagtcttaatttacaacatcccattactactgcatgacgacttaagaagtcgacaagtattcatattaaagaggaaaggaataagcataagtaagtcaagtgtgagcatgcaaaaacaacataacctacagaagcatgtaggtaagcacaagcaactgccctcaacttattaatgcaacaggtacggcaagaaaatgaattaagcatgtgaaaacacagaacctatgcaagcatacacagcaactgaaaacacttgctaacacaacaaataccaaacaaaaagaaaagaacatagaaattctaacgcaagtgcaagcagctgcacttgtttgctagatgcacctccgaatacattaccaagagaagagaggagttagagcgatgctcacgtcatcaatcaccatatacgaagaggcttgatcttctctttcttctatg

SEQ ID NO: 13221 - DNA, 1139 bp, Setaria italica
  misc_feature (1)..(38): n is a, c, g, or t
  Peptide Sequence Number=SeqID_79195
nnnnnnnnnnnnnnnnnnnnnnnnnnnnnnnnnnnnnntttttttttttttttgtatgaacaaatttgggataaactgattaaatcagaataatatatctaaattaacgacacactaattaacaatatatttacccacagatcacgacttccaaactcgaaggctaaaatgagcagtatataatttgcaagaaaccaaaacaccattttagcagcataggctattatgattgggctatcttctaagcattacatacacatcaactgatgcttaagatcagtatcaagtcacttgactgcaggaattagtccgccagacgagccaccagaaggccctttgccatggaaagcagattgcctctctggtctaccaatcggctttggaggcaagggggaagcaggcactccactgtttgcatttgagtcatcacccttcaggctcagttctgacatattgtaaaggtctttgacgtttaatggaggcgttgagtgcacggccacaggcttgactacctgatgtggagcttgtgctgcacctggtggcccatagtaaaaaggaacataaccgtagcagggtactggaacaaatgctgggtggtagtatggaggaggaatcatcattggataaagatagggtggcatggcttctggcataaccacccctgtttctccagcacttgaacttgagggaactgagtcctgttccataagctgaggtgtaactactggagctgtaaccggaattggaacttgaactggtggtggaagtgaagcaggcgcttccacagacacaggaggaggcgccacggcagcaggagagaccacgggggcaggaatggccccaacaggctgtggatcatctaaatgttgttctacttcttgtgaagatgaacgtgagagcggcatctgatcagaagagtcatcaatcaccatatcgaagaggcttgatcttctctttcttctatgcacatttgtttggcgattgaaatacttctgtgcatggctagcaacttgagtaggagtcctcgaaataacgtaattacgggatataccacgccaatcacccttccctaacttattcaaaaccaagtagaaagaaactaagaaacaaaagaaaaacaaacaaacaaaaaaaaacaa

SEQ ID NO: 13222 - DNA, 193 bp, Setaria italica
  Peptide Sequence Number=SeqID_79196
acgcggcgcccacctcgtcccgcggcgccgagtgcagctgctcccacgccatctcccgcgccgcctcggccgcgcggacgtccccggccgccgccttctccgcggaggccacgaacgcgaacccgccctcctccgttatctgccgcagcagcgccgcccgcttctcctcgccgtcggtggccattcgccgtcg

SEQ ID NO: 13223 - DNA, 623 bp, Setaria italica
  Peptide Sequence Number=SeqID_79197
cacgatcaggatcagatgcaagaattaaattttctgctcctttgagtgctactttaatgctcttaaggtgtgtccaggcagcagcaggcacctcccagaccatgctgaagtcatcatcagggcggacggattttgacctacctgctaaatctctcacatgaccatagcttggtaccacttcatacatgtccccaaggtaattctgaataacttttgctttcgtggctgattccacaaccacaactgatttggccgtgggaggatacagtggtacaagtggctttgcctcactacgagaaccatcattagaggttttcatgtaactttcagcttcagatgacacagtaaaagcagcagaaacctttgattttgactttgacctattattcacctttttctctttagaactatcagcaccctttttggatttagagttgtcagccttcttgtcttcttggtttacactaatactctcggtcatctttgttgcagctttacgagttctagcaagtatcctcttttttcttggtaggtactttcttttctttcatatctccatgaacttcctttttgcttcctctagaactcttcctcttggcagtgtcagtcttagcatcagtaac

SEQ ID NO: 13224 - DNA, 109 bp, Setaria italica
  Peptide Sequence Number=SeqID_79198
actcaatactttggagcactttatattgcacaaagtattgagtattcatacatagcagtattctagaaaagaagctaggagttacacacacaggtttaaaccggatggg

SEQ ID NO: 13225 - DNA, 261 bp, Setaria italica
  Peptide Sequence Number=SeqID_79199
ttgtgttcccctggccagcaaccgcaatttgttcaaaccaaggaaatggattgaattcaccaactcaaatgcagggagctcttattccccagcaggtcagttttctccagttgcatgcttaagggaagaccctgtgagtaaacaagagaaagctgtgaaggaccatgatgattcaccagtcacaggctttagcatttccaatatactaaacaaggagaatccagataatttcactcaagcaaagagagggggactgaaggg

SEQ ID NO: 13226 - DNA, 485 bp, Setaria italica
  Peptide Sequence Number=SeqID_79200
tcctttggcacctccggttacatcagcagatatttctggaccagaagttatttgctcaactgcaactgcaaattgttccatcgaaaagctgggctaccttatcaatttttatccctttcaggacatcaggaagtgatgcaaaatagccaaggtcatactggtaagcaaatggatgcctcggatgctaatttagttggatgcaatcagagtgatcaagaggaacatcttgattttacatctctttcgtccttcaaaagaatagcagaatgtcatctcggttttgttcccctggccagcaaccgcaatttgttcaaaccaaggaaatggattgaattcaccaactcaaatgcagggagctcttattccccagcaggtctaactttggaattcatgtattcttcttggtacttagtctgctgaaataatttatttatttttcatatcacctctttaatgattatggcccatcttctatgaagcatact

SEQ ID NO: 13227 - DNA, 368 bp, Setaria italica
  Peptide Sequence Number=SeqID_79201
tggcacctccggttacatcagcagatatttctggaccagaagttatttgctcaactgcaactgcaaattgttccatcgaaaaggttacaagtgttcctgtgatgccagattctgtatcagaaggacaagataaaaccaagtatttgtctaacagtacgggccgggtagctgggctaccttatcaatttttatccctttcaggacatcaggaagtgatgcaaaatagccaaggtcatactggtcaaccgcaatttgttcaaaccaaggaaatggattgaattcaccaactcaaatgcagggagctcttattccccagcagcatactctatattcaggtcagttttcttccagttgcatgcttaagggaa

SEQ ID NO: 13228 - DNA, 522 bp, Setaria italica
  Peptide Sequence Number=SeqID_79202
agtaaaatagaccattctagcatttacaattactttattttcctcttttgcgaggaattaattactttattttctcggtctgtttgtaatggttaatctttcttgattcttgaatgtagttcattgtttttaaccagtagtatgattcactttccctatgtttaaatcatctccttcatgcagtcactgatttgagaatggttgcatattctttcctttctccagctatgtaaacagtactgctattttttagccattaatggtgcaaatgatgtatctactaaaatttcatcagagagctataatctatttgcttcagtctttattggtgtgacatggaagttgaggcccccatcttctgcttttactggttcttaagttgttgacttttgcatataactgattgctctgccaattgttgtgaacaaaacattaatgcttgggttctttttattgatttttatttggagaatatgaaagttacattggtttcaatgaagatatgcggattcacagattcag

SEQ ID NO: 13229 - DNA, 751 bp, Setaria italica
  misc_feature (1)..(1): n is a, c, g, or t
  Peptide Sequence Number=SeqID_79203
nagaaacagtcacattagatgcctagctaagttgagaatccaaaatacaattaggttttactacctgcacacatccacacttgattagcctgaatacaattgagccagcgtttttatttttaccacaccatcagaagtgataggcataatctcaattgcatcaagcacctgtgaggatctctgtaattttagcactatctttagtttattttaagagcatatttttattcatccagtcactatctcggtgcgttctgctcctgttaggtgtggttttgaagatgcttacatggtttaaagatggttttaagcatttgacttgtttcatctgctatatagaaaaggctcggtgatgttgacttgctaaaattgttgtttattgtgtaacctgacagagctacaagatgttctgcctgggatcattaaccaattgggtatgttacactccgcacctgaatgtctatatccaataaattgctttccttgtaacatggataacttgtatttgacctttttctaatcttgtcagcgttatctgcttctatgctgctttatttcatgttttgtcgtgtgttgtcctttccctacagttagcactactggccacgggaaagaatgtttactcttatggatgttccttttgttgtctgttagctttcgggctagcacttgttgagtatacatgttgtcccccagctgtttagtttggaacatagaagtcacaagaaggaaataaaacagtagctcagcc

SEQ ID NO: 13230 - DNA, 1399 bp, Setaria italica
  Peptide Sequence Number=SeqID_79204
gtggctgtgatactcttccactgagattttatggcttcatattctgctcgtttcatggcagcatggtattccctctcagcatatgttgaatcatattcatgataccccaacaagaatttccataccttttctctcaaatattcatcgactcccaaatgaatttccataccttttctctcaacttctgatcgagcagaatatgaagccataaaatctcagtggaagagtatcacagccacccaagctaaaagattcaccaagtttagggaaagaaaaggccttattgacaaagatgtggtgagaacagataggtctgttccctattatgaaggagatgacaatcggaatgttgtagttctacgtgatattctgttaacatattcattctacaatttcgaccttggttactgccaagtaagttttcatcttgcagaccgtccatgtaaaatgattagaacttcctgccatttaagtgggaaacacaaaaacactaggcccactagttttcttctactagttatgttaaatcacattttggggaatgatgcttgattagatgctttcattctcatgatctttacagacgatgacatcacatacacatggaatattaatgccttttagatttattcattgtttaggtacattcacttttggatatattgctggcttgctgctactgctaagttgttaacagtcctatgtgtgctatcctagtagattttttttccctgtacaagatgtaatcttctgggcatttacctttatatttctgttgtacggagttgctgacttctgcaacaactttgtgtcgacgtattgttgtttggtttttgatactaacccagtaaatctcgtttcttgtaatctctacaatatgctggagctggactgatcatttgcgattcaaaagttcaagtttaatttcttttacaaaaaatatattcttgtttcctgaaatggtgttcatgattgttgatattttttgtcgtcttcctgcaatgttggtgtttgtgttgcagggaatgagtgactttttggctcccattctttatgtcatggaggatgagtctgaatcattttggtgctttgcttccttgatggaacgactaggagccaattttaatcgtgaccagaatggcatgcatgctcaactacttgcattatccaagcttgtggagctgcttgatcctccattgcataactattttaggcagaatgactgcttgaactatttcttctgtttccgctgggttctcatacagttcaaaagggagttcagtttcgaccagatcatgctcttgtgggaagttttgtggacccattatttgtcagaacatttccacttgtacttgtgtgtagcaatcttgaaaagataccgtcagcgtataattgggag

SEQ ID NO: 13231 - DNA, 357 bp, Setaria italica
  Peptide Sequence Number=SeqID_79205
tggtattccctctcagcatatgttgaatcatattcatgataccccaacaagaatttccataccttttctctcaaaacatgatcgactcccccatagaaaacttttttcctcagcgccttcgagtccataactctaccttcgggatctaagaaagctgcccactcttcgtcacttaatggacgatctctttgttttccccatactagaggtaatggatctggctccggtggagctgagggcatggaagccttttctggtgttatatactgatttttttgcttatcacttgcttcattatccagaagatattcatgttgttggcgtccataagcatgggcaccactattgttttgaaag

SEQ ID NO: 13232 - DNA, 340 bp, Setaria italica
  Peptide Sequence Number=SeqID_79206
tactttaacttatcgtgggcttctgtttagggagcctgtggccacctttattttcagccttttgcactattttatcaccaattaggggtttctggatatatcatgtatgtgaagtagaacatgattcttcagaatgagagtcttgtaattttggcaggttatttgtgatagggatctactgcattcacttttgtcggaataatgctttcacattttttgggcatacattacacttcatttacacaagtatatgcatgattattcttgataccatttgcagagtatcacagccacccaagctaaaagattcaccaagtttaggaaagaaagccttattgac

SEQ ID NO: 13233 - DNA, 426 bp, Setaria italica
  misc_feature (10)..(10): n is a, c, g, or t
  Peptide Sequence Number=SeqID_79207
ttaggtgaanctttagtcttgggtgggcgtgtgatactcttccactgagattttattggcttcatattctgctcgtttcatggcagcatggtattccctctcagcatatgttgaatcatattcatgataccccaacaagaatttccataccttttctctcaaaacatgatcgactcccccataagaaaacttttttcctcagcgccttcgagtccataactctaccttcgggatctaagaaagctgcccactcttcgtcacttaatggacgatctctttgttttccccatactagaggtaatggatctggctgcaaaaagagttgggaagctaattttacacgaaatagatgaatgtgcaatttgcaatcatgaaaggctaagcaattaaagctttcaacagcatcgaaggtcagaagacaaaacc

SEQ ID NO: 13234 - DNA, 2503 bp, Setaria italica
  Peptide Sequence Number=SeqID_79208
agaccctacaagactccaccggagccagatccattacctctagtatggggaaaacaaagagatcgtccattaagtgacgaagagtgggcagctttcttagatcccgaaggtagagttatggactcgaaggcgctgaggaaaaaagttttctatgggggagtcgatcatgttttgagagaaaaggtatggaaattcttgttggggtatcatgaatatgattcaacatatgctgagagggaataccatgctgccatgaaacgagcagaatatgaagccataaaatctcagtggaagagtatcacagccacccaagctaaaagattcaccaagtttagggaaagaaaaggccttattgacaaagatgtggtgagaacagataggtctgttccctattatgaaggagatgacaatcggaatgttgtagttctacgtgatattctgttaacatattcattctacaatttcgaccttggttactgccaaggaatgagtgactttttggctcccattctttatgtcatggaggatgagtctgaatcattttggtgctttgcttccttgatggaacgactaggagccaattttaatcgtgaccagaatggcatgcatgctcaactacttgcattatccaagcttgtggagctgcttgatcctccattgcataactattttaggcagaatgactgcttgaactatttcttctgtttccgctgggttctcatacagttcaaaagggagttcagtttcgaccagatcatgctcttgtgggaagttttgtggacccattatttgtcagaacatttccacttgtacttgtgtgtagcaatcttgaaaagataccgtcagcgtataattggggagcagatggactttgataccctcctcaagttcatcaatgagctcagtggtcagatcaatcttgaccgggctctccaggatgctgaggcattgtgtactattgcaggagaaaatggggcatcttgcattccacctggaaccccaccttcaatgcccatcgagaccgatggtggcctgtatgtgcaacaagatgatgtcttgtgagatatcaccaatcaccttagaaaataactgcacaggaccaccgcatcgggttttttttcctgtaatggtttcgtcgatgttataaatgttaccagttgtaattttataccaatggaagaatcttgaaatcttagcgttgtgtgtatatactccattgacgtaatttgacacttgctttcacttaatggatacagattctctaactttttcctcagcgccttcgagtccataactctaccttcgggatctaagaaagctgcccactcttcgtcacttaatggacgatctctttgttttccccatactagaggtaatggatctggctccggtggagctgagggcatggaagccttttctggtgttatatactgatttttttgcttatcacttgcttcattatccagaagatattcatgttgttggcgtccataagcatgggcaccactattgttttgaaagaggcttgatgtagtatcacgtgcaaactttgtgaccaatgagaatttctccaagacttgaattgaaagatcacgacctgggtcgtttgatttgttcttttgctttgagccatactgagaaatgctagaagcttccccatgtcttccatcagtcccatgcctggactcatcatttgccccagtgaaactgagtgaattttgccttgacatggcatttgccacagaggctactcctggaagctccagggatgacaagcttttctgaagaggatcttgaaagtcgttgacaagaaacacattaggatcatcatccgacctgataatgaagacatgctgtttcaatgttgcaaacaattcacgaattccaccattatagaaatagaatggaggataagccaggcctgatgatagaacaattattatgtagtccaatcgaaatgttggggtatgcctacggatgaagcgtacatcacttaagggcaaggccttgatagtgtacaggtttctatatttttctatttccacgccgattgaactggttgacaaagagtcggctccttcatttggctcccagctcaggaataatgatccccgctgcagaaacaggcgcagcttcccactgatccggccggagccatactgcgtcaggtggattgtcacacgctccttctcataaaccacatcaatcctcgccgtctcatccgagcctctgtccaccgaatccgtccgcatcgccgtgtgatgggaggcggcggcgtagtcggagtcgtcggagaagtcgtagaggtccggcgagcggggcgaccctgcctccgctgctgctgctcccgcgtctcccccacgcatcgccacgcggagaggtgcgatctcgggttttgctcaatcccaaccaaccaccaactcttcttactgccgaagcaatgggcaatggcacggcacgctgagaagcctagtactcacactgggggctgatgacgacgaac

SEQ ID NO: 13235 - DNA, 431 bp, Setaria italica
  Peptide Sequence Number=SeqID_79209
gactccaggtgtcagagacaagaaatggaaatactgctacatggatgcaaattggtgatcagtgcttcttcagctcaggcgtaaacgtactacagagtacagaatcaattggcgtagtatgcaaacacagagtgcagaagccgtggccggggaggtagtagtagcaagctgatggacgacggagctctttggtcgttggaagttggatggatcctcggaaagaaagaaagtcagaaggcgaggaagaagcgcttgttggcccggccggcgcggccgatggagtcggcggcgtcgaggttcttggcgatgagcttgcgcgcctggcggctccggatctccacccgcatgctctccgtcttctccaccttgtcgtagcccgccgccgccgacgccttcctccccgagccgtccgtccccttctttcccgtact

SEQ ID NO: 13236 - DNA, 426 bp, Setaria italica
  Peptide Sequence Number=SeqID_79210
ggcaagcgctgggaaaggtttggcactgaggccaaagtcgagcaatcgatcagacatgaacaagagtcagcagaacctttttgcaatggcagagcctttgttcagcaatggtgtgcaaactgtaaggaaatcatccagcactccggagttccaagagccagagagcaacaccagttcgtccatatggtcagcaagcaagtggagcataaacacagatgcttttgctcttcctctccccatccctcgctttgacaacatcccaaagccgattgctgcttggagaaacaaggcggctcgtgattaatcatgtgctatatcttggttatgtgcatgattttccctgaacaccaggaggcccaggaagtgcccatgaaagagcttacagcttacgttggcaccagtctccacagctggaagcaaagcagg

SEQ ID NO: 13237 - DNA, 254 bp, Setaria italica
  Peptide Sequence Number=SeqID_79211
gtcatcggcatacctggttccattcaccgatggcaatgtcttccccttgactgttccaatagtagtgagatctttgcattgggacagatttggtatacacagtgcagccattaggcctaatgatgatattcaggaccaaaatgttcaggataactaaatgcaatcaaccaaccacaattgatgtaagagatattacacaaggtaacaaactatagtattattatttgggctcttgcatggcctacgagaggtca

SEQ ID NO: 13238 - DNA, 810 bp, Setaria italica
  Peptide Sequence Number=SeqID_79212
ggtcaagcacaccagtacacatcacgaaaaaattaacaggcggcacgaggcacatggggatcagatcagcaacagcagttggcactttggatacagttcaactttttctatagcacaaccttgcaaccagaccattacacaatcatccccattaacaaaagagaaagcaagtaaaaaggagcgcagaatagctacttagctatgtatcaccggtgctcttccaagaagagggaccgatgagtccatccgcaattggcaggtgaacgatttgcaggagcagtcgatgggcacgtgcaggttacgacccgcagcttacttggaagggtccccacggtggggatgggttggggaggctgccggaaagaggccgatcctagtggtgcctaggtatgggagcaagcagcagtggcagggtagagcatgatccatgccatttgctgcaaggtcttctttagtctgctgctcaccatgccttctgtcatcggcatacctggttccattcaccgatggcaatgtcttccccttgactgttccaatagtagtgagatctttgcattgggacagatttggtatacacagtgcagccattaggcctcactggtcactcgaaccgcgaccggtcctcaaagcgccgggccggacgcatggcgacggcgagggcggccgcggcgacgtaatgatgatattcaggaccaaaatgttcaggataactaaatgcaatcaaccaaccacaattgatgtaagagatattacacaaggtaacaaactatagtattattatttgggctcttgcatggcctacgagaggtc

SEQ ID NO: 13239 - DNA, 746 bp, Setaria italica
  Peptide Sequence Number=SeqID_79213
cgacccaacatttgaacaatccttaggattgagtgatcagagaatttgatttgtgcatcatgaatcattttggagaatttccactctggagtattgacatctgtagcattgagctgactagctaacttctgtattctctcttccatttccatccgaagaatccgtggcctatccctgacatcagtgaatacctcaaaagacttgaaagcagctctatcatcaaagtatgtagcttcagtgtccctcctaacatatttcccatattaacatttgctcctctctgcatttgaatttttctaggtttatcactcttcaaactatcacttgaatggctatcatgctgaggcgttgacttcttagagtctatgtcaatctctcctaacctacactctacaaagtttctccctgaactctctactctttgctggtgtctttgaactttactgttggcattgacctcgctattaaaaaatgtactctgcctgggatatttgaagtcacgactactacttgtgctagtaaagtctccttttcccatttgaaacttggcattctttgatgaaatgctgttattcggaagggcagaagtccgaggtggagtatacggtacctgcccttccaaactgagactgccaactgactgattttgcctgttcctcactgactggtgttcagacatactactgctagtatctttgaccttcaaatgtgatgagagctgcccattgcctccatctcctctcgtt

SEQ ID NO: 13240 - DNA, 1278 bp, Setaria italica
  Peptide Sequence Number=SeqID_79214
cgtcctactccctccgttgtctttgcatgaaaacgagagaggtcttattgcatttgctactacacccgaggaccagaagagtgttcaaattatcatctcagtcaaagaaagaaagaaagaaagaaaataagaagaacgttcataccaagtactccagatttacaaataaatccggatgtcatttcagactgaagccggaagccggaagcctgatggcatggttcagacttcaaaccgaacacagcggcactcttctgaatatttcccttcagtaaacgttccctttagttgacggggatcggagcgtagccctgcggttcctcgacgtgcgccggcgcgacggcggcgacgacgaccgaggcgccgaacagcacgacgacgagcgccgtgaagttcaccaggaatgcctcggcgccgtacttgtcgaggcccccgctctccaggaaggtgagcttctccaggaacccgagctccgcggtcatcaccgccagcacgtagacgaagagcccgaacagcgcgtgccacggcagcgcgctgcgtctcaggctcggcgccgcgccggggaagaagaaggtcacgaacccgaacacccactgaatcccgtagagggagatggttccgatcccgagccaggagtgcaggctgtagagattggcgatcccgctgtcgttgtggaacttgaacgcgcagtagatcccgaaggcgccgaggacagtcgcgatggcgtggaggatcaggtgcgtcagcttggctgtgtcgtggttcaggtttgggaacaccttgtagatcataatggcttcactgccgaggataatgtagccaatcagcataaggacagggtgaacgttgaagatgaggttcttgttgggggcctcgagcgcgaggccgcctcggaagtggacgcaccacaccagcaccagcaccgccgccaccgcggccagcgcgtgcgccgcgtacgtgaatggcgtcgccttcacgccaagcccggccctggccatctcgctcttcttcctcctcctcttcttcctctgcccctttccaggccgtgcggtgatggctcacgctctctgtccgccacgaacagctcgagctacgggagtgaggcctgaggagtgaggagcgtgtggagcacgtacggcggcctcgtcctttatgagaaggccagaagggggccgggagacacagagagaacagggctccgcttctgtttcctggctgtggttggtggggggcagttgctgaggccgggaaggcgtctccgttcgtgggcggatctgg

SEQ ID NO: 13241 - DNA, 316 bp, Setaria italica
  Peptide Sequence Number=SeqID_79215
ctcgccgaaatatttgaacgaagcaaacagaaattccccattccccaaatccgaacccgtctccggcgagcccatcccttcgccgcctcagacgcaatgggagcggagatggagcggtccatcttgtctctgtgcgcttccctctcgtcggtgctcgaccacgccgactcctcctcccgcgagctcgccgacgtcgtctcccgccgccccatccacctcgagtcgacgacgaccgcgttcctgcagaagctggaccggctgacggaagcggcgaacgaggacctcgcgcacctcgactccatgaccttggtgctgt

SEQ ID NO: 13242 - DNA, 1287 bp, Setaria italica
  Peptide Sequence Number=SeqID_79216
ccataggctaatgagtactactagtcagctcaagcaaaggcttgtttggttgctgctcatttgcaacacggcatgatgccaggcaacatgcatacgtggcagcataagttgctacatgccaataaacctaaacaggtagctagtgttgctggtcccctcagcctcaggctgagacatttgcatccaaagttatcctcagtcatccccttccatctacactaataaggttaaggtaaggctgcacatcttcaagcccccaccaagcaaaagtcgctagtccaggcttccccactagattcgcccagctgctctacccatcctccttgagctccttggatcacggcagcatctgcttccgcacatgcatcggaatgctttactgggaccatccacatcatcaaaatcaatgccataatcccatgttaactcctcaaatgcctccactttcttggttgtgaaaaatgccagatgataataatgatgatctggcgtctcaacttcaactgggatctgaactaaatttgcatcatagcatctgtggttgatgaatcgcccgacattcccataaaacgtcccatcaaggccaagagcctcttcatccctcagtacgccttctgaaccccaatcagcatccaggagcacttgatgcatatgtctaccatttcttgcattttcaattgctctttcatacaattcagtgcttgttagtacctccccagcatattcacagacaaatgcaccttttgggagatcctccagggtgcgtagtccccagcccttcccctcgtgtgtaaaaaatacctgcaatctgcatgttataccacgctgaatcacacggttcccacactgcatgccacacccacatttactccagcattctttaatgaattttctgacaagatgacctttacagggacccggtgaggctgcattcttagatcttttaagagggcaaactttacagtagaacctatgatgattttccgggaaatgattaacggaggtgcattcatcaaggaatgctgtcttaaccaggccctcaggtgtatacacgaaatcacccccagttgctcttgcacaagcacatggaagtggcgctgacaaacagttgccagaacaatcagcacagcagtcttcatcaccaatccgagcaatggagatgttgacgtaagcactttggaagacaagattccttggtatgtaatagaaggatggaggacaggtttcactgccaaattcatttactacagatattcttacccgctctaccctttggatatatcagta

SEQ ID NO: 13243 - DNA, 649 bp, Setaria italica
  Peptide Sequence Number=SeqID_79217
caccgcagccggagcccgtcgctgcggtgggtgccgacctcggcggcgccggccgccaccaggatgcgcagcgcccggcgcaggccgttccggagctcctccacgtcctcgctactcgggacgtagcgcacgcggccctcgcggcccacggtccccgcgccgcggtcccggacaagcgcgaaggcgtgcgccgtgcgcgcgtaccggagcatgcgctccttcatgtcccgccccgactcccaggggatcagcgaggccatggaccccggcccagcgccggcgtctggacgatggtgcgggcggtgacgcggtgcaaggtggtgatgatgccgccctcgtagcacttgcccgtgagcggccgcggctccggcgtgccgtccgggaagtagccccacgccatggacaccgggtggaggtggaggttgcggcctatgtgcctgttcttgagcccgctgcggcggagcagcggcggcgtcatgagcgcgccgcaagccgagatggagaccttggcctcgatgcgcagcttcctggtgatgccgtcgcccatgcacttcgccaccaggcccacgcacctcttgctccggcacccgttcttgccgggttgctctcgagtacgaaacgctcggccttgcacccgtcagtacgaccg

SEQ ID NO: 13244 - DNA, 525 bp, Setaria italica
  misc_feature (7)..(7): n is a, c, g, or t
  Peptide Sequence Number=SeqID_79218
cctggangtgcttgatcaaatggatctagcagatgcgcaggaaaggaaaaggctaagggatgagaatgccaaaaaagcaggatcgaaagctgctcccaagaaacaacgtaaaaaaccggctgctaaacagccaaaagtggaaagtgatacagaaggagatgctgctgaaccagtggttgcaaagcgtggagctcaacggaaaaaaccagccaaggaaaatggtgctgggtctgatgacgaagattatgttgctgaaaaggcaaaagctgaacaacagaagaagaaacaatctaagaaggcaagtgctccacctgtggatgaagacgaagatgacttgcccacactaaaagaacgtcttgcagcttttaatctcaatgactcctctccggataattctggtagtgcccaagtacaatttctcaatttgagctgatggccttattctctgtttcaaaaatttgagctgatggtctaacaactttgcagccatggaaactgaaacaacagaagagcagattggaggca

SEQ ID NO: 13245 - DNA, 2399 bp, Setaria italica
  misc_feature (2355)..(2399): n is a, c, g, or t
  Peptide Sequence Number=SeqID_79219
tgcgagtcctaggtacatcttcaccaaactatcacatatcacacgttcaattttcccaaaggatgatgatactcttcttaattatctgaatgaggatggacagttaattgaaccgagctggtatgtgccaatccttcccatggttttggtcaatggaagtgaaggaattggtactggatggagtacattcattccaaactacaatccaagagacattgctgctaacatcaggcggttgctgaatgatgaggctactgtaccaatgcacccgtggtacagggggttcaagggatccattcagaaggcaaataatgcaagggtagatggtgccacatataccatcactggtatcatagaggctgttgacagcactacattgaggattactgaactgccagtccgccgttggacgcaggattacaaagactttattgattctttgcgtccagacgaaaagaacaaggacaaggaagcatttattgaggactgcaccgcacaaggtgataatgacgatgtttactttgagctcaaactatctgagaagaatatgaatatcgccaaggaagaaggactgctgaagaaatttaagctgacaacaacaataggaacaacaaacatgcacttgtttgattcagatggtaaaatacggaagtatgacactcctgaacaaatacttgaagagttctttaaattaaggcttcaattctacttcaagagaaaggaagtattattgcaaaatatgaagctggacttgaagaagcttgaaaacaaagctaggtttatccgctgtgttgttaacaatgaaattgtagtcaataacaggaagagggcagatctttttttggagcttcgacagaagaattttgatcctttcccaaagaaaaagaagagagctgaaccagctgctgtaggagctacagaagaggaggaaaacgaagagagtcctgaagctgcaaacggagttgatcctagtgactatgagtatctcctatcaatggcaattggtaccttgactttggagaagatacaggagctcaatgctgagaaagagaaagtagtgaatgaagttgaggaactggaaaagaccacagaaaaatcgctttggctgagagaccttgacgcctttgagaaagacctggatgtgcttgatcaaatggatctagcagatgcgcaggaaaggaaaaggctaagggatgagaatgccaaaaaagcaggatcgaaagctgctcccaagaaacaacgtaaaaaaccggctgctaaacagccaaaagtggaaagtgatacagaaggagatgctgctgaaccagtggttgcaaagcgtggaagtcaacaacggaaaaaaccaagaccaaaggaaaattaggtagactagggtactagaatgatgacgaagattatgttgctgaaaaggcaaaagctgaacaacagaagaagaaacaatctaagaaggcaagtgctccacctgtggatgaagacgaagatgacttgcccacactaaaagaacgtcttgcagcttttaatctcaatgactcctctccggataattctgccatggaaactgaaacaacagaagagcagattggaggcaaggggaagaagggagtaagcaaaagaggtggaggaaagaaggcttcatcatccttggcagtgatacatgacgatgaggatgaggatgtcgatgtttccctggaagttccagaagaagtccaaggtccaaagaaaggtagaggacggaagcctgctgcccccgtgaagcccaaggctactgccaccaggaagagggcgccagctcagggcaaggccatgatgctcaagcccacagaggacagcaacaccagcgctccttctcctgagaaaaaggtccggaagatgagggagtctcccttcaacaagaagagtggctccatcttgcagagaggctcgatcgctgcctcgacaagctctgaatctactgctgaggcatcaccaccctctggcagctctgcagagccaattgctgccccgcaacctaggaggacagccagggctaccaccaagaagacgcctgtctacgaccttgaaagcgaggatgaagtggtggaggtaactgatgattctgacttcgacgtggatggtgactctgacgagtgagttcatggccttgctacgtcgaactaagttagccgtgtcccttgtgttgcgtgcgccagtatctagtatgtgggttgttacattagctactctgatgattcggtggtgtactctatgtgatgcatatcttgtgcgttgtatgtggtgtctgttggctttgctggtgtgaacagaggttgttctgagttctgcgtgtcaacttttctaaggttcgagtggccagtnnnnnnnnnnnnnnnnnnnnnnnnnnnnnnnnnnnnnnnnnnnnn

SEQ ID NO: 13246 - DNA, 289 bp, Setaria italica
  Peptide Sequence Number=SeqID_79220
atccaaggccgcgccgtacgcctcctacggtcctaccctccgcctcgctcggcctgatggcgctgcagctccagctgccgcggccgccgccactgcggctcgccgccttccggctctctgttcgcctcccttcccgggtcgccccggcccgtgccgcctccgcttccgccatcgccctccgcgcccgcgccggcggcgtcgcgttctcgctccagacgaacgtgcacctcctcaagcccaaccgccgcgtccgccgctcccgggacccctactacggcctcgacgagga

SEQ ID NO: 13247 - DNA, 274 bp, Setaria italica
  Peptide Sequence Number=SeqID_79221
gggggcagaggaggcggcggcggaggatgaggagaagggagaggaaccgaaggcgggggcgggggaggaggccgccgccggctgggagaaggagaaggggatggggtggaggagaaggagaagggggaggaggcggtggagcccgcggccgcggagccgccgccgaaaccgaaggaggtcgccatggctggggcggcggtgatttgggcgagattttagcgtggttttgccgctggctccacggccgagcggcttgcaggggtcttggcccgtt

SEQ ID NO: 13248 - DNA, 1603 bp, Setaria italica
  Peptide Sequence Number=SeqID_79222
cgccaaggtcaagttcgccaggaacgtcgagaccggcgagaatgttgccatcaagatcctcgacaaggagaaggtgctcaggcacaagatgatcgcccagataaagcgcgagatctcgaccatgaagctcatcaggcatccaaacgtcatccggatgtatgaggtgatggccagcaagacaaagatttacatagtgatggagcttgtcactgggggtgaacttttcgacaagattgctacgcgcggaaggctgaaagaggatgatgcaaggaagtacttccaacagctgatcaatgctgtcgattactgccatagcagaggcgtctaccaccgagatctcaagcctgaaaaccttctgcttgatgctactggcgcactcaaggtgtctgattttggattgagtgcactatctcaacaagtccgagaggatggtctgctgcacacaacttgtggaactcccaattatgttgctcccgaggttataaacaacaaagggtatgatggagccaaggctgatctatggtcatgtggggtgattctctttgtcctcatggcagggtacctcccatttgaagattcgaaccttatgtcactttacaagaagatcttcaaagcggatttcagttgcccatcctggttctccacaagtgcgaaaaagctcatcaagaagattctagatcctaatcctaacactagaataactgttgcagatcttattaataatgagtggttcaagaaggggtatcagcctcccagatttgagacagcagacgtaaatttggatgatgtcaactccatctttaacgaatccggcgatccagcacagcttgttgttgagaggcgtgaagaaaggccgtcagtgatgaatgcttttgagttgatctctacatctcaaggcctcaatcttggcacactctttgagaagcaaacgggttctgttaagcgagaaacaagatttacgtcaaggcttcctgcaaatgagatcttgtcaaaaatcgaagcagcagcaggacccatgggcttcaatgtgcagaagcgcaactataagctgaagctgcgaggagagaaccctggaaggaaaggtcagctggccattgcaacagaggttttcgaggtgacaccttcactctacatggtggagctgcgcaagtcgaacggcgacaccctcgagttccacaagttctaccacaacatctcgaacgggctcaaggacgtgatgtggaagccggagggcagcatcatggaaggcgacgaggcgcggcaccgcaagtcgccgtgatggatggatctgcaaccaagtttttagaagtagcgctgcagatgaaactagtcagggaactagtgaaaactaagaagctttgttactgctctctgtttaaaggtgtcttttgtgttgtaaagaaaaagtatgggtaatgcgagtgaagagttttcaggttgctatcaaagtaacgccgttgaatttgttcaattctcatctgtgcaatgctgttgctagtgaaatggctagatcgagagacgaaaaatcagaccgaggcgctcgtgaaattcacgtgctgaaggagctcataatgcaacacgaagacccgtttggtagagcttc

SEQ ID NO: 13249 - DNA, 704 bp, Setaria italica
  misc_feature (1)..(24): n is a, c, g, or t
  Peptide Sequence Number=SeqID_79223
nnnnnnnnnnnnnnnnnnnnnnnncgtgatccttatgcaataccatcctttcatggaccgacgaaaaccagtacaaaaagataaagactaaacattgtaatttgtataaaccttttattaacagaaacagagtcaacttatttacgaaaagtaacacaaccaagattcacttcatactgtccaaaaatcatagcaagtcaaatgcacagataatttttgctgtcccaggatgccagacacaaggaggcttcaagggcatgtatgtcagaagcagcagcagcagcactcatccagtatgcagcagcagcaaagagcggccaaccatcctttcaggaagccgaggcagcagtcatcctcctcgtggtggtggtggtggccatggtgatggtagtggtgatgatggtcatcatggtggtgatggtggccgtggtggtgatgcccgccatgcggtggcggatatccgtagggctgctgcccgtcgttgaagtagccctggtaccccggaggcggcagctgctgcggcgggtagtaaggcccctgcggtggagcctgaggaggcgggtacggctgcgagtaccctggcggtgggtaggactccgggatcttttggtagctcatggcgccgtcgccgcctcgccgtgccctgctcgctttaccccgatgcccgatcgcttctcgtccaggtcttcttcctccagttccac

SEQ ID NO: 13250 - DNA, 282 bp, Setaria italica
  misc_feature (274)..(274): n is a, c, g, or t
  Peptide Sequence Number=SeqID_79224
tgatattctctgtaacatttttagaataaaaatttaacaaggaaccaaagtcgctgatcgtatatgcatttcaatatggtaaattgaatttgcagagggctgtgtacattctaaaaaatgtggtattctattattttcttttgcttagtctttgctttcctctatcatcaaattgcattatattaagttttacatagcataaggggttgaggaaatcaagtatctagtataatgtatatgtattgtgctgggtcctagcttgcttacatttaangatttaaa

SEQ ID NO: 13251 - DNA, 1607 bp, Setaria italica
  Peptide Sequence Number=SeqID_79225
ttcatcaaacacacatctaaatgcagctctacaagtaattgaaagggcattggttggagtgaatctctatagtcattcaatatatgaagtttgcactggaaatcctgatggtgggacagtttcttctgatgttgctgctgggattgactgcctctatctggttcttgattttgtgccaggaaataagcgtgtttttaagagaacagtcccaggcctagttggtgctttattcaacatcatactgcaccttcagagtccacttattttctacgttcaaaagctgccacctcattgcagtgagttccatccagatgctggagccgttgttctaatgtgtgtggaggttatcacgtcattcgtgggaagacattcttttcaaattgatgcatctcatgtttcccagtgcctgcatgttcctgtgacacttttcaaagggttcaaacaacttcttgcttatcgtaaaatatcacgttctttggcaaagtatcgccacggaagtgtacggcaacatggcgatcatgatgaatatatactcgatagacaattttcagttgatatctatgctgcatgttgcaagttgttatgcactactcttcggcaccaacaacgtgagattgggcgatgtgttgcactcctggaggattcagtaagcatactgctgagttgtttggagtctacagattctaagatggttaacatggctgggtattttgcttggaacatggaggaggcactaaaatgtgcttccttttttagaaggatctatgaagagatgcgtcagcaaagggaaaccctaggaaaacatgccatgcatttccttgctggttatatttccatgttttctggacagggtccttttcagacagggataacacgagaaattgatgaggccttgagacctggtgtgtattccctgattgatatatgcgaggaaagtgattttcaacagctccacacattcctgggtgagggtccatgccgaaccacactagctgaactggtgcatgactataaattacacttccagtatcagggcaagatctaagtcagcctgttaatacgtggaatgattggtgtttatcctgctacatctgggtagaatatctatagtaccatctgctgaaggtacttagtagttcgttactcaaaaaaaaatggggttcttgtgttttggacttttgggtggacttatttggcttaattgctgtgcactgacttctgagcgaggagacatggtgctgatgaaagatttaaagcttgtcaaatcaacgtctggtatcttaacatatgagaagcagattgtccgtaagagtacatctccccagtgctcttcccagaaattggacctgttaatattaagcacacgttgtcattcaatttcaagggtaatgtataaaatgcatgcttatccttgacaaagtctgtgctatcgaagatatcagctcaatttaattcttttgtctagtacttaacaacagtaaaggttatagggtggtaatgatctagtggtgtttggatacctcataagatttactgatcaaaacattgtaatatttaaacttaaagtagaacataattgatgaaaaagataaccttgtgtacctact

SEQ ID NO: 13252 - DNA, 311 bp, Setaria italica
  Peptide Sequence Number=SeqID_79226
cgtggtccgacgaggtcgtcggcggggtggaggtggaggtggacaagggcgacgggtgcgcgctcgacggccggtgcgtgtgcttggaggacaggcactgcagtcccgggcaggggtactactgcaggccggggctcgtgttcacagaagccagggtctgcaggtactcggtgtcgcagaatcagtgaaacttgtagcgtctcggtcttcagtcccgactaaaatttatatcacatcaaatatttgaaggctaattaggaggactaaatatgagctaattataaaactaattacacagatggaggctaatt

SEQ ID NO: 13253 - DNA, 482 bp, Setaria italica
  Peptide Sequence Number=SeqID_79227
agcgttcaaggtctatgcggagaaatatgcagcgtaccaagacgcattctttaaagactacactgagtctcatgctaaactgagcaatctgggtgcaaagttcaatcctccacagggattctctctggatgattagtgctgcacctgagacagcccgtgaagcaggctcatactctcctagaaaaggatcaaagaaacacatacaatttattgctcatcgtgcaagatggagtggtccccagattttcatgacgcaagacggagtctttcaatttttcttgatttcggaaccgagcttgcaaataaatcgaataaaagaactgacacggcatgaatttcagagcctttgtgtgatcctccggagtcgggatagagctatctaatctgatgtttcatttctctttcacataatgctttgcgtgtactgtcaatattctactagcaagtagcaacatggttctctatttgtctataccccctgc

SEQ ID NO: 13254 - DNA, 1210 bp, Setaria italica
  Peptide Sequence Number=SeqID_79228
gcgcgggccagccgcgccttcttacccaactcgtcggcctcgccagctggcgcgcgcgtcggcctccgcgccgcgccatctcggctcccgcagaaggcgagggcggtgaggtgcgcggctgtggcggcggcgtccgacgcggcgcagctgaaggccgcccgcgaggacatcagggagcttctcaggacgacacattgccaccccatcctggtccgtctgggatggcatgatgctggtacgtatgacaagaatattgaggactggccacaacgaggaggagctaatggaagcttaagatttgatgttgagctgaaacatggagccaatgctggcctgataaatgctctaaagcttatccaaccaattaaggacaagtacccgggtatcacttatgcggatttatttcagttggcaagtgctacagcaattgaggaagctggtggcccaaagattccaatgacatatggacgggttgatgttacaggacctgagcagtgcccgccagaggggaagcttcctgatgctggcccaacttcacctgctgatcacttgagggaggtattctacagaatgggccttgatgacaaggacattgttgtcttgtctggagcacatacacttggaaggtccaggcctgaacggagtggctggggaaaaccagagacaaaatataccaaaaacggtcctggtgcacctggtgggcaatcatggacacctgagtggctgaaatttgataacagttacttcaaggagattaaagagaaaagagatcaggatcttctggtcctacctacagatgctgctttatttgaggacccagcgttcaaggtctatgcggagaaatatgcagcggaccaagacgcattctttaaagactacactgagtctcatgctaaactgagcaatctgggtgcaaagttcaatcctccacagggattctctctggatgattagtgctgcacctgagacagcccgtgaagcaggctcatactctcctagaaaaggatcaaagaaacacatacaatttattgctcatcgtgcaagatggagtggtccccagattttcatgacgcaagacggagtctttcaatttttcttgatttcggaaccgagcttgcaaataaatcgaataaaagaactgacacggcatattagatagctctatcccgactccggaggatcacacaaaggctctgaaattcatgccgtg

SEQ ID NO: 13255 - DNA, 231 bp, Setaria italica
  Peptide Sequence Number=SeqID_79229
gataatctggatgaggagtcccagcggcaatttatgaaggatgttggcaacaacagcgaagtcagggtgctcgacatttatgtcggtcgcttcaaagggatggtgcagtcagatctagtgcattcactaggcaatctccgcaaactccagcatctggaactgacggatcattatttggatcaggatggcgttagaagtgaaggcgcaacgagggagtggacagagtggtgc

SEQ ID NO: 13256 - DNA, 389 bp, Setaria italica
  Peptide Sequence Number=SeqID_79230
tggctgacccagctgagatggatggcctgctcaaacgtctccaaaagaagatgtccaagttgttcaacaagagcaaggcgcgccacaccattgccggcaccatcgaggacatgaagaagcgactccaggaggtggctgaccgccgtgacaggttctcggttgcgctgtcgcaacctgcattgccaacgaagccggatcctcgccttgcggagatgcacaaagaagcggcgcagctcatcggcatcgaggagtccaaggctgaacttacagccatgcttctgccgacgcctcacggcaatggagattctgacatctctggcagcaataacaagatgaagatagtttctgtggttggaggttgggggcctgggaaagtccactcttgccaa

SEQ ID NO: 13257 - DNA, 399 bp, Setaria italica
  misc_feature (6)..(6): n is a, c, g, or t
  Peptide Sequence Number=SeqID_79231
acggcnctcagcaagtgggcgaggtgccgccggagcagcttgatccacaggtcaagctgtgggctagcaaggtcagggaggcgtcctacgacatggaggacatcctcgacaccttccttgtcagcatcgtcgacgtagacaccccagctgagaagaaggatggcctactcaaacgtctcctcaagaatattgccaacttgttcaacaagagcaaggagcgccacaccatggccggcgccatcgaggccatgaagaagcgacttcaggaggtggctgaccgccgtgacaggttctcggttgcggtgtcgcaacctgtgttgccaagaaagccggatcctccccttgcggacatgcacaaagaagcagcgcagctcatcggcatcgaggagacgaaggggg

SEQ ID NO: 13258 - DNA, 255 bp, Setaria italica
  Peptide Sequence Number=SeqID_79232
gttggatggctggatggtccagttggtgctcagtgaggactccactggtgtttcgtttagcatctggaatgggatggatgctatagcctttggttccaaaacaaaggatgagtacaacagatcaatagcaccaccgcctgtgatgccgaacctccaagagctttcgtatgacgttcccgtcagggccttatataaggatggaaatggtagctgcggtgatgtcaggctgtcgtgcctcccttcgcttttgagtgt

SEQ ID NO: 13259 - DNA, 360 bp, Setaria italica
  Peptide Sequence Number=SeqID_79233
atggattcagtggaccttgtgcttgatttcaatggccttacgttggctgcagcactatctgtgcatcaacataacctgacagatgaacaaagtgacaaaccacgctcttatagggccgcagcaacgaattcgtcagaagcgacaacgcgcgctccaatggcaaatatgcttaccgacgatgaagccgaaaatcaaagtgacccgaattcctgcgtcgccgaacgtgataccattgaggaggaaaagagatcaggtgaatggttcgtcgcaaccggcgcagcacatcacgcgacttggaaacgcgatctattcagcaacctggtggatgtcgagaacgatggcctctgtgttcatgcggca

SEQ ID NO: 13260 - DNA, 474 bp, Setaria italica
  Peptide Sequence Number=SeqID_79234
ctttccgttggccggaaacctgacctggcgcaaatcttaaaagaaatcttccttcttctcgacaaaaaggagtacgaggccattcgtgatgtaaagaacgaatccctgcttataggcgaactccgaaaattcctccaaaacaagaggtacttcatcgttattgatgatgtatgggatataccaacttggaagacaattaaatcagccttggttgagaataatagtggaagtagagtaatcacaactactcgtaatcgagatgtagccaacagggaggaggtttacgagctacgcgcactttctcctgatcactcagagaaattattcataacgaggctgtttggtgttaatggcaaatatcctactcatcaccctgcggaggcatctgaaaagattctgaaaaaatgtggtagtgtaccattagctatcatcacaatggccagtttgctggtgggtaaatcaagagaagattgg

SEQ ID NO: 13261 - DNA, 382 bp, Setaria italica
  Peptide Sequence Number=SeqID_79235
aaggaagccatggaagtcgctattaagcccgcgtatcatcagccagagtttccaagccagatcagtgccatggacgccgccgcgtggttaattgatccccctgttgaagcttctctcaaacgctttgaagatgctgaaacctggaagtatatattgaaggcggtgttcatggagaagaagacaagggaggatgacatcctcgacacctgcctcatcgaggtggctgaccgagctgaaaagaaggatggcctgctgaaacgtctccagaagaatattgccgacttgctcaataaaaagaggaaggcgcttcacaccatcgccgtcgccagcgaggacacgaagaagcgactccaggaggtggctgaccgccgtgacaggttct

SEQ ID NO: 13262 - DNA, 379 bp, Setaria italica
  Peptide Sequence Number=SeqID_79236
cttgaaaaacggaaaaaaagaaaaaataaaagaaacaaaacaaaaagaaaagacgggccgcagctcatcggcatcgaggagtccaaggctgaacttacagccatgcttctgccgacgcctcacggcaatggagattctgacatctctggcagcaataacaagatgaagatagtttctgtggttggagttgggggcctgggaaagtccactcttgccaaggcggtttacgatgagtttcgtccacgatatgattgtggagcctttctttccgttggccggaaacctgacctgacacaagtcttgaaagaaatcttccttcttctcaacgaaaaggagtacaaggccattcgtgatgtaaagaacgaatccctgcttaatt

SEQ ID NO: 13263 - DNA, 613 bp, Setaria italica
  Peptide Sequence Number=SeqID_79237
tgctccaggcggagtacaagctgcagaagggcctgcctgagcaaatcgagtctctgaaaaatgagctcgagagtgcgcagacggctctcagcaaggtgggcgaggtgccgccggagcagctcgatccccaggtccggctgtgggctagcgaggtcagggaggcgtcctacgacatggaggacatcctcgataccttcctcatcgaggtggctgacccagctgagaagaaggatggcctgctcaaacgtctccaaaagaagatgtccaagttgttcaacaagagcaaggcgcgccacaccatcgccggcgccatcgaggacatgaagaagcgactccaggaggtggctgaccgccgtgacaggttctccgttgcggtggctctacctgccccagcgaccaagccggatcctcgccttgcggacatgcacaaagaagcggcgcagctcatcggcatcgacaaggcgagagcagagctcatagccatgcttcagccgatgtctcacggcaatggagattctgacgtctctggcagcaataacaagatgaagatagtactcacctcgttcggcagcgcgttaagccgctgctgcggctgctggctgccgcagccggt

SEQ ID NO: 13264 - DNA, 587 bp, Setaria italica
  Peptide Sequence Number=SeqID_79238
ggttgtacgacaacgcgcgcatgctaacagataactcatttgctgctgttatggtctattcaaagtgacccgaattcctgcgtcgccgaacgtgataccattgaggaggaaaagagatcaggtgaatggttcgtcgcaaccggcgcagcacatcacgcgacttggaaacgcgatctattcagcaacctggtggatgtcgagaacgatggcctctgtgttcatgcggcagatgggacgcccatgcccgtctgcggccgcggcgacgtggtaacggatgacgtggtccttcctgacgtgtattacgttccccgcctttgcaccaaccttgtctccgtcgggcaacttgccgggctcgattactgcgtcgggttcggccgtggcgcctgtgtcatcagtagcgctgcgggcacggtcgtcggtagagcgcacgccagaggcgacgggctgtatgaggtggatttcctcagagtcccacttggcatgccatgaagtgagttatgcatgagtacgcacacttgagaaaagttgtgcaatgtaacaagtcatatgaaataatgcaacccatgcatgcacaatatttggtttct

SEQ ID NO: 13265 - DNA, 1898 bp, Setaria italica
  Peptide Sequence Number=SeqID_79239
acaggttctccgttgcggtggctctgcctgccccggcgacgaagccggatcctcgccttgcggacatgcacaaagaagcggcgcagctcatcggcatcgacaatgcgagagcggagctcatagccatgcttcagcctgatctcgaaagaaaagaaaagaaaagaaaagccatgcttctgccggcgtcttactgcgatgcagattctgacgtctctggcagcagcagcagaaagatgaagatagtttctgttgttggatttgggggactggcaaagacgactcttgtcaaggcggtttacgatgagcttcaatcgcaatatgattgtggagcctttgttcccattggtcggacaccgcaagtcttcagcaacatattgtaccttctcgacaaaaaagaatactctcccatcctcaacttaaaggaccaattcctgctcattggagaactccaaaaattcctccaaaacaagagggacttcatcgttattgacgatgtatgggacataacaacttggaacataatcaaatcagctttggttaacaatgacactagaagtagagtaatcacaactactcacaatcgagatgtagccagcagggtgggcgaggtgccgccagagcagctggatccacaagtccggctctgggctagcgaggcctgggaggcatcctacgacatggaggacattctcgacacctgcctcatcgaggtggctgacccagttgagaagaaggatggcctgctgaaacgtctccacaagaatattgccgacttgctcaaaaagagcaaggcgcgccacaccatcgccgtcgccatcaaggacatgaagaagcgactccaggaggtggctgactgccgtgacaggttctccgttgcggtggctctgcctgccccggctccacaggaatatctgaacgtttcactttctcccacagcttcggttcctgcagtaaagggccctgaattcattcgcacgggaaccgttaaaaagaaggggaaaggtggaggttgcacttgacaagatggataccttactctgctttgagtatatgcagaaggcaaatctttataaacttgacttgcagacacgcttcaatatagagggagaacaaggacaacaagcacgaaagatgagaagctgtggttttggggatgatggtgatggtggcatcaaatttgtggaagaaaccaagaaagaaggaagaagcacgggtctggcacacctcatgttgctactgatggtagaagcggtctgctccaaaatatctgaaatgtctcccgaagaattctatgagattgtcgtatgtcaagagtggtggaccacgtggatgtttgagtcatcttctaaacaaataaagagattgaatcaaatagttttaagctgtctggaaaccggcaaatccaccaaggctacgagcagtactgtttcatcaacacaacgagctgtgcatgatatcctcatcctggctgccatcagcatcatcactgaaatgaaacctttgctggcttatgatattactgctccgaacatggattcagtggaccttgtgcttgatttcaatggccttacgttggctgcagcactatctgtgcatcaacataacctgacagatgaacaaagtgacaaaccacgctcttatagggccgcagcaacgaattcgtcagaagcgacaacgcgcgctccaatggcaaatatgcttaccgacgatgaagccgaaaatcaaaggtaggtgtttttttattacacatttcaaccttttccatccgttccccagcgtttggactccaatcaaaaggtatacaatgcaaagtcatttcaaagtagaacttactggtaatcttctgctaatgaacaaaacacctaatgaactaccagtttttctatatcttgccctta

SEQ ID NO: 13266 - DNA, 1498 bp, Setaria italica
  Peptide Sequence Number=SeqID_79240
ctgaagcacaatcaagtccatccaagcagatattttccctaccaagcagagcagtcctcggctcattcactgtaactgcaagtcgatcaaccaaagcccatccattattcttcgtagctctatctattaatcctgcttaatgttttctcgatctagctttctttctttcttttgaacgaaatatcctcgatctagatttccaccctattatttttttctttttctcgctttgttcttgattgtgcttgaaatcctagccgatagcagcatgttcttggtagcctgtgtaaatagctcaatgttcttggtagccttgctaccgttcttacaaatatatatattgatattagattgcacgtacttgatgcatggacaagctgcagtagtgcttggctcattcatgacaagctgcgcttcatcttcaactcaaccacccatcaatccttcactctttcctcaagcacaatccaagagctgaaccagcagcagtaaggctctgcacatgcacaagagccataggcatggatcttgtgtccggggcggtgggcagcgtcatcggcaagctcggcgagctgctccaggcggagtacaagctgcagaagggcctgcctcagcaaatccagtctctgaaagatgagctcgagagtgcgcagacggctctcagcaaggtgggcgaggtgcggccggagcagctcgatccacaagtccggctctgggctcgcgaggtcagggaggcgtcctacgacatggaggacatcctcgacaccttcctcgtcgaggtaactgacccagcggagaagaaggatggcctgctggaacatctcaacaagaagatgtccaagttgctcaaaaaaagcaaagcgcgccacaccatcgccggcgccatcgatgacatgaagaagcgactccaggaggtggctgaccgccgtgacaggttctcggttgcggtgtcgcaacctgcgttgccaacgaagccggatcctcgccttgccgacatgcacaaagaagcggcgcagctcatcggcatcgaggagaccaaggctgaacttacagccatgcttctgccgacgcctcaaggcaatggaggattctgacatctctggcagcaataacaagatgaagatagtatctgtggttggagttgggggactgggcaagacgactcttgccaaggcagtttacgatgagcttcgtccgcgatatgatcgtggagcatttctttccgttggccggaaacctgacctggcacaagtcttgaaagaaatcttccttcttctagacaaaaaggagtacgaggccattcgtgatgtaaagaacgaatccctgcttattggtgaactccgaaaattcctccaaaacaagaggtacttcattgttattgacgatgtatgggacataacaacttggaacataatcaaatcagtcttggttgagaatgacactggaagtagagtaatcacaactactcgcaatcgagatgtagccagcatggaggagg

SEQ ID NO: 13267 - DNA, 2803 bp, Setaria italica
  Peptide Sequence Number=SeqID_79241
ctgaacttacagccatgcttctgccgacgcctcaaggcaatggagattctgacatctctggcagcaataacaagatgaagatagtatctgtggttggagttgggggactgggcaagacgactcttgccaaggcagtttacgatgagcttcgtccgcgatatgatcgtggagcatttctttccgttggccggaaacctgacctggcacaagtcttgaaagaaatcttccttcttctagacaaaaaggagtacgaggccattcgtgatgtaaagaacgaatccctgcttattggtgaacttcgaaaattcctccaaaacaagaggtacttcattgttatgtcccatacatcgtcaataacaatgaagtacctcttgttttggacgatgtatgggacataacaacttggaacataatcaaatcagtcttggttgagaatgacactggaagtagagtaatcacaactactcgcaatcgagatgtagccagcatggaggaggtttataagttacgcacactttcccctgatcactcagagaaattattcaaaacgaggttgtttggtgttaatggtgaataccctgctaatcaccctgcggaggcatgtgaaaagattctgaaaaaatgtggtggtgtaccattagctatcatcacaatggccagtttgctggtgggtaaattaagagaagattggtttgctgtgtgcaactctcctggattctatcgtggtcagggtaaccagcaagtagatgatactgagtggatattgtctcttagctattatgatcttccttcttatctaaggacctgcttactgtatctaagtgtgtatccagaagacattgtgattgagaaaaattctttgatatggaaatggatagctgaaggtttcgtggagaagaaaagagggaccagcttgttacagcagggagaggaatactacaatcagctcgtaaatagaagcatgatccaggtggtcgagtcattacattccatgggcattaatggctgtcgtgttcatgacatggttcttgatctcatccgtgacttatcaaataaagaaaactttgtgactatctcatcaaatgatgatgaaggaaaatcaccacatcagagcagggtgcgcaggttagctcaccagaacataattatgaagcaaacacagcaggacgatcacatggacatggcacaagtgaggtcattggttgcctttaggtgtgatattgatagttgggtcttgcatccaagctttaaactcttgcgagtgctagctttattgggatgccgtggacattgggaaggcgggcagggtcttaagcatattggaaatctacttcatttgaggtaccttgggctacgacgcacaaatattcgtgagctcccggaagaaataggaaaacttaagtttctacagatacttgacttggaaggttctaaagtagggcaactgccatcgagcgtttgccagttaacgcagttggtctgcctatgtggtcactcccgttatacatgcccgccggatgggttattccttaggaaggtgacatcattagagtacctgcgtatacgtattgataacctggatgaggagtcccagcggcaatttatgaaggaccttggcaacctgagggaagtcagggtgctccacattattggctcgttgaaagggatggtgcagtcagatctagtgcattcactaggcaatctccataaactccagcatctggagctgacgaaatataatggcaatagtgaagccgcaacgagggagtgggacagagtggtgcttccacagcatctccggtatttggatttagattctataccgctccgtcagctaccatcatgtattaatcccgttcatctccccgtcctccactacttgcggttgcatgtggatcatatggacgagtcaagtctgcgaaacttgggtgggttgacagagctccgtgacctcaatttgtttacggctcggccgtcgatggcttgcgcggcaactgtagctaatataaatactgcggtcgatggcttcttcaagaagttgagatattgcttattgcatggttggatggtccagttggtgctcaacgaggactccactggtgtttcgtttagcatctggaatgggatgggtgctatagcatttggttccaaaacaaaggacgagtacagcagatcaatagcaccacaaccagtgatgccgaacctccaagagcttctgctttacgttcccgtcagggacttttataaggatggaaatggtagctgcggtgatctcaggctggattgcctcccttcgctttgcagtgtcataatatttgtcgactgtatggatgcctctactgatgacgtggagaaggcagaggctgagctgaggaatgcagcaaaactctatcccaacgggcccataatcagactccaacgactccttgaacataggatgatggcacgatctacagaccaagatgacaaagagtccgtcgatgtttccgcgaaagaagaggagcgcggggcctcagcaactggcgatgaagtcgctgtcacggagtcaggaggtgacaaccccgcgacgcctagctgttgaatctgttcaatgcaaatcagtcttgctatgacaaagaggtacttgcagtgcatggtatttctagattcatatagtgtatatatggatgaataccaaaagctatgaacctacgtatgctaaaatgacctacaatttgggatggagagactacaatatatatgtgtatatattgtttggtagtattttatatattacatttgacatttacatacgtacatatat

SEQ ID NO: 13268 - DNA, 340 bp, Setaria italica
  Peptide Sequence Number=SeqID_79242
ccagcaggggcagcatccccctcgacgcctcgaggccgaagccgcgccgccggcctctgctcatgccggcccccatctcccgagaccgcggggccgccacaggaccaaagccgcagcttccttcagtcctccacacgcaaactctccgctcgaaattcctccgccttcctatcgacttgcggcgctggactcattttatttgtggactggtttggggattttggtttgcttctttcttcgggcgcaagggaaggaacggatggcggcgaggcgaccgaaccttcgggaggactctagcggtcttgccccgccgctccgcccccaagttcgcttcgcctca

SEQ ID NO: 13269 - DNA, 367 bp, Setaria italica
  Peptide Sequence Number=SeqID_79243
taggtacttacgaaggtcgcttgcgggcgaccaaggacatgttcccgaggatgtcctcgagcgagatggtcgggccaggggacaccgcagcggccgtggcggtctcaaccgagcggctaaggcagcggctgcagcaggaaggggtcagcgaggcggccattgctgacagcgagagcatcgacgagcagaattcgaggctctgcacaagcagcttgtgctcgccaagcagaagcatgcgctcctcgtggaaactcttcgccagctagagaaaaggttgatttggagaatacccttgttgatgagagccaaagacagtcgaaagaaggaagtgctagcgaatctgatgattataatgaacacaagatcc

SEQ ID NO: 13270 - DNA, 501 bp, Setaria italica
  misc_feature (22)..(22): n is a, c, g, or t
  misc_feature (103)..(103): n is a, c, g, or t
  Peptide Sequence Number=SeqID_79244
taatgttatggatgacgcaganattcagctagccgtgcgttctgtgtgtttgctgctgttggtacagcaggacaacgctgcactacatgcctaggctggtatntaaacaagtcagaattgggcatccgttggagaagggcaccttactgggaccgctgcacactcctacttcaaaagagaactttttgaaaggcatacagaccatcaaatctcagggagggacaatcctttttggaggatctgccattgaatcagaagggaacttcgtacagccaacgattgtggaaatttcagcttctgcaccagttgtgaaagaagaactctttggccctgtcctttatgtgatgaaatttcagaccttgaaggaagcaattgaaatcaataactctgttcctcaaggattgagcagttcaatatttacaaagaggccagaaattatttttaagtggcttgggccccatggtagtgactgtggtatagtgaatgtgaatatacctacca

SEQ ID NO: 13271 - DNA, 234 bp, Setaria italica
  Peptide Sequence Number=SeqID_79245
ttggagaatacccttgttgatgagagccaaagacagtcgaaagagtatggatctgcttctaaatcaaggcatgagaagtatagtggtatgataattggtggaatgaaggaagtgctagcgaatctgatgattataatgaaccacaagatcctgctgaagagactgacgatgatgagaacatttattttgatacaagagattttctatcttcgagctcttttaaaagcagtggat

SEQ ID NO: 13272 - DNA, 178 bp, Setaria italica
  Peptide Sequence Number=SeqID_79246
ggatggagcgggtgcttctccttgcacaggaagaagctgttctctggaggctggcagccgccaaaggcattagtgatctggtcactgctcaacctgggggttagcagagtccgttggtgaggggtggtcgacctttaaattttaacgggcgtgtatgtaacctagaacctgtgaggtg

SEQ ID NO: 13273 - DNA, 339 bp, Setaria italica
  misc_feature (321)..(321): n is a, c, g, or t
  Peptide Sequence Number=SeqID_79247
aaagaatctttgtatactgtgtttaatggtgccttgcccaggatggagcgggtgcttctccttgcacaggaagaagctattctctggaggctggcaggtgccaaaggcattagtgatctggtcgctgctcgacctgagggttagcaacgtccgttggtgaggggtggtcgacctttaaattttaacgggcgcgtatgtaacctagaacctatgaggtgtgtgtagtattggtgtgtgtggtgttgtatggttatatgagccttgtatctcctttcttaatacaatgatacgcagctctcctgcgtattccaaaaaaaaagntcttgtatgtaatggcaa

SEQ ID NO: 13274 - DNA, 447 bp, Setaria italica
  Peptide Sequence Number=SeqID_79248
ccattcagcacctcctctgttcttgtgtcttctctaggcaattctggcttcaactacttcgcagttttggactcctggatattgcacctcaaccatcttccactgggttctttgactggtggcaacaagctggtagcacacttgacaaaggaaccaagagaggattcaattcaccggtcatgctaggagcttggattctatggaaggaaaggaatgatattgtgtttaatggtgcctcacccaggatggagcgggtgcttctccttgcacaggaagaagctgttctctggaggctggtaggcgccaaaggcattagtgatctggttgctgctcgacctggggcttagcagtgcccgttggtgaggggtggtcgacctttaaattttaacgggcgcgtatgtaacctagaacctgtgaggtgtgtgtagtgttggtgtgtgtggtgtt

SEQ ID NO: 13275 - DNA, 428 bp, Setaria italica
  Peptide Sequence Number=SeqID_79249
tgcagtacagtcttgtgtggtccatttgcagaaagttagtttagctcgaagatttgcactagttcctttggggccaccactattgacctacaaaagcaactgcaaagcaatgttgacagctgatggtgattctgttcggttggtggtggatcggccttataaggctggggagccaataatcgtctgattatacaggtgtggaccacaaacaaactccaggctggttctgaactatggttttgttgatgaagacaatccctttgatcgcatatcaattgaggcatccttaaatacagaagatcctcaataccaagaaaagagaatggttgctcagaggaatggaaagcttgctatccaaatttaacgtctatgtaggtaaagagaaagaaactgttgcagaatgctgccttacctgagattaggataca

SEQ ID NO: 13276 - DNA, 388 bp, Setaria italica
  Peptide Sequence Number=SeqID_79250
atttttaagtggcttgggcccatggtagtgactgtggtatagtgaatgtgaatatacctaccaacggtgctgaaatcggtggagcatttggtggagaaaaagcaactggtggtggacgagaagcaggaagtgattcctggaagcagtacatgagagggcaacttgtacaatcaactatggaaccgagctacctctagcacagggaatcaattttggttaatccggcaggagagggttgagcatggatctcgctgttttctgcagacgtggatgcccgcattggagaacttatgctatcgtgttgagatctctgcatacatcagtattgtttatctgtgtactagtttgttgtaaaccttaaatttggtaggtactagtctagttagtt

SEQ ID NO: 13277 - DNA, 239 bp, Setaria italica
  Peptide Sequence Number=SeqID_79251
gaagagtgcggcggccatgacgctcgggatggggatgaggatttggatggagataaggttccggggattggagagactgacgatgatgagaacatttattttgatacaagagattttctatcttcgagctcttttaaaagcagtggatctgatttccaaagatctgaagctggttcagatgatgaagatgactatccaatggatggaattgatccttccatgaagtctgttggaattag

SEQ ID NO: 13278 - DNA, 449 bp, Setaria italica
  Peptide Sequence Number=SeqID_79252
aggaaatcattgacatgtgtgattatgctgtggggctaagtcgccaattaaatggatcaattataccatctgaaccatatgtgcagctagatgataatatcaggaggtctgctaacactccattttctgtgtttttgcaggtccgaaccatatgatgatggaggtgtggaatccacttggagtcgtcggtgttataacagcatttaattttccttgcgctgtgctcggttggaatgcttgcattgctttggtctgcggaaactgtgttgtctggtaagaatgggtttgcttttctgataaaggagaattgctgttatatatgtgcatagaaaatcttaccattccattcagtgaaattttgagttgacctcccttatgattcatctattactctttgtccctgctcatgaaaattcactggcccttccctttcaacagaataattagtg

SEQ ID NO: 13279 - DNA, 990 bp, Setaria italica
  Peptide Sequence Number=SeqID_79253
ctctgccagaaccttgtctccctccagctgctatgtgaacatctagctggccttcaggcatcaaaattagacacctaagaatgcttcaggagatcgaaacttcatcctgaaatcagtgagccagcaagacaagaatgggaagaagcagcacggaaccatcctaacaggccgattgttttgcctttcgtaactgttaacgatctggtggaaaatgataatgaaaagaacccagttgcctcaccagaggaatcaaggcatgagggtggtgaggcacccagaccttcttgtgtacaacatatgcctctttccacttgtaacaattctggactcagcagtgaaatggatgatgctgtacaccatgatcccagggagagtccagttgagacagaggaaacaactcccgagagtgtcattgatgagcaactgctgacggaggagccattgaaacacacgcctgtgcagactagacatgaaaatagtacagtccaaccaagaacaaatggcatactaggctctatttctgatcattcaggacttaatagtccaagggatgattcgaggaacagcaagccactggggaaatatgttgctctggaggaaccaacatatgagaatggaatccagggatgtccagccgaggaggcaataagatactctcttgtgctgactgatcaaacagtaaagtatacttcaaggggacctctcaatatagcaacaacaccattcaattccacacaaacaagaatatgaatgatctgaggatggagcgggtgcttctccttgcacaggaagaagctattctctggaggctggcaggtgccaaaggcattagtgatctggtcgctgctcgacctgagggttagcaacgtccgttggtgaggggtggtcgacctttaaattttaacgggcgcgtatgtaacctagaacctatgaggtgtgtgtagtattggtgtgtgtggtgttgtatggttatatgagccttgtatctcc

SEQ ID NO: 13280 - DNA, 701 bp, Setaria italica
  Peptide Sequence Number=SeqID_79254
ggcggccatgacgctcgggatggggatgaggatttggatggagataaggttccggggattggagagctggaggtgaaggtcgagcagcagcagcagggcggcgacggcgaggaggcgaagggggatgagggggaggaagaggaggaggaggaggaggaggaggaagagggaggtgcgcggaagagggaatacgacgaccagggggaccttatcctctgccgcctttcgtccaagaggagggttacgctgtcggagttcaagggcaggacgctggtgtccatccgggagttctacctgaaggacggcaaggagctgccgagcagtaaaggcataagtatgacagttgagcagtgggaagcatttcgcaatgctgtacctgcgatagaggatgccataaagaagcttgaagattcagactgaacatgttttgcaagcctcttcttttgcctgtaccaaatcaaaaggcccattctggcccctgataagggccatacgcggtttgaaagtgccgcatggagctatagagctcctatgaacttctgtaaaaggtttcgctcggtcaaactgcctagtgccatctgtagggtagactgtagacagttcggaaatatttgctaacgagtaatccaccagtattgtgtaaagagtttggaatgtgtgctagcaagcttgtgaagtttcaatccagttctttctaaaaa

SEQ ID NO: 13281 - DNA, 847 bp, Setaria italica
  Peptide Sequence Number=SeqID_79255
aaccgcccctccacctcctcgtcctcccactccaacggccaccaccagcctcgcaaccccatcggcgaaatccacctcaaggtgtcaaccgtgagggagagcagatcggacgacaggagattctcgatcttttcgggcacgaagacgctgcacctgcgggcggagacaagggaggacagggcagcatggctcgaggcgctgcgggcgaccaaggacatgttcccgaggatgtcctcgagcgagatggtcgggccaggggacaccgcagcggccgtggcggtctcaaccgagcggctaaggcagcggctgcagcaggaaggggtcagcgaggcggccattgctgacagcgagagcatcgtacgagcagaattcgaggctctgcacaagcagcttgtgctcgccaagcagaagcatgcgctcctcgtggaaactcttcgccagctagagacagaaaaggttgatttggagaatacccttgttgatgagagccaaagacagtcgaaagagtatggatctgcttctaaatcaaggcatgagaagtatagtgaaggaagtgctagcgaatctgatgattataatgaaccacaagatcctgctgaagagactgacgatgatgagaacatttattttgatacaagagattttctatcttcgagctcttttaaaagcagtggatctgatttccaaagatctgaagctggttcagatgatgaagatgactatccaatggatggaattgatccttccatgaagtctgttggaattagctatccatatgtaagaagacggaagaaactaccagatcctgttgagaagagaagggtgtaagcttgtggtcaatgatcaa

SEQ ID NO: 13282 - DNA, 554 bp, Setaria italica
  Peptide Sequence Number=SeqID_79256
caagtaatcttcaaaccttcgtccagtcagcgagagaagatgaaggagtggacagtgaccgtatctcaatgatcgtcgacatagccgctgcttgtgttcggtcatcaccagaaagtcggcctgccgcctggcaagtacttaagatgatccaggaggtgaaggaagcagatacaactggtgacaacgacaacgacagtgatcttaccagcaactcctagttgcctcttagggtccatgtcataattcgaagcaaccgtatcagtgctagtgtaggagcttgtctacaggttcttgctggatggatgtagatcggatattcaaaatgaaggtgaactctagtgtaggagaaggcaatataatcatgatctctctggttggtatcgttttgagctacggatgctgtaacatatttaggatttctgtagtggcagcatgttcttgtctgttgctagcaatagaaattttagctccgctctgttatgtgaaattgtatcaggctttatagtagtaaagttactaaaacagtgtgttgagaactaaaaaaaaaaaaaaaa

SEQ ID NO: 13283 - DNA, 1152 bp, Setaria italica
  Peptide Sequence Number=SeqID_79257
gcgtacggtctctgacagtccgtgggaatgcaggtgttgctatttctgattttggcaggtataaactaatgagagtcttggatctcgaagaatgcactgatgtgaatgataggcatgtaaggaaaatatgcaagctgtggaatctgagatacctgagcctcagtcgcaatgttacaaatcttcctaaggaaattgcaaaactcaaattgttagagacactcgttctgagtaaaacggtggtaaatgtgctgccagttgaagtcattgggattccttgtttaactaatctaattggaaagtttaagctttcagatcaagactgcacatcaaatagtaatatggagagactgtctaaaaatgaaggacttgaggacctgtttagaaaaagcaaactggagaccttagcaggatttgttggcgatgggagtcacatgcaaggatttctgcaactcatggtccatatgaagaacctgaaaaaggtgaagatatggtgcgagtccgctgcagacattgaaggcaatgaccacttgaatgctgaactggtaaaggccattcggcagtacatcaaaactcccatgggtgctggagatgttcgttccctgtcaattgattttcaaggagtgcctggaggatcactgaatgcactgcaagaactgtgtcgtcatagcacatctttacaggaaacatattatctcagttcactgaaactgcatggcaacctatcaacatatcctgagtttgttggcatattttcaagactcactgaattgtgcctttcatgtgccactgtttctacggatcttttgtcttgctggctcactgatttcaggatgaagttcgatctcctgaagcattcttaggtgtctaattttgatgcctgaaggaccagctagatgttcacatagcagctggagggagacaagttctggcagagctccttcttcgatttcagggaggacagggttctgatgtcgcacaagaaaacacagacgtctcaggctttggtacgtcccacctttaatgacgaaaccatcaatctcatcaacaatcagtttgaggtaaagcaagaatggcattgcactaatcgcaaacaaaagatccgtagaaacagtggcaacaatagaaaaggacaacaaattacaagttagaaga

SEQ ID NO: 13284 - DNA, 1158 bp, Setaria italica
  Peptide Sequence Number=SeqID_79258
ttccagatggatcatgcatgatacatgccatcacaaacattctgaaaaaatgtcagatcgtaactcacatctgttcttgactgctgctatgtatcgcatgtgggcacaactctctcaagatttctactttctttgaaagcgcaattagcataagagcgtgtgttcattgcaggccgggaaaatctcccggtatacaacaatttcactcccaacctttcattatcgcatcttctttttactcataataaggaggcaagaatagaagctagaaactaacacttggcaaaacacactattaacctctaaattgacataattcaaaattgacgccttggctttgattccgcaactgtgactcggatctgcctgccatccaagtcgatgccatcaaggtttgatatggcattgttgacctcctcagcagagccataggtgcaaaccaaataccctcttgacctgccgctctccctgtcatagatgaccttagcatcaagcacctgcccttgctcactgaacaggttctcaagcgttgagttgtcgacaccccatgaaaggttccctacgtagaccttgtttcctgaatccacaaagtttccaccaccaccaccaccccttggtgctcttggtgcagagtcatccctaggcggtggtggcccagagttcacccttagtggtctgccttgaaatgtctgtttgagaggcaaggctaattagtcaggagctcaatctgctacaacgcactatgcactcaagagaagtaattcagttccaaaagctatgatgaagttgttcctaaagttttcggttatgcttcgattcacatttcaaccttttatagaaatgcaagcttcagtgcaaaacctgcatctgatcttaaaatggctagacaactttgtctgtttagtgttgttatatctttttatttttccttcaactggatagttaatcttctccagaagcataccaagagaaaggtagcttaaaccatggaagtatactcacataaccgttgaattgctcaacagcggctccagcttcttcagctgaagacattgtcacaaatccaaatccacggcttcgtccagtcattctatcatatacaacctcgaccatctcgacggagccggcctgctcgaagagcccggcgagctgcgcgct

SEQ ID NO: 13285 - DNA, 670 bp, Setaria italica
  Peptide Sequence Number=SeqID_79259
tcttcgccagctagagaaaaggttgatttggagaatacccttgttgatgagagccaaagacagtcgaaagagtatggatctgcttctaaatcaaggcatgagaagtatagtgaaggaagtgctagcgaatctgatgattataatgaaccacaagatcctgctgaagagactgacgatgatgagaacatttattttgatacaagagattttctatcttcgagctcttttaaaagcagtggatctgatttccaaagatctgaagctggttcagatgatgaagatgactatccaatggatggaattgatccttccatgaagtctgttggaattagctatccatatgtaagaagacggaagaaactaccagatcctgttgagaaagagaagggtgtaagcttgtggtcaatgatcaaggacaacataggaaaggatctcacgaaagtctgtctgccagtttatttcaatgagccactctcgtcattgcaaaaatgttttgaagatcttgagtattcctaccttattgatcgtgcatctgaatgggggaaaagggggaatagtcttatgaggattcttagcgtagcagcatttgctgtttctggatatgcctcaacagatgggagaagctgtaagccctttaatccccttcttggggagacatatgaagcagact

SEQ ID NO: 13286 - DNA, 624 bp, Setaria italica
  Peptide Sequence Number=SeqID_79260
agtatatatcaaactatttcttgatcaacttgttgaggtatataaacaagtcagaattgggcatccgttggagaagggcaccttactgggaccgctgcacactcctacttcaaaagagaactttttgaaaggcatacagaccatcaaatctcagggagggacaatcctttttggaggatctgccattgaatcagaagggaacttcgtacagccaacgattgtggaaatttcagcttctgcaccagttgtgaaagaagaactctttggccctgtcctttatgtgatgaaatttcagaccttgaaggaagcaattgaaatcaataactctgttcctcaaggattgagcagttcaatatttacaaagaggccagaaattatttttaagtggcttgggccccatggtagtgactgtggtatagtgaatgtgaatatacctaccaacggtgctgaaatcggtggagcatttggtggagaaaaagcaactggtggtggacgagaagcaggaagtgattcctggaagcagtacatgaggagggcaacttgtacaatcaactatggaaccgagctacctctagcacagggaatcaattttgctcaaccctctcctgccggattaaccaaaat

SEQ ID NO: 13287 - DNA, 1758 bp, Setaria italica
  Peptide Sequence Number=SeqID_79261
actgctgctatgtatcgcatgtgggcacaactctctcaagatttctactttctttgaaagcgcaattagcataagagcgtgtgttcattgcaggccgggaaaatctcccggtatacaacaatttcactcccaacctttcattatcgcatcttctttttactcataataaggaggcaagaatagaagctagaaactaacacttggcaaaacacactattaacctctaaattgacataattcaaaattgacgccttggctttgattccgcaactgtgactcggatctgcctgccatccaagtcgatgccatcaaggtttgatatggcattgttgacctcctcagcagagccataggtgacaaaaccaaatcctcttgacctgccgctctccctgtcatagatgaccttagcatcaagcacctgcccttgctcactgaacaggttctcaagcgttgagttgtcgacaccccatgaaaggttccctacgtagaccttgtttcctgaatccacaaagtttccaccaccaccaccaccccttggtgctcttggtgcagagtcatccctaggcggtggtggcccagagttccacccttagtggtctgccttgaaatgtataaccgttgaattgctcaacagcggctccagcttcttcagctgaagacattgtcacaaatccaaatccacggacttcgtccagtcattctatcatatacaacctcgaccatctcgacggagccggcctgctcgaagagcccggcgagctgcgcgctgtcgacgctgaagggcaggttcccgacgaacagcttcaggtcctcggagaactcctcggctccctcctcctcctgctccgcaccctcggtctcgtactcggacgacaccgcgacggccacgggctcaaacacccgcctccccggcgccgacacagcgcgcagcggcagcctgaaggggaggaaggcggaggccacggtcgcagcgggcttcggggaggatagggcgaggaagcggggcgagagggaggtggagaagagtgcggcggccatgacgctcgggatggggatgaggatttggatggagataaggttccggggagggagaagcttgccaagtacaagggggagctcgggaaggggatgtgggggtactgggagctcggcgcgtggaagccgctgggcatcagcgcccgcaagcgcgcccgcctccgcaaggaggtgctcctcgccggcgaggactggacctacgacccgccccgcggcgagatgcgcaccaagcgcaagggccacaagtgcgaccgcatctccgccgagaagcgcgcgaataccgttgagctgatgaagaagatgccccagatgctgctcgattacaagaaacgtaggtgggagaaaaagatgaaagaggaggagggcggaaagagctgatatcaacctgctcctgcatgttgctgctcttcctaaataaggttgaaactttgttcaggagatttataggatggctagatttggatgcatcagtttcttttcgcttgatggattcctgctctcctgtattctgatgcaactttgggatcctctgagtgtaatactttccaacacttgtgccactggatcatgattttagccagccccaacttctgcagaactagtattttgttgagacaaatcagttataaatattacctttttgtcaaataaatttgttcaccatgtaaggcgattgctgctagtcgtgttttatttacttattacaaagaacggttactgacg

SEQ ID NO: 13288 - DNA, 1268 bp, Setaria italica
  Peptide Sequence Number=SeqID_79262
gatagttcctgattcagatccgccaagctctaaagatgtggacctcctgtatcaatttatcgacaagagtaaaaggctcatggtggtaactggagcaggaatgagcaccgagtctggaattcctgattacaggagtcctaacggtgcatacagtactggttttaaaccacttactcatcaggagtttgttcggtctattcgagctaggagacggtactgggctaggagctatgctggatggagaaggttcacaagagcacaaccaaatgcagcccattatgctcttgcatctctagaaaggattggtcgtgttcactcgatggttacccaaaatgtggataggttgcatcatcgtgctggcagtaagccacttgaactgcatgggagcgtatatgaggtaatttgtttagactgtggtacatccatcagccgagagtcattccaggaacaagtgaaggacctcaacccaaagtgggctcaagctatcgatagtttggaagtggggcaaccgggttcagacaaaagttttgggatgcagcagcgacctgatggtgatattgagattgatgagaagttttgggagcaagattttgaaattcctaactgccatcaatgtggtggagtgctaaaacctgatgttgtgatgtttggtgacaatgttcctcaagagagagctgaaagcgctaaggaggctgcaagaaattgtgatgcacttctggttgttggttcggcactgatgacaatgtctgcttttaggctggcaaggcttgcgcacgaagcaaatgctccaatagccgtggttagcattggggagacaagggctgacagcattttatcactgaaaatcaatgcaagatgtggggagatattgcccagaatactgcagatgggaagcctgacagtaccaaacgtaagctgagcgttgctgtcaaaatgtccaagttgtattctcacgcgactatcgtcgcccataagcacaacctctggagaactcggttcgctgtgaagaagacaaggtgaaacaagtaactagctgtgagataattcaacatgtcctaggaaggcgaaggtcactgactatctcgtttcaaaaaaaaaaaactgactatcttggttctgcctatgagcattagtaagccaaaaaggggggatatttaaattgaccatagtgaacaaatacagtattctgggatcattcccgcaaccaatgttgaagtcgccctgtcttgtaaaaagaaagaagaaaagaatccaaggtcattattaat

SEQ ID NO: 13289 - DNA, 476 bp, Setaria italica
  Peptide Sequence Number=SeqID_79263
gtcgcacctggagttgaagataagcagcctcttggagtgcgccgatatgatccccgcggtgtccttcgctctgggcagcacaacgccgtagccgtcgtccatgtagtcggtcccctccgggaacacctgccagagcaggccccccgctccggcgccgccacgccgcatcgaggccagcagcaccccgtacaccgcttggacgaactggtccctccacgtcgcgttgaaggcgctccgggccttggtggacaccccgaactccgtgaacaccaccggcatgctgagcacgccctcggcgtcggcgatgtgcgcctgcatccacgactgcacgaacttgagctgtgcctccacagccgcgcccgacatccatgtgtccgggtagatatggacggaggcgaagtcgacgcccaggacgcggtggttgcggatgaagtcggtgccgacgtggccggcgtaggtgttggggttggcctgaa

SEQ ID NO: 13290 - DNA, 221 bp, Setaria italica
  Peptide Sequence Number=SeqID_79264
tgttcgtctctaaagtgaacagtgaaaaattatcaggagtgaagccaggatccggtgatgtgtttatggcccaagtaatgaatgcaataaggtacctgccaatgaaaactttattgcatgtccttgaagtttggagcaactatgtaaagggaattagtgagatcaatgagaaagtgaaagagcttcagtcaaccacaattgatgcagatagtgcaaggacc

SEQ ID NO: 13291 - DNA, 1839 bp, Setaria italica
  Peptide Sequence Number=SeqID_79265
gtgaaaaaagaagaaagaaacatatagtttcctcgctattgtcatgaaaatcctctcattggaacttctgcgcggttcacctgattttacattcgtgattttttcaatctctctggcgatttgaatatcactgggcctaaagtgttctgtgaaagccttgattacaaaatgtgggaccattgctgtgacaacaatgataagcagcagtagccaaaacagaccggtccccattatatgaaagattgcaccataacctggaagaatccatatggaatctatcacaaagaggcaaatggtagttgctgcaattgtgccccacacaaatgcatgtattatccaattccacctaatgatgtccatgcccaattgcatatttacaacaatgacagctgcaagtgcccacagatctccaagactagacatatctattgtgcttcgtctatatgcaaaatatggtaagtagaaaacaaccaaactctgccagagcgcttcaagcatattgagcacaaacaaattcacattatacttctcatccctctggccagatccatatagcttgggataagctaacaaggttgccttactaagatccttgtcaagaattccgacaacaattgttggaagggatgtatatagcacagtatacaaaagactactccattcagtgattgcagttgtcaaagtgaatgccgtataaagtacataccagaaaagaaccaagacaaatgtagcattcttgtaaaagttgtaaaggatcatatatgacatcctttgataattccagtgaccgtgaactaatagaaggggaaccaagaatctaaattgccccatagaaaaatctgatgccataacagcttgtcgtccttcttgaccactgatgccaaccccaacatcagccatttgaatcattgaaacatcatttgcgccatcaccaattgctaaggtcatatcatctgtcctgttcttgataagggcgactatccctgccttttgtaatggggccactcgacaacacaagacaacactacattcagttgctagtttgaaaagctcttcttgcaactccgtctctagaatgtaaacaaggctattaccatctacaatcaaagcgatagttacgctagaagcttctgatgctaacactggacccagtgtagcaattgatgaagcagatctgagcttcttagttgtggcaagtgcttccactagacttctctgacatgattcctttgaattgttatttataacaatttgcgtcatgtcattggtcagcagcttacaagagtagccaatagaaattgctgtctcctgcttatctcccgttaagatccaaacctttatgtctgcttgccgaagagactctattgcttctggaaccccatcttgaagcttatcttcaatcccagtggcccccaatatgtggatattgcactctatgtttgcggcaacagatcggagtaagtttcctcttccaagtactgctgtgctggcattctcataagccaattgccactcctcaaactcagattgactcaatttacgcatgccaacaacaagagttcttagaccaagagatgaatacttgtggagatgtgcctctgttgcacgaacaatgtccaactctgatgatttgtttgtaattccaaatattgaactgtccgcacctttcacataaagcttaatagtcctatctgggcagccaactatgacagacattctcttacgatcactatcaaactcatgaagtcctaatatatcaaatctttgcctgtcaccaaggacatcaatcactatgtaaccagatgttcgctcaacaaggacaatgccataagatgctgc

SEQ ID NO: 13292 - DNA, 307 bp, Setaria italica
  Peptide Sequence Number=SeqID_79266
ttttttttttaggtggcctaaagtgatcttttccattaaccacacatagcaaatagttttagggtacatatatatagagagatagacaggggtaggtagctggggcattctagggaataagttcctactacatggatagatagggtgcacatacaccgtcaaccacacctaacacacatgatttatgctatcatagctgcatcgtctatgcagatcaagtcctccagcccagccatgaaatcgttcacatcaccgccagcagcctcgcttagcatctcatcttgcatcatcatgggctgtttcattt

SEQ ID NO: 13293 - DNA, 506 bp, Setaria italica
  Peptide Sequence Number=SeqID_79267
acgtgcatgtcgcacaaatgcagtacacatgagcaggccagctcctgtaggcaccatactagtgaatcatcggtctccgcacgcaggcagatgaccacataaacgacgacttatttagtatatatgtagtgtgagtatgggtagaaaaagcttggcgcacatttgtgttgtgcgtgcgaggatgttgctcaagttcagcctcgacggcaggcgatggggcccttgacgttgggggtggggatgggtaaataaaggttcgtagagtaatagcacaagcatttcgtggtgctggtgcccgggctggcatcagcaatgtttttggagacaatgagaagaaggatattgcgctttagatacactgggatggcgcttagaaatgccttcgagtcatcgaagcctgcaggacacacggattgggttggtggtggtggtggtgggggagtcggtggtggtggtggcgggggagtcggtggtgggggagttagggtgggcatgggagcaggtcg

SEQ ID NO: 13294 - DNA, 765 bp, Setaria italica
  Peptide Sequence Number=SeqID_79268
accttgtagatcatgtagatgtcctaaacggcatgtgttttgcatcgaagggaatgcataacaacgctagatatggatgattttgcacatatctcaattcaaccagcaacaaacattccaaactgatttcatgcagccttttggctgacttgttagtattaatgcccagtaaatggaataccagttctgtactttacatgccagctgctaagctgataatttcctatccccttgatatctcctgtgatggtattcatttcatgtatctatatctaaacccatctcagctaaaactaaaccaaaattttgtacaagctaacagtgatttcaaagaagcaagggaccgatcaaggagtttctctgttaactggaaacttggtgaaggtgttcacaacttgatcgactagcagtgctggcataaactggttttgttcttatgaatagaactatgcttgatgctaaccccagcaatgtgatgcaaccccacacgaagaaggtggttgagtagcatttcacccccatgcaaacaatcatggtatcaatcatgccagtgtggttatccattactctcatcctttggccatttgcatcgtataccagggcagcaatctggccatagaggagtgagcccagcgggatattggtgattaggatgttgtgattcacaccaatgctatttggtccaaagagctcggaggtcactgacactgctgcagcgaagatgaaccctgagcttaggccaattagtgctgttcctactgccag

SEQ ID NO: 13295 - DNA, 336 bp, Setaria italica
  Peptide Sequence Number=SeqID_79269
aatatgatctcatggaataacgatgtgtccggcaaggagacacctacgagtcgtgttggcaatgtaaataatgagttcatgatgccatttcgcagtcagcagcttctcttgtctgcaaggccgaatcagaatgaacatcggcctgaaagggacaatgctattaaagtaagcagcttctcgaatagaattcttgagcagatgagaagtaagactgtaacacctccatctggggttctaggatcaccgcctaatggcaaatcaaaaggtaaaggagttgcgtaccaaggtgcacgggaggaggtccaagctcaagctaatgcaagacccagagtccct

SEQ ID NO: 13296 - DNA, 305 bp, Setaria italica
  Peptide Sequence Number=SeqID_79270
ccacccttctctctccgccccccaccccacccgccaccccccctttcggtcgccggccgccgcgggagaatcccgaggccgggatcgagacccagcccgcacgcccgcccgctcgccggacgcgcccctccctctcgcgtctcgctctctgcacccaggcccaattcgccccgcggcggaggaatcccgtcctagattcgatcgaggggcggcaatgccgggctccgcatagccgggaaatcagggcgctgacaggcaccgcggcggcgccgagatgggcccgttccggcgggcgcggcgggacc

SEQ ID NO: 13297 - DNA, 260 bp, Setaria italica
  Peptide Sequence Number=SeqID_79271
aacagggatcaagaaaggtaaattcacttcttccgtaggagccatctagtgtactcgctttagtgcgagcattcgaatacttttctcagtttttgtggggaagatatgtcccagcacaagtcctctagggttgttgtgagataagcttacagcttcattgatatagaggacattgacccttgtgcttcgctgaatgcagctagtggaactcgaagaaagcaaacacaaaaggtactgttttctagaagttcaatgtttgg

SEQ ID NO: 13298 - DNA, 365 bp, Setaria italica
  Peptide Sequence Number=SeqID_79272
ggcgacggctcctacaccgtcggcgacttcgccaccgagacgctgacgcttggcgactcccagcccgtcagcaacgtcgccatcgggtgcggccacgacaacgagggcctcttcgtcggcgccgcgggcctgctcgccctcggcggcgggccactctcgttcccctcccagatctccgccaccaccttctcctactgcctcgtggaccgcgactcccccgccgcgtccacgctccagttcggtgacggcgccgccgaggccgacaccgtcacggccccgctcctccgcagcccgcgcacgagcaccttctactacgtcgccatgacggggatctccgtgggcgggcaggcgctctccatcccgac

SEQ ID NO: 13299 - DNA, 620 bp, Setaria italica
  Peptide Sequence Number=SeqID_79273
ctggcggcggacggcgtgacccggctcgacctgcgccccgccaacgcgtcggcggtgttcgcggcctccgcggcggcgatccagggccccgtggtgtccggcgtggggcagggcagcggcgagtacttctcccgcgtcgggatcgggagccccgcgcggcagctctacatggtgctcgacaccggcagcgacgtcacctgggtgcagtgccagccctgcgccgactgctaccagcagtcggaccccgtcttcgacccttccctctccgcctcctacgccgccgtctcctgcgactccccgcgctgccgggacctcgacaccgccgcctgccgcaacgccacgggcgcgtgcctctacgaggtggcctacggcgacggctcctacaccgtcggcgacttcgccaccgagacgctgacgcttggcgactcccagcccgtcagcaacgtcgccatcgggtgcggccacgacaacgagggcctcttcgtcggcgccgcgggcctgctcgccctcggcggcgggccactctcgttcccctcccagatctccgccgccgtctcctcctcctcctcctcgccgccacccgacgcccgccgcctcccgcccaccccctctcccgcagc

SEQ ID NO: 13300 - DNA, 253 bp, Setaria italica
  Peptide Sequence Number=SeqID_79274
ggactatgtagagattatgtacacgcaggtcagctcacaggtcccagaagctcctggtgacgaggaaatcatcgataaggaactcaagctttcacagaaccttcagaacaggacgtacctagttgttcttgatggtttaattagcattagcgactggaactcattgttagacgtgctgccagatactaatggcagctggatcttaatcaccacacatctaaatgtgaaggaaatcaatcacattgacccacag

SEQ ID NO: 13301 - DNA, 1059 bp, Setaria italica
  Peptide Sequence Number=SeqID_79275
aaggcactatgtggaagttttctcatcatacagagactcaggtggtccattgtataagaactaaaatagacttaagctaattgaaagccatacactaatgctacctcaataccttctctgcggtatacttcttcaccttcagctttctgttccttcttctagtgtcttcgtaattatcctggtcagcttcatcaacataaataatttcaggttcatcgccagtttcagcattatcctcaccataatcggcagactctagctcactcctggcatcccaaccctcctcctcctcatcttcatattcatcatcaaaatactgctgagcccgaagagtgtggaactctggtgggggagggcagtcttcagtaatcgcctcatcccgtttcataacaaggtgcctaatgatcctttcatccttgtctagaagggtcttgaagtcattgatgtatcttgactctatctcaaagttcattaagatgtagttggcatgtgttgctttctttattttataagcaagcctgcgcaatccccaatcgttaagcctccatatccttcctttcttcgccctgacaaaatcttgtacttttgatacaacatcttcaacttcttcaacacgatcctcatgaattagataaactacttcgtagtgccgcattctttttagatttaaatcactctcaagctgaatgttaagaaattcatatagcttttcttcttctgcatcagcaaattctggcgccacttgaccatcctctctcgccattttctttctaagcaggacggcctcgggaaacagcccggaggcctcgccggccttgggcgcgaagctgtgcgtgtccacccgctcctccgcctccccatccccacccctccccctcttcttcttccccctgactgccaccggtcccccgccgcctcacacttccaacggcgacgcgccaacagttcatccgcagcgtcagcggcggagacggcgcaaggagggagagcgcccgcggcgcggcggtggcctccatgggtaggtggccggagatgtcgccgagcaaggttcttgccggg

SEQ ID NO: 13302 - DNA, 291 bp, Setaria italica
  Peptide Sequence Number=SeqID_79276
cagttcgatctcgattctcgacgttcttcggcatcggcgcccgccgtcccgtctcgctcgctcgttctctgtcgtcttctccgcgtctccggcgaggctgcgccgacatcagtactcgccgcagatagagggggaaggagatggacccggagcttttggagctgcagcggcagctggaggcggcgcagagcgcgcggtcgagcgtacggctgtccgagcggaacgtggtagagctggtgcagaagctgcaggagcgcggcatcatcgatttcgacctcctccacaccacct

SEQ ID NO: 13303 - DNA, 367 bp, Setaria italica
  Peptide Sequence Number=SeqID_79277
gatgaaggaagaaatgataggaaagctgaaggatctggggaattctgtgctgggtcacttcggaatgagtgttgacaatttcaaagctgtcaaagatccaaacacaggttcctactccgttcaattccagaagtaataaaaggtgaagaaatacacggacgaagatgatgagcggcagacttcagttaatggactcactggacccttcattctatggttcaaggcacttctgcgttgcgccacatacctggtccatattcacgtagaatcctgcaagttgatcagaaggcggagcatgagtatgagcctcctggattattgtgtctcgcactatgttgcacgttagagatgatgtgtctcgagtgtg

SEQ ID NO: 13304 - DNA, 941 bp, Setaria italica
  Peptide Sequence Number=SeqID_79278
cgccgagggcggaggaaggggaggaggaggatgccttcgaggacgcgctcaccgacgagcagctgcgggagaaagctagaagccaagcaaatgatgcaaaagcagaaggaaacaagcttttcagtgctggacaatatgaggaagcattatcacaatatgaaatggctctgcaaattgctgcggagctggaatctgctgaggatatacgctccgcatgccattcaaatcgcgctgtatgcttcttgaaaatggggaaacatgatgagacgattaaagaatgcacaaaagcacttgagctcaatccatcgtacctgaaagccttgcttcggagggcagaagcacatgaaaaactcgagcactacgacgaagctattgctgatatgaaaaaggttattgaactggatccttcaaatcaacaagctaagaggtcactgttccggcttgaacccctggcagctgagaaaagagaaaagatgaaggaagaaatgattgcaaagttgaaagatctggggaattctgtgctggggcgcttcggaatgagtgttgacaatttcaaagctgtacaagatccaaacacaggctcttactccattcagttccagaagtaaacgcaaggtgaagaaatacaggggtgaatatggctgggaggcatatttcaagttaatgcactcactggacccttcattgtaattgttcaaggtgcttccgcgtcacaatcatatacatggtccatgttgttcacggacaccgttcccctgcaagaatcctgcaaatcgttctgaacacgagggaccctgggatattttgtttgcacttgttgcacgttagaagtgatttcccgagtgcgaacttgtatgataatcattgcgaacttctggtattttccccgatacaaaagtcgcctgagatggaacatggaagttttcccctgttgtgaaaaa

SEQ ID NO: 13305 - DNA, 450 bp, Setaria italica
  Peptide Sequence Number=SeqID_79279
agtaggtaaataatccaaactttaccaatccatcaacatgcaccggcttcaaagccaaagatcctatcttggatatcataaacaaccctaaatgacctcattgctctattccccaaaacttgagccccttttacaccggcatcatctggccgaaatgtcaagacatatatcattgtctgagttcacataaaaacacatttcccatacgtagcagcagggtagacattccaaattccatctctatagtaggtaggtcgttccaatctattggctcaccagaggtaacgaagcaaatcttgtccttcagacttccccgtgcatatcccttagctagcattgctgttgtcacttccttgtcaagcgcatgaaacaaaggagacaaaatatatgtatcagtagtgccagtatcaacaattgtcatcgcagtactatagatacggggatcaactt

SEQ ID NO: 13306 - DNA, 692 bp, Setaria italica
  misc_feature (173)..(173): n is a, c, g, or t
  Peptide Sequence Number=SeqID_79280
agtaataggttagacaatagtagaagaagagcgggcaaaggagggcgatgacatagcagcatgataggatgatgaaaccagctgtgcggcggctggtattgtaccacctgctaacccagcacatgcagaagagaacacaataactggtggtgcctgcatgagggaaaaaaggnggatcaaaccaagtactttgtatcagaccaccatgtgatccatttcactgttcttgaacagaaagacaatgcacagaatttttttccctcttacttctctcaggtgcagctatgggcacactaagaaatctcaacaagatgcacattcgtaagagaatatctgatggaattgtaaaatggaacacagggtctgattggatattcatgtccatagacaggtcataaatgttgtgtttcgaacaacttagaatgaattaggtcttgattgttgatacatatagaaaaataacacattcccctctcagcttctgatgttaccactgaagattgtcttggcaatagtcatgacgttgataaaagaaatgtctaactcaaaatggttcatgcagaacaggtccataagaaaactatcaatgtatggactacaaaatttgtgataacttacaccaacaagaaaatgcatccacattggcccctttatgtaacgtcgaacaacaggcatctaggtctattaagtta

SEQ ID NO: 13307 - DNA, 1009 bp, Setaria italica
  Peptide Sequence Number=SeqID_79281
tactaccgactcagtgtgagtagttcgcaatgctggtgcctacgttggatatacatttgcagacatgtttatccaacgtaggcaccagcattgcgagtaaccaccacgcaagacttgcaagtttacaagcatacggcctcgtcaaaattgaataagtcatgctattgagcaaacagtatgatccgagtgatagaatatgaaaacagccccaggtgaacaaaccgatcatgacacttcggggcttattagactacaaaagttaacccaaaagccaaaagctatacaccgtgatagataccaaattttgtaaaattaccatttacaaaagaaacatccctcgttaaacaggtgagaaccacattcatggttcatagagggtggaacttgtcttgcatagttaggatagtttctcaaggcaggcaagttatgtagaggatctgctgcaccgataagttacaacggcgaggagcttcttgccttgtgcatgtcatcatgagaagcagagcaggagcgggcaaaggactgcgatggtatggttgcatgtgaagaagagcgggcaaaggagggcgatgacatagcagcatgataggatgatgaaaccagctgtgcggcggctggtattgtaccacctgctaacccagcacatgcagaagagaacacaataactggtggtgcaccaacaagaaaatgcatccacattggcccctttatgtaacgtcgaacaacaggcatagtgtggttgaagccataaaatgctccagctatacccccaacagcggaaccaatcatggagaagctatctcgaaccatcggaggcaccgtccagctgctcgtttccatgtccttggagagaggcccggcgcagtggtggcaccgcccagggatctcggagcagcgcgcggcgtcccccgcggcggccatggcgccctccctccgctcgcggtgtggatcgatcgaatcgatccgcctcgagctcgcgggagaggaagagatgcgtctgcctgcctgt

SEQ ID NO: 13308 - DNA, 624 bp, Setaria italica
  Peptide Sequence Number=SeqID_79282
cctggaacctcttttgtagatagtgcatctgattccaacttgttttttcgttacgtgccacgacaatcattcttgtagttgtgccagtgacaaagcatgtttccacaaggtgtgccacttttaacattctcaatgcagcaggcatcagacggaggaccctggtttgtagccctaaaatgtgtatctccacaagatccgcacttccacaaggtacccttcaaaaggctgtggggctcttctggactgaaatcatggcgggtggtgatattgtacccaccatctggtttctggtgatcttgtattattgagcacgaattaatagcatccatccaagcacggaaaagagggccatgggagcggtccttcctgtgatgcttaacatatatgattgcatgaatcatttcatgcagcaatgcattcttccggtcagtgcatgagagatacttcagaaccggctcggagagtgttatggtattgcgcggtttagaaaaggtgcaagatccaaaggaactgaaggctggcgaggaagcccacttgacgatgaagccggcgccggcgagcgcgccccggaagtagaggcggtcgtagtgctggaacaggttccttgtctaacgttaccgggta

SEQ ID NO: 13309 - DNA, 328 bp, Setaria italica
  Peptide Sequence Number=SeqID_79283
ggcgggatcaaatatatgacgaggttgcctgacattgtgatcgtccttgatcagcaaaaagagtatatagctcttcgggaatgtgccattttggggattcctactatttctttagtcgatacaaattgtgacccagatctcgcgaatatatcgattcctgccaacgatgacactatgacttcaattcgattaattcttaacaaattagtatttgcaatttctgagggccgttctctctatataagaaatcgttgattaagtagaatagtgaattcttaagcaactgcgtagatttataggatcagttactattcttttttgttttgca

SEQ ID NO: 13310 - DNA, 403 bp, Setaria italica
  Peptide Sequence Number=SeqID_79284
aaactctctgcgatctttctctgcaagaagaaccctgctacagcccttgcagatacacttcaacacgtccagaatacaattgaaaaagccaacattaaaaactggaagtgcgagcttcaggtaaccgaaatgaccaggacattcagcaaatggaccatggcaggtgctgcatttgagttccgtgtctttcttgctagcaagtcccattcgcatgtcaagcaacccattcggcaccggcttcatgtcgtgctcatagatccggctgttccagacctgcacctccgcggacttgcgaatctcgctgcccgagagcacactgaaccggatgctctttatcctccgggcgccgacatcctcgatgaagggctccttcgtgcagcgcagcttctcctccggcttcgcc

SEQ ID NO: 13311 - DNA, 1402 bp, Setaria italica
  Peptide Sequence Number=SeqID_79285
tttacctttattattgtatgtagtactaagttaccttctagtcttcttcatagatcttaggagtgtcagggtgggatcgatctccagctctatattcatggaccttgctcctagcttcagcaacactagcctttttccttccttttcctttgcaaggtctgaagcaccgacagggaaaagacccatcttggactgttcgttcaacctagaagaatccaaacgttctattatttgagcgcaacgatctccaagctctaagaagccattaagtctgcacatgttcatcaaattttcccagacctcaatgcttggttccacaggcatccgttccacaaactcatgagcttcagcaatgtagcccgactgcccaagcatactaacaatgctggcataatgttccatggtaggagttataccgaaatccttctgcattgattcgaaatgcaacattccctcatcaacagatcccagaattccacaggccaggaaaatatgcatgaacatgacggcatctggcttatcccctgtctgcttaaactgatcgaaaaaatcagttgcttcttcaccatgaccattatgcacaaaacctgagatcatagtgttccaagaagccaagctacgatgatccatagtactgaaaagcttcttagcatcttccattgaaccacactttgcatacatctccaaaattttgttttgaacatctgtgtccacaacgattgatgattccaacatctgactatgtattactcttgcttcttcaagagcagttgcatcaacacatgcttgcatcaatctaaagtactgatgagcatgtagcacagttccatttccctgtagcatagcctgaacctccagcgcttctttatgttgccatcttcacataacttctccagttcttcaacagtacctttgcgtattctgctgacttcgttagatacttcagagggtgacccatcatttgaagggttgccaggtagtggctgaaaacatatgccaccttgatgcggcacactattcgagtgattcccaaatgatgtagtaggttgaacatgtggatgtttttcttgatgaattccatgagggaggcgttgagcatctgtatttaggtacatggaatatccttgaggagtgttccttgtgtcagcttggctagggacataagggctctgattggcttgtggagcattatatccataattgctactgctgccttgctgaaaccctgcaacatgctccttgtgggaatgagttggatttgcatactgggaggtaggatttccaggtctatctggataaccacccccagatctatgatcaacgtattgctgttgccgaaagacttgctgatcatatccaactgagtttggcccttgtcctgaaggaccatatccatactgcc

SEQ ID NO: 13312 - DNA, 472 bp, Setaria italica
  Peptide Sequence Number=SeqID_79286
aataatgtggtaaacaggattccggtttaccaatagtctttgcaagagcagacaccattttcaaagtggtggaatctcttcgcatctcttgcgatgatcagacgcccaacaagttttgagatgatcttgaaagcagtgtgacaatctccacatgaccgaagattcttgaaaactcggatgggagaacgaggagcgcttgttataagaccgtaactgatagccagcctctcgctgtgagccagcaaagcatcctcttttgtttcttgatcaacgtcgtgaagcacgaatcgggtgtcagcaatatatccagcttccttcatatgagccgacaagtacctcagctcttcatagatcttaggagtgtcagggtgggatcgatctccagctctatattcatggaccttgctcctagcttcagcaacactagtcctttttacctttaccttttacctttatccaaagttcctggaaa

SEQ ID NO: 13313 - DNA, 287 bp, Setaria italica
  Peptide Sequence Number=SeqID_79287
ggcacgtgatgctccgccggccccatcccgaggccgaggcccttcaccggcttgcccagcgaagaagcagcgcggggccggcagagctgccattgcaggcgcgcacatcgcatgcaaacggatatatgtgatccagactgggtggggttggcggcggtggagagcgccgtggaggccgccatggctgcagggaagggaggatcggattgctgggggaggtgtcgagcgaggcttctgtcgctggcgtccacaggcttgcggatgagccccggggctatatgtgtgtg

SEQ ID NO: 13314 - DNA, 309 bp, Setaria italica
  Peptide Sequence Number=SeqID_79288
agtaatggagtagcagtacagcactactatattactttgtaggtagtatgatccatgttctttcagttctaacttctacgttgcgttaacgaactcatacagcaaagacgatgaacacgcctttctcggaaaaaagtcacagcagtagccagtaggggaggggagagaggagaagcgaggcgcagaagaagtagaagaggaagctgggcgcttacctgggtggggttggcggcggtggagagcgccgtggaggccgccatggctgcagggaagggaggatcggattgctgggggaggtgtcgagcgagg

SEQ ID NO: 13315 - DNA, 706 bp, Setaria italica
  Peptide Sequence Number=SeqID_79289
tatgatccatgttctttcagttctaacttctacgttgcgttaacgaactcatacagcaaagacgatgaacacgcctttctcggaaaaaagtcacagcagtagccagtaggggaggggagagaggagaagcgaggcgcagaagaagtagaagaggaagctgggcgcttacctggtcgttggggccgtgggtcttgagccactcgtccaccttgatgtcgttgcccagcttgtccttggcgtacgtcccgccgccggcgctgccggacccggcggggatgaagaaggcgccgtaggggacgaccatgccgacggtgggcagcgagatggcgcccaggaggaggaggttcatcagcttccgcttctccatgtcggggacgcggtcggcggggatgctgctcgccgcctggcacgtgatgctccgccggcccatcccgaggccgaggcccttcaccggcttgcccagcgaagaagcagcgcggggccggcagagctgggtggggttggcggcggtggagagcgccgtggaggccgccatggctgcagggaagggaggatcggattgctgggggaggtgtcgagcgaggcttctgtcgctggcgtccacaggcttgcggatgagccccggggctatatgtgtgtgtgtccctggtgggagggggggagggcggccggtgattggttgatgcgcagcgaccgggccgcgacg

SEQ ID NO: 13316 - DNA, 595 bp, Setaria italica
  Peptide Sequence Number=SeqID_79290
ttgttccttggcgtacgtcccgccgccggcgctgccggacccggcggggatgaagaaggcgccgtaggggacgaccatgccgacggtgggcagcgagatggcgcccaggaggaggaggttcatcagcttccgcttctccatgtcggggacgcggtcggcggggatgctgctcgccgcctggcacgtgatgctccgccggcccatcccgaggccgaggcccttcaccggcttgcccagcgaagaagcagcgcggggccggcagagctgccattgcaggcgcgcacatcgcatgcaaacggatatatgtgatccagacttaaacatagataacagatcaatcgagctgcaaattaaatgtatagcaaacctggattctgtggtcaactactccagaatccagatacaaatgagtgtctacaacgtatttgaattgttcgtcaaatcgtcaggtaaatccagtggaccacggatcagaaccaggagtgaaatcgatatagtagtgctacactgctactccattactttgtaggtagtatgatccatgttctttcacgtgctgctggaggacttcatctaaagctgttgtgattcctgc

SEQ ID NO: 13317 - DNA, 236 bp, Setaria italica
  Peptide Sequence Number=SeqID_79291
ttgggcaaaccttgatacagaaaggttgctcctaatccagctgaagcatcccacttatacaaccaatatcaacttcaatctgcatccattcctcaaatggagctggccaggagtgacatgacagattcagacgcctttaatgggcttgaaggttcggcaccagaacctttgatgcagcaattatcagtttcaaacttcacggatccacaccaagggactgcgttaagaaggatccg

SEQ ID NO: 13318 - DNA, 801 bp, Setaria italica
  Peptide Sequence Number=SeqID_79292
cttacaactctcagtaacaatgagccaacagccgcccaggaaggcgatcctcttctggatgtgttagcccagcttccagacctacagcctgagcaaacatacgatggattccctaccatcacctctccgatgcgtccttacactgaccatccttttcttggcaatgttggtgggcaagatctttcggcgtatatagatagcatcattgctcatcaggatctggaagacttgttggtccaacccttctttggcgaagacggtggagcaccccactggaaattttgagcccattcctacttctctacttgttccaagcagcagctcctcaaacaacaacagatcacctgaaaatagctgggcaaaccttgatacagaaaggttgctcctaatccagggtgcagatggcacagatgctgctgcttgctgttcttctgcaaccaaaatactacaatttgatacaggtgatgctaatcatgacacgggacctcaaactgactcggcctctggtgtgtcagctgaagcatcccacttatacaaccaatatcaacttcaatctgcatccattcctcaaatggagctggccaggagtgacatgacagattcagacgcctttaatgggcttgaaggttcggcaccagaacctttgatgcagcaattatcagtttcaaacttcacggatccacaccaagggactgcgttaagaaggatccgccttgtgcactctattcagagggcgtcagtcactgagcctgtaactaaacttacaaaattacggaagggtagaaagaatagaaagaaaca

SEQ ID NO: 13319 - DNA, 667 bp, Setaria italica
  Peptide Sequence Number=SeqID_79293
ccatctagatgtccttggcaatatctatttggaagaatgggagtttcctagtggcctgaatctgtgtattcttatgtactattcaatctaactatcataaaggaacacccttatgcacttgtattgttgtcttttgaacatatcatgtattggcccttttagtggaatttaacatttttgtttactttactggcagattgcaccagctgagcttgaagggctacttctgtctcatccggaaattctggatgctgttgttattccgtgagttgagccacttaatttgggggggctcctagctgattatagtattccttttccaatatttgttttgttgtatcttaatggagagctctacttgtttccaaggtttcctgatgccaaagctggggaagttcctattgcctatgtcgtgcgttcccctgttagttcattgacagaagttgatgtccagaaatttattgagaagcaggttgcatactacaaaaaaattgaagagggttacctttgtggacagtgtaccgaagtctgcttcaggaaagattttgaggagagaactcatagcaaaagtcagatcgtcgaagctatagcaaatccacttctaatctgtttcagaagaattaggttagaccttactaagactaactaagaattaggaaaatttaga

SEQ ID NO: 13320 - DNA, 2027 bp, Setaria italica
  misc_feature (2005)..(2027): n is a, c, g, or t
  Peptide Sequence Number=SeqID_79294
cttctgccagcgatttgcacgagcaactcgggcgcaacacaacacaagaacgcgaccgcgcaagagacaatggccggaacggcgccgccggccgcgggctacggcgcggacggcgtgtaccgctccccgcgcccggccgtgcgcatcgactccaacccggggctctccctcaccgacctcctcttccgccgcgccgacgcgtgcccctccgcgctcgcgctggccgacgccgcttccggccaaaccctcaccttcgccgccttccgctccgcggtcctcaccacggccgtcgctctcgcctcgcgagcgggcgtccgacccggcgacgtcgtcctcctcctcgcccccaactgcgtcctctaccccgtctgcttcttcgccgtcaccgccctcggtgccgtcgccaccacggccaaccccctctataccccaagggagatcgccaagcaggccaccgacgcccgggccaagctcgccatcacggtgtccgaactccttcccaaaatcgcggagctccgcctccccgccatcctgctcgacggcgacgcagccagcgccaccgcttccagcgtcacgctctactccgacctcattgctggggcgcaggagaaggagtaccgccgcccgccgataaagcagagcgacacggccgcgctgctctactcgtccggcacgacgggggcgagcaagggcgtcatcctgacgcaccgcaacttcatctcggcggcggccatggtgacagcagatcaagacgagcacggagagggccccaacgtgttcctctgcttcctacccatgttccacatcttcggcttgtccgtcatcacgttcgcgcagatgcaacgcggcaacgccatcgtcgtgatgtcgcggttcgacatggactctgtaatggccgccgtggagaggtaccgtgtcacgtacctcttctgcgtgcctccggtcatgatcgcgctcgccaagctcgggagggcagggaagtacgacctcagctcgctcaagttcatcggctccggcgcagcgccgctcggcaaggacgtgatggaggtcgtggccaggaactttccgggcaccgtgattgcccagggttacggaatgactgaaactagtgggatcatatctttagagtacccagaaaatggacaagctcgtcaatttgggtcaaccggatcacttgtctcaggagttgaagcaaagattgtagatatagaaacattgaaatgtatgccaccgaatcaactgggagaaatttgtgttcgaggaccgaacataatgcaagggtatttcaacaatgtgcaagctactgaatttacaatcaaggaagggtggttgcatactggtgatattgggtactttgatgaaggaggtcagctttatgtagttgatagactcaaagagctgattaagtacaaaggtttccagattgcaccagctgagcttgaagggctacttctgtctcatccggaaattctggatgctgttgttattccgtttcctgatgccaaagctggggaagttcctattgcctatgtcgtgcgttcccctgttagttcattgacagaagttgatgtccagaaatttattgagaagcaggttgcatactacaaaaaattgaagagggttacctttgtggacagtgtaccgaagtctgcttcaggaaagattttgaggagagaactcatagcaaaagtcagatcgtcgaagctatagcaaatccacttctaatctgtttcagaagattggttgccttctagctactagattggaaatttgtggattgagcggtaaggtttacatgttactgagtggggcttatgaaacataacattcagttttatacatcagacgctgatacattatgtatatgtggcacatacagatatattgttccaagttggccccaatcctaatcaccatgttgttctgtcaaatactgggccttgctacaaaggcctaatttccatttcaatacagtaattgcaaactatatgaatctagtaaaaannnnnnnnnnnnnnnnnnnnnnn

SEQ ID NO: 13321 - DNA, 1029 bp, Setaria italica
  Peptide Sequence Number=SeqID_79295
actaggccaggccgtgtaataaggcctggagcaatcaggatgaatgggaaatgtccactgacacctttggaggttggattaatgctgcgtggaatgggtttcagcaataataccgcgatctatttggcttctggaaggatatataaagcagaaaagaacatggctcctctacttgaaatgttccctctcctacagactaaagaaactttggcatcggatgaagaactttctccattcaagaacttctcctcaaggatggcagctattgactacagtgtttgtgttcatagtgaggttttcgtgactacccaaggtggtaattttcctcattttcttattggccataggagatacttgtatggtggccatgccaagacaattaagcccgataaaagaagattggccatactatttgacagtccacgtattgggtggaagtccctgaaacgccagttattcaatatgagagcacatagcgacgccaagggtattgagataaaaagagcaaatgaatcagtatacacctttccatgccctgattgcatgtgtcgttcaaacaaatcagaacactccaaatccatccagtccagataacatctaatagttgtatcttgacatgatcgactgaccccaattcgttctcggtgtcatggcatccttgattccttattctttgcctgctgtctggtggtgagatgttccatatcctccaagcatccctactgaactgttgctcgtccattccatcctccccaggttgggtgctgcttgtatagcctggagcaactgagatacatcaaattcttttcatctgacccctggtgctaacaatacactgattcatgtctacagtagatgtatgtaacaatatctagggctacgttaacaacttagtgctaatccactcagtgtagtagtagttcccttgtacattgcttagctgggaagcaattttcacacacaattttgtagcaaagatgacattttcatttggttaagtttatcaaccatttctcagaattcaaaaaa

SEQ ID NO: 13322 - DNA, 377 bp, Setaria italica
  Peptide Sequence Number=SeqID_79296
ggcatcagtagccgataagtgaaacaatttcggcggaattctgcgagcagtacaactagaatccaatttccgcggaacccaaacaacggaaaccatccagctaaccttgacgcccgaattcgaagaggctaaacacgcagatctaaggcaagctcccaggcaatcggcagcgcaacaacatgcggagggatctaaaccgaaacaaaccaagagaatcgcccccttctacgggcactgaatcaggaagatcgcgtacgaatccaccgtccgggtggtggatcgagggaggcgcgcgtacctgactgagatgaatccgcggtttcttctcttctcgtccttcctttcagagtctgaagtctgatgcccgagcgagatcc

SEQ ID NO: 13323 - DNA, 227 bp, Setaria italica
  Peptide Sequence Number=SeqID_79297
cagttcactgtactcgatatggactagctctgatcatgatgtccaaaagcttatggatgacacagctgaggctaaggcttatcaagatgaaataaatgctgttctaggcgagcagttatcggctgaggatgaagaagctgttatgactgagtttgagaatttggaagctcagcttgctgtcgagtctttgccagatgctcctgttactgaagtacgcccaccgtccc

SEQ ID NO: 13324 - DNA, 467 bp, Setaria italica
  Peptide Sequence Number=SeqID_79298
ttttttgttaaagtccttgtaaggtcttggtaaattgtcttgcccctttaacttattactagtaattgtagtattaaacattgatgatgtccaaaagctgatggatgacacagctgaggctaaggcttatcaagatgaaataaatgctgttctaggcgagcagttatcggctgaggatgaagaagctgttatgactgagtttgagaatttggaagctcagcttgctgtcgagtctttgccagatgctcctgttactgaagtacgccccgaagagaaaatgaaagcaccagctgacacagaagctgcatctgaggacatcgatgaggttattgagcttcctgatgtgcctacgaaagcgccagagagaccacaagctccagaaaaaacgaagttttggaagagccactacctgcatagtggatgaaggtgagatcactagggcacactcagtttgcaggagttgtaac

SEQ ID NO: 13325 - DNA, 1121 bp, Setaria italica
  Peptide Sequence Number=SeqID_79299
cgacccgacccgcatcctctgccccgccggcaccgaagcgaaccgctcaactgtgatgccgtgaccgtctcgtccccgtccagtccaccttttccctcctcctcccctactccgccgccgtcacgccacctcgccgccggcgcaaccccgggccgcggagatggggaacatcttcgtgaagaagcccaagatcacggacgtcgacagggccatcctcacgctcaagacgcagcgccgcaagcttgcccagttccagcagcagcttgagaaggtaatcgaagcagaaaaggaagctgcacggcagttggttcaacagaagaagagagacagagctttgattgctctgaagaagaagaaggctcaggaagagctgttgaaacaagttgactcatggcaaataaatgttgaacaacagctggcagatattgaactagcaagtaaacaaaaggctttatttgaaagcctgaaggctggaaatgctgcccttaagtctatacagaatgagataaacattgatgatgtccaaaagctgatggatgacacagctgaggctaaggcttatcaagatgaaataaatgctgttctaggcgagcagttatcggctgaggatgaagaagctgttatgactgagtttgagaatttggaagctcagcttgctgtcgagtctttgccagatgctcctgttactgaagtacgccccgaagagaaaatgaaagcaccagctgacacagaagctgcatctgaggacatcgatgaggttattgagcttcctgatgtgcctacgaaagcgccagagagaccacaagctccaagaaaaaacgaagttttggaagagccactacctgcatagtggatgaaggtgagatcactagggcacactcagtttgcaggagttgtaacatatccaccatttcattgtaccacctcattttcagccatctcagaatttcattatgtacagcctgaaaaattgttgttcttgactaccaattattgcccggttggatttctcagtgtccatttatagtccaatccaaccgggtaaacacattgttttcagtgcatttatttgaaggcagaaatgctgaagttctcaagcacgtgtcttgttccgttaggaa

SEQ ID NO: 13326 - DNA, 1867 bp, Setaria italica
  Peptide Sequence Number=SeqID_79300
tgctattaatcatttatgtacatcagcagtggtctacatctctgtgtttaacttgacagcagcacccacgaatcaaccaatgcaaccaaacgtgtcaaacgaggtaacggcgatacacagcaaatgtacatcgaaccaggtaacaataaatagtgagcagcagctaccaatcaccaccggacgtatagacaaacgaaccacccaatttggctatttctttccaccaatcataggttgaccaccatttgagctacccatggcagtgggcccgccaatcttatttccaccactcaaattcttcacgtcgatcaaatcgctgaatagattatcaggtatgtaatatggtctgctagatgctgctgaagaatcttttggttgttgataattcacgttcatatgagcttgagtcgtggtcagtccgttgcttggtggtgaacccacagaactgttatgctgaattgactggggggttgcaaatggcgcgtaaggcattgaagaagggggatatgaagctgggggaggtgcataggtggctgcctgagcaactggagcagtagcagggcgcggatcttggtaattagccaaaaggaaaggattagaatcgactgctggaggtgcaggcgcagcccatggtggtgcggggtagccatacccagatgcatatgctggaggctgaggtggatatgctccggtttgggcccaaggtgcaacgtaattgctgttctgtcgagcatatccctggtttattgtgtgaggctggtagttcaaagggtattgtggcacaccagaaggatattgctgcccatctgtaacagttggttgttgaggcccattttgattatgtgtaatggtaggttgctgaggtgcgttttgactttgtgttggagaatctgttgaagtttcaggactagggctgcacaaggtgaggctcaggaggttgatcatatcaagctcttttgattcagagctactgctgggaactgggtcaagaggaaccaatgcattgcttgcaatagaagatggcgattctgaacccactggatcaatcggtacaagggcgaggtccccagtgcttgataatgcatcatcgctacttactacagatttgtttttcctttgagctagctgggcaaactcatcttcctcttcatcagcagtgtcattatgttcaggaggtgcagatggttttactgcaggagcctccctaggagcctcaattgtctctctcacaggtgcttcaaccgccaaaggagcaccagagaccacggcatcatactttgaaagtacactttgtaagagatcatttatctccagtccttgctttagcaactgctcattccctgttgaactgacaagttgcaaaagcttttgttgatttgagcgacactgggtcacaagatctgtgataatttcatcgttaacagccgtacgatcagatgggtttaaagcatgcaccatatcattcagtaggtctgtcacatttcgaatactattcaagtcccctaaacttagagtctcaacatctgaggacattctgtcactcagacttcctgcagcatatctgggtgaactagaattatacgtagcaggaggtgtaaatatcggtggtgcatcaataggacgttttgggaacaccacacctgtcgtcttcacttcaagatatgcccaatgatattgcggatatttacttcctggtccaccaaatgcctcttgccaggagtctaaaagtaataatattttatcccttacttgcatatcattcttcttctgaataattttgaccatttcttgcagaacatgctgttcagcgacttcaaaccggacatattcaccacaattcttcatcattgtctccaaaagcgtcaaa

SEQ ID NO: 13327 - DNA, 638 bp, Setaria italica
  Peptide Sequence Number=SeqID_79301
aagagcaagatgactgttccgtgggctttgagttgagattagcatctccccagtgggcctctggttttttgttgcaatttatatgttatttacactctatatgactgcaagcagttcatgagctttccatccaaacattagtttcctttgcagcaagtcttagcattagtttgttattttggattgcatcgctttaatcaatcagttattgtaggttgtgtcctggacattgttagttcatgtatatgcctcagtatccatcggtttactcaatggaacatttgcatgaataatggaagtaacacgggaacttttcatctgcatgcctggtttttactattgtttctacccctattagtcaccagctcaagtgttttgttctgtgtgtgcagtcaattttgttttgtatggtaagtataaatggtatttctgagattatatttatgattcaccatgaagacttgtgcgaacgggcgtgtagctcaatggaagcaacactttagtagcatctccagatcctgggttcgactccctgtgggagcgaatttcaggactggttaaaaaatccccctgttgtgcctccccacagaatagggcagcggcgggtaacggtgtgagcctaccaggggtagtgacag

SEQ ID NO: 13328 - DNA, 470 bp, Setaria italica
  Peptide Sequence Number=SeqID_79302
gaagaatggtcgacgaggattgtgaattgctaaaccttggtgataggccagagaaacttaattgtgacggagattgcagtgccacctgtacctataaggccttctgttgttgttggtaatactagaacaagtaatgaagatagcattactgctatattgaagagcattgttaatacaaattccatccttaaggagacccttcaaactgggggcctgttctccaagtgctttgattgctggcaacaacttcaacttcaagttgttgaatttgtaaatagcgatgccccctgtcttcccgagtcacaacatcgtggccttgttcaacgactcaaagggaagacaggccgatttcgtggtaacttgtctggaaaacgtactgagtacactggaaggactgtcatatctcctgatccaaatttgagaataacagaggtggctattcctgtgttgatggctcgagtcttgactta

SEQ ID NO: 13329 - DNA, 2097 bp, Setaria italica
  Peptide Sequence Number=SeqID_79303
taaaattcttcgtaaaatactcgcgcagaaagattccccgatccctcactcgatttggcttcctctgttcttcctcggcgccgcccgacgccgacgccgccgccgtcgatcccggccatctccggcggctgatcgacttcgattgctatggaccgccccgaggggagcgggagcgcgagcgcgagcgcgagcgcggtgggcgacatccccgaagggcccctggtggagatcctctcccgcgtccctggcaagtccgtctgccggttcgagtgcgtgtccaaggcctggctcggcctcattgcggacaaccggaagaagctccggcaagccatgcaaggactcttctacaggacgctcgagtacccggagggctacgacattaccgcttttgagctgtacgatttggagtatatttacagtttcatcgacctgacaacgagatccgtgcctctggacatcgaccctggcttctccttcctgacggaactgcctgagatccagtgcctcgtctcccggaattcctgcaacgggcttatcctcttcgagaaccgccacaagatatactccttacctcaaagcacattgggctatattgtgtgcaacccaaccacaaagcaatgggtagctgtgcccacttgcggctctactgcatcgtttacctacacctatttggccttcgatccggccgtatcatctcacttccacttggtccacttcaaggtgggctccaacgaccggttggtttcagtgaacatttactcctcagaaaccgggacctggagtcgcaaccaaattgacgaacaagaagagctaggacaatcggaaggatggcgtgattatcaggtcagactatgtatgagtgggggtgttggcactgagggttctcggtgcgcctttgttaatggcttcctgcatttggtggtttgggactctggtcaacctaaggtacttgctgtagatttacaaggcaaggcacggaggatgatcacactgccacaggtggcttattcacctgggtgttatcttggtcaatcccaagggctcctgcattacacgactcaaggattttcagatgctcatcaggagaggtaccaactgcgtatctgggttcttcaggattatgatacacaagaatgggtgttgaaggacactctcgagctctctggagaaaattgcataggcaacatgtggggcttttttgtatttaacattcatcaagattgcaatgtggttttctttacaaagtcggggcgtgaattaatgtcctacgacatgggccgtaaggaagtgagtgttattgccacttttgaaggtcgaaatcatctgactgatgcttttcagtatgttccctatttctcaaaattgccagccctcacaaataaccactgaaagtgcaagcaaagtatggagcagctagcagttaaaccttgtaggcttaggaaatatgtgacctcttcactcttggacatggctatgggtgtatgactccatatgtaccccaattctcagagttgtctgctcttgaaaaataagactcttgtgggctatttatctggacattcagcagaaatcagatcttcgatgtggttgctgttcatcaagattgcaatgaggttttctttgttcagatctcaaacagtaaactgataagtgataacatatgacatggaccgtaaggatggtgtttttgccacttatgaagatcaagatttgtatcattttgttgctcttgcattccctatgtctcagtcaccggcgctcacaaatcattactgaaagtgtgtgctccaagtatggaacaactagcaacttggttaagcctagtaaatttaggtgatatgctgtctgtgcttggatttatttcgtttcatgcttttgtataattactactgcatgactgcatcccatttgagatgttcctgttatgtatcgttaccgatgcgttgtattaatgaatgaagttgcccaagctgcacaatttttattttgttgtttaaattatatccttacaatcttccagttgtctctccagactgcctacctattccgtggctttaagtgttgtgacaaattaaatagaaactagtagaaatttaa

SEQ ID NO: 13330 - DNA, 346 bp, Setaria italica
  Peptide Sequence Number=SeqID_79304
atttattatcttgatgaactctgaatttttgatttctcacgtatagttatctccaaactatgtgtgatttctgtaagaagtttttttttctacatttgggagtttccttccccggcacttcattttctatctggttgtttgctttcatgtttatccatattatgctgaattttggtctgttattgcagtgctgtggttgcaatatattccataagttggtcgacaatctgaacctgtttcatgagatgaagtgctatgttagtccagacttccgctacgaaggggatgctccattcaactaccttgacaataacgaggatggcgatactatcttccctctcttctt

SEQ ID NO: 13331 - DNA, 980 bp, Setaria italica
  misc_feature (960)..(980): n is a, c, g, or t
  Peptide Sequence Number=SeqID_79305
ggggaaaaaaaattctgacgcctgctgcaccgcacctcgacctctcgccgtcgccgcccatggagtccgtcgcggccgccgcgatcgccaccacctcccggtctctcccgctccccttctcctctaccccgctccaccgccggtgccgtcccgtcttcctccccgtcgccgcctccaagcgccacaacgacgacgacaaggaggttgccaacggccccgggcgcgagcccaccagccttgcgccgtacggggggctctccatctcgccgctctccaaggacgcggccatggggctggtggtgagcgctgccacggggagcggctggacgacgggatcagggatggaggggccgccagcggcgagcagagccggtggggcggacaggccggaggtgtcgacgctcccttggtcgctcttcacaaaatcgccgcggcggaggatgcgggtggccttcacctgcaatgtgtgcgggcagcgtacaaccagggccatcaatcctcatgcctacactgatggaactgtgtttgttcagtgctgtggttgcaatatattccataagttggtcgacaatctgaacctgtttcatgagatgaagtgctatgttagtccagacttccgctacgaaggggatgctccattcaactaccttgacaataacgaggatggcgatactatcttccctctctaaaccttctcccttgtgtttcagtgcatgatgatgccgttctaatttgctcgtgtagctgtatgtaataagcagatgtaccttcctgaactcgtgatattatacaggtgtatgtatataattgtttgtacttagtgcacaccttgtgctgcaaattttatacaggtagcagataatggaatagacacggaagtttatgcatttggccccatgttctatggtgtctgaacatgatatgtacgccagtggtttgtggagtacatttatttttttnnnnnnnnnnnnnnnnnnnnn

SEQ ID NO: 13332 - DNA, 571 bp, Setaria italica
  Peptide Sequence Number=SeqID_79306
gagttggtcagatccagttcgctgtgtggattgcaggcacatatatgaaaagggcccagtattccattatataaggtcccaaaaccaccacagtgccctattgcaggctgtcccagagtcctacaaatagggaaggttgtctgtgatcccctcctcctcattgaaatcgacgagctgcgttcatcagggcctgctgctccaaatgccacaaacatagatgactttactgatctacttgacgaagatgatgaatgaggagcgtctggtaaaagatggcagcagccaacagtcattattgtgtaggaggataatgtttagtatcttcaggacatactgtcttgttcggtgctgtaggacagtgctctaggaggatgggttttattatgttcaggacgcactctttctcttgttgggtgctgcaggaggaagggagcatgggttttagtatgttcaggatgcactctgtatcttgttgggtgctgcagctgcaggaggattagtatgttcaggatgcatccttagtctctatgaagcataccaaggtcatacgcagcacccaactaagactaaa

SEQ ID NO: 13333 - DNA, 534 bp, Setaria italica
  Peptide Sequence Number=SeqID_79307
cggcatgcactatggatgacacgaaacacctgctgttgcctcccacggcgcaacggccggcctggttataccggtgtgcgtgcaaagcgcccagagcacggtgatgaactcgccacccagcgccagcctatcccttgtgtgccttgacgtgaagctcgccgctcgacggtgccaggtacaccgtcagctccatccagaggtcggccagaagctcccacacttgatcctcccctcgacctgcttccgccatctgcatcagcttgttccccaactttgcccccttgcgcaccacggccgccgccgccgccgccgtctcctcctccggcctttctgcgacctcgaccagcttgtcaaagcgggttccttgctgagacacatggtacctccaacaccctcccaacacgtccttgagctcgtccttcgtgtcactgtacacacgcttggtcccttcaatgttgtcagggagcagctccggacgcgagaccaccaagtaagcagcgtacccagacagggtcgtcgccacctgacgattga

SEQ ID NO: 13334 - DNA, 1256 bp, Setaria italica
  misc_feature (1232)..(1256): n is a, c, g, or t
  Peptide Sequence Number=SeqID_79308
ctctttgcctccgaatcccagctcacgcctccgctgtccgctcccaattcccaaaccctagccagccagctacgcaagatggacgaggactgggagctcctcctcgcgtcccccaaggcggcggcggcggccgaaccgtacgccggcggcggcggggaggacgacgccggcgccatcaagcacgactacttcgacctcggctccgacgccaagtaccccaggaggacgtcgctgtcgaaggaggacgaggaggaggaggaggaggaggtggaggggcttctcgcggcgtcggacaacgcgagctgggtggagccggacccggatgatcttctcttccccggccgtgaccgagcggcgctgtggtcggactcgtcctcggacggggagaggcccgaggtcgaggtgaccgaaccggtggagcgggccagggcggaggccggggctgctgctgctgcggcggcggcggaggcggaggcggagggggccgagggcgcggtggcgaagggaggtggacctgagccgtggtggaagctgccgctggatgcgctgcgcgtgtgggccctgcgcgccgcgaggagcgcctggtcggtgccgttcgccgtcgcgctgctcggattcgccgtgctcgggcgccggctgtaccggatgcgccgccagagcaaggccgtcgggcgcgtccgcctcgtcctcgacgaaaagaaggcatcccaattcaagggccaagcatcacgtctgaaggaatccacggccatgctgcggcgagctccaatcataaagcctatgcttcccgccaatgcagtgactccatggcctgtgctggggcacctgtgagatgtgtgatcggtaacttagagctagtaataccatattaccatagtccgcagccaaccagtgtcactcgccttgctactggcaagcatactatactatgcacgcccctgcagtctgcagatgtacagactgattgtaatttggaactacacagttgtggaatgtggaagaccttgtaagtttccgttcatgcggaatggtatttaggcctgctctagttcatgtttcatttgtacccgtgttcatatttttattttctgtagcctttatattgtcgatctgatgtgcttgagatgtatatgactgaagtaatcatggtagtgtggatgtatatgactaaattacacataaatgaatgcagagtggtagttggattcacaaaaaaaaaaaaaaaaaaaaannnnnnnnnnnnnnnnnnnnnnnnn

SEQ ID NO: 13335 - DNA, 135 bp, Setaria italica
  Peptide Sequence Number=SeqID_79309
ctggactgctccgtcatgtggcattacatttacttgtgcaagtacaacgacaccaatctaatgccttcccctttgctctatcgtgtcgttgtacttgcacaagtaaatgtaatgcacatgacggagcagtccagt

SEQ ID NO: 13336 - DNA, 446 bp, Setaria italica
  Peptide Sequence Number=SeqID_79310
ccccgctgcagggatcgccgatctagatctcccgttcaccgcccctccctctccctctctcgtggcttcattcctgtcggcgccgccctcctcgtcaggcccttcgccggcgacgagcatccaccaggtacgcccccttccgttccgttcgcttccctccccgctgcgcgaaaccgagcaccccaaaccctattgtaagcaacctgtatccggatctgacccaattacgtgcgcatgttacccactaatttcgaccattcgccccctggctgcgcaggatccagagcgtgctacgacctctcctgccatccgccatgattaatttcgtgctcctgatcagccgccagggcaaggttaggctcaccaagtggtattcgccatacacccagaaggagaggaccaaggttattcgtgagctcagtggactcattattacacgagggccc

SEQ ID NO: 13337 - DNA, 775 bp, Setaria italica
  Peptide Sequence Number=SeqID_79311
cacgttctctctgctcgtggccggcgttcactggatcgttcaaccgggtctgaaccggtcgaggcagctggctgactggaggcccatgttccagaactcgtcgtagtactcctggtaggtgaatggccggtaggccagcgggtgggcgtcgtccaccagcgcgcccgccggcgcgatcaccgcgtccggggacgggcagtagaacgtcggcaccgagatccgctcgctctcgctgttgacgatcacgcggtggagcacgctcttgtagcggtcgttgctcagcgcctgcagctggtcgccgatgttgatgaccagcgcgttgggcacggggttcacggcgacccagcggccgtcgcgctgcacctgcaggccggagacgccgtcctggagcagcagcgtgatggcattggggtccttgtgccccggcagcccgtaggtgagctccggctgcgggcacggtgggtagtagttcaccgccatgtgctgcgcctgcctccccatggccgccaccatgtggctccgctccaggcccaggctctccgagatcgcctccagcagccgcagcgccagcgctcgcgcttccgtcgcgtaggtgcccaccacttccctgaatgagggcgggttcgacggccactgttcgatgaagctctcgagcgggtagcaatgcaggcgcaggaagtcgcgccagttgctgaccttctccgtgcgcacgttgaagctcgtggacagccggatggccttcttggggtcgtcggagtagcacttgagccgctcc

SEQ ID NO: 13338 - DNA, 235 bp, Setaria italica
  Peptide Sequence Number=SeqID_79312
tgagcagcagcatttagttagagatgttgtggagagacccaagagacattgatctttggctgctttatgtacacatgaaggaatggtcatgctcttaaatttagcagtaggaagctcactttcttttccattttactagatgtttatcagatctgaatcatattcactctgtcccatgtattcctggtttacacttattggttttgggcagcatgcgacagagtgaagattataa

SEQ ID NO: 13339 - DNA, 570 bp, Setaria italica
  Peptide Sequence Number=SeqID_79313
attctcgcgagcacagaagaggggaggaaaaatcatctccttcaacctctcccctcctccaccaaaatcccgatctttattccagaaaagatcctccttttctgggtcgatacagatacacgcagctatttatagcgtctggtctcgtggatacgctcgttcttggcttccccgcggggctgttgatttgatttgagggagtcaaattcgcctgcggctgaagggggcgccgggcgcatggcggagcaggagagacggcggttcgcgaatctgcgaagcgtccggtggcgggtcgatcttggcatcctgccggcgtcgccggaggcgtccgtcgatgagctccgccgcgccaccgccgattcgcggaggagatatgttagtttgaggcgccgtcttatggtagacccacatcttccaaaggaggaggacagatcatccaacctcgtcgttgacaacccgctctctcagaacccagatagcagctggggccgtttttttagaggcgctgagttggagaagactgttgatcaagacttatctcgattatatccagaagatggtagttacttt

SEQ ID NO: 13340 - DNA, 796 bp, Setaria italica
  misc_feature (1)..(106): n is a, c, g, or t
  Peptide Sequence Number=SeqID_79314
nnnnnnnnnnnnnnnnnnnnnnnnnnnnnnnnnnnnnnnnnnnnnnnnnnnnnnnnnnnnnnnnnnnnnnnnnnnnnnnnnnnnnnnnnnnnnnnnnnnnnnnnnncaattcagctccaatttagcactggaagcaacagagttttatctctgagagcaaaattcttatccttattaaggaccatcgtcaccgctccacattttcttgagttgacacaacaaattatacaattttacaggctaaaatgctaaccacttgcgagtaaaacctagccacggaaaatatataagagaaaagccaagaaaaagggcgcaaaaaagagtgataagaaagtttagtcctataccctccaccacaaactccttatcatcatccatccgtgacctcacctcaccccgacgacggcgaggatgggaacgcgtccttgacggcggaggcggcggtgaggtagttgagggtgttgcgcagcgtgtcccgctccctgcgcagccttgcggcggtgtcctcgagctcgagcagcgcctgctgctcccggggcgcgccctcgaaggtgttgccgacgtagaaggagaagggcgtggggaagaggcccctgcgcaggtcgcccacctccttctcgggcttgccgttgagtcggttggcgattcgtatgacgtcccgcatgagggcctcgacgtcggcggcgagcgcctcggcatcctccgcgggtgccggggcctcggcgggcgggcggtcctcgagccactgcacggcggcgacgaggtagggcttggtgcgcacgacgcgggcgacgcg

SEQ ID NO: 13341 - DNA, 399 bp, Setaria italica
  Peptide Sequence Number=SeqID_79315
aataatgaacttatagatttcctgttgtgatctcgatgatttttgcaatttcttcatctgacatggtagccattctctgaaatagatctgctatgtttgcacccatatatgaatcaggaccataccagacagtaaggtctggtatttgggcaaatgcctgtagtatagttggaacaacattagaagaggtacaggtaattgtaggaacaagttcatgagcatgagcttttgtttccagagaagtattgatgtaaataacatgcaaagaaggataagatcctgatgcttccctcaagaaatgagtatattcagaacttgaagccgcatcagctaacgaacagccaatctgttcactggacattctgtaaacaccaaccttattaaatcttgcttgatcaa

SEQ ID NO: 13342 - DNA, 915 bp, Setaria italica
  Peptide Sequence Number=SeqID_79316
caatactgcaagatagtcttacaaaagagcattagaaaaatactgtaagcactttcaagtttcaaaacctcaatacagatataatggcgatgcaaagttataagtattttgatggcacctctgaatagtacaagcaacacattgcttgcaacataagtgctatgctgatatatgcaagcagctgtccagatatccggttcttaggaatcagtgaatactctgagtttattcaggcatagcattgttacaatgctacagtaatcattctggcacggttgacagctgcaaagtagaggcagatgtgctcctcaaggtcagcaagctgtcgtagcaggctgggatggttcttcctgagctgccgcaccacctcctctatggtgtgatgctgccccctcccacgctccagcccaaggcggacaagcatcttgtcgctctccacagtggcatggagcctgcccaccagccgctcaatcgtggcgacgtcattgttcaagacgtaggtgcccctggcggtggcgtccagccggtccatgtgcttctgcaggcgtttcatcgaagcagccagtgggcagcaggaggaactggatgcagcacaggcaggggccgtcgccaacagcgcggtgatggcgtgtgttgcaagcacgaggcccgcgatggcagcgccggtggcgcaggcaatgaggcagatacctgacccgcgcttggcgcagcggagccaacggcgcctgcgtcggacactgaggaggcgaaggtcgaggtgttccttgaggccagcgaagctctggtgcatgccctggaacccggccgcgggcgccgggaacgggttgggcatttggtcgaacaggaggaaggcgtcgaacgcgcagtcgcagtgcgccacggcgagctgcggcgagtgcgggatgagcgcgagga

SEQ ID NO: 13343 - DNA, 273 bp, Setaria italica
  Peptide Sequence Number=SeqID_79317
cgcctccttgtacttctctatgttgtctacactcctgtcatggaacaagcacctataacattctttcttctccttaatagccctttggacttcctcattccaccaccaagtatctttatctacgcctcaaccccccttgatcactccaagcacctctgaggtcaccttccgaatgcagtttgccatcttctcccacatgttgtttgcgtcctctccttccttccaagggccctcattaccctaggtagttgctatagctcctcaaaattggag

SEQ ID NO: 13344 - DNA, 449 bp, Setaria italica
  Peptide Sequence Number=SeqID_79318
ctctcacgaaccctagccatcctatagatgtccttctctccttccttcgtgcctaatcgttggtaaagatcctcattatcgccctacccttaaccgcacttacagcttgcttcgcaatcttcttcgcctccttgtacttctctatgttgtccacactcctgtcatggaacaagcgcttatagcattctttcttctccttaatagtcctttggacttcctcattccaccaccaagtatctttatctacgcctctaccacctttggtcactccaagcacctctgagaccaccttccgaatgcagtttgccatcttctcccacgtgttgtttgcatcctctccttccttccttccaagggctgagaacactactgatcgaatttgttgacttggtactggtggtgctgatggtaatatttacatcaatacagcttgcaggctcagatgttta

SEQ ID NO: 13345 - DNA, 487 bp, Setaria italica
  Peptide Sequence Number=SeqID_79319
tattgttaggttccttctttaataaccgacgctccatagcttgtcttattaagaaaataccttccatggttgaccttccaggcatgaaaccaaattggttcatagacacccgcgttatccttgtcaaacaaacgatgctcgatgactcttccatagcttcatagtatggctcattaacttaattcctcggtaattagtacaactttgaatatctcccttattcttgtatattggtaccaatatacttctccactcttccggcatcttgttcgaccgaaaaatatggttgaacaacttggttagccatactatggctatatcccctaggcatctccacaccttaattgggataccatccgggctcattgccttaccacttttcatccttttcaacgtctctctgacctcagattcttggatcttccgcacaaagtgcttgttggtgtcatcaaaagagtcatccaactgcaaggttgtgttctcattc

SEQ ID NO: 13346 - DNA, 857 bp, Setaria italica
  Peptide Sequence Number=SeqID_79320
tctctctataccactccataacttgtcattaagaaaatagcttccatggttgaccttccaggcatgaaagcaaattggttcatagagacccgtgttatcattctcaaacgatgctcgataactctctcccatagcttcatagtacggctcatcaacttaattcctcggtaattagtacaactttgaatatctcccttattcttgtatattggtactctttcggcatcttgttcaaccataaatatggttgaacaacttagttagccatactatggctatatccccgaggcatctccactccttaattgggataccatccgagccaatcaccttactacttttcatccttttcaacgcctctccgacctcagattcttggatcttccgcacaaagtgcctgttggtgtcatcaaaagagtcatccaactgcaaggttgtgttctcattctcaccattgaacaatttgtcaaaatactcttgccatctatgtttgatctcatcctcctttaccaagatgttctccatttcatccttaatgcacttaacttggttgaagtccctcgtctttctctcacgaaccttagccatcctatagatgtccttctctccttccttcgtacctaatcgttggtaaagatcctcatacgccctaccctttaccacacttacagctcgctttgcgatcttctttgcctccttgtacttctctatgttgttcacactcctgtcatggaacaagcgcctatagcattctttcttctccttaatagtcctttggacttcctcattccctacctacctaagttattcttttattcttacgtccttcttaccccccttggtcactccaagcacct

SEQ ID NO: 13347 - DNA, 361 bp, Setaria italica
  Peptide Sequence Number=SeqID_79321
caacagactcgcacatcagccaaaagtacttctgggcaagctgactgatcacatcagatcagacagtagcaattccgagcaagaaaatggttgccagggtgatgccgttctggctcctggccgcggtgctggtcgcggcggcgtcggcgcagtcctccggctccggcggcagcgactgcacgtcggcgctggtgagcctgtccccgtgcatggactacatcagcgggaacggctcgtcgtcgcccagcgcgtcgtgctgctcgcagctcaagtccgtggtgcagtccaagccgcagtgcctctgcgccgcgatcggcggcggcgcctcgtcctccctcggcggcgtcaccatcgaccggga

SEQ ID NO: 13348 - DNA, 760 bp, Setaria italica
  Peptide Sequence Number=SeqID_79322
gcatgagggatgtgaaagctcagattgggatcagtacagctcatttgctgcacgagagcttaaggctcaagcatgctccttcaaagcttgacgtattggatgatgaaagtgctagcgcattgagaaagttttgtctcacgtactatgacatcagggcggtgatattggagcttgcactgaagcttgatataatgagacaccttgatgagcttcctaagtatctgcagcggattaagtctcttgaagtcatgaagatatatgccccactcgcacatgctgttggagcgggtaatctgtcactagaactagaggatctttcatttcgttacatgtttcctcattcatatgaccatgttgatcaatggttgagaagccaagaaagtgagtgcaaggccttgataaatttgtacaaggagcagttgctacaagcactgaaagctgatgacgagttgaacaggattgtactggacatctcagttcaagggcgatacaaaagccgtttcagtactatgaagaaactagtaaaagatggccggaaaccagaagaggttaaagacatactagctttgcgggtaatcttggagcctcgatgtgatggcaactcatcagattggggccccagggcttgccacaggacgcatgaaatcattcaagctctgtgcaaggaagtaccaggtagaacaaaagattatatcagtcggccaaaagaaaatggttaccagagtttgcatgtggccatcgatgtcagcgaacctgggaa

SEQ ID NO: 13349 - DNA, 2688 bp, Setaria italica
  misc_feature (1)..(17): n is a, c, g, or t
  Peptide Sequence Number=SeqID_79323
nnnnnnnnnnnnnnnnntttttttttagaaatttaggaagacaagtaacaatttagaaactaaccttttaaacctaaaaccacctaccaccataaccacttccatttctcatcgaaaaggtgaaagtgcagattacaagccattatccttcgctacttgtatccctagtatatcatctagtgtgcacagtactagacatactaacgcatcaggcagcataactggctaatgctactaaataatgtactgtacaaccttctcgcatcagtagaggactgatcttcaagaggggtattaagaaccctcatatgcaggcaccaagtggaaagaagtcgcaccccaggtcattatccgtgaatgagaaatcatccttctccgctttgatcatggaactgagaagaccatcaaaattgcagctagtagagctaacaccaccatgtagctttggaatcccaaaatcacaaacattcttctgcttcagtttatcctctgatgttaatgagtgaatcttcacttctggtgtaagaggtaacatactagcatttgtctgctgagtcatacaggcaccaaaatcatgactgaaacctccaatgctcaatccttggttctgtagatgatcttgtttcattccatccatttcacgtctagagttcgatgcacctccgaactgcatgtagtttgaatgtctcccagtatcaggagcaagcagcactgtgccacaagaggaactggcaccactcttggtattgttggttgctgtaaggctaccagaaggacaaacaggcatggttactgaaaattttgttccactagtgccatcgaatggatcatgcaactgtaacttgtcagcagaaaatccctcgtttattggaagggcaccctggtgggatacacttgaatcctgcaaattacatgaaattccaatagtcctttcaaccagttctgaattcatagatggcattggcatcgatgtctggatgctaagtttggcttgtgtgcactccaaaagttcttgcggtggcaatgaactgcttgtaactctctgaagtgcaccggacagactgttagccagtgcgctcccagaaaagacagtagacaaatcattattttcttggtggatccacttctgttcaagttggggcagcccaagtgatgtggtcgatccttgtgccagatttgcgtgttggttttcttgcaagccgacatactggaatttgctcccatcactaccacagtgacttattatgccattgttggtagcagtttgaactgtcatggcaggagcaagctcttgaaccccaaatgttgctgcactggctccagttagcaagccatgtgggttgaaagatgagagagcagcagaaggcacaaaaggctgataactctgaatcccttcgaatgctcccatgtgaagaaaagaagggtctctgcctccaaaagcagcaacaatgctagcttgctgtgatgccacagcacttaaccgtttgaggtagagcctgtatttctgtagatgactcgcgacgttttccctggtgagcttctccacattcataagctcaagaattctttttggtacagctttatcaattccaagctggttgacagccgcaacaaattttcgatgcagttcaactgaccaaacaactcttggcttcttagcagctgagggttcatcaccttcttgcaaatcattctcctctccgtcatcttcctcgtcgctatgcatttccttcctcttcttgcagatcctcccactttggtcagaagcaccaccaacaatctgactgtgcccatggcatgaatctgcacttggtggcttattgaaatctttgtagatttcaagattactgcgctcgcgcttactgaacttcctcctgacaacatgctgccatatgttcctaagctcctcgatacgaacaggttttaggagatagtcacaagctccgtgagtaatccccttcatcacggatttcgtttctccattcactgataacatgatgacagggaggtccatttcaagccctacaagctcaaggagcttgaatccatccatgtcgggcatgtgtacgtcactgataaccagatcaaacatgtccctgttctcccgtagcagcttcagcgcagtaatggcctggttggttgttgtcacgtggtagtggcagcgccgcaggagggtctcgagcaccttgaggcacacggggtcgtcgtcgaccgcgagcacccgcatgccgacggggaaccgatccctctccctccccatcatcagccccttcttctcctccatcctcgcagcgcccaaaagcatcccggattcgcgcgaacccaaacaggaagcaaacctaatactactgtgcagtagcaacgaaaatttccggccccaaaacgtcccaatcgactcagtcccaagcgagagaacccgacgcgtggttgggcgaaattgaagcgaatcgcgagaggctaatggcagccaagaacaagaagggcgaagtctccccaacccgcacacaccaagagcacctgattctgaggcgcgccaagaaagaaagtgaaagcgcccccaagcaagctgagtgctgggacgcgaccgcgaggaggctggtgcagaggagaaaagcgagagcccaaaagccagccacagctagtgccaaaactacacctgaaactgctaaagaaaagaaaagtgcaggt

SEQ ID NO: 13350 - DNA, 505 bp, Setaria italica
  Peptide Sequence Number=SeqID_79324
ttttaggacaagatacagaatagaacttcaaatttacacaaaaagaaataatgacaaccaaattcgtggccgtcttaggcttactagcaaaatggagaatacatataaatcggctggaagcccaacactgacccatccactgtccaacttgcactatgctacaccaatccaatccaacttgccatgtccttgatctacaatactctaatatctaaccctaaacacctacggtcagctttggtaaagcaggcatcttgtacaccaacatcaatcttggggcctaaatatggcgtttatgaactgcttcaggttgctgcagggcaagatctcaatatcaagcttaagcggtttgagcaacttctcagaggtcttgggaacaacacacttcttgtatcccagctttgcaatagccatcacccgcttgtccattcttggcacagatctaagttcaccgccaaggccgatctctccaataaatgcaacatcatttgggataggaaactcc

SEQ ID NO: 13351 - DNA, 530 bp, Setaria italica
  Peptide Sequence Number=SeqID_79325
ccaatccgcacggtccggccgtcggagctgctggggtcgaggaggacctccttgacgccttcggtggcctcgaaggaggtggccgactgcttggagtcgggctgtttctcggcgccctccgcgagctagaccgccaattcttctgtgaaggtaatggccgcagcgtactcgcagcattctacgtcgcactcgtacgccttttggaaagacgtgccgacggtgatgaccccgttgggccctggcagcttgagcttgaggtaggtgtagttggggatggctatgaacttcgcgtagcatggtcgccccaagatggcatggtaggttccacggaaccccaccacctcaaaggtgaggacctccttcctgtaattggagggggtcccaaaagtgacgggcaagtcgatttgcccgagaggcatcgcctgttttcccggcacgacatccgtggaacggtgccttgctgggacggaggcgggagcggtccattcccatagcatcgagggtctcggcgtagaggatgttgaaggacc

SEQ ID NO: 13352 - DNA, 1116 bp, Setaria italica
  Peptide Sequence Number=SeqID_79326
ctagcaagagggtcatttcgcacgacaaggccatgcaatgttctagtagtgacataaagggcatacatgatatatattattcaccataaagaaaatagaaagaagacataaaaatatagcaaaaaaaaaaatcagtacctcaaaatggcacaagctgacaagcagtctatttcataggagcaacaccatgatcaccatccatgtccttcccatcacacatggtcctacttgaaatatattcaactttttcctgcttaattgagctccttttgctatacttcttcttatagcaattgaccaaatcatcctgctgtagggtcacagaaggaccttttcttttagctttcatgctctcctcaccatgtttacctttcacacattctaacgcaagaaccactgtgacaaaggaatcagatctcctaaaacactttaacaccctgttgctacctggttcttcatcgccaagctgagccatcacattggttatgcaaatctcctgatttccattgccatcccttccagcaaccacaccattcttccccttgcctgggccagtagaggcaccactacatgagttccctgaacgtgaaatcctctgtgatccattcatcgccagatgcagctgcaaagctaaatcctcatccagcagaaccggatcaccactgccccgcccacaaactgaccagtgctaacgccttccttacccccttggaaggcgacttcagaatgtcgcccccagccacggaggtaggatccctggggtaaccctccagattcagccccaaattgaatcccccgatcttcggtctcacggtggggtagcaatcgacgcagaggaaatcctccacctcgacgggctggatcagggatgtacggtgttcggctgggatgcaggattggtgcacggaatgcttgcaacgccgacaagagacggtggagtcctcgggcggggggttgtcgagggagaggcaataggagcagacggccgcggagcggacgagggagaggcattccgcgcagaggaggacgatgcgccacagggagctgagcggacggaccgggcggcgcttgggcttggccccccaggctgcggcattgggaagcggacgccgcagc

SEQ ID NO: 13353 - DNA, 789 bp, Setaria italica
  Peptide Sequence Number=SeqID_79327
gttgccacacattggacatgtccagtcatttggaccaaacaatccaggtggaccaccaacagcagcagcagcgccagcacggctgcttcctcttgcatcagtgctaccacgacctctacccctgccaacaccaccaccagtagctccaccaacaccagcagggcgagcagctccacaacgattacaaacaccacgaaaggcaaagtttacattgccacagctggtatttggacacatccaatccccatcttgctgccaagcctttcctggaccatcaccggatcctctacctctgccaaccccattatccaagtcttgtctacctaagtcagcagtgatggccaagttcgtggagctatcgaatgtatctttaccttttgactcagctatgtgaacttggataatacttccatggaaatctttgttattgaaccagtccacagcagctgaagcagcatgtgggtcctcataggtaactgttgcatcaccctttggttcattggtaaccttgtctctatatatccaaatttttggacgcccagtccttttgtccttctttagcaaccctatggtgccaaaatattcagccagcatagtctcatcagttccaggaggcaggttgcacacataaaccgaaccgtttgggggccctcttgacatatatccagccatcttgaaccagaaggccaattcaagccgcctccttctgtgtacagtcctgaatggtttatcagttggttgactgcaacacaaatcttcagtatgtgagaaatttaaccagtggatccg

SEQ ID NO: 13354 - DNA, 417 bp, Setaria italica
  Peptide Sequence Number=SeqID_79328
tttttttttaactttggatgcagaatgaaggactttttatttcacttttactcaaagatacattatacacatacagatattttacaatagatgaacagactactgcatactacatgggagatcgattgatctgcaaactagctagatagcggtagatattcacatgcgggctcggatcggatgctccggccactttgcttttgcttgagttgctctctttgtaggcacgcccactgacgacttgaatgtcgcctagattcttcaggtgcttctgagttcatcctgtcatgtcgtctcggcctagtagccgcccatggtcatgttggcgggggcaccgccgccggggcacctgtatgcggggaagggcaccttgccggcctcgatgcgcttgacgtcctcgaccaggatctcgtagta

SEQ ID NO: 13355 - DNA, 746 bp, Setaria italica
  Peptide Sequence Number=SeqID_79329
ccaccacaagaacctcgtctccctcgtcggctactgcctctacggcgagcagcgcctgctcgtatacgagtacgtccccaacaagaccctcgagttccacctccacgggagcagcaggccgacgctggactggccgcggcggtggaagatcgccgtcggctcggcgaaggggctcgcctatctgcacgaagattgtcatcctaagattatccatcgtgacataaaggcggcgaacatccttcttgattacaactacgaaccaaaggttgcagattttgggttggccagataccaagcagctgaagtcacggctgtttctacacgcataatgggaactttcggatatttggcgccagagtacgctgccacaggcaaagttagcgaccggtccgatgtcttctccttcggcgtgatgcttctggaactgatcaccgggaggaagcctatcatgacatcttcagcttatcagcctgagacgctggtttcctgggctaggccgttgctgacgagagccgtggaggaggagaactacgacgagctgatcgacccgaggctggagaccaactacgacgcgtacgacatggcgcggctgatcgcgtgcgccgcggccgccgtgcgccagaccgcgcggtctcgcccgcggatgacccagatcgtccggtacctggagggcgagctgtcggtggaggacctgaacgccggcgtgaggccggggcagagcgcgctgagacaggcaggcggcggcg

SEQ ID NO: 13356 - DNA, 338 bp, Setaria italica
  Peptide Sequence Number=SeqID_79330
ttttttttttaggttttttttctttcacagggttcccaaatactgacaaagctgaccctgttccatgtaggctttccagatggtccgaggggagttggaagcgttgatttctgtatccccattgcttgaaaaactgtcccttctgttcttagaggttccttgtagcaatgacgagtatcttcaatgggcaattcaggctcccaaactccagtatttgttgattgatgaacttcgtgactacgtgtggcagaccaatgatcttccatcccttgaggaagcacaaattcatgctgcaatgtactctactcaccgtgatgtcatcaagcttatgacaggta

SEQ ID NO: 13357 - DNA, 332 bp, Setaria italica
  Peptide Sequence Number=SeqID_79331
catgtgccctcgccaggccatatgtgggtctgcccctgcctctgggtaggttttgcaattcagaaatagagacgtacctccccgataattggactgtctgcaaatgccctaattccatcctggaactttggagcaatttgctttacatggccaggaatatccctttcacgataaattttcagagcttctatggccacagcacaggcaactggatgaccggagtatgtaaatccatgagcaaatgaaccaagcttattactctgggaatgaatcacatcttgtttcactagctaaggctctttcaaacgcctatgtacccataggagcaactc

SEQ ID NO: 13358 - DNA, 416 bp, Setaria italica
  Peptide Sequence Number=SeqID_79332
tcatcatcatccctcaccgtctttacaccaatagcactggctaaatcttcttggatttgagctctgagatcctttcctcagtggccttcagggcatggccgaatttgcttatgatttcttcaacttctccaggagtcattatcagagggggtgacagcatgatgctatctccagccaccctgatgagcatcccacgcttctcacactcggcgccaaagattgcacccacacctgaaattaccaaccataatgaaatcgattttactactgcaatgcaaatcactcggcagggcttcctttgactctggcattatgatgaactttgcttcaatatgctacaataaattcataagcactaaggctgcctttagaaaacttttttggtagcccgaaattttcttttagcatagttaaat

SEQ ID NO: 13359 - DNA, 658 bp, Setaria italica
  Peptide Sequence Number=SeqID_79333
atgatgatgacaatgtacataataatccctcaccgtctttacaaccaatagcactggctaaatcttcttggatttgagctctgagatcctttcctcagtggccttcagggcatggccgaatttgcttatgatttcttcaacttctccaggagtcattatcagagggggtgacagcatgatgctatctccaggagtcattatcagagggggtgacagcatgatgctatctccagccaccctgatgagcatcccacgcttctcacactcggcgccaaagattgcacccacaccccattcagctgggaaaggatcatttggcgatttgttgtcgacaaattcagttccaagtatcagtccctgaccacgtatctccccaacaattgggcttcctgagaaggccttgattccctcctggaaccttggagcaatttttgttaacatgttcaacaatgttcctttctctaacagcaattagatgaagggttagtcagatatacgcattgatataataggagtttatttataattacataaagtgtagtttacttatatatcttcaacgtttctatggcaacagcacaagaaactggatgtcccgagtatgtaaagccatgagcaaaagacctttagcaaaaaggagaaaaacaaaggaaattat

SEQ ID NO: 13360 - DNA, 418 bp, Setaria italica
  Peptide Sequence Number=SeqID_79334
cctttcctcagtggccttcaggcatggccgaatttgcttattgatttcttcaacttctccaggagtcattatcagagggggtgacagcatgatgctatctccagccaccctgatgagcatcccacgcttctcacactcggcgccaaagattgcacccacaccccattcagctgggaaaggatcatttggcgatttgttgtcgacaaattcagttccaagtatcagtccctgaccacgtatctccccaacaattgggcttcctgagaaggccttgattccctcctggaaccttggagcaattttgttaacatgttcaacaatgttcctttctctaacagcaattagatgaagggttagtcagatatacgcattgatataataggagtttatttatattaacttaatattaaagttgtta

SEQ ID NO: 13361 - DNA, 1899 bp, Setaria italica
  Peptide Sequence Number=SeqID_79335
caaaagtgcagaaggttcaaactgcaattcctccgtttcaattgtaaccattttctttccttgcaaaggtatgtatcggaatattttaccaataaggatgtatacagtttgagacataaggggaaaaaacatctatgtcctgtatagaagttatcagtcaccattgctcagtgacagacagctgctatcttgcacttcaagaacagtgcccgttccagtgcattattgccatctcccagccatggatttattcttctgtacatcagctgtgctcatttctgcctgacgtttatcgtcatcgtcgatgcctttggctaattcttcttggatttcagctccgccaccctcgcctcggtggccttaagggcttctccgtagatgctcaccagctcgtcgacttcgccaggtgtcatgatcagtgttggcgacatcatgatggcatcaccggcaaccctcaccagcatgccgcgcttctggcactcctgcccaaagattgcaccaacgccccattcagcagggaatagatcagtcggtgatttgttgttggtgaattcggttcccattatcatccccaagccacgaatctccccgataattggactgtctgcaaatgccctaattccatcctggaactttggagcaatttgctttacatggccaggaatatccctttcacgataaattttcagagcttctatggccacagcacaggcaactggatgaccggagtatgtaaatccatgagcaaatgaaccaagcttattactctgggaatgaatcacatctgatatctctgggctaacaagagttgctcctatgggtacataggcgtttgaaagagccttagctagtgaaacaagatctggtttgatgttataataatcagatccgaacatagttcccaaccttccaaatgcagtaatgacctcatctgctatgaaaagaatgtcatacttcttgaccactgcttgaaccttatcaaaataggtctttggaggaggaatgacaccaccagcacccatcacaggttcagcaatgaaagcagcaattgtttctggtccttctttgagaataaggttctctaaattggtggcaagtctagtcgcaaactcttcttctgtctcaccaggaagatgatatcgccaatagtgagggcagtcagtgtgcagaacaaaaggtgccggtagatcaaacttctggtgcagggcaggaagaccagttaggctcgctgatatcaatgtagacccatggtatgcttttgttcgtgcaataaatttcttcttgtttggcctccccaacgcattgttataataccataccagtttgacctgagagtcatttgcttctgaaccactgtttgtgaagaacacttttcccatttcccgtgcagtgaacatgctaagaatctcctgtgcaagatccaatgaaggtctggttgtgcggttccaaaaggaatgatagaaaggtaacttgtttaattgatcagttgctgctttgactaatcgaggttcactaccacctaaagctgtacaccatagtcctgcaagagaatctaggtacttatttccatttatgtcataaacataggaaccctcagatctctcaataatcagtggatgcaactcattgctctgccagccagctgtaaacggtgccagcatgccatgacccttaaacccattttcttcagttgagtcagattgggcagacggtgctgaactaaaatgtctgactgatgcatccggcaaacattctgtgtgcccttgcaaacttgcagtgctagttacgtacttcactaagctgcttgcctgggcggaggcatttgatcggagcaggcgtcgcgcaatcatcatcttctttccccgagacggaggcggagacggacggcgccctcacgag

SEQ ID NO: 13362 - DNA, 245 bp, Setaria italica
  Peptide Sequence Number=SeqID_79336
gctagtcatggcggccatcatagcgtagccacccttctccctcgcttgccatcacgagctgcttctcttctacactggttgcggtagcacactgcggaagaagctcctcctcctccgcccacgcgcgcagtggtgtcgtgctgtgctgcgcgtgccgcgcatacgcgctgcggctccggcggcggcggcggaggccttgtcgtttgcggtgtctccggccgcctgggcgggcgggtttgtttagg

SEQ ID NO: 13363 - DNA, 403 bp, Setaria italica
  Peptide Sequence Number=SeqID_79337
acggcacctccgacccaaaacccccaatcctagcccccgccaatccccaatcccttcgtccccatccaagcccacctcacctccttcctctcctccctcccccgggccctcccgccgccgccgccctgggcacgcatcccctgccctcctcggcttcggccacggcctccgcctccacggccctccgggtaaccgagatcgaggagcggctcgccggggtacccgtgtacgcgctcgccaacgccgcccaggagttcgtgctcgtgtcgtccgcccgcgagggagggcaagggggcgatggcgcgcggcagcctccagcgctcggcctgctatgcttccggaaggaggatgccgacgcgctgctggagcagatggagggcgacatgcgcgccggttccagcgt

SEQ ID NO: 13364 - DNA, 1162 bp, Setaria italica
  Peptide Sequence Number=SeqID_79338
gcctgttcaagttccaaatcatgcccattaagttttgtcataaatgacaggatatccttgttgcttagtccatgtagtcatcaaatcctttacaggctccccggattcctcctcaagaacagcccataggtcttcagtcttagcatttgagtaggcatacttctttatatatgaagccaaagctttctgaaaacgctctgcgccaaggtaactctgtagcatacgaataacagaagctcccttgtcatagcttatggaatcaaaaattgcatcaatttcactggcatggtttacttcaacctcgataggatgagactctgcaagtgcatccagtctgaggccagaggtcgtctcatcaaggaattgtgtccagttattccactcaggaaacaaagattccactgctaaatagcttacccaggaagcaaaaccctcatttagccacaagtgagtccaccattccatggtcacaagattgccaaaccattggtgagccaactcatgtgcaacagttattgctacctgttgtttgttggatgctgatgacagtagctcatcatacagcaaagctgtatcacggtaagtgactaacccatagttctccatggccccagcagcaaaatccggaatagcaatcatatccaacttaggcagcggataaggagtggcaaaataatctttatatagatccagtgacttcacggcaacatccagcgcaaactttccttgattagtcttgccaacttgagtatacacgcgaactttggtcccctctgatgttgagctctctatgtagtcaaataagccaacaactatagccacaagataggttgacataagtggagattcctcataataaacagtctttgtaggtccactgactgtctccttaaccactggcatgttggataatgctaccaggtcagatggaacttctagagttagcttgaacttagccttaaatgcagggtcatcccaacatggaaagcaccgccgcgcatcagcagcttcaaactgtgtagttgccatgtttcttgactccccattgtacacatatttactcctgtagaatcccctcatctgatcgttgagagtcccggtgaagtccatggtgagcacgccctcgccgatgggcagctcccgatcgaatccgaggaccagg

SEQ ID NO: 13365 - DNA, 2117 bp, Setaria italica
  misc_feature (47)..(55): n is a, c, g, or t
  Peptide Sequence Number=SeqID_79339
tgagcgagcttgatttccatgtcttcaacacatgatcccagtttttnnnnnnnnntttttttttttttagtttaagtgcttttgtgaccttttgtccatgtgaaggtaaatcagttctttacaaataaagaacttagtttctttattaatgtttgttaatcttggacttagcacaccactcttagaaacaattaaacaaacgtcaccacttcaattttccgcaacagatcatatacaagcaaacgacagtacaccgtcagaagtcagaaccacgcacggaagaactttttcaagagcattgtcatgcggactcccacgacattatcacaccaaggagctgctattttgaacgcatgtttatgctccggcctgcagcagctcctgcactgtctgaccaaggctgggctcgctcctgatgctctcgatccaccttgcgctgatccgcaccctctcgaggctttgcttcaaagctctctggaaggacggcttgatgcggccagcaaagaactcggaaacctcagcagctttctcctcagaggtgaacggtgaaataatggagttgatgaagtccgatatgagcgagcttgatttccatgtcttcaacacatgatcccagtttttcttcagccaggtccatgcaacttcacgtccttccaagctaatgccaccaaggatataatacgaatcttgattccgtacctcatcagtgaatataaagttcaatgcttccaaaacaatatccttatctggtgatgaggacaaggagcctaagacacgggatttctcctggggttcagctgcttctctgtagattttgaggagagcatcataaccagatctctttgaggtactaacagtccgcatcacagcaaggtatgcagcctttctagtatctggtggaagaagggaagttttgcggtcctcaaagaagatatggaaacgccgaactccttcatttatagtttcattatgtccaagtctgaccagggcaatcaagagcagtgatctaagcattacatcaagatggctctcgccatccttcggatcccagcctaattttatggcagttggaagaagaaggttgatcaaaagctgcttgatatctttgttcaggtcaggagtggcatcaacagatattgtagaaatgcttaagcacacagaggttacatgtgaaagcacagtgtaatcagactcatcatgataagcattcagcagtcgcagcaatgatgtcagtgtttgtttgcgagcaacagaaagggcatatgaatcttccacaataccaatcttatccattagtgagagcttcttggttttgattgcatttacaagtccagctgcaagttcatcatcgtacttcactctaaagaatccagtttgatcgatgttcaatttgatccaaatgttttcacccttctctccatcagaactttgagaggcagtgaattctttaatatgaatcttatcagttttgtctttcaataaaaactttttctgtgcatcatacgagccactgcaagatgttataggaacaatccacatgccaggaccagaggatccgtcagacagaaactgtgcctgttcaagttccaaatcatgcccattaagttttgcataaatgacaggatatccttgttgcttagtccatgtagtcatcaaatcctttacaggctccccggattcctcctcaagaacagcccataggtcttcagtcttagcatttgagtaggcatacttctttatatatgaagccaaagctttctgaaaacgctctgcgccaaggtaactctgtagcatacgaataacagaagctcccttgtcatagcttatggaatcaaaaattgcatcaatttcactggcatggtttacttcaacctcgataggatgagactctgcaagtgcatccagtctgaggccagaggtcgtctcatcaaggaattgtgtccagttattccactcaggaaacaaagattccactgctaaatgagggttttgcttcctgggtaagctatttagcagtggaatagtccaccattccatcgttttgttttaatttgtttctaagagtggtgtgctaagtccaagattaacaaacattaatacagactttagttttcttt

SEQ ID NO: 13366 - DNA, 940 bp, Setaria italica
  misc_feature (895)..(895): n is a, c, g, or t
  Peptide Sequence Number=SeqID_79340
tggccaacggccaaccgatcgcagcgctcgaggcagccacacgccttcttcagtcttcagactgggatagaccgctccactagcctgacgacggataggacacacgagctgcagcagccgcgccgcaggctgcgagagcaatggaagctgcaggggcggagaaggatgccaacccgagcatgagcaagccggcggatgcgactgccaccggcgtcttcggcgaggagcaggaggcgctcgtgctgggcgcgtggaacgccatgaagggcgactcggcgtcgcttgcgctcaagttcttcctgaggatttttgagatcgcgccgggcgccaagcagatgttctccttcctgcgcgacgccgtcgacgcgcccctggagaaccaccccaagctcaaggcgcacgccgtgagcgtcttcgtcatggcttgcgagtccgcgacgcagctgaggaacaccggcgacgtgaaggtcagggaggcggccctgaagcggctgggcgcgacgcacgtcaaggccggcgtcgccgacgcgcactttgaggtggtgaagacggcgctgctggacaccatccgtgacgcggtcccggacatgtggacgccggagatgaaggcggcgtgggaggaggcctatgaccagctggccgccgccatcaaggaggagatgaagaacgccgccgccgcttgagctcatcgttagcataacacacacgcgcaccctgctgcgtaaagacccgcgctgatggggagagctttgaactgccaccaccactgttgccaagctgttgctactacgtacttctgtattctgtttgtcaaccatgtcgttggtgaataaacctttaattatactacaacagaaaaagtttgcacggcaaaaaaaaaaaaaaaaaaaaaaanaaaaaaaaactaagagacacgacaacgagggagtaggacgaagga

SEQ ID NO: 13367 - DNA, 451 bp, Setaria italica
  Peptide Sequence Number=SeqID_79341
gcccagaatcaagttttcttggtggaactggtccatgattatggttctttacgaatttggtaaccatccatttgccgggaccaaactttttaatcattatcatggccttgcaaccaactctagtacctgcccgttcttgctgtttttggtcagaatggaggccatcgcaagcacgggtttcatgaaatccctcttttgaacacacaatacgacgagaaatgattgaattatcacgtctcgagcgagtatacctgctgatccggatccgaaaaccagcatttcttgcatatgtgctgtagaaatcccttgcagcatcttcagactcaaattccattccttcacaaggtgttaactctgtgtcatcttcaagtccaattaatttttctacttcatgatgatgcgctactaaagtctccatagatctaggcagttctgtcaaagagtctagctc

SEQ ID NO: 13368 - DNA, 415 bp, Setaria italica
  Peptide Sequence Number=SeqID_79342
tagtacctgattgaacctagacgtgagcggtttgatccactgtctctggaacgaagttcccctgcggccgcacgtggtggcaagtgtggtcacagaatggcagaggccgggtctgtggaaccttgcaccaagggaagtgggcccgacacaggttaggggattgatggggacggccgacacaggaagcgaccctcggtggtgcacggatgtcatgaggttaggttcaccatgcatggttaaagaactcgaatcgattcgtctgcctctcacagtttgagactgcttgatcgctatgctacactgagtaatgaaggagtctgatgatgacatggtcttgatgttgagcttatatacataaagttgatctatgcttgcttagtataagttgccaatgtagactggttaatgaacttag

SEQ ID NO: 13369 - DNA, 1187 bp, Setaria italica
  Peptide Sequence Number=SeqID_79343
taaggtaattagttgttgaaataaccgtctatgctaaccaatgtgttgcattcgtgtagagctgcgtctcgctgacggctactatgagctgcacccggcgccagaagacgacggtgtagctgagctcctgcttccagaagccgaagctaccgaagaagacgagcagttcccttcctccttgctcgaaggcaagccccggatgcatgaatcccctatgttttaccagacttgcgcatgccttctttaacatgcttgtgcatttacgtataggagttgtttgaaaccatagatgcataacttagcttcccttgatctgaacactagctgttggaccgagtagctgctttgcttaactaggagacggtaaaagccgagtgattccctgtcactcgcgagttgtaggagttggatgtctacctttctgttacaactataaggacgatggacggggcagggtttggtaactctttggtggtcggatggtcgcccgtctgtctatgaaaatcttgctaaggcccgacagtggtggtgttcgtgatcaagtgtttgaaagtactagcctcatacttagtatgggatgaggaagcctagtacctgattgaacctagacgtgagcggtcgccccattgttcttggaacggagtttcccctgctggttgtcgcacgtggtggcaatgcgtggtcacagaacggcagaggccgggtctgtggaaccttgcaccaaaggaagtgggcccgacacgggttaggggattgatggggaaggccgacacaggaagcgaccctcggggtgcacggatgtcgtgaggttaggttcaccatgcatggttaaagaactcgaatcgattcgtctgcctctcacagtttgagactgcttgatcgctatgctacactgagtaatgaaggagtctgatgatgacatggtcttgatgatgagcttatatacataaagttggatctatgcttgcttagtgtaagttgccaacatagactggttaatgaacttagaagctgagctaaaacttgaaaataaggacctaatatagtgcttttggcaaacaaaacccctcagccaaagagccttgcatgtctagaagtggtggagtagttcttcccaccggatggataagtcttattgagcttagaaactcagccttgtttgtggcttctcttttcaggtgaagtag

SEQ ID NO: 13370 - DNA, 237 bp, Setaria italica
  Peptide Sequence Number=SeqID_79344
ggttttggttgatatatgcgttgagacctatgcttctgcacgccgcaacttcattgatgagagcattgctcgtcttggcgttcatgctaaattggcagaaaggttcaagtcagcatcatgggaggagcttgagactcagatcatgcgctggatccctgcaatccgagttgtgttccacatcttaatcccgagtgagcgcaatctttgcaattgcattttcgatgggtttacatctta

SEQ ID NO: 13371 - DNA, 771 bp, Setaria italica
  Peptide Sequence Number=SeqID_79345
caatttaactatgcttgatcgattctaacaaatggacatcagattaactgaaccacctcttgttgatttacttgtggatgaaccaatcaaccaaattcatggcagcctcataaccactaccaatataatccccacatcctgcagaaattaacctagtacttcttttttttactccctccttgccaccaatataaacagttacacccagctgttctcttctcactaccatggcgatccgatcaacggcaatgcctatttgacaatggcattaccctttgatgactccagcgtttctgtacttgtacctgatggcccagaacaagaagacgaggtagttgagggtgctgagcacgcacatgacccagtagaaccgctccaggtggtagtggttcaggctggcaccctgcagccacggccggtgcccgccgtgcgccgtcgcgctgttcacgatggacaccagcacggagctgaggtagtatcccagcgccagcgacgcccacgacagcgacgtcgccatcgagcgcatccgcgacggcgcctcgctgaagaagaactcgagcagccccgccagcgtgaacaggtccgccgaccccaggaacaagtactggaacgcgatccagaagaagctgatgggcaggggcttggccgagtccagcatcccgttgtcggcggcaacgttcttgcgcttcacctcgacgacggcggccaccgccatggcgacgatggagaggacgagcccggtgccgatgcgctggaggtggctgatgccca

SEQ ID NO: 13372 - DNA, 294 bp, Setaria italica
  Peptide Sequence Number=SeqID_79346
cccttttttaccctttttgctcgcgtcagcacagaacaggtcaaaaacataggaagaagaaaaaaaaataactggagcccgtgagtaatgctgaattaggattagttagttctctctatgacgtcagccagacgtgccctgctacaccgtgcacgcttcgtcctgcacctttgccccgccgccgtcgaggccgctctcctcggcgtcgtagctggcgtgcacgctgtagagcacgtacacgagcaacgcggcgaccgagaagaagccgaagcggacgtaggagggccggtccag

SEQ ID NO: 13373 - DNA, 846 bp, Setaria italica
  Peptide Sequence Number=SeqID_79347
gtagaaatgcatgctgcggaaggggaaggccttcttggcgtcgacgccgacggcggcggggtcgtagtgcacgatctccacggcggcgccggccgcggccgcgcacagcctcgccatgccgtcgagcgtgacggcgcggtcggagacgcagttgaagatcttgccggccgccgcgccggggttctcgacggcgagcgccagcatgctggagaggtcccggacgtgcgcaatgttggtcagctgcatcccgttgcccgggatcggcaccggccggccccgcacgatcctgtcgaagaaccactcctcgcagtccttgttgttgccggagccgatcatgtactgcggccggaacgacgcccagctgctgaactgctccgcgatgtacttctccacgcccacgtgccccgcgctctccttcaccgcgtccccttcgacgtgcggcggctcgtcggtcggcttgtagatgccggcgctgctgatgaacaggaactgccccacgccggacgccttcgcccagtccgccaccggcttgacggcgtcgaggtccttgccgttgttgtcgagcacgacgtcgaacgacgcgccgctgacggccgcgccgacgtccgccgggtcaccccacaccgtcttcccgccagctcccgtcagttccgagaagcgggagaagggcggcttcttcatcttgtcggagccctcgtccccgacggtgagcacagtgacggcgtgcccggcggcgagcagctccttggcgaagtagaaaccgatcacggcgtgcccgccgctgttggtgttcacgatcagcacgctcttcttggcctccggacgaccaacgaccggaaagaaacc

SEQ ID NO: 13374 - DNA, 436 bp, Setaria italica
  Peptide Sequence Number=SeqID_79348
gttcccctctctccgcttcctccctccgcaccgccgccgtcgtccgccctacgcgccgccgtcgttcctcctcctttccgactcagatcgaccatactccgcccggatcgagccccaggcaccacaaatcggcgttcttccactcgaatcgagtcccaagcgccccggatcgagccccaagcgctcggatctcgctgggcatcctcttccctcctcccctagcgccgccgtcgattccgtccttgaggtggataaggggacttgccaggggggagggcgagtgctaagaggccgttaaccgttccttcacaagaacaaaacacattccattccattgccatttatacctcacaacctcctccaaatccccaatcctcctctccccccagatttcgtctcctcctccggcttgctctcttctccggccacgtccagg

SEQ ID NO: 13375 - DNA, 331 bp, Setaria italica
  Peptide Sequence Number=SeqID_79349
tacatcttatagaaataattcatctttgtcgttcagttctcataagtggacacccaaaggtttcatttatggtgtgaagtgtgaacgactttttttcttgctcatattagttgtcttgttttgtgcaatcatatatacgtaccattttgcaacgtttgggatttcagctttgagattggtggattgcatatttgtttccccaagaagattctttacttgctttatctaactagatttatacatgctgtgttcttactggactatgttttttttaaaaaaaacacaattacatgtataactgttgttggtctccattacacaagagtccctt

SEQ ID NO: 13376 - DNA, 698 bp, Setaria italica
  Peptide Sequence Number=SeqID_79350
tacaaatagacaataagaagtgcaatctggagtgcacagcgatgtatttcttaaagaggtgacaagaaaagcacaggaactcatcagtatttcgaggatatccacaatgcaacacatgggagtatgggacaagtggatgggaattaaagcgcatgatggcacatgcctaggtgctttggttctgtatgccatcatttttcatgactagttttcggcacacacatatatgtatagatgagaaatatggatattttttcacaggctagctgccagcctgccatcctctgttctgtgggtttcattgaatttgcaaacaaggttaggtactaggtgagccctgaaggtatgaactaggcgcatgaaacaaagcattagtacatcatctcagactattaatctgatagtacatcttagctgtcacatgctgataacaactgaaacttcagcaacaaatttccaccaatgtcctacagtctctttctcatctttactgtacttttgtccaaaatctacagagaaaaatgcacctcccaaaagtcagcccagacttccaagtgaagtgaaccagtgaagcaatcgagcaaaagtgcaaaggacattcatttactccctccggatcaccacaacgtaaaaatcaccaaattgccaatcagatccgcagctcatcggagttcgtcaacgtccttttttcttttttt

SEQ ID NO: 13377 - DNA, 735 bp, Setaria italica
  Peptide Sequence Number=SeqID_79351
catatgaaaatgcggtactgcctcatcaagaggaggaacaaccagaggaagatgaaaaacacgtgcagaagactgttgtgctcccagagaatcaccgttatcgaaattgctctgacagcgatgatgacgtggaagatgagtatgctgaagatgatgtatacagtgatgatggtgatgaagaagaggaggattttatggactgcaagattgatttggttgatgaggaggaactgataactgaagagaacaagcaggagtctcgtgagtctctattctcactgtcagtgtctaatgatcagcagaatgaccaagaagttagcagtcctgcacccaagagcaatggtacctctgtagatgcagaaagccctctaattatgagaaataatctccatgatagaagccagtatgttcatcccgtgctgaacccagttcagaatctgtcacaatggaaggaagttaagagtcagaagacccaagctgtaccaggtaaaaagttggacaaggagaatgtaaacctagtgccaaatgtaggtgtaagccagacaaggatgagccctagcatatctggcaaaaaagaagtttctgtggacgcaagcctctctacttggttaaattcttctgaaaactcaacagcgggcaaggggcagagcagcaaatcgccttgttccatctcctcagtaagccgagcggaaaggcctgtcctgggtgctctgactgttgatgacctcaagcaac

SEQ ID NO: 13378 - DNA, 1404 bp, Setaria italica
  Peptide Sequence Number=SeqID_79352
gacagttccaaagcattgcagcagcagataatatttgatggacagaacgacgagcacggggacacaaattatgactctgatgaagcagaaagtagactatctgttctagaacctgaggactcagttgacgaagataattttgcagctgtgctttcgcaattaagcaatgcccctaaccctaaggaagaaagtgaaggctatggtgaaagtggtcatggtatgcatgaagaaaaatctcttgctgaatcagtgggatcactgaactttgttgtggattcggagtccgtggattcaactccacaaaatcatgataaagaatcttattctactcattctgcaactgatcaatgttcaagaacgagaacggctaaatgctctttaagttcagaagagtcagattccataagcagtcatttggcgtttgaaattgacaagaatgatccagagttgaatgctcatcctgttgaagattcagaaaggatttatgatggacatgtcaagtctctagatcattctattcagggaaatggggaaacattagctgatcatccaaaaaaagagggcgaatgcatccaaaaggacactggcaccatgaatctacattgcgacacccttgcctgtgatagggagtcagtgtgttcaagttgcgaggaatcgagacatgggttaaatggggagccatcagacttgagttccgaatcacactcagggctgaacccaacacacactacgggtggcaaattgccaatggtttctgaagatccggtgaataatatagagccaagtatgattgggatgacaaatgatagcacgagtgaagagctgaatcctgaattcagcgatacgaatcaaatggaaggttcccaatctgttgataaacccgtggaatcagaaaatatagctcaggatagcatcgctgctcagaggcctgaagatgacgctcccaaatcagggaaaggggtgctgaaatcagttgccggaggaattacccttgttggtgcagtgttcttcatggtccatctcaggagaagcaaggagagaagcttcacgagagttatgccatcactttcagaaaaatcaattcagagtgactcaagaagggctaagaacatggacaacgaaaaggtttctgatgtgtatcctggtgcacggctgaaggtgtaaaaagatgggtgtgggacccgcattctgcctgaaaagccagagctagaagaaacttcagattcccggtaaaagcagctctcatggagcgactccagtagcatgtagcctaaactcacagcagcttcgagctaactgaatctggaaactttttgtcaaggcacctctcacctgttaatttgatatcctgtcctcttcatgtacagaacgatatagccatatatatgggtgatcagctacaat

SEQ ID NO: 13379 - DNA, 423 bp, Setaria italica
  Peptide Sequence Number=SeqID_79353
gttttttgtttttttgtttttttgttttttttgtcctcaagccctcaactttccatgcgattgtcacaaatctaaatctggtttactcacagcaagaagccaaggagcatcactgcatccatgaactaaccgccttacacgtagtcatctttcatgggtctctatcacggaggttgcaagctagtgtcatatgctactcctcacattcatgccctaactttatgctttcggttgctgctttcaccgctcgttagcacgaggactccacgtttgcagttgcggccgtcgtcctgttggtaaccccgccatcacttcccggcgactttatcctgttcagccagccggcggcgatgtaccggtaggccgcctccgtcaggtggacgccgtcccagaacaagcgagcagacgggtccctgcacttga

SEQ ID NO: 13380 - DNA, 528 bp, Setaria italica
  Peptide Sequence Number=SeqID_79354
tccacctcggcgtcgctcagcgagaagctccggcggtgaccgccgctcgccggcgaccagcagtcgtactcgccctcggggtagaacgcgtcgccgctgtcggagcctacctggtcggcggcgaacggcgactgatggtcacctcccccggggctcgggacgccgccccagggcgagccaagcacgggcgacggcggggacgcgggcttggcggcgagctcggcgcgggcggtggcgacgaaggcgtggaggaggtggtcggggccgaaggcgaggcggatgagctccttgtcgctgttatcctggatgaggaacaggcccatgatcttggaggcgttgtcggggtccagcgcgcgcacccggtcgaacaccaccttagtggcctcccaggcgtccatggcgtccgccgcggggagcaggagcagcgcggcggttcttccgcttcttgaaggggggagatcgatggagacggacgggaggtgaaaagcagcggaggtgaaaacagggaggggaggggagcggggtgtg

SEQ ID NO: 13381 - DNA, 287 bp, Setaria italica
  Peptide Sequence Number=SeqID_79355
tggagccatggaggaggttgtgaaacaggccgcgggatccggcctcgctggcagcctggaaagcaggcttacgccgcaagtcacgtcaccacctcttgcctactgcagatgttatgtgcagaacttttctgtcaacttcaaaagaattttaagttaataattcatattcccataaaacatgtgtattcatcagagagtactatatgcagcaaaaccatagtgtagtttaattaaatcccatgtgctgggatactccctagtccatagcctaaaatctcccaaggcta

SEQ ID NO: 13382 - DNA, 340 bp, Setaria italica
  Peptide Sequence Number=SeqID_79356
gggggagggacgaatgggttggttggttggttgggtgatggaatggaacgcaagcaaacaaacttattttgtggggttcggggcagcgcgatgatcaccagctggagccatggaggaggttgtgaaacaggccgcgggatccggcctcgctggcagcctggaaagcaggcttaccccgcaagtcaagaagttgccttctttattccaagatggttaatatactctgaaagaaggttgaaagcataaacatgctttacttctttaaaacctggagtccaaatgacgaaaatatctacaccagcaaagcaaagttaataacaaaccctaatagaagtatcaa

SEQ ID NO: 13383 - DNA, 258 bp, Setaria italica
  Peptide Sequence Number=SeqID_79357
cattgattcgcgatcagttcacagggctcagatcggagaagggaggagagatgcgatcggatcgtacttgcgacgcggtcgaagacgtcggcggcggactcgccctcggggaagcggaagaagaagcggccgaagcgctggcgtgtctccttgacggcgcgcatccgctcctcgacctggaagttgccgaagtcctgctcccggacgcggcactcctcacgggcgccgatgacgcggtcccgcgggaaggcgcgtccg

SEQ ID NO: 13384 - DNA, 1590 bp, Setaria italica
  Peptide Sequence Number=SeqID_79358
actcatgttccaatctctagctactattaacagattacaaatcggggaaagaaaaggagagcaatcaggaatggctcgctaggccaccactccatagaaaattctagaaagcataatcgaattgaaagaatttcagtgaaccagagacagagcagagtctgattactccaggtgcttgatcttgccattctccttctcctcttcctcatcctccgacgagctctcagagtccttggggtcctcgaagaaggagtcgatgaaggaggagcattcctcggcccagctgcggcggttggcggaggcgcgccactgctggtcggcgatcatctccggcgacatgccccactgctcgagctcctccttggtgtggtggacgaggagggagtactccccgcccgggccccagctgcatgaccctgaactcgcagttgtcgaagttgttgaggcgctcgaactgggccaccgtccacttgaaccacttcatgaggaacacccgcgaggtgaggccgtgcgacacgattaccaggttggtctcgcagctcgggtcctgatccagcctccccatgtcgatgtcccgccacagcgactccaagaagcttgcgacgcggtcgaagacgtcggcggcggactcgccctcggggaagcggaagaagaagcggccgaagcgctggcgtgtctccttgacggcgcgcatccgctcctcgacctggaagttgccgaagtcctgctcccggacgcggcactcctcacgggcgccgatgacgcggtcccgcgggaaggcgcgtccgatctcccgcagcgtggcgcgggtgcgcgcgtagggggacacgtagaagtagaccttccagttgccgccgccgctcgccaccacgtcccggatgccccggcccgcggcgcgcgcctgctcggcgcccagcgccgtgagcgggatgcggtagtcgggggtggtggtgtacgctgacatgtcgaggttcccctggctctcgccgtgccggaccaggatgatccgcttcggcagccggcgcgcgcactgcgggtggtgctgccgcgtcatctcgcagaaccggcactcgctgctgggcgagtcgacactgtcccggccggggtggtggccttcttctccttcctctgcttctcgaggggtggcgatggggtggcgcgcagccgcgtcgtgtgacatgggtagctggcgccggtgccgggatatataaagagcaggcagcagggaggtggttgggtgatggaatggaacgcaagcaaacaacttattttgtggggttcggggcagcgcgatgatcaccagctggagccatggaggaggttgtgaaacaggccgcgggatccggcctcgctggcagcctggaaagcaggcttacgccgcaagtcacgtcaccacctcttgcctactgcagatgttatgtgcagaacttttctgtcaacaagaagttgccttctttattccaagatggttaatatactctgaaagaaggttgaaagcataaacatgctttacttcttttaaaactgggagtccaattgacaaaatatctcgtcgtcgttgtcgcctgtcgcgtcacgggaggagcagga

SEQ ID NO: 13385 - DNA, 244 bp, Setaria italica
  Peptide Sequence Number=SeqID_79359
gccatcactcccagctgcaagccacacatatctccctcaacaccagcatactaactaccaaaaaactgcacacgtcctcaacactaacaatcaatcagctggaacctcagcatcaggtgacaaactgcgacgtgcgtaacatcattaaccagaacgaaaccatggcttacaagtacggcctcccaattatggtcactaacacacgcaaaatcccatctaccacgcaaacaggacagcaggaaag

SEQ ID NO: 13386 - DNA, 471 bp, Setaria italica
  Peptide Sequence Number=SeqID_79360
cccccgaggccccgagcgcttcccaactcgtcggccgcggcctggcacgaactccggcggcgatattcccctcgaattctgctcttcccggaggcgcttctgcggtgaggtctgtgtggggggcatggcggcctgagtatccggctggggctcggatgaaggagcggaagccggcggcatcctcctccgctctcgcccggatcctcgcatcctgcgcatcccaggcaaaagattatgggagatgcatagcttcaaaggtccctgagattgaacataatatgtgttctaaggagtttctagcgctcagagcatgcatgcagactgtggtaattttctctgccaacagattattattattggtccaattgaatcataaagttagatgcatgtacttgagtgcccagattgtttccaagtgatcatttcatcctaaataagttaatcacctactagtagacgaactagaagtta

SEQ ID NO: 13387 - DNA, 374 bp, Setaria italica
  Peptide Sequence Number=SeqID_79361
ccgggtgtcggtgcaaccttaagcaaagggtttaatcgtggattggggacactaactgcaggagctcttgctctagcggttgcagaattgtccaaaaacctgggaaaattagaggaagtgattcttataacgagcatcattgttgttgcctttgtcacaactttgacaaagctgcatccgaagatgaagccatatgagtatggattccgtgtgttcttgttgacattctgttatgttatggtctctgggtacaacactgggaagttcactgatacagctacaagcagatttatactgattgccattggtgctgctgtcagtcttggaatcaatataggtatttacccaatctgggcaggagaggatttgcacaa

SEQ ID NO: 13388 - DNA, 515 bp, Setaria italica
  Peptide Sequence Number=SeqID_79362
actctctggttcatacaatgtgatgcaaccaatctgaaaacatggttactcaccagatgttgcaggggaatgtggggagagcctcaccagatgcccgatatgtcgacaccaaaatagtgtttctttgtgaatttatagagtttttatgatacatggtgtgagcaggtcctcgagccagtatttggttgctatgtttaggatgcagattgtacaatactcccatagtattatcgcattttttgagttctgggattcttcgtgatgaccatacgtgctgactaaatgttcctgtagatgaagatattgtatgaaattacaagctgcctaaattctcacttgaaatatgaggaattctgctagaaaaaacaaaattctttgtcattatttggttaggtctcgctttccgctctttatgggacctgttactttcatgcatgatcttcatttgttccatttgtaagttgcaaatgtgcatcagttagcaaattgatttacatttactatggtcatagggt

SEQ ID NO: 13389 - DNA, 271 bp, Setaria italica
  Peptide Sequence Number=SeqID_79363
gtcatgaggaccctcgccgtcgcaggccccacccgggcgccgccttcaccgcccgccaccgccgtcttcacccctccgccgcggacagggactcgatttctcagcgctgttggcgatgtgagagaactcaagaccgctcctttgggaactctctaaggatcagccgccttccaggaacgccgcacagagatgtcggaaagaatttgctcacaccaactgctgctgtttctgttgagcaagccgaagctactgctgaccttccgaaaggtga

SEQ ID NO: 13390 - DNA, 309 bp, Setaria italica
  Peptide Sequence Number=SeqID_79364
ggtttctttgggtcctatgcggttgcttggaacttggtttgtcacattgggtgcattggtagcttaagatgagatctgaggcatttggttcggcaacgggttgctcatgaagggtggtactctttgcatctgactgaggaactgcgccgcaggtggcatacaagctgaactcaagcccatgcttatcggaggcatgagttggtgagcacccgggagcatcatcggcgccatcccagtactcatccacatgatctgaacttgcatttgggagggacttcaggtactcaattgcctcatctagtatcgacg

SEQ ID NO: 13391 - DNA, 625 bp, Setaria italica
  Peptide Sequence Number=SeqID_79365
cggctcatctgctccgctcatcgtctccctcctcgccgtctcgagccctgcgctgcgccctttctctcttctgccggaatccgaatcgacaagctaatcctgtccggcgacctcggtctctcttctcgcccgcaggtcggcaagggcgcaggatgatccggttgttctgctcagtggctgcaccagcacctaggagcgcctgatgttaaggttttggatgcttcctggtacatgccggtagagaacaggaatccatgggaagaataccaggtggcacatatccctggcgcagttttcttcgacatagatgccatagtcgatcggacaactgatttaccacacatgttgccatcagaagaggcttttgcagcagcagtttccgcgctggatataaaaaaccaggataaagttattgtttatgatggaaaaggattctttagtgcgcctcgtgtttggtggatgtttagagtttttgggcacaataaagtttgggtgctagatggaggtttacctcagtggcgagcttcagggtttgatctgggaagtgccagccctgatgatgcagtactgaaatcaaaagctgccagtaaggctgttgaaagagtttataacagtgaaccgacaa

SEQ ID NO: 13392 - DNA, 718 bp, Setaria italica
  Peptide Sequence Number=SeqID_79366
tctttaattttagttttaattacttaaaatttcctttgtacgttggtcttgcctcacgggtccaatcggctcatctgctccgctcatcgtctccctcctcgccgtctcgagccctgcgctgcgccctttctctcttctgccggaatccgaatcgacaaggtcaactcacctctagtcttggccttaatggtggctcgctgccggcggctgagaagctgatttatttattctcttttgattcatcttcttgggaggctatcatccagcttgggaagaaatctcacccgcgagcttctttttctagctaatcctgtccggcgacctcggtctctcttctcgcccgcaggtcggcaatggcgcaggatgatccggttgtttctgctcagtggctgcaccagcacctaggagcgcctgatgttaaggttttggatgcttcctggtacatgccggtagagaacaggaatccatgggaagaataccaggtggcacatatccctggcgcagttttcttcgacatagatgccatagtcgatcggacaactgatgatgtttagagtttttgggcacaataaagtttgggtgctagatggaggtttacctcagtggcgagcttcagggtttgatctgggaagtgccagccctgatgatgcagtactgaaatcaaaagctgccagtaaggctgttgaaaggtgattatactaggtcggttcactgttat

SEQ ID NO: 13393 - DNA, 547 bp, Setaria italica
  Peptide Sequence Number=SeqID_79367
tcctaagtatttgtaagtcgtcttttgggtaattatttctattgtcctagtctttcttttttctttctttattgtccttccttctttgcgacgttggtttatgagcgtcagaatttgaactcagattgctgttatgatctccaggatgatttggtactcttctattcttaaatgattcgccgcttgtgctgttagaagtattgcttgagcttgatatcacacgtttatctgcagatctggctctatttggtgcttaatgagcgaggtggtggcataagaactcgagcatctctctgacgctggttcttttcatcgcttgacatgccagatgctgccctacccgcactggaagctggttccttagcacttttatcagtccactcatcatcagcctcttcatcacttgaacttccagacataaagaagtcatcatcactcacatccaagccccacccctcctccgctgtctccgcctagggttccggcgatggcgcacggcggctacccgcgccgcggcgctgccgtccgccggcccaagtcctcggcc

SEQ ID NO: 13394 - DNA, 1486 bp, Setaria italica
  Peptide Sequence Number=SeqID_79368
gtatgcgaatcaggacagctgggggacaatgcaacagacgtatcacgcatacaggtcatgagatctcagagtggctgggagcagccagcaggcaaccaattcacagcctagcaagtagcagctagcaaggatgaaagcatccccctttcggacctactagacacagggtgtcctgaatccatggagctgtccctattccaccattccagtaccatgagttaatgggagatcatgaatgaaaaatgaaatttcgcgagaaaaccaaacgagcatttggtggaatggcaaaatctaggcactgtaagtgatatccgtgaacaaatggatgcagaagtcgttttacaccaggagagagcatacaaaatcatcaacttgcccaggcacaccacacatactgtgtttttttccctttccaacaaattgaccaggctgaaagtcaaatattgctgggaatctcaagtttccgccccccaagattgaagcgctttgggaatattcatgccagcttctttttcttcttatgcctcctcttgcgacgtggtttatgagcgtcagaatttgaactcagattgctgttatgatctccaggatgatttggtactcttctattcttaaatgattcgccgcttgtgctgttagaagtattgcttgagcttgatatcacacgtttatctgcagatctggctctatttggtgctaatgagcgaggtggtggcataagaactcgagcatctctctgacgctggttcttttcatcgcttgacatgccagatgctgccctacccgcactggaagctggttccttagcacttttatcagtccactcatcatcagcctcttcatcacttgaacttccagacataaagaagtcatcatcactcacatccaaggtatcatcatcgcttgctgtctcttctaaatcttttccgttcgcagcagcagccatgagattctctttgatctgtttacgccacttatccacatccgcgttattccctccagcgaatagtgagacatatttctcattctttgggaaaaatctaacatattcaagatcttctcgcaattttgacagcttattgctgacatcatcaccatttgaacgttgctgcttctcaaggcgccgtatcatcctctcaatctttcgcctctcaaagaattttatcttcctatctctcaactgtactgtccgttgaacagccagttgattctgaagctcttgctgcctcttcagttcttcaagtttcttctcttgagcaatcctaacgtcatctggaaggtccttgcggaggaagcgctctgtggagcggatctggttcttgagggaggcggtcttggtggcggcggcccgcttccgctttcggtcggccacggcggcggaggccgaggacttgggccggcggacggcagcgccgcggcgcgggtagccgccgtgcgccatcgccggaaccctaggcggagacagcggaggaggggtggggcttgg

SEQ ID NO: 13395 - DNA, 536 bp, Setaria italica
  Peptide Sequence Number=SeqID_79369
ctcgagacgctccgcgccatccagcgccgctctcgcactaccagtccagtacctccacttcgtcaccgaaggccatgaaacctgaggcgtcacagggagtgcacggtgaacttttcgtggacaggaatgatgacgagtctgctgcacagaagcagaatgcaaaggctcataatcggactgggtttccaaaagccgcgctattgttagtggatgctctcaagaagaacagagcatgccagaagttaattagaagaaaattgataaacattgaagcgaaaattgaagaaaataaggatcttagggatcgcgtaaaatgccttttgggttatcaattaagctgcagaagatcagctggcagatctttatcccagaaggaggatcctcgtatcagattgatttcctctaggaaaccaactcagctttctgaaaagaaagatgcctgcactatttcttggcccagctgagaatccccgtgtttcaaagtatagaatggtactggagcaattcccgatgtcatttaaaaagcagccatggtc

SEQ ID NO: 13396 - DNA, 327 bp, Setaria italica
  Peptide Sequence Number=SeqID_79370
ttgaatggatccgaaagatgtgtcaaaagattgtcgatggggccaacatgagttacagatgcttgcaccatgaagccaatgaactgagccattgccaagctaccattcttgatttctttcaacttctcttcatgcgcattctctatgtcttttgcaagtcctaacggattaaacagtggacccccggggtagctgccgaaatatgtaaattgtaataagtgtggcaaaagcaaaggcttgacaatgtcactcaagtacataatgctccagcacttaccctggctgtgaacctacaagtgcagcctctagccctatagaaaggttacc

SEQ ID NO: 13397 - DNA, 286 bp, Setaria italica
  Peptide Sequence Number=SeqID_79371
tggaagggctcctcctcttcggagaagggaaagccctacaattcctaattcaaatttatcctttcttaagtacttgagtaataataattactgctttcgacagttttatttgctctgtagttgcagagggagtcagattcagtaagaacaaaacggttgcagaggcaagttcgcggcgaagtagcttacgtcagttacaaggattccggcgacccctgccatggcaaaccggcagtgtacgagctcggcctgaacgtaccacttcaagctcgccggttcctccccg

SEQ ID NO: 13398 - DNA, 1094 bp, Setaria italica
  misc_feature (1)..(40): n is a, c, g, or t
  Peptide Sequence Number=SeqID_79372
nnnnnnnnnnnnnnnnnnnnnnnnnnnnnnnnnnnnnnnnttttttttttttgtcttcgttatttttttttttttgtctattgaagttccatattcagttttcattattgaaaaatttgcaaagaggaaagctaaaataatgcacttcctgttagaaagcattgtgtgttgtttttgtgccacagcaccgtacagtgaaaagcagaggtatggggacagaattctcaggaagaggagagtgtgtgaatgatatttttgttgaatggatccgaaagatgtgtcaaaagattgtcgatggggccaacatgagttacagatgcttgcaccatgaagccaagcatggctaccattgccagcctcccattcttgatttctttcaacttctcttcatgcgcattctctatgtcttttgcaagtcctaacggattaaacagtggacccccggggtagcctggctgtgaacctacaagtgcagcctctagccctatgaaggttccttcctctgcttgtgatcctggattgatgaagtccatgtacctcttggtttcagcgaatcccatcaggagaagctggacgaagaagagtgacgtggtgttggcgaagtcaaatttcgctgcacctgcctcgaaccacaccggtaggtcccggatccctgatacacggagcaagtcagttacaaggattccggcgacccctgccatggcaaaccggcagtgtacgagctcggcctgaacgtaccacttcaagctcgccggttcctccccgagccccaggggatcgaagccgtagtcacccggtagcgtgccgtcgaggtgagcaggcgggtccagtccgggcagccaggtcgcgcgctgggcgctggctcggacgacgacccgagctctcggcgacggcgcacggtgtgcgggcacggcgagcgtgcgcctgctccagcctgtgagcgccctgggcctggaggaggctgcgcaggtgtgcagggctctcccatggctgttagctcctgttacggcggacgccatggctggctgccaccggagatgttgcttgccggcggccggactacagcctgcgatggcctttcctctttgtttgac

SEQ ID NO: 13399 - DNA, 2192 bp, Setaria italica
  misc_feature (2143)..(2192): n is a, c, g, or t
  Peptide Sequence Number=SeqID_79373
ctgatgagattgaggttttcaaaatccttcaaaagtgcctcgagttaagagactcttatctttttagagaagaggttgctccatgggagaaggaagtcataaatgacccctgtactccaaaacctaaccccaacccattcacttatgtgcctgaaccaaagtcagagcatgtcttccaaatggttgatggtgttgtccatgtttatgaggacaaggattatacagagagtatttatcctgtggctgatgccacagccttcttcactgacttgcattatattctccgagtgacggctgcggggaacacaagaactgtctgccataatcggttgaatcttcttgagcataaattcaaatttcatctgatgttaaatgcggatagggaatttctcgcccagaagactgcaccgcatcgtgatttttacaatgtcaggaaggttgacactcatgttcaccactcggcatgcatgaaccaaaagcatctgctgaggttcataaagtccaaactaagaaaagaacctgatgaggtggtcattttcagagatggtacttatatgactttaaaagaggtttttgagagcttggatttaacagggtatgatttgaatgttgatttgctagacgtccatgcagacaaaagtacatttcatcgttttgacaaattcaacctaaaatacaatccatgtggccaaagtaggctcagagagattttcctcaaacaagacaatctcattcaaggccgtttccttgctgagttgacaaagcaagttttctcagacctttctgctagcaaatatcagatggctgaatacaggatttcaatctatggaaggaagcaaagtgagtgggaccaacttgcaagttggatagtgaacaatgaattgtacagcgaaaatgttgtctggttggttcagattccacgcttatataatgtttacaaggaaatgggtattgttacttcattccaaaatcttcttgacaacattttccttcctctgtttgaggttactatcgatccagcttcacacccacagctccatgtcttcttaaagcaggttgtagggttggatctggttgacgatgaaagtaaaccagaaaggcggccaactaagcacatgcccacacccgaacaatggaccaatgtgttcaaccctgcattttcatattatgcgtactactgctatgctaacttatacacactaaacaagctgcgtgagtcaaaggggatgaccactatcaaattccgtccacatgctggggaggctggagatattgatcacttagctgcgacatttcttctttgtcacaacatatcacatggaatcaatttaaggaagtctcctgtgcttcagtacttgtactaccttggtcagattggtctggcaatgtccccattgagcaacaactccttgtttcttgattatcatcgcaaccctttcccaatgttcttccagcgaggtctgaatgtctcactgtctacggatgatccgttgcaaattcacctgacaaaagaaccattggtggaagaatacagcattgctgcttcgctgtggaagctcagttcttgtgatttatgtgaaattgcgaggaattctgtctatcaatctggattttcacatgctctcaaggcacactggattgggaagaactacttcaagagaggccctgctggaaatgatattcacagaacgaatgtaccgcacatcagggtccaatttagagacatgatctggagaaatgaaatgaaactggtttacctgaacaacaacatcttaatatctgaagacctggaccagtaagatgtctgcccttgtgtatatcccatatttgctgtgggaagcatacttcatgtttggccgctggaagtaggcatgaggagctatgtgatctggagtgcctcagccggcaaaactcccataaatgccccaagcacaccgaaggatagaatacctaaaataataatgaggcgaagtgaagcggcacacaggtgtgtgctgggttgcgttatagagggtgcattgtgaggtgcaacttgtaaagaatgtaatcgacagttgatgaactccggttagactttaccatgcgaataaagtgctgccgcttgccctgaggaaattggaaaataaaacgaaaaaaaaaaaannnnnnnnnnnnnnnnnnnnnnnnnnnnnnnnnnnnnnnnnnnnnnnnnn

SEQ ID NO: 13400 - DNA, 295 bp, Setaria italica
  Peptide Sequence Number=SeqID_79374
catggctctgctgcaggcggcggaggccgagcttgacggggccgaagaaggagctggagagtatcaaggcggggggggttccgagttcatgacgtccatggacagcgcgcgcaccgagatcatgcgcgtctccgaggaggtgggccggctcaaggcgcaggagaagaaggcggacgcgcaggtgcagaagctgaacgccaagctgctgaaggcgaggtcccggttggaggccctcacggcgaccaacgagcgctccaaggcgatcgtctccagcctgacgtcggcactgcagcag

SEQ ID NO: 13401 - DNA, 422 bp, Setaria italica
  misc_feature (414)..(414): n is a, c, g, or t
  Peptide Sequence Number=SeqID_79375
tccagctcgccgagcaggtaataaagtggtccgacgaggcctacacgttccggcaggagtgcatggagctcaaggccaaggtcgagcgcctcgccggcctgctccgccaggccgcgcgcgccgacctctacgagcgccccgcgcgccgcatcttcgacgacaccgagaaggcgctcgacaaggcgctcgccctcgtcgacaagtgccgcgcccacggcctcgtccgccgcgtcttcaccatcatccccgctggctccttcaagaagatgaccaaccagctcgacaactccatcggcgacctctcctggctcctccgcgtctcctcctccgccaacgacgacgacgacttcgacgcccacatcggactcccgcccatcgcgcagaacgagcccatccctcttcctcatctgggancagatccg

SEQ ID NO: 13402 - DNA, 282 bp, Setaria italica
  Peptide Sequence Number=SeqID_79376
tggaacggattgtgctctcatccttgtggaaggagctttcaagagcctgaactctggtaagctcctcttctacttgcctgagcttctcagtcagttcacttgatccactggccagcactgtattctcatcgtccaagttctgcagggaattctccagctcactgttttcccgacagagtcgatctatctgggaggtttgtgatgaaaccataagctccaagtcaacaactttgttgacaagctcatcaattctctccgtaacttctgccatggagatgttgc

SEQ ID NO: 13403 - DNA, 616 bp, Setaria italica
  Peptide Sequence Number=SeqID_79377
cgagagggtgaaggtggcgagggaggcggagtcgacggtggcggcgatcatgtgggggcggaagatgaggtagaggatgaggacgaggacgccggcgaagacgaggagggagatgaggatgctgcacaggcatcaggttccggtgctgaagaggtacccagccaggctctcggttctgtcactgacctgcatcttcgggctcctccagttcctggtcatcgcggccttcaccgaggaggacctgagccggtggaaggtccgctccggaggggagctcttcaccatcctatacgctgtaagcatcaccaacaaaacaaagaacatgtgcagtgtaactcctgtttgatcttgtactgaagaaaacgccatcgatctttttcccgtagggcctggtggcgtctggcgtcgcgttcgctctgcagatctggtgcatcgacaggggaggcccgctcttcaccgccgtcttccagccggtgcagaccgtcgccgtcgccgtcatggctgccgccatccctcggagaccagctctacacgggagggtaagggcacacgtgcgctcgtacagatacattcgcgacaacaatgagataacaggatcacatggatctctgacaac

SEQ ID NO: 13404 - DNA, 919 bp, Setaria italica
  Peptide Sequence Number=SeqID_79378
ggccgctgtcctcaggcttgagcaggtcgacctgagcaggaggtatggggtggccaaggttgtgggcacggtggtgagcatcggaggggcgaccgtgatcaccctctacaagggcctgccgctgttccatcacaatctcaccatcaagtcactcctgacgctgtcctcctcgagccccatcctcaactggactctcggctgcgtcttcatcctcggacactgcctctcttggtccggatggatggttcttcaggttccggtgctgaagaggtacccagccaggctctcggttctgtcactgacctgcatcttcgggctcctccagttcctggtcatcgcggccttcaccgaggaggacctgagccggtggaaggtccgctccggaggggagctcttcaccatcctatacgctggcctggtggcgtctggcgtcgcgttcgctctgcagatctggtgcatcgacaggggaggcccgctcttcaccgccgtcttccagccggtgcagaccgtcgccgtcgccgtcatggctgccgccatcctcggagaccagctctacacgggagggatcattggagccgtgctgatcgtaatcggcctgtacttcgtgctgtggggcaagagcgcggagaagaagaaggccgccatgaaccaccaggatcaggagcagggaggaggaggaggagacatgacgaggcacctgctcgggggagacggcgatgcttcggcgaaagaagaggaggcgccggccattgacatgctggcgtgacgatcgaacgatcatccagtcgatcgagggcatccgcagttgtgttgcatacttgcgtttgggattgtacgagatgtgatctcaactgttccattcaggcaaccgagaacaagtgtgcatgggttgccggtgtggaacagtggtcatgctgcc

SEQ ID NO: 13405 - DNA, 397 bp, Setaria italica
  Peptide Sequence Number=SeqID_79379
ggagcggcttggggcgcggccacctcgcgtggtggtagtacgtctcagcgccgccggggtggaccaccgtggcgacgcagtgcttgccgccggggtcgaggaacacccgatgcaccgagtggtcgccggagcggccgctcccgaggtcgagatcgtgggcgtcctcgaaggtgtagtcgtggcggacgagccagccgcgggaggtgccgaggacgatgacgtcgctgccggcggccatggaggtgacgacgccgtggccccgcgcggcctggcgctccaaggggtcaacggagaagagctggccgctgccgctgccgccgccgccggcgtccatggctagcgagctggtcggggcgatgcgagattgggctcaggcagagggcgtagttgagggaga

SEQ ID NO: 13406 - DNA, 378 bp, Setaria italica
  Peptide Sequence Number=SeqID_79380
cgacgacacgccgggcgccagggggatgctcacgcgcgccatctgcaggagcggcggggccagggcgcccatgcggcggttcgtgggcggcgccacggtagcgttcctgaagaggtgggtcggaggggacggcgccgcgctggacggcatcagggcgcgcccggagcaggcgcccgtggcgctgtccgtcgtggagttcctcggtgacgaggcgatggcgcagatagcttagaatctaatccttagattgtaggacctgtcatctgcaggactgtgttgtggcgacaggaactcgacacgtcgaaattacagcttgaaaagatgaaatggatgtgtgtgcgtagatttttgtagaaaacggatacgagatgtgtagat

SEQ ID NO: 13407 - DNA, 793 bp, Setaria italica
  Peptide Sequence Number=SeqID_79381
caatgttcttgatgaatttaatgtagacagctaggctgtgatgatagaaatgtgaattggtacatataaaatctgaaataatcagcatccggtaagcagatgaataatggccaaaaacttttgaatctgcttgtagtaatcctttgagctccccttcccctttctgatctagcagagtgggaggtccggtggaggtgcctccagagactgcagctccccaacgccgtcctccacgaggaacgccatggcgagtccccaggtgatgtgcacgtccagatggcagtgcatcagccacacccccgggttgtccgccacgaaccggatcacggcccacccgttcaccggcacgcccaccgtgttcctcatcggcgggtcgtccaggttgaacttggcggtgtcggtggcggcgtcaaagttgccgaatccctcggccaggatgtagaagtcgtagccgtggatgtggatggggtggttctcgccggcgaagatgttggtgccctgcagcaccagctgcacggcggcgccgtacttgagcctgtacaccttcgtgccgggcgccggctgccacagcgcgcggctcacgttctgcgccgtgtagtcgaactgcaccggcgggttcgccgggaagtcggcggtgaacacgccctgctgcgctccgccgtagtgcgcctgcaggatggacacggtggacggcagcacgaaggagacgttgttcatgctcgccgcgaaccgcgtgttgttgggcccgccgcacttctggccactcgagcagttgaacagcccgacgcccacg

SEQ ID NO: 13408 - DNA, 751 bp, Setaria italica
  Peptide Sequence Number=SeqID_79382
ccggttattagtacattattctgttcaataaaacaagggtgtgcagtggacacatcaacaccagaagatcaccttcgcctggatcctcttgccttgcgttcagtgcctctagtaggctttctcttggctttcggcacagcgcacttggggcacaaccaatcatcgtcaggtacagcgtccaagggagggtcgcagcagtcgatgtgcataccgatcccacaaccggtttcaccgtcctcgtcgccacagatcaacatcacttctcctctgtccttgcacccgcacgctgagcagctcaggtcctccggatcgtcctcttcatcttccgactgttccatatccgtggccatctcttgctggttcttcatgagtttctcaagggacttgttggccagatcgtttgtcttgaagagaacatgtcggtcgagggggtggccaggcttgcagacgtaatcaaccagataatcagcactgacacagggaataccatgcctgatgaattcctgaacccatgcgtctgctcttggtaagctcgctgatactacagcgaaatcaaacccggagtcaaggaatcgactgtatggcggcgatgttgctaaaatggtgccatcaccagcttttactgcgcgcttcactgtatccagcgttggtagtatgagctgtccatagacaacaatctgcattccatagaaggcaccatggcccatctgctgccttatatttcgcctattttcaggagcatcaaggctga

SEQ ID NO: 13409 - DNA, 503 bp, Setaria italica
  Peptide Sequence Number=SeqID_79383
tggtgattatttttagggatgggatcacgagttgaattattgttctccctttgtgaccagaaaccacctggtggatttaaacctgattggtatgtcagggatactgcaagaatggctagaagaagaagatatgtacgagacttcttcagatgttcatcagttggattggcacccgcatttccattgctggcatattgtctgggagctacttcatgcatgccagtgtttccattctcaataggtctcgtggcatttttattttccacctcctctatctcaatggataccataggcttctctaaagattctttctcttccttgagattgttggtggctccattatggttattggctaacaatttgtcttcgggcaagcactccaccggcatgaatatagattcatgatcatcagtagacaaagattgcccaatcatattttcaactgtctggttatcatcctaatttgtattgtcttctattggttagacataccagctatggta

SEQ ID NO: 13410 - DNA, 451 bp, Setaria italica
  Peptide Sequence Number=SeqID_79384
tttggagactactactatgtgagagatgcatgcgtgctgtccttactttttttccttgcgtaccaacctttcatgacagcccccttctctttttgttacaggattatgagtatgcaagctttaacccagttgcatacgacattgctaaccatttctgtgagatggcggctgactatcattcagaaaagcctcatatcctggactacaacaaatatccaggtattgcatcactaagagaactgctgattcttggactgttgcttttcttttgttctttataaatcagtttgcttaatcttggttcggttttcagtcttcatcatgtgctgttctcttttacataacagatattgatgagcagaagcgtttcgtcaagacctacctgagcatttctggtaagtatgagttcattgttctcattgattgtctgaatttatttgcacgattttta

SEQ ID NO: 13411 - DNA, 1700 bp, Setaria italica
  Peptide Sequence Number=SeqID_79385
gcggcggcggaggtggcggggccgcggatccccaaggaggcgcggcggctgctgcacgagctggcggcggcgtgggcggacgtggcggactgccgcgcgctccaggtcgtgccgctcaagggcgccatgaccaacgaggtctaccaggtgcgctggctcaccggggtcccctccgtgggcggcgaggcgggggagccccgcggggagagggaggtcaggaaggtgctcgtgcggatatacggcgacggcgtcgacctcttcttcgaccgcgaggacgaggtgcgcaccttcgagtgcatgtcccgccacggccagggcccccgcctcctcggccgcttccccaacggccgcgtcgaggagttcatccacgcaaggacactgtcagctgctgaccttcgcgatcctgagatttcagctcttgttgcttccaaactgagggaattccacaacctcgacatgcctggtcccaaatctgtgctcatttgggacagactaaggaactggctcaaaactgctaagaacttatgctcaactgatgaagccaaagaatttcggttggacagcctggagagtgagattactgcattgcagaacgaagtttcaggtgattaccactggattggattttgtcacaacgatcttcagtacggcaacatcatgattgatgaagagtccaacatgctgaccatcattgattatgagtatgcaagctttaacccagttgcatacgacattgctaaccatttctgtgagatggcggctgactatcattcagaaaagcctcatatcctggactacaacaaatatccagatattgatgagcagaagcgtttcgtcaagacctacctgagcatttctggtgaggaacctgatgcggaagaggtggagagcctgctccaaagcattgagaagtacacgctagccagtcatctagtatggggcctctggggaataatctcagatcatgtcaacgacattgacttcgactacaaggagtatgcaaggcagagatttgagcagtactggcagaagaagcctgcaaatctgcaatcttgacttcttgaacatgtgaataaaacacccgtggcctcaggggatccttgagggcctatgctgcgcacacaaggtgtgcaatgtcactgacaaagagagaagctgcgaaagaaaatactgacaacgacgatgatggagaaccccgtcttgggatcagggagctcttgttctacaacttgattggtttggcttcggcttcatgaaggaagaagctaggggttttggttgctcgtttgtacagtacgaaggcaaggcaacgatgataaaagccccggggttgcgtgctgtatgttgctcagtttgggtagcactgccgtggggcgtcgtgctgttgctgttgtgtggacgtggttctgtttctgtatgcttgatgctaatatagtggagattttggctgagctttgaggcaatgcgtactttgtatagtgtgtacacagctaaaggtagaataattgttggtatgagagctaatatgtattgtgccattgtgtgttgtgtctttgaactaatgagttggatagttgcactatttcctatacaaattttcaaatatgttatggattatggttatgagtggctttcactggatgagctatatggtcacaataatcccaggaatcatgatttgatacaaaaaaaaaaaaaaa

SEQ ID NO: 13412 - DNA, 1634 bp, Setaria italica
  misc_feature (1621)..(1634): n is a, c, g, or t
  Peptide Sequence Number=SeqID_79386
agaaagcgcagtcacacgtactcgagctgcctcctccctctcggctctctgcgccgccgccatggaggacgacgatgactgccctcccctcgccgtcccgcagcgagcgccgtctcctccgacgccagatccctcggaagcctctccagttggcgtcaccgtcatcaccggctacctcggggccggcaagtccacgttagtcaactacattttgaacgagcaacatgggaagagaatcgccgttatactaaacgagtttggagaggaaattggggttgaaagggcgatgatcaatgaggggcaaggtggtgcacttgtcgaggaatgggtggagctggcaaatggatgtgtctgttgctctgtaaaacacagcctggttcaagcacttgagcagcttgtgcagagaaaggatagaatggatcatatattactagagacaacaggattggctgatcctgcaccacttgtttctgttctttggctagacgaccaattggaatcatcaattagattggattctattattacggttattgatgcaaaaaacttcagggttcagattgatgagcacaaaaactcttcctcatttcctgaagcatttcaccaaattgcatttgcggatgttgtgatattgaacaaaattgacctagtggaagacaatctcgaggatttggaaaaacatatccatgatgtgaacactctggttacagtggtgcggtctgtcaggtgccaggttgacttgaatgaagtatttaacaggcaggcatatggtgccaagaattcatctcatctgcaagaactgctggactatagtaaatcaataccacctaatcgccgtcatgataacagtatttccaccttgtgcatctatgaacaggatccagtttacttggctaaggtggaatcatggcttgaagatcttctttgggaaaagaattctagtatggatatatatcgttgtaaagggattttacacatccaggactcagatcaaattcatacattacaggcagttagggaagtctacgaagttgtgccggctcgaaaatggtctgagacagagtctcgcatgaacaagatagttgtcataggtcgcaatttggatatcaatgttctacaagattcatttagtggttgcaagggctgacaatgattatcttgtttgtcttgcgcaatgttcatttttctgcaaggtcgccgtgtaatcaaatgctgaactgaaggggcccatatgggcctaacctcaacagtttaggtgctccatatatatactttgtcagtgggggaatcgtcataggaacccactattccaagattaagcgaacatctcaaagtggtcgagtaataccaatgttagtgcttctctaacgcatcatgttagtgtttttctgctgggcttcgttctgctcagttgagaatgcaagctgatgtactttgggcatggggcatgtatcctattatgagatgcactttgtggaaggatttaaattcgaggcctatgccatcgccagctgattgaaaacatgttgaatacaattatacaagggcagtggcggaaatcttgcatgaggtagtaaatgtgatacatcaggtgaatttagctttgtgaattggtggcctnnnnnnnnnnnnnn

SEQ ID NO: 13413 - DNA, 352 bp, Setaria italica
  Peptide Sequence Number=SeqID_79387
gacgatagcaacgatcaacaactgcatgtatgcatgcttcactgaaacctcgcgagtggtaagtagttcgtccagaaaaacacatactaccaaattgatgtgatcatcatccacactctgctacagtagctacaagcttcgagtagctatctactcaagcacatcgtcggcagcacaagtgagtgctgcacgagcacgtcctcgtcgcccacggtctagctgcaaccgttctgtcggcgaggccacgaacatgccatgaatctgcccgcctctatttggctcgtatcgctgcttccgggacgagcacacatatcctcgctgacaggaccgccgaacaatacctacgaccgat

SEQ ID NO: 13414 - DNA, 1233 bp, Setaria italica
  Peptide Sequence Number=SeqID_79388
cgacgacggcgcgggggagagcgcgccgccgccggtgcacctgtacacctacacccacgtcatgcacgggttcagcgccgcgctcaccacggcgcagctggaggcgctcaaggcggtcgacggccacgtggcggcgttcccggagacgtacggccgcctccacaccacgcgcacgccggagttcctcggcctcagcgccggcgccggcctgtggccggcgtccaagtacggcgacgacgtgatcatcgggatcgtggacacgggcgtctggccggagagcgagagcttcagcgacgccggcatcaagaagcccgtgccggcgaggtggaagggcgcgtgcgaggccggtcagaagttcaacgcctccgcgtgcaaccggaagctcatcggcgcgcggtccttcagcaagggcctcaagcagagcggcctcggcatctcgcccgacgactacgactcgccgcgggactactacggccacggctcgcacacgtcgtccacggccgccggcgccgccggtcgggggcgccagctacttcggctacgccaacggcacggccaccggcgtcgccccagtggccagggtcgccatgtacaaggccgtgttctcggccgacacgctggagtccgcgtccaccgacgtgctcgccgccatggaccgcgccgtcgccgacggcgtcgacgtcatgtcgctgtccctgggctttcccgagacgtcctacgacaccaacgtgatcgccatcggggccttcgccgccatgcagaagggcgtcttcgtggcgtgctccgccgggaacgacggctcggacgggtacaccatcatgaacggcgctccgtggatcgccaccgtcggcgcctcgagcatcgaccgggacttcaccgccaccgtcacgctcggcagcggcgcgaccatccatggcaagtcggtgtaccctcaggtcagcccggcgatcgccggcgggaacctctactacggccacggcaacaggagcaagcagaggtgcgagtactccagcctcagccgtaaggacgtgcgcggcaagtatgtcctctgcaccgccgccggcgacgtgagcatcgggcagcagatggacgaggtccagagcaacggcgcccgcggcgccatcatcgccggcgacacgaaggagttcctccagccgtcggagtacaccatgccggtggtgctggtgaccgcgtcggacggcgccgccatcgccaagtacatgacggcggcgt

SEQ ID NO: 13415 - DNA, 264 bp, Setaria italica
  Peptide Sequence Number=SeqID_79389
ctgcaccgccaagaattcgcctttgttcgacagacactccagcttttcattccccttctcctcgcctttgccagcggcggcgagggaggctccggccgccgcctccctgcggcggcgcatctcgacgacgcggctgtgccggttggagtgcagctccggggagaaggttgggctgctcgctggccggtactccggtacgagccgtccgctcctgtaccgcacgccgcacgcgttgcacagcgtgctgcgcccttcggggccctc

SEQ ID NO: 13416 - DNA, 371 bp, Setaria italica
  Peptide Sequence Number=SeqID_79390
cccacctccacctgcaccgcgaaccgcgccaccgcgctcgcgaacggccgctccgatgccagcgccgcggcgccgtcgtcctcgcagcgccgccccaggaggcgggccaggagggagacgcctttggcgtcgggcttcgctttcggggagcagtaggggtcgtccgcgtcggcgagcgagccgccgaggtcgtcggagcgctgcaggcagaggaggcgcttgacgaggccctcggcgaggagcgcgtccacgacctccttgcggccgtagtagccgacgcggagcgcaaactcgagcgcgagcgtgcggacgcgggggtcgggcgcgcagagcagcgcgacgagccgcgggacctcgccgcgcgcgtggag

SEQ ID NO: 13417 - DNA, 268 bp, Setaria italica
  Peptide Sequence Number=SeqID_79391
atggctgccgccattgccgccttctccctcctgctgttcctctccgtccagggcgcgtctcccgttcttggcttcacgaggagcgacttccccgaagatttcgtcttcggatccgctacctctgcctatcagtacgagggtgccgttgcagaggatggcaggagcccgagcatctgggacaccttcactcacgcagggagaatgagggacaagagcaatggggatgtagccgccgacgggtaccacaagtacaaggatgacgtcaagt

SEQ ID NO: 13418 - DNA, 701 bp, Setaria italica
  Peptide Sequence Number=SeqID_79392
ggcgcccccgtctgcctcccttacaactctgcaaaagtgaacatcaaaacatgattcagagctgctggcagcatataaaagaacaggcacaacggcgctcttccgtttcgtttcaaacgcccacaaagtctttcctcctcttggtcacctgctgatcaggtgctccgacagtttgtcccgcgccctgacaccattctcatcagctaactggcacacctgttgcctgtaattcacgtcgtggtcgcttgacgacgctgccctttgctcgtccacagctgcctcctggaggtctatgattatgttgtgcagcaagcagcagacatggattatccggggcagcttatgcttgtctgggcgccacatctccccctgaaggaacttccatgtgtccttgaatttcgccagtgtccttggagccactgttctcgcggccaagtgcctcctgttgaactcggtgttggactctgtgagatccttctcttggtatggtgtcatgagccaggaaaaagggggtaccctgcatcgccaatcaagtattccccaatttctgatccatctgataccttcagcttgctgccattcaggcgctcacctttctcgcacagtttgaaaaggccagagctgtgcaaaatgctcgactctttcatgctgccaggccacccagtcacaatatctgtgaacctcatatccgcatcgatgac

SEQ ID NO: 13419 - DNA, 886 bp, Setaria italica
  Peptide Sequence Number=SeqID_79393
gtaaaagggcgaggagggcgggcggggggcgcggcggagggtggcagttgggcattgaggatgtcatcgagtggctcgggaggaggcggtggtggaggaggaggaggcgatgcaggtgccgcaaggcctacaggtggctgctgtgacaatgcagactccagttcggcaaaatctcggagggtggctcctgtgttgcggagggcgtgcaggtacgcaatgtgcgcagctgcaagctcaggacgtcggcgcaccagctgcttcatgagctgcctcctgtccttgcacctcctcacgggctcctcattatccactttggagttggagcaacccatctgccaccaacgagcacaaatttcccaccgatggcctcaggagaatgcaggatgcagcaccaactggaactcccaatttgataccttctcttggctcgatcaaagttgactggaattggtaaaaatctgcactagaattcaagagtgcagacactatcgagccacagctccaaatcatggagcgcgcaaatgaaacaaaaatttccggatgggcttccctgattcctgctaaattcactgaaattgcccccaaattcgcctaaaagtcgcggccaagaaattgctcctcctctcgaacaagccaaacaaccggtcacaaaaactaccaatttccttgcatcaacattcgatggagctggaacttaccagagtgtgcttcgatcgaagaaacgctccgcggtgagcaaccttggccggcttggaagctaagcagggctgaaaaaagaaggatctacacaagcggaggagaagaatatgccaagataaagaaaagagggaggcgctggtactggcatcatgtgattcttacgcggacgcctacacccatccctcct

SEQ ID NO: 13420 - DNA, 364 bp, Setaria italica
  Peptide Sequence Number=SeqID_79394
tgatgctgcttctctgagttctgcaccttttttatgttgaatcatttaatgtatatctgcttgctgattcaatgggtaatatttttgcttagataaatctagatcacagggtggatcagactctaaggatataattatccatagggatgggaacagtcaaaatattgcagcacagactttcacttttcgtgaacttgctgctgccacgaagaatttcaggcaagattgcctattaggggaaggaggttttggccgtgtatataaaggacgtttggagaatgggcaggtaagtctctctgaaaccatcttggcacattggcatgttgtctgtaatgctaagtcctctcaattttgggtcttgagt

SEQ ID NO: 13421 - DNA, 451 bp, Setaria italica
  Peptide Sequence Number=SeqID_79395
tgctgtgtgtattagccagacccatggatgaagcttgctgattgaaaagttgaaaactgtaagattaagaaggaaaagttgaaaactgtaagatcaaaactgcagaaagaaaaagataatgagaaaaaagaaacaacaacactcagaaggctctcaattcgaacacaagaaatgataaccttagatggttacttttttttctcttactatgagtttagtttcatcgtctttatatttattccattcttccaattcttgggaatcgcaactttctggtctatggtctagtaactgaggcgtatccttttgtaatatagatctgccaaaagataaagaagctcttgattggaacacacggatgaagatagccgctggtgctgctaagggcttagagtaccttcacgacaaagccagccctcctgttatttacagggatttcaagtcgtcaaac

SEQ ID NO: 13422 - DNA, 575 bp, Setaria italica
  Peptide Sequence Number=SeqID_79396
caagtcgccgacgccaaggacccgcgcaaggacgggccgccggatcgcggggtggccagggtcggatcagataaatctagatcacagggtggatcagactctaaggatataattatccatagggatgggaacagtcaaaatattgcagcacagactttcacttttcgtgaacttgctgctgccacgaagaatttcaggcaagattgcctattaggggaaggaggttttggccgtgtatataaaggacgtttggagaatgggcaggctgttgctgtgaagcaacttgatcgtaatggtctccaaggaaatagggaatttctggttgaggttctcatgctcagtctcttacatcacactaacctggtcaatctaattggctattgtgctgacggtgaccaacgccttcttgtttatgagtttatgccattggggtcactagaagatcatctgcatggtttgtgtatcttccctgtcatctagtcttctgaaattccatgagtgcctgtagaaacgttaaggaaagcatcgtgttactctgtaggagtgccatgcttcattcttagtaacttagttta

SEQ ID NO: 13423 - DNA, 1007 bp, Setaria italica
  Peptide Sequence Number=SeqID_79397
accgaaggaaatttcctaaaatggctgatcctaagcttcagggccgcttccccatgaggggtctatatcaggccctagctgttgctgccatgtgtttgcaagagcaagctgccacacgccctcatatcggggatgtcgtcactgccctctcatatcttgcttctcaggcatatgacccaaatgcccctgttcaacacagccggagcaattcatctacccccagggccagaaaccctgcagggtggaacgacgaccagcgcagtgtgcggtcaccaaatcatcattctccagacctgcggaggagagacgctgccagggcatcaaagtatggagcagaggttagccgaactagctctactggcggttctggtcggcggtcaggattggatgagatggatatgacaggttcacaaatgggtagtccagctcaaactggaaggagaagagaaactccaagggctgctgctgacaggcagcgtgctatcgcggaggccaaaatgtggggggaatattcgagagagcgatcaaatggccatggtagcttcgatagcacaaatgagtaaagccgacaggtttctttccaggcatcacttcagaagaggggtgagttcgagttcacccaccatcaccaaaagggatccggtctcggatacatgtcaacggttccgctcggtcccattatctgtgaataaggcgtttcttgctcttttctgcatcctcctggcgtccattcgttgcgaatgtgattgtgttacatgcttgggtggagcagaggagcctgtaggattcagttgaagagggtagaattgagaagagagggtgcacagagtcgcatttgacgagtgcgttttttgcggttaaatgatataagcatatgcatgctcgatttcttctatgttgtgaatgtataactcggtgtcaggcttggctgcctgagcttctttgtgaattccggtttggatatgtataacaggctatgatgtttagaaccaaaaaaaaaaaaaaaa

SEQ ID NO: 13424 - DNA, 1490 bp, Setaria italica
  Peptide Sequence Number=SeqID_79398
actgtgttttctcttgaatgtacactcgcagtcgtcctggatgactaaccaaataattctacttgtgtacttggatcagtcctggatactaacataattctacttcccaggctgttgctgtgaagcaacttgatcgtaatggtctccaaggaaatagggaatttctggttgaggttctcatgctcagtctcttacatcacactaacctggtcaatctaattggctattgtgctgacggtgaccaacgccttcttgtatatgagtttatgccattggggtcactagaagatcatctgcatgatattccacctgataaggaacctctggactggaatacacggatgaagattgctgcgggtgctgccaagggcttagagtaccttcacgacaaggcaagtcctcctgttatttacagggatttcaagtcctcaaacattctacttggtgaagggtttcatccaaagctatcggactttggccttgccaaacttggccctgttggtgacaagactcatgtttcaacacgtgttatgggaacttatggctattgtgccccagagtatgcaatgacagggcagcttacagttaaatctgatgtatatagcttcggtgttgtgttccttgaactgattactggccgcaaagcaattgacaacagcaagccccatggagagcaaaacctagttgcatgggctcgtcctctattcaaggaccgccggaaatttcctaaaatggctgatccgttgcttcagggccgcttccccatgaggggtctatatcaggccctagctgttgctgcaatgtgtttgcaagagcaagctgccacacgccctcatataggtgatgtggtaactgctctttcatacctagcttctcagacgtacgatccaaatgcacctgttcaacataatcggagcaattcatctactccgagggctagccgaggtggcgggagcaatgaccaacgccgtctccgctcaccgaatcaccattctccagatttgaggagaagggaagcaaccacaggaccaaaatatgaagctgaggttagcaggacaaattctggtagtggttctggtcgtcagtctggcttggatgacgtggatatgacagtttcgcaattgggtagtcctggtcatggaggaagaaagagggaatctcctaggactgcggaaaggcagggtgccattgcagaggccaaaacatggggggagaattcgagagggagaaattgactaaaatctcagggcattgaaagtatgaatgagcagaactctgaagcagaatgttcaatccactcatcattcaagaaaaaaaacattgatgagttccttgccagcaccaaacaggacgattaggaacattgcatctgttccatcttggtcccttggtcatgtgaatagagctttcctttttccgctttcctggctattgccactgcttcgcagcttctccatacaaatatcaccaccaccaccaccaccaccacc

SEQ ID NO: 13425 - DNA, 1397 bp, Setaria italica
  Peptide Sequence Number=SeqID_79399
gtgcgggtccccaaagttgaccttcctgtgcatactgaagggccctctttccttctaccagaaactaggagattttgaacctcctgagcagtagcctgaatctggctttccgaaggaagattcctcatgcaatggactccataccctttcatatcagcactgctcttacaagatgacagaagttttgtaaccgccatatctaggccatctatactaacctcctgtgatgggtcagacccaaagggtgaacggagttttccatagtgttgacacagtattttcaacaacgaaataagcaccttctgaacatcccctctctggaattcggtcagagaagattcatatactgcaatcatatcatcaagccatttattcacatcctttgatgcagcactaccaccaacaagaggtccaggaataggttgacgacacaaagcatggaagtaactaagcgcactgccattagccacgcttgaatgatcaatcttatcagcaacaatttctgaaatattatgaactgacaccatccgaccagaattgcccttatttccgctgtcaaagtttgcagtaatggagctcatttctttcagaactactagccttcccccaaacccaaaggtgaccacggcatgtggtgggcgtccagctgatgatctctgctcatgtggtgagaaaccaaactgttgggatggaccatttgtaccaatcagttgctgctgagcaaagtccattgctgtctgagtgcccccatagttgtttggcacatatgtatgtgcagaggagccagcatgcgtttgtgtattgtacatgctctcctttggaacgaagtcttgtggaccatttgaattaccatacccaactcttgttgaaggttcatatgccatgtggccagcctggtgatctttaggaggttggaattccttgtggccagtctggaaattcgttgaagatgcaaacgctctgtaccctacctcctgacttgtagaatgctcagaacccttgtaccaactctggttccctgtaaaaggtttgaacccctcataactagcctgattgccttcactgccagtgtattggcctgtagaaggtacaaatgtgtctatatgaggcttataatttacagaagattgcaatgactcagcattggcctgctgcccaatctgattctcagcctgttgattggaactataggaactacccagcaagctattacctcccgaaacatcaggctgcatggtgttgcccaatgaatccggttgccactggctctgctggccgtagctacttgcataagaatcctgggtgcagggagctagactatggcctgcccctgcgaacccatccgaggctgctggagtagttgcagcttgcgcaacactttgttggtatgactcgag

SEQ ID NO: 13426 - DNA, 385 bp, Setaria italica
  Peptide Sequence Number=SeqID_79400
gaattcttgtcaatagatactaatgccaactattaacgtcatttttgttctggataatacctgtgtttttcttcttcatagaagtcccattcattttataatacatacatattgcacatgggaattatacaagtggacactggaaaacgtttccctacttttattattattccactcgaatcaacagtaatcctgaagtccacctccctgattagaaattaagcaggcacctcagcgacttgccttcctccagcaactggaaagccttgttgatgtccgagaagggcaacttgtgcgttatgaagccatcgaagttgatattaacactcccgttgatgcacttatcgacgaggtccggcagctgggacttgcccttgaagtcgcc

SEQ ID NO: 13427 - DNA, 531 bp, Setaria italica
  Peptide Sequence Number=SeqID_79401
cccttactgaataaaatgtctcaaatcgcacacattttttacaatagatagcaccgatgcacatgtgttatacaactcagcactggttaaaaaaactctacatttatttttgtaacataaacagggctaaactctccatcagaaatggagcacgcacctaagtgacttgccttcctccagaagctggatggccttgttggtgtccgagaagggcatcttgtgcgttatgaacccatcaaaatttaccttcagctccccactcatgcacttgtccacgatgtcaggcagctgggacttgcccttgaagtcgccgaagacacagccggtgatccgacggccgtcgaagagctccatcgggtgcaacggcatcatcttgggtgtcgcatggatccccagtaccaccgtcaggccccaaccatcatgtgtggacaggaaagcctctctcagcacatcattaatcccggtacactcgaaactgtagtcgacgcccccatccgttatctccctgatcacctcatggaccggtttgtc

SEQ ID NO: 13428 - DNA, 889 bp, Setaria italica
  Peptide Sequence Number=SeqID_79402
ccttctgaataaatgtctcaaatcgcacacatttttacaatagatagcaccgatgcacatgtgttatacaactcagcactggttaaaaaactctacatttatttttgtaacataaacagggctaaactctccatcagaaatggagcacgcacctaagtgacttgccttcctccagaagctggatggccttgttggtgtccgagaagggcatcttgtgcgttatgaacccatcaaaattaccttcagctcccttgaagtcgccgaagacacagccggtgatccgacggccgtcgaagagctccatcgggtgcaacggcatcatcttgggtgtcgcatggatccccagtaccaccgtcaggccccaaccatcatgtgtggacaggaaagcctctctcagcacatcattaatcccggtacactcgaaactgtagtcgacgcccccatccgtcatctccctgatcacctcatggaccggtttgtcacaggccttcgagtcgatgaaatccgtgacgcccatctctttccctttggtgaacttttcggggtttatatctacaccaatgatccgagctgccccacgtagcctggcaccctcagcaaccgcgagaccaacagcaccaagcccaaatactgccactgtggaccccgtagaaacgtttgcagtgttccatgcagccccaacacctgatgccaaacagaggacaactgtggagatgccgcagctgaggaggcacatcttctccagcggcgccttggggtggaccttgacggcgcaggccgcgtccagcacggtgtactcggcgaaggtggacgtgttgaggaagtggtagaccggctggcgctcgccggacgacgcgtccaccacggcgaaccttgtgccgccgtcgga

SEQ ID NO: 13429 - DNA, 1339 bp, Setaria italica
  Peptide Sequence Number=SeqID_79403
ttaaactaattaaaactaagggtacttaaaacttacttacctaattctaagaaatggagcacgcacctaagtgacttgccttcctccagaagctggattgccttgttggtgtccgagaagggcatcttgtgcgttatgaacccatcaaaatttaccttcagctccccactcatgcacttgtccacgatgtcaggcagctgggacttgcccttgaagtcgccgaagacacagccggtgatccgacggccgtcgaagagctccatcgggtgcaacggcatcatcttgggtgtcgcatggatccccagtaccaccgtcaggccccaaccatcatgtgtggacaggaaagcctctctcagcacatcattaatcccggtacactcgaaactgtagtcgacgcccccatccgttatctccctgatcacctcatggaccggtttgtcacaggccttcgagtcgatgaaatccgtgacgcccatctctttccctttggtgaacttttcggggtttatatctacaccaatgatccgagctgccccacgtagcctggcaccctcagcaaccgcgagaccaacagcaccaagcccaaatactgccactgtggaccccgtagaaacgtttgcagtgttccatgcagccccaacacctgtggagatgccgcagctgaggaggcacatcttctccagcggcgccttggggtggaccttgacggcgcaagcggcgtccagcacggtgtactcggcgaaggtggacgtgttgaggaagtggtagaccggccggcgctcgccggacgacgcgtccaccacggagaacctcgtgccgccgtcggaggtcatggtgctcttgaaagggttgacgcggtaggtcccgcacaggtttgtcttgccggacttgcagtaggcgcacgccccgcactcgccgttgaagatggggaccacatggtcgccgggggcgagatcctccactccgtcgcccacgctctccaccactccggctgcctcatggccgaggatgcggggaaacttgcgctgctgttcgttctctcctttcaagaagctgagatcggtgtggcagatggaggtgaagagcagcttgacgcggacctcccgccgccccggcggcgccacctccacctcctccatcgccagcggctcgccggggccccacgccaccgccgctttgcatttgatgggctttccatgggtggaggcgccgttcgccaagctgccgttgccgttggacgccatggcgcgccttcgatcgatgccttccttctctggtttctccgtcttgctagttttcttctcagcgagaggaaattagtggagctcttggctgttgt

SEQ ID NO: 13430 - DNA, 277 bp, Setaria italica
  Peptide Sequence Number=SeqID_79404
gcgagccaggttgacgaagacggccaggtcgccggcggccgaggagtagaggtagtagacgggcagcttgagctcggcggcgacgtcgagggcgtcgccgcagaacatgtcgaggacgagcgcgtcgacggcgggcagcgagcggaggaagtcgcggagcggcgcgcacatggccttgaggtagtcgaacatcatgacgatgcggtgcgctaccgtaccgtcgctggagctggaagaatcgtcagccggagcaggcggcggcaggacgtggaaggtg

SEQ ID NO: 13431 - DNA, 2198 bp, Setaria italica
  misc_feature (1)..(53): n is a, c, g, or t
  Peptide Sequence Number=SeqID_79405
nnnnnnnnnnnnnnnnnnnnnnnnnnnnnnnnnnnnnnnnnnnnnnnnnnnnntttttttgagggaaaaaagtgcatacattgagacacgtaaagtgtgccaagtatttggagaacagtgtcttggtcaaaaaggttccaagtagtataatgagctgataattaagctcgtcctgttcagttaagtacaagctgctcctatgaccgcgcgctttcccaatgaatttgagcctgttttaatcttattacatctttgataacaagatggaaggacgtccactgcagtatacactctgttgatatcctcagcccccccccccaataagttcttcacagctgccctgctgctgaggtccatcgatccaacatggcctggcactccttgggcctgtactccggagctgtgtgccctcctccctttacagtggcgaaagtgaggttgtgggcgtaagtccttgtgaaccctgcgacctgtcggttggcgaaccatggcctccagtcgctgacgatggggtagccgatcgatctgatccactcctgggagcccacgaaggtcatgtccatgtcatggtcgccgttgtagacgagcgccttgtatcctgccttggtgaggttgacatggtgtgggatgacggtggtgaggtcgtgcgtgaagtgcgtcagcatcgtgcaccggctccaggagccaatggacccctcgtggatgcccagcgtctccctcacctccgggtcgtccgcccagatataggacagccggtacccgttgtccctgcactccacggggaggttcagcctactcttctccaagaagcccgggtgcccgacgtcgtcctgcaccagcatcgaccgcctgccgccgccgtagccctggaagatgctggggccgcgcaccgccgcgccgcagaagggctccaggatgtgcacggggttcacggcgaaggtcaccatgttgatggccatcatcgcgctggcgcaccgcgcgttggcggggtctggcctccggtagaagtcgccgccgcacccgtccttggcggcctcgtagagctcgtcggagatgagccccatgccgtgcatgaacggcaccttgccgcccgagtcgtaccggtcgtccgtccccgcgttgccgaccaggtaccccaccaggttcagcttggggtcgtcgttgtgggtggcgatgtccagcgcggtgacgggcacggtgtagccggagtaggagtcgccgccgatgtagagcgggttggacgcgaactccgggtgctcggccagccacttgcggaggaaggtgtggtgctgccgcccagatcccgtgaggctgacgttgaggccggcctcctcccgcgagtaggagaagcccgtgcccaccggcgcgtccaggaagatgacgttgctcaccttggtccatgaatcctcgaagtagacgaggcgcgggaaaccttcagtgtaccccgccacatcgaacttgagagggccgatctcgaagaggaggccggagagggcggagcatccggggccgccggtgatccagaggatgagcgggtcctccgccgggttcctctccgacgcgatgaagtagtagaagagccgcgcgccgtgctcctcgtccacctccacgtaccctgtctcgaggtggaagggcagcgggccctcgaagcccttgatgtgcgtgatcacattccggcccgccccgcccttcgccgccgccgccgcacaccagacgaggctgctgctggttgcgatgatgagcagcgccgccaccaagggaagaagcggtggcggcgagcggcgacgacggccgcccgaggctggagaagatgacaaggcagaggatgcaaccgctgcaccgcacagcatgtccctcgtccggcccatccctgcctcgctctcgtaggctttgatttctttatttctttctttgtccgtcactctcgctacctctttacctttatatatatatgctgtgccacacttcatctgtagtggtggcgcttggctgctagatttactggagttgtggagctcgctctccggccgcacacgaacgcacacctgatggccaagttgcagcttgggacggacctacgtaagaagactacgtacggaagaataaaacccaataaccaacggtgttaagaccggaagttaaggtaagttacgtaccgtaccgttaatttagtttaagtttaagttttacgggtttta

SEQ ID NO: 13432 - DNA, 342 bp, Setaria italica
  Peptide Sequence Number=SeqID_79406
tactcgctggctctggtgcagggcgcgctcctatgctacagggccatcttctccatttctatgagggaacaagtttttgtgaatgcaacgttggagcgctaccacttcaaaggagacgctgtccagtcagccctggactacttccatgacaccatggctggatgcgagaagaacccttcctttgctagaggcacgaacctgatcacgtacgcctcggacctgatggggtccacttcgcctgacaggtacctctccgggataaggatcctcgacaccctcctgatgaaggagaaggaggggccgatccgtactctcgtggtgcagcggctgctcgtgtcggaa

SEQ ID NO: 13433 - DNA, 445 bp, Setaria italica
  Peptide Sequence Number=SeqID_79407
gcgggggacaggggtcggcgccgggcgcggcgactcggcggaggagctcggaagcggcggcggccggcgtgggcccgacggctgacggcgcgggtggcgaggacgatgaaggagaagcgggagcggccgtggacgcccagagcgcgatgaggcggcgcagggtgaggtttgggacgaggtcggtggaggggagcgggagcatggtggccgggcaggtggtgttgccggagtcgagccatcgctggatggaggcgcggtcgtaggtgacgccggtgcagaggctgacgggcgagcgcatgacgtcgagcgagatggggcagcggaagaagctggggatcttgacctccagcccctggtgctgcgggggcagcctcatggccgtctccttccggaccatgggacgtcggggaagctagcgacggctgccggagggagagggaatgcg

SEQ ID NO: 13434 - DNA, 265 bp, Setaria italica
  Peptide Sequence Number=SeqID_79408
ggcgtcgtcggcgtcctccgccgccgccgcctccgcgcgcgcgcagatccacatggtcgtgcgggcagagcccgacccgcggtacgtgttccagttcggcggcgagccggagtgcgggcccgtcgtgtaccaggtgcccgggggagccgctggcggcgggcagcggcagccggtcttcacctgccggttcagcgccggacggagggcaaccaggagcagatcgctgacgccgcagtcgtccatgacccggagcaccagccggagg

SEQ ID NO: 13435 - DNA, 1066 bp, Setaria italica
  Peptide Sequence Number=SeqID_79409
tttgcccaatattcatctgcaacttcttcatcagatcgcccatcagcatctccagaatttatgtaaggtctatgtttcacacgattcaaatcctcatggagtccatccaagaggaacgccaacagctcctgtgaatcatgctggttgtatccactgaactgagatgcaaaccgagaaagcttcattttgaatggtctaggcgaaactggggcacgtcctccaggagcccagagttttcttagtagctcaccaaaagctaacgcaagttcaccctacatggcacgttaccaagaggattttgccgatttatttcgcggtggtaatcttcacaaaagtatctagtaaactgtggcgtgtgcacaagacactgtatggcactgttcatgtagcatgtatttcccaaattaagtagccctgtaaggcccgaaggtgatcccctcgtgatcatgccactagaaccatgcacattatcaaggtcaccattgggagatcgcaggtggaggtttggcgtcagactagagttgtagtttctagaagaatagttgttggctgcaaaattgtcatttggcaatcctgatcttggagcatcagcaatcagagaagttgattcttgctcaaaaaatcatttcctttaaccaaactcatgcatccaccatccacactaccattggcatcagtagtaatctcgactagaatatcttgatccatctgaatgttggcatcgtcaagggttttctccaagttatccatcaatgtatgctttgttcgaccataatagtcccaaatgcatacctcatctggtatcaagtcaaaagcatcacaggcccttttatggagttggccaactgtatccttcttgcttatccttataaaggttcgctctcctgttgacgttagaagtaactgcagacgtaggggataaacttctatggccaaatcagtttgagaaaagccagtattgattgcctttcttggtattgttggtcctccaccataccaaccatgcaacttttcccatacttgctgaggaagaagtatgtaatcacgaccctcaactaaggtatca

SEQ ID NO: 13436 - DNA, 2119 bp, Setaria italica
  Peptide Sequence Number=SeqID_79410
ttactggagatgctgatgggcgatctgatgaagaagttgcagatgaatattgggcaaatcatatcgctagaaacaattcaatcattgttgatgtatgccagggccagtacaaatcaactttggtctgccctgtctgcggaaaggtttcagtgacttttgacccgttcatgtatctttccttgcccttacaatttgcctcaacccggagcatgactgccgtggtcttttcttgtgacggaagttctccaccaacaccattcactgtaaatgttcctaagcaaggtaggtgcagggatctattacaagccctcggcaatgcatgctcacttaaaaatggggagaaacttctaattgccgagatacggaatcataagatctaccgttttcttgacgacccagtgcttcaattgtctacagtcagcgatgatgaccgtctcgcagtttataggctcccaaaattggaaaagagggccaattacattcagtttgtgcatcgtcatgaagacttggaccatggaaacaataacagcttgacatcttggaaaccctatggtgttcctcttattgcacaaatacctcgcaatgaaactgtcacaggttttgatatccatgagttggtccataaaatgcttgtgcccatgctaagaaatcaggactctccgcatttggctgctcatagttctctttccacaagaatgcatagttataataccgacagcagcaaatttgagctacaattgattgatgatagcaacacagtcattgaaaaatcaaatgattctatcagggtcccacaatcttcactcgcaactgtattttttgtcaattggtccaaggcagatctgaaaaagattaacaccgatcctttagaacaccttccagaggtgtttatgtacgctcctcctgccaagagaacccgtggtgaagctctctcactctatgcatgcttggatgctttcttgagagaagaacctcttgtacctgaagacatgtggtactgtccaaggtgcaaggagcaaaggcaagctagcaaaaagttagatttatggagacttccggaagtgctagtcatacatctcaagagattttcatttagtaggtcaacaaaacaaaaattagaaacttttgtcaattttccaatacataatttggatttgaccaagtatattgctaacaagaagagttcagagcgccagatgtatgagttgtatgctgtgagcaatcattacggcagcatggcgagtgggcattatactgcgcacataaagctcgtggatgagaaccggtggtacaactttgatgatagccatgttgctgccattgatgaagacgaggtgaggactgctgcagcttatgtgctgttctacagaagagttagagaacaagatggagcaactagtaatggatctcagttatatgcaaagagaagccacagatctagccatagatagactcatccattgtgcaccaggagattttgggaatgacacctgcacctattttgttggaactgcaaggagcaaatggcatagctctatcatagcaggcaaaaggcctgtcaggtgcattcaatgcgatactgttatccaaggtgaaagtcacaaaagattgaagcatgtttttaatgtagtgctgatgcagatgggtatcgcgtgaggcggatcagattgaaggagcgatttactctttccttgtcatatatactgggtagcttcaactggaaggtagagcttggcggctttctggctatctgttttcgtccagaagagagaaagcaacgggaagcaagaaaaaaggagcaccaagtttaatttgattttttgatttcgtaccatttttagatttagtttagcttgtacacttgactgttgtaagagatgggtgcgccggtgttggttgatgcttgtggtggccaactgtactgtacccaactataccaaacaatgcggcagtgaatgcgcctttgttgttacagcaggagttgtaacattttttgtttgtacttgttttttgtactggcagttgttcccagtttgtaaaatgcattgaattgctgacatcgatggcaggcattcccctatgtgtactggagataagaagtgtttgttggaaaaaaaaa

SEQ ID NO: 13437 - DNA, 1253 bp, Setaria italica
  misc_feature (1217)..(1217): n is a, c, g, or t
  Peptide Sequence Number=SeqID_79411
gtcgtcgcgcgcgccgccgccgccggcgcggcccctggcggccttcgccgacgacgatgacgacgatgttgaggccgagatcctccgccaggccgccaaaaagcgcgccctccagaaggtggaggagcagaagaagaaggccatagaggaggatccatcggtgtacgcgtacgacgaggtgtacgacgacatgaaggagaaggaagcccgccccaagatgcaggctaaggtcgtccgcgagtcaaaatacattgcacaacttaaggaaaaagcagagcaacgtaaacgagaacaggatataatatatgagaggaagcttcagaaagagaggagcaaggaggaccacctttttggggacaaggataagtttgtaacatctgcctacagaaagaaacttgaggaacagcaaaagtggcttgaggaagagagaatgcggcaacttcgagaagaaagggaagatgtaactaaaaagaaggacctgagtgatttttacttcggacttgagaagaatgttgctttcggtgcacggacgcatggcaatgcaaaagctgctgaccctcaaaagtcagacaataaaccagaggatactaaatctaacagtgttgatgctgaagtctccgaaccttctccaaagcgtagaagagaatccagtgttggaccagagagggctaagagtgtggaagaaccctcaggaagtcaaccgaaggattcaacagctgctgcatctactgagaaaactggcgctgatgctccttcgaatgcttctcagaccccacagaacattcagccagcaaaggttactgatgatcactacaaaagaagtgatgatgcacttgctgctgcgagagcacgagctctggcccggaagaaagcgaaagagcagcaattgtgaagtacaaggcagaaaagtttgcggatcttttactcctttagggataatgtcaaattttatttgatagggttgtgtaaaagattgccaactgatagctgccttgcacattgaaaaacatttttgagtgtatgttgcacatgtatcttgtaaaaaaccctcgactttgatcagcacgcactatgagagtaaaatgtcagtgttttgtgaaaaaaaatcaggactcaggagggaagagtaaatttacttctctgaacattctttctgtaaactaacctgttggtagtaaacaaaggttctatgcagttgtaagttaaaaaaaaaaaanaaaaaaaaaactaaaaaagagaactagaccaaagga

SEQ ID NO: 13438 - DNA, 311 bp, Setaria italica
  misc_feature (298)..(298): n is a, c, g, or t
  Peptide Sequence Number=SeqID_79412
ccaacgagatcaactgatacgctggagatttgaaggaacccacccaagcccattttaacatgtgattagtatgtggcagatataataaatgtacatatgacatattgattcttgatgaatgtatatgaatataggtaggatgagaaattggtgaacaacgaagcggagaaacaacagcagccaggatttttccttccagttactaaccgaggggtgcatttgtcaaaggaagccaacggcactctgttctctggattgttgcaaagacattttatgattgtgcagtctgataaaaacngttaatgtacgta

SEQ ID NO: 13439 - DNA, 1369 bp, Setaria italica
  misc_feature (1)..(55): n is a, c, g, or t
  Peptide Sequence Number=SeqID_79413
nnnnnnnnnnnnnnnnnnnnnnnnnnnnnnnnnnnnnnnnnnnnnnnnnnnnnnnagtttcctgaaaattcaaaaagtcttaaatactgttactgcctgcatacagaaatcgttcagactactttcttgtccagccggtgagaacaatgcatctctcagaatacacatgacacacagttttacaaacatttaactcctttctctactagcaaacttattccactgcagagcatcttcagcttcagatcagcacttggagccacagattaatccatctgcacaatagtatgcagaaaaaattagaccatgacaactccgataaacggttgcattttcaatccaaaacaaatagcagtcctgagattcagtagatcaaaatgatgcaatgatgcagtaacaatatgtgtagtcatttaagcgtttttcacatgcgaccgcttcatccaagtagctacattacacccaagatgcatgagcgtacagggcataagagtgtaggattgtaaacgacgacataaaaagagcgggtagcactctttgacagcaaatggtttcagttctctatatatgatacgaattgtattatatgtgtggcactgtgcaatgaaagtaccaaacattacagtatgtatgctaccagataaatcacagccagtatcctactagcttgcaaaatgcacgatctagttgttttccaatggcattactagattaaagccaatggtgaactagtagtagcacaactacaatacaagtatatggttttcgactctctgttttcaccttttctttacagtctatcctccaagatccattcaaggaaatctgaaaaatagtaatataaatgtaaatgttataacagcgttagtcaaatgtttctgtgagagatgtccatgactagtcgtcaatcaggggcacccatggcctgtattgccgcctactgatcagcaaaagattcagtgcatggtttggtccagtagccaacatgtactaggccgattggcgcgctttgctccacatattcagataacgacatatatccagctgtagtgaaattgttataggacaatctgaaaagtagccaacagaagaagagccaaatcgacctagatacacggatctgcagttcactggatgacgccagtctcggaggggccctaggtgcggagccgcttcgccgaaggtctggttgctcgccgccttgctggagtcttgccactgctgttgcacgtcgggccgtcggggtggttgggcggggcgccagaaagctgggcagccagcgagacatggagagcggcatctggtcctagcggatccgtggacagccggacgggggcgcaacgacggcgagccccatggtggcggcggc

SEQ ID NO: 13440 - DNA, 244 bp, Setaria italica
  Peptide Sequence Number=SeqID_79414
atcgactcactcacttcaatcttgcgccctaacagcaacagcaacagcaacaggatccccctagctacatctatcctgtggggtgcaccccccaacgcccatgtcgctctgctgtgctgccgtcgacggcctctcgcatctacagcctagcagcaaacaacaaccacggggcgatgatggatggggcccaggccaccggcggggcggagagcgtctgcaggttggcgacgacgatggcgaccgt

SEQ ID NO: 13441 - DNA, 232 bp, Setaria italica
  Peptide Sequence Number=SeqID_79415
ctctcctcacacactctctctctcctgtggtgcatgcagcatgattagccactcgatctaccaatcaccttctccctttccgggccaccactccaattctgtccaccatgtcctcatgcttgtgagctggttcgcgtgcagatcatggcgctcaagggaggcggcgggaatggcggcggaggaggaggaaggcaggaggcggcgtcggagctcatcaacctcaacgtcaagg

SEQ ID NO: 13442 - DNA, 554 bp, Setaria italica
  Peptide Sequence Number=SeqID_79416
agggactggtggctggtgaagatgcgggcagtctggtagagggccgagttatcgaaagaggccaccccattcgcggacgtgccagccaggatctcctgggaggtggacaccttcaccggagatgcaccatctgaggcgaaggtcctctggccaaccgtggtgctcttaggggacccgcagtcaacaagatagctgtccgcaggcttgaattgcgctttgcagacgcacaaggatgacaagatgcatagcaggatgaaggtcgttgcagctggcggcctcttcctccctgatggagccatcatgatgttgaccagcaggaggagaacggatcggaacccgggcggatctccggttcactccagcagtccagcaccgagatggtgatggagaagaggaggcacgctccccacgcctctcgtcgagacaagaatgtggtggcccgaggaggcccggcttgctgcgtcccgtcgccggcggtgaggtcgccgacgatgcggcgccagagaaggtggcggcagctgtggagagaagagagggaggaggagagaggggag

SEQ ID NO: 13443 - DNA, 254 bp, Setaria italica
  Peptide Sequence Number=SeqID_79417
agagacaaaaccttgggacaaagaataggctaggcaatcacacgttataattagtttattaacgcatcttttttacctgcacgtatctcacagctagtggacagaacaaatatcagcacacttgtcaaatgtcacagcccttgtgtcttccaaactaccgaaggaccccttttctgaagttcgcacggtcgcagcttgttcattgctcgtcccatcatcgccattgcagcaatgcttggaaactgaccttcaag

SEQ ID NO: 13444 - DNA, 290 bp, Setaria italica
  Peptide Sequence Number=SeqID_79418
attgttaaatttgaaaaagagctccaccaaatggttaccagcaacaaatgggtgaaatcaacttatgctaaaggtggtgttggaaaagatgtcacagctattatttggaaagatgttgacttttgggcccagtgcaaacatgttgttaaggtcactgagccattgttgcgcgtcctgcgcttggtggatagtaatgaaaacccttccatgggctatctttatgatgcaatggaaaaggcaaaggagtcaataagggcaaggatgatgcacaaggcttgtctgtatggacc

SEQ ID NO: 13445 - DNA, 725 bp, Setaria italica
  Peptide Sequence Number=SeqID_79419
cagcgagcacgcggagctagaagctccgtcagcagcagggagctcagccccgtcggccgtcgcgcccagcggcagcgctcccgtctcttccaccgatcgctgctcccccctcgtcgtcctacgcgagcaccagcagcagcagcaaagtttcatctaggagagcaggcaaataattgtggacaatagacggcaaggcacaaagggtgatggatagaaaggaaatggcgcggttcgagatgcaatgatcaagaatgaaaattcggtagccagggggatctaaattacgctgccattctgccaataaagaggccaggaaaccgtacctgagctgatctcagagctgctcaccagaaccccggatgctgatcaatctctgcaattcaaggtcaagaattcaagccggagagaacagaaaatttgcgttgcggttcccactttttatggcctgccgcctgcacctggaggatccaggtggttgcggcgttgaaatagcctgagaaagggcactggctgaaaaggctcttgaatgtttggcccttatgcttccgtttgttggctccggtggacgttccataaatagtcagctgagacgcccctccattcatgattcatgggcctgtggatcagccgtttcgtgttttcctgcgtccaaacggaaggcgcggttacatgcccgctgtctctgaactttatttgtgctggcacgcgtgttccctgctgcggat

SEQ ID NO: 13446 - DNA, 275 bp, Setaria italica
  Peptide Sequence Number=SeqID_79420
cagttgacttttaagcgcggcagacgatctccacgaacttgtcgaagttcctcctgcacgcgccgccgggcgcgaacgcggcggccacggcggcctgcagatcccgcgccctggccctcatcctcaccccttcctccccgcggagcatctctcccacggcggtggccaccccggcgcgcgtcatcgtggcgccctcgaaggccgcgccgaacccccacacgtgcgccacggaccgcgcgttcatccgctggtccccgaagaaggggcgcccgcca

SEQ ID NO: 13447 - DNA, 463 bp, Setaria italica
  Peptide Sequence Number=SeqID_79421
gatacaagcagtggaccacgcgaactcttgcgcacgcagagacggtagggaggagagaggtcgcccgactgcccgccgcctttgtgctctcgataccaggtgccatagggatgctgtcgctaaatcgcgtcatgctcaagcagaagcggaggcgttgctggtgaatccaagcccgcaatcaaaattctactgaaatgcccaagaaaaaggacttgctctgtcaagaagatgatcgttctgagggtggtaaaatttcaagatattcagggtcaggccttcctgaggatatctggtgccatatacattccctaatgccactgcgagatgctgcccattctgcttgtgtatctcgtacgtttttacgttcttggagatgccaccccaatctaaatttcactaaggaaacactatgcgtgaaacgaaatgcatgtggaaaagggtggtgtagcaaggtgtttcacca

SEQ ID NO: 13448 - DNA, 469 bp, Setaria italica
  Peptide Sequence Number=SeqID_79422
accctaagaacttactattcttctcacaactcactcctatcttcttcttccttggaatagattgcacatgcacagcacgttaggcacgcaggggcaaaaggggccggtcagggagaggggaaggaggcatggcgacgctaggggagggtggcggcaccatgcccagggctagggccctacctgagtggcacagatggggggataagcagcagtgcacaggagctccgtgggacggcagcaaacgccggtgacatcactgggaacgcctatggaaactcgatgcaaacagaaaacggataagagcatcactgttaggagttcacctaagttccatttgagctgttggtcggggacgaggagggccggagcatggggcgccatgtgaggtcgacggtggtggtggaaaagtttctgtaacttggggaaaacttcgattcccatcgattcggtgggcgattgagggagaggg

SEQ ID NO: 13449 - DNA, 284 bp, Setaria italica
  Peptide Sequence Number=SeqID_79423
tacctaacaatcctacaaaataatcagggttacctggtagcttacaccaacaattcaaaaccaaatgtattggcttctgaattttctaatttactcggtgtcagctttgtcttgtgaaaaaacttcctagctttattaatgtgatttaaatattgcagagttttacttagagctattatccatgccatgggtacaaggagattaaaaagctatttacacttgtccattttgtgtagtccaaataaaatttcacctgacgctatatcaagccatcagatttatgg

SEQ ID NO: 13450 - DNA, 314 bp, Setaria italica
  Peptide Sequence Number=SeqID_79424
tgttaattcccagccatggcttgagtgtagccgaaaatggaatgccagggaaggaaactgtttctaagataaaagctgaataccttggtgttgaggcgaaggatcaacctagtatcaaggcggcacaggcggttattgagcgggactatggtgggtcaatgtcaccgagtgaagaaaatgcttttaaggcagcatttgtagtgtatgtgatgtctttgttgctgtctccgggtgcaaagtatgatcatgcctctgtggattactggaatacgcttagagatcctttggtatacatacatttgactggtcagaag

SEQ ID NO: 13451 - DNA, 374 bp, Setaria italica
  Peptide Sequence Number=SeqID_79425
ccatttccccagtattgttgctatttagccaacatggggaaagtttgcgtggcctattagttggttcactacaggacgcgcagcagaaagaacgatggcatcaacaactacgagaagcttccgactgcagaactgtaatacccctattgcttgaggtgagttatagcattcagttaataactttctgtatcctttgatactcctcaatattctacaaccaagtcatgatatagtatataaccctgaatgctgtcagcaagcggtggcattaaatagattactaatttcagatttctcatgcagcttgagctagatacattatattcctgcatgtatgcttttaataaaggaaattacctctacatacaatgttt

SEQ ID NO: 13452 - DNA, 1454 bp, Setaria italica
  Peptide Sequence Number=SeqID_79426
taagaccaaacaatggaaggaaaagtttgcgtaggacctaattagttggttcactacaggacgcgcagcagaaagaacgatggcatcaacaactacgagaagcttccaactgcagaactgtaatacccctattgcttgagttggaaagcaacatccgtggagtggcattttctgcaagctggttgaagccaatagatgactggcctgtggaatctcctggtctatcggctggggcatctcgtcctgcacaataccaaaaacgtggagctggtggaaggcgtggcagaagacgttcgttggcatctgaatgtggtactgctactgctactgctactgatgatgacaacagctggacttggtggaccggaggaaatatttcaaaacgtactttgcagaggggggctgttctatgttcaaccataagaaaagttgctcgccaaggtggtaaaactaggatagcaggtttaccttaccatgaagcttccaattttccaagacgatctcgtcaatttgcttggagagcatgtgttggactaagccagacttcatctcaacttgctctgcaggttagatatcttgatgcccacattagatggaaggagttcatccctccagatcaaattccttcagatggaaaaagttctgatgctgacttttctgccctcagaaatgccgtaatctgtgataaaaaaataattgacaataagataagatacgcacttaagtttcccaaccagaagcatcttcctgtgcgtgtgacaaaaaatatcttggaagcagaaggtgatcaggatgaaaatagcaaattgtggttttccgaaaaccacgtgccactgtacatgttgcgagaatttgagcagaattatggtagtagctccttgcctagtccaggaatttcaaactctaactgtttcaccaatttgtacccaagagtaaaagcatataccggagatgtcttttcttatctctttcacaaaggagatgtttatccctgcacctcatgcaagaaggatgttctgtacagggatgttgttaaatgcagctcttgtcaaggttattgtcataaagagtgtacatcaagatctattgttagcaaaggagtcagtgctacttccaatttgacatgcaagctatgcctccagaagcggaatcttatgcttacaagttacaatacaaatgcaagttatatccggccccaacagaagagtactggccaacagcaagtgaccgctcccaaaattatcttcaaggttagttcttcccattctgctgaacctaccctgaaagttgaagcgcagacagtcccaaaggttaaagcacagccagccgcaaatgtggaagctcagccaattatgaatgtgaaggcccagccaatcgcgaaggtggaatcccagacacttgcaaaggtggaagccttgccaatcacaaatgtggcaactccgaatatcaactta

SEQ ID NO: 13453 - DNA, 930 bp, Setaria italica
  Peptide Sequence Number=SeqID_79427
gtccacgacttacccactaacgttggaaggtaatggcatgcctagggaaggtaccgtgagcaccatttctgcaaaggcagaatcattttgtccatcttatcaaggtaaacaacaccttcagctgtttgctgaaagatctggaaacatgagtggtggcaaggcagcaaaattttcatcttttaaaccacaggcttacatgaatctctacaatcatggcaatattgcagcatctgctgctgccaatcttgctgttattacatctgatgagggtaaggtttcagcatccaaacagactgcaaacccaaggaaaagaatggctgcagacaattccctacagttgaaagcattttcctcagcagccgcacaatttgtttggccaagtactgaaaagaagcttatggaagtcccaagagataggtgtggttggtgccttgcttgtagaagttcagcaattggaaataaaaaggcttgttttcttaacatggccactgcaaatgctgctaaagggtctgctcgaattcttagtgtcatgcatgtaataaaaaattctgatagccatttccccagtattgttgcttatttagccaacatggaggaaagtttgcgtggcctattagttggttcactacaggacgcgcagcagaaagaacgatggcatcaacaactacgagaagcttccgactgcagaactttaatacccctattgcttgagttggaaagcaacatccgtggagtggcattttgtatcctttgatactcctcaatattctacaaccaagtcatgatatagtatataaccctgaatgctgtcagcaagcggtggcattaaatagattactaatttcagatttctcatgcagcttgagctagatacattatattcctgcatgtatgcttttaataaaggaaattacctctacatacaatgtt

SEQ ID NO: 13454 - DNA, 428 bp, Setaria italica
  Peptide Sequence Number=SeqID_79428
cgcctccttcccctcctgccaccctttctgcgtgtgctgtcagttgggactggggtgacatcctctgaagaaacaaagaattggtcaggttacatcaaacaatgcaagaactgcattctaccaaatagtactggaaagcctggcaaatttagatttgtcacttacctttccaaaagataaactacaagacactacacattctacattacatatatgatatctaaatgcaaggaatgtattctaatgttagtcaaggcatccttagttatgccgcaataactggaaacctgtggatggggtttgcagcttgcaaagtcaggcatactgagttatgcagcaaatttaactggaaatgaacagcaccgtgtggatggggtcagcagactgcagaataataactagataatgtactttaatcatcatcgaag

SEQ ID NO: 13455 - DNA, 333 bp, Setaria italica
  Peptide Sequence Number=SeqID_79429
cacgggaggaagcatactcatagttgggttcgtcattattcgtggccaccatttcattacggaatttgagttccaataaaccgaatacaccctttgtcgttcacccaaaagcagggtgggtttatgccttcttgggcacggcaaggcgctcccggaagtcgtcctccatgaacaccaagccatcgcgcaggacgaccttgggctcccatccaagaacttccttggcctttgtgatgtctggcttcctctggcgaggatcatcaggagtgttctcggtcattgtcactgtcacttcggggttgatcagctccttcacattctcagcaagttcca

SEQ ID NO: 13456 - DNA, 264 bp, Setaria italica
  Peptide Sequence Number=SeqID_79430
tcccctagttcttaattcggtatttctaaaccgtcccgtttccccgttgtccgaggccaagcaagccgagcccaatcccctgcgccagctgctaggtgcgtgacccgcgatggcgcagaagtagaccaatggcagcaacggcgagcacaccacccgcccaccgccgaccccctcgccgctccgcttctccaagttcttccaggccaatctgcggatcctcgtcaccggtggggcggcttcatcggctcgcatctcgtcgacaag

SEQ ID NO: 13457 - DNA, 245 bp, Setaria italica
  Peptide Sequence Number=SeqID_79431
cattgatgatggccgtgttgttagcaacttcattgctcaggctgttcggtaataattgttgggtttcttttattttaattcccaacttgtgtccagatgattttgttggcttatccttttctttcacaatgttgtagtggcgaacccctgactgtccagaagccaggaacacagactaggagtttctgctatgtcgctgatatggttgacggtcttattaagctgatgaatggaaacaacactgg

SEQ ID NO: 13458 - DNA, 195 bp, Setaria italica
  misc_feature (69)..(69): n is a, c, g, or t
  Peptide Sequence Number=SeqID_79432
tgttgtttgtagcctatgcactccctgaatcgattatagcaatgttgccacaagatctgcggaagcagngagacgcaaaacggccggccctgtatgggaatttgagttccaataaaccgaatacaccctttgtcgttcaccttgaaagattgtatcattagatctagcggaagcagagaagaacgacaaaaacgg

SEQ ID NO: 13459 - DNA, 239 bp, Setaria italica
  Peptide Sequence Number=SeqID_79433
atcctcgccagaggatcatcaggagtgttctcggtcattgtcactgtcacttcggggttgatcctcgccagaggaagccagacatcacaaaggccaaggaagttcttggatgggagcccaaggtcgtcctgcgcgatggcttggtgttcatggaggacgacttccgggagcgccttgccgtgcccaagaaggcataaacccaactatgagtatgctcctcccgtggatatccttccccc

SEQ ID NO: 13460 - DNA, 674 bp, Setaria italica
  Peptide Sequence Number=SeqID_79434
cctgaacatgctaggacttgcaaagagagttggagctaggattttgttgacttcaacctctgaagtttacggtgatccgcttgagcaccctcaaactgaggcctactggggcaacgttaacccaattggtaaatttgttcatctgacaaatggaatatttccctctgcttttcataatttaactttcaagttctcttaccattttgttttatttttctatcaggagtcaggagctgttatgatgagggtaagcgtgtagcagagacactgatgttcgactatcacaggcagcacggcattgaaatccggattgccaggatttttcaacacctacgggcctaggatgaacattgatgatggccgtgttgttagcaacttcattgctcaggctgttcggtaataattgttgggtttcttttattttaattcccaacttgtgtccagatgattttgttggcttatccttttctttcacaatgttgtagtggcgaacccctgactgtccagaagccaggaacacagactaggagtttctgctatgtcgctgatatggtttgtcttccattgcatttgtaaaaattgattcacaattcgtcataactgtgtcggtgcatgatctcaccaactacgtctcttcattataggttgacggttcttattaagctgatgaatgg

SEQ ID NO: 13461 - DNA, 669 bp, Setaria italica
  Peptide Sequence Number=SeqID_79435
tactaatttagacttacaaggctgttcgtggcgaacccctgaactagtaccaagaaagaccaaggaacaacagactaggagtttctgctatgtcgctgatatggttgacggtcttattaagctgatgaatggaaacaacactggaccgattaacttgggtaacccaggcgaattcaccatgctggaacttgctgagaatgtgaaggagctgatcaaccccgaagtgacagtgacaatgaccgagaacactcctgatgatcctcgccaagaaggaaagccagacatcacaaaggccaaggaagttcttggatgggagcccaaggtcgtcctgcgcgatggcttggtgttcatggaggacgacttccgggagcgccttgccgtgcccaagaaggcataaacccaccctgcttttgggggaaggatatccacgggaggagcatactcatagttgggttcgtcattattcgtggccaccatttcattacggaatttgagttccaataaaccgatacaccctttgcgttcaccttgaaagattgtatcattagaattcccatacagggccggccgttttgcgtctctctgcttccgcagatcttgtggtacttgtgtttgtagcctatgcactccctgaatcgattatagcaatgttgccattttgagcttttg

SEQ ID NO: 13462 - DNA, 754 bp, Setaria italica
  Peptide Sequence Number=SeqID_79436
ttaggtactttgtctaaagtagtagtttggtagtcttaggtatttttgtttgtactttctaaccttcttgtaagttttacggttgtattccgtctttgtagtctaccctacaaaactagaaggcctactggggcaacgttaacccaattggagtcaggagctgttatgatgagggtaagcgtgtagcagagacactgatgttcgactatcacaggcagcacggcattgaaatccggattgccaggattttcaacacctacgggcctaggatgaacattgatgatggccgtgttgttagcaacttcattgctcaggctgttcgtggcgaacccctgactgtccagaagccaggaacacagactaggagtttctgctatgtcgctgatatggttgacggtcttattaagctgatgaatggaaacaacactggaccgattaacttgggtaacccaggtaaaattcatctctgtattacttttgttgccacacagtttacagttcagtctgcgttataaatttgtcataagcattcctatggtcaagaagttgggtttcgtcttctttctgctaaatggctgcaattcattgtggtgtaggcgaattcaccatgctggaacttgctgagaatgtgaaggaggtaagttggatattatataatggcaatcctttcttcttgcaaagctttgtaaatcttgatggtttactgacatgcctgcttaactttgcagctgatcaaccccgaagtgacagtgac

SEQ ID NO: 13463 - DNA, 2611 bp, Setaria italica
  Peptide Sequence Number=SeqID_79437
gcgcagcgcgggctctataaatacggctcagatctgggaagcctcctcgtcggccgcccccagtctaatcggattcaaaccgcccgttccccgtgtccgaggccaagcaagccgagcccaatcccctgcgccagctgctaggtgcgtgacccgcgatggcgcagaaggagaccaatggcagcaacggcgagcacaccacccgcccaccgccgaccccctcgccgctccgcttctccaagttcttccaggccaatctgcggatcctcgtcaccggtggggcggggcttcatcggctcgcatctcgtcgacaagctcatggagaacgagaagcacgaggtcattgttgctgacaacttcttcactggttcaaaagacaacctgaagaagtggatcggacacccaagatttgaactcatccgtcatgatgtcacccaaccgctgcttgtggaggttgaccagatctaccaccttgccttgccctgccttccccaatcttctacaagcacaatcctgttaagaccatcaagacaaatgttattgggaccctgaacatgctaggacttgcaaagagagttggagctaggattttgttgacttcaacctctgaagtttacggtgatccgcttgagccacccctcaaactgaggcctactggggcaacgttaacccaattggagtcaggagctgttatgatgagggtaagcgtgtagcagagacactgatgttcgactatcacaggcagcacggcattgaaatccggattgccaggattttcaacacctacgggcctaggatgaacattgatgatggccgtgttgttagcaacttcattgctcaggctgttcgtggcgaacccctgactgtccagaagccaggaacacagactaggagtttctgctatgtcgctgatatggttgacggtcttattaagctgatgaatggaaacaacactggaccgattaacttgggtaacccaggcgaattcaccatgctggaacttgctgagaatgtgaaggagctgatcaaccccgaagtgacagtgacaatgaccgagaacactcctgatgatcctcgccagaggaagccagacatcacaaaggccaaggaagttcttggatgggagcccaaggtcgtcctgcgcgatggcttggtgttcatggaggacgacttccgggagcgccttgccgtgcccaagaaggcataaacccaccctgcttttgggggaaggatatccacgggaggagcatactcatagttgggttcgtcattattcgtggccaccatttcattacggaatttgagttccaataaaccgaatacaatctttcaaggtgaacgacaaagggtgtattcggtttattggaactcaaattccgtaatgaaatggtggccacgaataatgacgaacccaactatgagtatgctcctcccgtggatatccttcccccaaaagcagggtgggtttatgccttcttgggcacggcaaggcgctcccggaagtcgtcctccatgaacaccaagccatcgcgcaggacgaccttgggtctcccatccaagaacttccttggcctttgtgatgtctggcttcctctggcgaggatcatcaggagtgttctcggtcattgtcactgtcacttcggggttgatcagctccttcacattctcagcaagttccagcatggtgaattcgcctgggttacccaagttaatcggtccagtgttgtttccattcatcagcttaataagaccgtcaaccatatcagcgacatagcagaaactcctagtctgtgttcctggcttctggacagtcagggggttcgccacgaacagcctgagcaatgaagttgctaacaacacggccatcatcaatgttcatcctaggcccgtaggtgttgaaaatcctggcaatccggatttcaatgccgtgctgcctgtgatagtcgaacatcagtgtctctgctacacgcttaccctcatcataacagctcctgactccaattgggttaacgttgccccagtaggcctcagtttgagggtgctcaagcggatcaccgtaaacttcagaggttgaagtcaacaaaatcctagctccaactctctttgcaagtcctagcatgttcagggtcccaataacatttgcttgatggtcttaacaggattgtgcttgtagaagattggggaagcagggcaagcaaggtggtagatctggtcaacctccacaagcagcggttgggtgacatcatgacggatgagttcaaatcttgggtgtccgatccacttcttcaggttgtcttttgaaccagtgaagaagttgtcagcaacaatgacctcgtgcttctcgttctccatgagcttgtcgacgagatgcgagccgatgaagcccgccccacccggtgacgaggatccgcagattggcctggaagaacttggagaagcggagcggcgagggggtcgggcggtgggcgggtggtgtgctcgccgttgctgccattggtctccttctgcgccatcgcgggtcacgcacctagcagctggcgcaggggattgggctcggcttgcttggcctcggacacggggaacgggcggtttgaatccgattagactgggggcg

SEQ ID NO: 13464 - DNA, 1596 bp, Setaria italica
  Peptide Sequence Number=SeqID_79438
cttcatctccaacaggaagttcagaaacttctacagccaaggaagttcctagcgatattgcacatgaggggccaagccaacatgaggtcctacaaatgcggcttcctgatccaacagaagaccatgtgggatcaattgtgccttcagataaaggtcctgaaatactgtccaatgcaggaccaactgaagcattcatcagctcaacaaatgataagacagatcatccttcttcagcagatgcaattgaaatgaacagtatgcctgtaaatgttttgaacggtactggaactgcactaagagatgaaatgaaacctaaagaagatgagatacattatcagactgatatggctacaaagctgaaaaggaaagaagattcagaaacaacacctgcaagtccatacaagggccttattgacactgctgcaccttttgagtctgttagagaagctgtcaccaagtttggaggaattgttgattggaaagctcataaagctcagatgattgagagacgcaagctcatacagcttgaacttgaaaatattcgaacagaaattccactttgcaaggaggaactagaagccgctgagatggctaaatctcaagttgttgatgagctagagcacaccaagagactcattgaggagctgaagcatcacctcgagaaagtacaggttgaagaagctcaggcaaagcaggattccgagcttgcagaactcagggcacaagaaattgagcatggagtagctgacgaagctagtgcaatagccaggacacaaatggaagtcgctaaagaaagacatgaaaaagctgttgctgaacttaagtcagtaaaggaggagttgacgtcagtacataaacaatatgccaccctaatcgatgaaagagacactgcaatcaaaagagcagaagaggttatatctgcagggaaggagattgagaggcgagtggaggaactaactttagaattgattgcgtctaaagggtctcttgagttggcccatgccgcacaccatgaagcagaggaacgcaggatcagtgcagcattgacaaaagagcaggattgtcttgcttgggagagagagttgcgtcaagcacaagaggagctgcaacagctggacagtaagcttgcgtccaataatgatatgcagcaccttatagatgcaaatttgctcaagttgcttagcctcaattcggagctgtctgcctatgtggagaaaaaactgactgaagaagctgaaggagcttccaaggagcatgagtctgaagatgctaaacaaattagcaattcaattaaggaagctctagcatcaaaacagaaagagcttcaggaggtcaaagagaacattgagaaggcaaaggctgaggctaacgtgttgagatttgctgcctcaacactcaaatcagaactagacaatgagaaagcttcacttgtcgtgttgcaacagggggagggctatggcatgcgttgcagtttcttcactagaagatgaactcaaccggacgaaacaagagatagaatctgtcaggtgcaaggaagcagaggcccaagaaaagatggtggagcttccatggttttacagcaagcgactcaagagg

SEQ ID NO: 13465 - DNA, 596 bp, Setaria italica
  Peptide Sequence Number=SeqID_79439
ccttagcgttggtgcagtgcgcgatgtgtttgagaagtcccttggtctgcgtcttcagaaggtactttgtagctcagttgctacagcacttctttactagtttgtagagtgtagaacattatactaacaggccttttactttttcattccaccagatgaatcctaacacagactatcactgcttgaagaccttttggttcacacttcacggaagatatccccatacccgcgggtacaaagatcgacttctgtcaaacatcagatgggaagctaataacagaaattgatgggagacaaattggtgctgttcagagcaaagatctttgcaaggctttcttcgacatgtatatcggtgattcaccgatttcactggaggccaaaagaaacattgcccagaacgtggctggactcattgcaagacgctgacgaaagcacaaattaagagggcagcaagtaggatgattatttcattcttctgtacagttagaaaggacacttatgaacgggaaaataggcgagaatcattgtaagtatatagagtgatctgcgccttttcaaggaagcaggcaaaagttccaatgtacatgtggaaggtg

SEQ ID NO: 13466 - DNA, 1628 bp, Setaria italica
  Peptide Sequence Number=SeqID_79440
gcgttcttcgcctctcaccctgcgggaggcgagggcgcggcgagccggcgagagcaaatcggatttggggaggcaaaggaaaatccccggagcaattccttttcgcctccccatttcctcccgattcggattttgggccgtattggttaatcccgcgcccgaatccgcgacaatccatccgccgggggatcgcgcaagggaagcgcggatcgtaggcggtcttccctgcaccctctcgcccttcgcctgcttttgccgcggtctcctctccgggcgatttggagcccacagttgacagattactaaattttcctcgtcacatattcccaaccttcgacttcctacattcagaagcccgtgttttggaaggacatttcacaatgaagcccaatcagttaattctatccaaccttgatattgacaggggatacgtatacaagttcccatcagagcttccaatgtctcatgatcttggtttgagtttgttttcgcatgctggtactgtgatggggacttctttaagacatcatcggaagatttgttcttctggaaatgtaatggtccatggagctttcaatcgcctcaacaagctttccagagctatcttttgctggctttccagaccatctgatcctaaggttttccactggctgtcagctatagcagcgtctggttctagatcctgtcagttgcgtatgaagcaagtgagctcgcacatgcaaaatttgactagattgcagttcggctttctagtaagagaagagcaagcaatgcagctacttttagctaggcttgcaaatgcaacaattgtgcgactgtgcaatgattttgagaagcaaggcgcctgcaatctgctcaccctagctggcgctgctgctattgtaccaccactcgaaactatatcaccaataatgcttgcagaggcaatcgcattaagaaatactgatggttatatcagcagaccggtgggtcagccttatgtagaaggaaagtgcgtaagttgtgcctctcctcctgtgccaagtactatctttaaagaagatgcaattgaaccaaaaactggaatcaagttcccaccatttctggaagatgactccagttcatcagcaacggtccttgttggggtaggtttgaaaggcatgagagtaatgagggtcaaaaatctgaacctgtacgcttttggtttatatgtgcaacccaattctattcatgagaagctgggtcctaagtatgcatctgttccaactgacaaactgatggagaaccctgatttctatagagatcttctcagggaaaaccttcatatgagggttaggttggtagttaactacaatggccttagcgttggtgcagtgcgcgatgtgtttgagaagtcccttggtctgcgtcttcagaagatgaatcctaacacagactatcactgcttgaagacctttggttcacacttcacggaagatatccccatacccgcgggtacaaagatcgacttctgtcaaacatcagatgggaagctaataacagaaattgatgggagaaaaattggtgctgttcagagcaaagatctttgcagggctttcttcgacctttgtcttaagttaaattattttactattaagttatttgttctt

SEQ ID NO: 13467 - DNA, 419 bp, Setaria italica
  Peptide Sequence Number=SeqID_79441
cttctgggcaacgagacaaaggaccaaaagacccgtctcctaaaaaggttgtcgggtgcatgtttagaactaagttgcatctgtgatttccttagaactgatatgactaagccattctttctgttctttcttttggtacataactgtttcgatcccctgtggtgggcgagttccttgttaccatacgcgaaatgggtggctttgtgcactgtcacatgatgttattgccaccagtgtgttgtatgcccaattttttatttataccgtagaatcatacacttttgcaccattttgtacagagagaatcgatcgaatatacagtgactgtcacaatcttgtaagttggaaaaatggaacatatacgcttacttgtttctttgagcccttacgcacatctgtagtgggtatgaatccattgg

SEQ ID NO: 13468 - DNA, 424 bp, Setaria italica
  misc_feature (420)..(420): n is a, c, g, or t
  Peptide Sequence Number=SeqID_79442
ttcaagattttcagctctccggctggagggtgactttgctgaaattccaagcctgctactcgagaactggtgttttgagagcatttctctgaaaatgatgtccggcttccatcaggtggtgcaaataaatttagcatatgatgtttaatgtgttgggattgttatcacgccttgcatattttcaagaataaaagaaaacaaagatgtaagaaaactggtaaacaatatgcggccattttagaagatggaattatggaaacaactccatggataaaaaacaatatttccgaccttgcatggtgaagaccttgtgtatctgttgagacttgtttaggttagcactaaagagttctctgtttttatcattgtaggacattacaagatctgtaactagtgaagcttgccaatctctgaaaaggngcgt

SEQ ID NO: 13469 - DNA, 1061 bp, Setaria italica
  misc_feature (487)..(487): n is a, c, g, or t
  Peptide Sequence Number=SeqID_79443
tttgatgaaattaaggatgctgaggtttggcatgatacagttcgtgtcttttctgtttgggatgcaagttcaagtgatcttttgggttatttttttctcgatatctttgccagggaaggaaagtatgcccacacttgcgttgtgacacttcagaatggatgcttgtgttctaatggtacacgtaaggttccggctgctgtgctactatctcagtgtccaaaagagtttgatgggaattcagcattgctgcggttccccgaagttgtcaggctattccatgaatttagccacgtggtccatcacatatccaacagagccaccttttcaagattttcagctctccggctggagggtgactttgctgaaattccaagcctgctactcgagaactggtgctttgagagcatttctctgaaaatgatgtccggcttccatcaggacattacaagatctgtaactagtgaagcttgccaatctctgaaaaggnggcgtgatttatttgctggcctgaaatgaaacaagagatccttttgtgccttgttgatcagataatacattcaagtgagaatgtggacattgatgacttaatcaaggagcttcatcccaaggtaatgttgggcatacctttattggaagggaccagtccagcttcatgctttcctcgtatagctgttggctacgatgctgtgtgctacagttacatatggagtgaggtgtttgctgctgacctctttgtatcaaaatttaaagatgacttgctcaatcagcatgcaggattgcgattcagaaataaggtgttggctccaggaggctcaaaagatcccctggagatcataaccgactacctaggaagagaaccatcactccaaccttttattcaaagcagaacagggaacagtttgtgagacatcatggattagagttttttaaatgtaaccgttgaagatctggtgactgttgagttcttttattttgcgtgatgattaacaagtatgacctctgcaattcttgttcccaacatcatttgtttgaccttcaagcttccatctcatgcctgggag

SEQ ID NO: 13470 - DNA, 646 bp, Setaria italica
  Peptide Sequence Number=SeqID_79444
aaccaaagaaaatttaagaaaaatagaaagaatgaggcatatgaattttacagcatgtatgcagggaaattgggttcaatgtgcgaagggctagcatgacggtgaatactgagaatgttatcaccagaagaatgtttgtttgttcaaaagaagggttccgtgagaagaagagaggagcgaaaagagtaaagaaacctcgaccggagacacggactggctgtccagcatgtatggtcatcaggcttggaactaatggcaaatatcaagtcacagaatttgttaccttccacaatcaccagcttggggctgcagcagcttctgatcttgccatggcatcacagagtacagaaaatgatcaagaggatggagttgatctggcagatagatcgcctgatgattctgttcacaagcaaaatcttattaatgaaagtgccactctaaattccatagaaggtagaagttgcaaaagatacaagtgtacaaagactccacactatggtgatgttggtgctactctagagtacctgcaaaagatgcaacacgataacccttcattcttctatgctgtaaaatctgatgagaatgggaacttcacgaattttttctgggcagattcaaagtctactgtagattttgtccattttgg

SEQ ID NO: 13471 - DNA, 288 bp, Setaria italica
  Peptide Sequence Number=SeqID_79445
acatgcgttcatgtgatagtttctcaaggatcttgggttccccatccatcagcatgtctgagacaccctgctggatgggctctttgcaacctcctccgaatccagaaaaagtttaaggactcttggctagttgtaacctggacgttataaactttgtgaagcaacctggcggatgctagtcgttggagaagcgcccgacgaaacctggccaaagcgcggcgccgctcgccgtgttcgccgccgctagggggtgggggtgggggggtgggggggggcgggggggggttg

SEQ ID NO: 13472 - DNA, 243 bp, Setaria italica
  Peptide Sequence Number=SeqID_79446
ctcggcgatggtgatcctgataacgctgatgacagacatgagaagctggggcggcagggtgggcggctccttggcgaattcctcatctcctgggtattgcaggtcgtagctgtgctcgggtgatggaggagcctcaaattcagctacgctgtcaagactttcaggaacataatcatggacatcgaggagagcattagagaggtctggcaaagatcacgccatcttattggttcttccatccac

SEQ ID NO: 13473 - DNA, 714 bp, Setaria italica
  Peptide Sequence Number=SeqID_79447
tttcttttaccttttccttttagttcgcggttgtagagcacaaagctcacacacttggattcgaaccgatgagtgactccgagggcaagcagcgactgagatcccaccctttctcgatgaacagatggttgaggacgacgtgctgtggctttggaggttgatcatcagcgttatcaggatcaccatcgccgaggacagacatgagaagctggggcggcagggtgggcgggctccttggcgaattcctcatctcctgggtattgcaggtcgtagctgtgctcgggtgatggaggagcctcaaattcagctacgctgtcaagactttcaggaacataatcctgttcaacacaaatatgtttttcagatgtaacgggaactgacattaacacctttagatggcttagagcaaatactcccagtaattttctcaatctgctgtttaggttctcacaagtttgaatgatgaaacagaaatataatatccttactgacatggacatcgaggaggttggccacttgtcctaactcatcagttacataaggttgctcagggatgtatctcaaatccccatccacaatgatcctgtaatgatatactccggatggaagaaccaataagatggcgtgatctttgccagacctctctaatgctctcctcgatgtccagttatcccaagatccttccaagaacacctcatttcctccttgactcca

SEQ ID NO: 13474 - DNA, 1560 bp, Setaria italica
  Peptide Sequence Number=SeqID_79448
ccctttctcgatgaacagatggttgaggacgacgtgctgtggctttggaggttgatcatcagcgttatcaggatcaccatcgccgaggacagacatgagaagctgggcggcagggtgggcggctccttggcgaattcctcatctcctgggtattgcaggtcgtagctgtgctcgggtgatggaggagcctcaaattcagctacgctgtcaagactttcaggaacataatctgacatggacatcgaggaggttggccacttgtcctaactcatcagttacataaggttgctcagggatgtatctcaaatccccatccacaatgatcctgtaatgatatactccggatggaagaaccaataagatggcgtgatctttgccagacctctctaatgctctcctcgatgtccagttatcccaagatccttccagaaacacctcatttcctccttgactccatgtaatcagagttggaatcccccttctccagggcgtggttggtggtggattcatctgttccatttatcggtgaatggttgaaaacaggagaaaattcagtaggtctctgcagtggagcaactggaacctgcaaggtgcagttacctgtaagttgaagtaggaccagccgcaatgccaataaatgtgatttgtcccaactaaaaatgcgttgagcaatattgacatatgcttagttaaggcaatactcctacaaaaactttagagcaatccgaagcacgagcccatttatatatctcccagtattaaagtattaaagggtctgaaaggatcagtaattccctttagaaaaggaaagggttaacgacgtacgtcacttttcatacattttcataagtttaaatggagtccacaagtcaagtggtaagggaaaactaagcatcataacaagatgactctggtgaagaatccgtagctcaatgggaggcttatatacactaataataagatggcttcaaagttactataaacacaaggggcagttgttaggagttaggactatgaactgttaccagatcaaattttttttgggatcacattgcccgagcacctgctttatgacccatctacaacatccatataagcaaatacctgatcgaaaactttatccaactagatgtaccagcctaatgctccaagaggcagccatttgtctctaatgtaaattgtaggtgaagggataatcaaatgatgcagtcaaatacaaaatgtgcccttgcaggtctaactagtggttacatttaagcagccttgaataaagtactgtacttgtgttcaatcacatgattcttttcaataaatccgattgtgaatcacatttctagagcatggcgcctaacattttttttccatcatggggaccatccaagaaccaagagcaagcaatctggtctgcggtgtacatcgaacactggcgaactctaagcagaaagtatgcatttaaagagaccacatgtcctcaaaccaagaccaggctgtaacaattttgtcacaatgtggcgtgcagtcaccgaggaagaaaaatgaaacaatcaacaacacttgcat

SEQ ID NO: 13475 - DNA, 757 bp, Setaria italica
  Peptide Sequence Number=SeqID_79449
agcctccctcgtcatcggcccctactcggtccccttcctcctccccacctcttcctcctcctcctcctccggccgcgtcgtctccggcgagctctacgccccatcccccgccgctctcgcggagctcgacgccttcgagggcacccacatcggcgtctacgagcgccgcccgattaccgtcgtggccgatggatcgggcgaggtggtggaggcggaggcgtacttcgcgcacccgagctacgcggaggcgctctggcggcgctgcggcggcgaggcggccgagatcggggagtacaccgcggaccatgccaataggtacatcccaattactgagcgcattaccgacgccactgggctcatcgatgccatccataggttcctcgccactgccccagacaactgacttggtgtttatggattggtacccgaatctgtcacctgttgtttccttggctagtgctttggtcgcagctcttatttggtggagcctgcgatgaatttttaaatgtattcatgctgcaaatttgcagacactcttttgtgctattcgcagttgttttcagaatcacttagtccaaggttttggacaaaccaatcaaggtttgcaaaagtcagtttgtctattcagtactgattgtatacattattggaatgccaactattaagtttatcaaatgcaacatagttgtagtgtcctgaattcttatgcgcttttatccaaatatacttggtagtttgtatcaggatttgcaccgta

SEQ ID NO: 13476 - DNA, 268 bp, Setaria italica
  Peptide Sequence Number=SeqID_79450
caccacctccacctccagctgcgcccccaagctccgacgcggcgaggagaaatcctcccaaaccctctctgaaattcctcttcgtcagtacaagcaggaaggggatcccccgcaccccaatgcggctgctcccgctcctcctgctcctcctcgccggcgccgccgcccgcgcagcctccgacgaccccttcctctccggcgcggcgaaccacagctacaacatcgactgcggcggcgcggcggacttcacctcctccttcggccgccg

SEQ ID NO: 13477 - DNA, 931 bp, Setaria italica
  Peptide Sequence Number=SeqID_79451
atactgttggcagtgagaatgctgcagttggtgatcagggttgtgctggagggcagtctgctgcacattggacttcagatgtgagtgccaatgccaatggccccattgacgccactcccatttcagcttacagggcaacacggcctaatgttatatcactggacgatgatgatgacgatgacgagaattatattgctaaccagacatcagcatctggaaggaagattaagaggccatcccgcctaagcggatataatatgaacgatggtatgggcagcgatagctccaatagcatgaagactaaacgccccaagccctctcacaagaaagcttctgctaacaatgagcttgctgtggtgcctccatctggtgatcccagggttattgtggaggcagttctcatgacatatgaggcactgcggcgtaggcatcttcaaatggatgaggaacaagagactagcaaacgtgcagacctgaaggctggcgccatcatgatggccaggaatcttagggccaacacggggaaaaggataggggttgttcctggcgttgaaataggggatatttttctacttcaggatggagctatgtattatcggtctgcatgctcctagcatggccggaattgattatatgactgccaagtttggtgatgaggatgattccattgcaatatgtattgttgctgcaggtggatatgacaacaaggatgatgatacagatgttctggtttacagcggttcaggaggcaatagcaggaacaacgaggagcggcatgaccagaagcttgagaggggcaacctggctcttgagaggagcctgtccagaaaaatttaatccgggtagtacggggctataaggatccaggatgcttgactgggaaggtttatatttatgatggcctctacaggattcatgagtcatggaagga

SEQ ID NO: 13478 - DNA, 950 bp, Setaria italica
  misc_feature (920)..(950): n is a, c, g, or t
  Peptide Sequence Number=SeqID_79452
tttctttttgttttcttttaatttttgtttaattttctattttgttgtccacaaagaaactgccttggtgccatatcagaatcaacttactacaaggtccaaagagaattttgtgaatgtttccctaggaggatcttatgtctccaaactatcattgcctgatatatcaaaagttggcaaggatatggaggaagttgctagatctctttttggaaatagtgatgtcagtctgaatatagatcctggatgctgcatgaattgtagatcccatattgatgtggcatctgctgcggctacatcacacagggaagcatcgaaggtcgataggctgaaggaaattacattgctagacaaaactcttatcctggaggcgctacaatccctaaaacaactcaagaagctgaggcacccatatagcaaggctcttgcccaggccgaagacacaattgcagaggcctttgtaaagataggagaccaggaacaagcacaaaagcattgcgaagcatcaatccagattctcgagaagctgtaccacccaaaacacatcgccattgcgcacgagctaatcaagctcatttcgattctgctgtccctgggagacacggcaagcgcagcagccacatttgcacgagcagaggcaatattctcgctgtactatgggtctcatatggagaagattttagcatacctgggtaccctgaagagagctgtccgctgtgagtccacggaagcatgctgacaatctacaggtggaaatggtcctcgcggttctgcagaatcacctatgtaacagtcaccaagcagtggtactttaggaaaaacaaaaatgcttaccatatatcaacttatcaagccctgtactatatagcttggtgcagttccgtttgcttctggacaactagaaacacgcattagctacnnnnnnnnnnnnnnnnnnnnnnnnnnnnnnn

SEQ ID NO: 13479 - DNA, 256 bp, Setaria italica
  Peptide Sequence Number=SeqID_79453
ggcggtattagatagcagtcattcctgcaagttcacgcagtttctcacacacgatgaaggtgattgttgtctgagggcctaatcttgcaaaggtggcaaatccacctttataaagtgattttacgccctctgtgaccacaacctggtaagcacaatggaacccattcctgtatactctaacacctttggactcccgttgcagcattagccgtgttttgatcatgtctacaggtgtggtcacaagagtaccagctgt

SEQ ID NO: 13480 - DNA, 2254 bp, Setaria italica
  Peptide Sequence Number=SeqID_79454
cggcggcgcagtcggtgctgtggggtggggccagctgccgcctcctcctccgctgccggcggggcaggaagccccggagtactacaacgccaggagtggccggcggcaggtcgatgatgagtgtggtattcgtaacgcccgctcgcggcggaaccgtggtggtgattacggtagcagcaacagcagcaactacaatggaagggggaagaggaagtttggggctgataataggtattccgattcggggagggatagggggaggaacagggggtatttggatacccggagttacgatgaggatgatgaggatggggctcctgggttcaaacgggagcggcgaagcagtggtgggattgatgaggttgggagtagcgtgtcaggtgtggctggggaggggccatcatcgaaggtggaagcgatgggggagtcggagctggaggatactgggtcaaaggctagttctaacagcaaccttcgacagaaggctgatgctctgcaagaggtggaggatgagaacgaggcaaataaaatgcaggaggacagtgtggtgtctaattcagaggtagtggagcaagtgttgaatttagagggtaatatcaacaatgattcttctggtgctgttcaagaggcagagacaaaacatttgccagtattctcaggtgaaaaagtctcagatgggaggcctgaagatagtggcattctgagtgagaaggttgaagatgataagactttgcatgagaaggctgaagatgatacaacgtcagatgaggtctccattatggagaacaatttacctaatgattctataaatttgctaggctattgtagttttgcaagagttccaaaaagaccacgatcagtgcttgcaaacaggaatgcagcaccagcccgaagagaatttgctgtgtctggacagatcaatctggttactgctgaagaaatatcgcagacaacaatggatggagaagctaacaccaacttgataactaatatccaggaagacagcaaagatgaagtggtcagacaagaacatgctgaacaaagcactacctgcaatcatgtgtcagaatcaatgacattccaggaaaagggaacacaagatgaaactgaagagatggaagaacagaagaacatacctcaacattatggagttgaggataaggagcccaatgaaccgtctccttcatttgcttctcaccagaatagcttcagtttgcaagttgaaaaaggaatagaaatttacaatttagatacgccaccacaggatgaagtgttgattgatccacccgataaaggaaaaacagttgattcggagttattgcctaatatgaaagcagaagctggtgtcacaatggaagaggaaaagcttggtcagtctagctcatttaaaatacgtgatctcaacctggttggtagtccagaggttgctgacatgcgagctgatcctcgtttaggccaaagctccactgctggatgtccagtggagctacaagataatcagcaagttgaatttggaacaactcttggtaacaattcaagtaatgctgacacatttttattgggaaataaggcagttcaagttattgatatcgaagatgacccaccaattgaagctggtgcttgtgacacttcaaaagcaaaaggtgagatggtatattctagcatggagaacttgacgaacccacccacgaacaccgatgcccttcatggtatccaagatggctatagtcttgcgatttcagattaccttggttaccaatcaatacaaacagaccttcaagctgggatggacctaaatggttcagagggcataactgtcatggatgatccaatatatagttctcttggcgacataggttttatggaggtttgggaccagcaacctcaagactacgaaaagttcttctgaggcatgaaaccatgttgctgaaactgtcgcatacattgacagataaatacgagttacacaacacttgcatagacagaaacaaagccgcagattgtgccaaacacatagaatcccgtatgctcgtgcggcagctgcatctcatacacttgcatataccaggccatattgccacttttgcgataccagggccagactggagacgctcagttgccctggcttgttacccgacacacacactgctgtaaagagttgtcgcatagctgtctgtcatgtaactcaagggaattcaagccaagcctgatattcataccaaacaattcctctgtaaacagttcgatattttgc

SEQ ID NO: 13481 - DNA, 473 bp, Setaria italica
  Peptide Sequence Number=SeqID_79455
aactaaagaactaacaaacaaaaagaattaggtagtggagacctccttgaggtacgctatccacctgatcacctctgctgcactagcctgccagaagcgcaagggcaaggtggtggagatggaggatattagccgggtgtaccagctctttctggacgtgaagagatcgacgcagtacctgatggagtaccagagccagtacatgttcaatgaagttccaggagaagcagatggagatgatgccatgcagtcctagagaaagtgggatggtatttgctggctggtctggtgtattttggatgcttagttcctttttttagattgatgttacctgacgtgtggtaaatgcagactaactgctgtaggtgatttacagttcggtgtattttatcaaattatatcccagctgggattcacggtttatatggattaattaacaacatatctgtacgtgtatagtatttgcgtaaaaa

SEQ ID NO: 13482 - DNA, 443 bp, Setaria italica
  Peptide Sequence Number=SeqID_79456
cattcgcctccgtcgccgcctcggagctcttctccctcgacctatccaagacggaggcgctcacgcaggccttccgccgctccattggcgtccgcatcaaggaggaggcggagataattgagggcgaggttgtggagatctctatcgaccgccccttatctgcctccagcgctggcggcagctcctccgcgccttctggtgctactgcggctggtaaatccgggaggcttacgctgaagaccacggacatggagacggtgtatgagctcgggggaagatgattgaggctcttgggaaggagaaggtgcagagtggggatgtgattgcgcttgacaaggcctctgggaaggtcactaagcttgggcgttccattgggaggtcgcgggattatgatgcttgtttggtccctactaactaacctaaagtttttagtttaacttaaa

SEQ ID NO: 13483 - DNA, 1550 bp, Setaria italica
  Peptide Sequence Number=SeqID_79457
ggcgaaccacagaaccggcggcggcgcggcgggtggtggccatggcggagctgaagcggctgtcggagagccgcgacctgacgcgtatcgagcgaatcggcgcgcactcccacatccgggggctagggctggactcctccatggaggcgcgcgacgcctcggagggcatggtcgggcagctcccggcccgccgcgccgcgggcctcatcctccagctcatccgccaggggaagatcgctggccgcgccgtgctcatcgcgggccagcccggcaccggcaagacggcgcttgccatgggcatcgccaagtcgctcggcgcggagacgccattcgcctccgtcgccgcctccgagctcttctccctagacctctccaagaccgaggcgctcacgcaggccttccgccgcgccatcggcgtccgcatcaaggaggaggcggagatcatcgagggcgaggtcgtcgagatctccatcgaccgccctttgtccgccgccgccggctcggccgcgccgtccggtgctactgcgcccggaaagaccgggcggctcacgctcaagaccacggacatggagacggtgtacgagcttgggggaaagatgattgaggctcttggtaaagagaaggtgcagagcggtgatgtggttgcgcttgacaaggcctccgggaaggttacaaaacttggccgctccattggtaggtcgcgggattatgatgctgttggcccgcacaccaagtttgtcaagtgtcctgatggtgagctccagaagcgcaaggaggtcgtgcattgtgtcaccttacatgagatcgatgtcatcaatagcaggacacagggttttcttgcactgttcactggtgacactggtgaaattcgtgctgaggttcgagagcagattgacacaaaagttgcagagtggagagaggaaggaaaggctgagattgtgcctggcgttctgtttatcgatgaagtccacatgctagatatcgagtgcttctccttcctcaaccgcgcattggaaaatgatatggctccgatcctagtcatcgcaacaaatcgagggatcacatctatccgcgggacaaactaccggtcgccgcatgggataccaccagacttcctcgaccgcctcttgatcatcacgacgcagccctacacggaggatgatatccgcaagatcctggacatcaggtgcgatgaggaggatgtggagatgtctgcagatgccaaggtcctgctcacaaagattggtgtggagacctccttgaggtacgctatccacctgatcacctctgctgcactagcctgccagaagcgcaagggcaaggtggtggagatggaggacattagccgggtgtaccagctgtttctggacgtgaagcggtcgacgcagtacctgatggagtaccagagccagtacatgttcaatgaagtgtcaggggaagcagatggaaacgatgcgatgcagtcttagatgaatcctcgtgttacaagatggtggttggattatgtcgtgtatttcggatggttcttgcttgttttaggttgctgttac

SEQ ID NO: 13484 - DNA, 349 bp, Setaria italica
  Peptide Sequence Number=SeqID_79458
tgaacgacggaggggatgagagtccccacctgattcttttccactgatgccggcaagccggtaatggacggtgtgttcaccgattacagagttttgggccctaggccagatttaatacatgattagaggggagggaagagcttatgccatagtgaacaaattacagcatacattgaccaccattcgatgcgtacgaggcagtcgtcctcgccatagcagtcagtcttccttgcagccgtggagcagactgccaagattacaaatgtccagatggcccgcggcccggaagcccgcctaggagcccttttttggcccggtctaagcccggcccagcacgacggacttcgtg

SEQ ID NO: 13485 - DNA, 526 bp, Setaria italica
  Peptide Sequence Number=SeqID_79459
tagtggcgccgcaagcaagacaagccctcgcctccttccccttcccccaaacccctcgccgactcagatcccgccgccgcgcgccgcagcagccgccatgccgttcaccccgggcccctactccggcgtcagcaccctcgccctcgtggcgagggcgtcggccttcggcgttggcgtcgtctacgggagcatcaagctctccatcctcaaggcgacgaaacccaaaaaggaggaagcacatgctcatcactaaggatgacggggatgcgtgttaagctccaatgcaagaatgtcataaattggcagtgtacctgttctccatatgtgcatttgggttatgatttgtggacctcttctctgtaacacacctgctgagtttaccttagttttgcatcgtaataagttcttgatcccatgacttgaaatcaggaagtaaagggcaaaagctgaaaagaaccctgtttttttgtgaagcctttttttaagttgagaaatgaggataagtggtagtttaaacaaaaaaaaa

SEQ ID NO: 13486 - DNA, 246 bp, Setaria italica
  Peptide Sequence Number=SeqID_79460
gtctacttatttccgctcactcagtcccaacggtcaaatttcagatcccaacaccaatctgttctataccaatatgtttgatgcaatcattgatgctacttacaactcaatccaagcaatgaatttcacggggattcctgttctggtcacagcttctggctggccatggcgtggtgggcaaaatgagaaggctgctactgttgataatgctttggcctacaatacgaacctcatacgtcatgtact

SEQ ID NO: 13487 - DNA, 651 bp, Setaria italica
  Peptide Sequence Number=SeqID_79461
cacagatctattgcttactgtcactgaaagcagctatgagagaagtggatccacccttgtgattcctcctagttttgagttggatggacatgcaaggcatttgcttgaaaaaagtggtctttctcttgttgatccatccatacagcacgttgtaggcaaaatgcctgtgttagatttgatggatggatcttcttcagtgataagttgtaccaataacagtgagtctgtaaagaaagaatttgacaaagaggttaaagcttatatgtttgctcctgatggacacactccagcaactgaactttcagttaagttgaatgcatatccacctaataatggaactgaaacaactcggcgagattggtcaaatcccttcctccttgtccctggaagtggttcaacaaatattactattcctcagtcatctacttctggtgcctttttagttgcagcggcatccatacctgtttcaactgaactttttggaaggacaagagctattgctttcagaccaagatatgtgatatgcaatgcttgcagcaatgatttgttctttcgacaaaaaggaacgaggttttctaagcacttaagttctgggcaacactctttccttcactggtctgatacagcaagagagttgctggtatccattcg

SEQ ID NO: 13488 - DNA, 781 bp, Setaria italica
  Peptide Sequence Number=SeqID_79462
cccatcccatcactctctgctcttgctccaacaactccgcagagagagaatctagctcggccagtcttcttccccgggctccccccccccggacgccctccccctcatctccggtcggccggcctctctcccggcgccatgtcggcggcgttcaaggcgttcctgaacagcccgttgggccccaagacgacgcacttctggggccccgtctccaactggggcatcatcctcgcgagtgtggccgacaccaagaagcctcctgagatgatatccggcaatatgacgggagttctgtgcgtgtattctgccctcttcgtcaggttcgcatggatggtacggccccgcaactacttcctcatggtaacccacagctgcaacgaatgcgtccagctctaccagctgtctcgctgggctagggctcaggggttccttgggaagaagaaagagccggaggccccaagagtaaagaagatgaccctgaggccgaggaaaggaaactctgaagcgcatgcttccatcatacaaattatgtattattaccacagattgaacaatgtaacaacgtgacatggaaaactttggtttcatacatcatacatgttctgccacgaagctatcctagcactgtaacacatgacattttctgaattctcattgctccatcacgaccgaagttttggcgcacaatgaattattgattatttggcttagcgtccccttattcagaaaacactttgtcctctatatgtgcttgcccagaagaatcgttcaagaatctttt

SEQ ID NO: 13489 - DNA, 282 bp, Setaria italica
  Peptide Sequence Number=SeqID_79463
ttggaactggaaggcaactgcgtgcactctgctcggacctggtgaggtcaaaaatctttgggtcattcatcgacaatgttggacggatactcatggctagttttgcagggctccggcttgtcctaaaacggttccggctctgactccttgggtggagcggtttctttggtgtagatagagtcgttttgaaagtgtttggtaaaacagcttctcttgtatttttggaatagatgtaagaggtcaaatgtcctataaaccattggataataaaaaaaaaaaaaa

SEQ ID NO: 13490 - DNA, 621 bp, Setaria italica
  Peptide Sequence Number=SeqID_79464
catctatcgtttatgtttgtttaggtaggttttacttccttcgtgttgcagaggtttgtacgagatttcgagttgtgatgaacaactgtgttttggtactagagtttctgatactgctaattcgtggtagttgaagaccaaacccttggctgtctgaactcaaatctcgcaaatcagcaatagctttgtcgtatttagagttgagattaggttccgtctttctaatgctttttcttagatgcgtccattaccaattctggaggattatttcgtttctctcggtataatggctcggacgcgacatgctattcttgtggttatatcctgattggtggcgtttttgtgccaatccaatcctggaaaggccacataaattcaattacatttgtatttgattttttatgtcttcttgagatcgagggatctatatgatgtgaaactttgaaagggacagcgccttatcagtttgattgtggcgtaccatgacaactctttcatattgaataggaagatctgatagatccctcaaacatttatcttgtttctttgtttttctgtttctattgtctgatcaaagatgtggatgatgataacaaaagtaaaatacagttattcccttga

SEQ ID NO: 13491 - DNA, 466 bp, Setaria italica
  Peptide Sequence Number=SeqID_79465
gttccggccgaagacacatagatacgttagtttggccaggctctaatttcgacaagatccgaactccagagactccaatggaagctccaacaacttcaacaagagccctggtcaatctaggaaacgcgctaaggatttttaatgaagggctaggatttatatggtgctctaaattcattcttgagaaataggtatctacaccgcattccgttgcgaaagggactaatacaagcgatcagcggaaccttcagagtaaggcccccacaattactctccggacttttaatttgcaaggctggctggtcaggctcggaaaacctatcaaatagataactaatcatctataacctagtagtagcccaataattcgcccacaacggtccaaaaaaactatctcaacattttagaatgttggtgaatgttaaaaaaatgttgagccaaaaaatattggtgaatgaaaaaaaag

SEQ ID NO: 13492 - DNA, 910 bp, Setaria italica
  Peptide Sequence Number=SeqID_79466
gctgtagggtcgcggtagcggtccgcccgtggcgcccctggtggcgacgcgagcagaagggcgatatgatcaaaacattatctacagaaacagaggagcaaaagaagaagcagagcagcagattacaagcacctggcaatacgttcgagtcctcaaattttcattctgctcacacattattctgcaattgagggacacgaccaagacccggccaaggatctagaagatgtgaagctgaagttccggccgaagacacatagatacgttagtttggccaggctctaatttcgacaagatccgaactccagagactccaatggaagctccaacaacttcaacaagagccctggtcaatctaggaaacgcgctacggagttttaatgaagggctaggatttatatggtgctctaaattcattcttgagaaataggtatctacaccgcattccgttgcgaaagggactaatacaagcgatcagcggaaccttcagagtttaatatgggctaccttatggacttatggagggcatataggagctcccggccaggccgcacagtcgttgaatgggcactgctatatcaagtcgcgttccatgccaacaacagagaactcacaccgtcaggacctgatactgcgcaaaaaagaccaacaatagtatgtcaattgtgtttcaagttaagacaccatttatttttttcttttacaactcttttatggtacacaatactaggctatactagtgtcaaaatttattgtttagacattcaatggggaggatggtgggaagctctaagctcttatcccttcaacctacccacaccaaaactgtgtttccatgacccttcctagctccgacagaagaccagaatataatatatgcttatgaacttgtggccaacaaaaaaaaaac

SEQ ID NO: 13493 - DNA, 321 bp, Setaria italica
  Peptide Sequence Number=SeqID_79467
tactttgtctaagtagtcgtcttgtagttatttctattttggtttcctaggttgtattgtctttacttcatgagcaagttaaatgattctgtgctatacatgaagctgcaatctgcacataatgatgctcgtcgaatcttggcacagatgatttgggttcttttaattcagtgaactgttctttcaaatggccacagaagcatactcacaccgttagaacccggtattggcggcaatgtttagccgtgcgggtcaaaatgatgttgatgttgactctgatatttgtaaaatgttttattccattgacatttttacaaatat

SEQ ID NO: 13494 - DNA, 2268 bp, Setaria italica
  misc_feature (2239)..(2268): n is a, c, g, or t
  Peptide Sequence Number=SeqID_79468
ctccctcctgctatccgttgtccggcccccgtccgtttcccacgatttccgcgtcccacccatcccctccacgcttctctattaacgcgccccacgattccgccaccgaaaattaaagacgcgagcggcgaatccctagccctggcccccgaatcccacccgaaatccccgagctcgctcgccaatccgatccgccggccgcctcacttgccccgtcgccggcggcggttcccggcgcggaatctaccttttgcgttgggagatccggggggaacccctttatcctgggcgtccggggctcgaatcttgcggcgggcgggcaatgtgagcggtctccgtcggagggggacgatctgcggcgcggttcgtgggtgaatcttgcggcggcggggcggcgcggttggcggggatggagcacgtgatcggagggaagtttaagctggggaagaagattgggagcggatcttttggggagctctacctcggcgtgaacatacagagcggcgaggaggtggctatcaagttggaatctgtcaaatcaagacatcctcagcttcattatgagtcaaagctatacatgcttctccaagggggaactgggattcctcatttgaaatggttcggagtggagggggagtacaatgtcatggtcattgatcttcttggtccaagcctggaggacttattcaacttctgcagcagaagattctctcttaaaacagtacttatgctagctgatcagatgatagccagggtagagtacatgcacacgagggggtttcttcatcgtgatatcaagccagacaacttccttatgggcttaggccgtaaagcaagccaggtttatgtcattgactatggcctagcgaaaaagtatcgggacctccaaactcataaacacataccatacagggagaacaaaaatctcacaggaacagcacgatatgctagtgtaaacacccatcttggagtagaacagagcaggagagatgacctagagtctcttggttacgtgctgatgtacttcctgagaggaagccttccttggcaaggcttgaaagctggcacgaaaaaacagaagtatgacaaaatcagtgagaagaaaatgctaacttcaattgaggccctctgtaaatcttatccatcagaattcggtacatacttccattattgccgatctttgcgatttgaagataagccagactatacctatttgaagagactcttccgagatttattcatccgtgaagggtaccagcatgattatgtatttgattggacagcaaggcaagctgcggacaatgacagattgagactgagtgggagaggtgggttggtgggaccatctgcagaccgggctgcagcgagacaggctgttccggatagatttcccggtccggttgatgcatttggtagaagaatcgactctggttctggccattatggagaacaacacacaaagcacagaactctattggatacacttttagcacccaagacgactgttgattcggatagaagaaggccttcatcatcgcggaatgggagtacatcaaggaaggcccttctgtcaagcagcagaggctctggagatcccagtgacccgaatcgcagtagccacctactcccaaccagcagtggcagcagccgcccatcaactaatcaaaggcttcaccagtcaacaggacttgagggcaggacctcatcattctcgaaaccaggaagaatcgtccatgatgataccactatgaggaactttgaacgccttactatcagtgcagacaggaggaaatgaattttttactagagcaaaagatctgagttgctctcacttgcaagagcgctgagtattcatttggttccaggtgatgcttactcatgagcaagttaaatgattctgtgctatacatgaagctgcaatctgcacataatgatgctcgtcgaatcttggcacagatgatttgggttcttttaattcagtgaactgttctttcaaatggccacagaagcatactcacaccgttagaacccggtattggcggcaatgtttagccgtgcgggtcaaaatgatgttgatgttgactctgatatttgtaaaatgtcaatggaataaaacatttcggtagacttgcgttaccttaaatatttttgtgaaagttgaatttttgtctatgcaaaggggtttcgtgggtggaagacacttcgtctatacaaagtggattcaaaatgagttttcagnnnnnnnnnnnnnnnnnnnnnnnnnnnnnn

SEQ ID NO: 13495 - DNA, 895 bp, Setaria italica
  Peptide Sequence Number=SeqID_79469
ggccggagagagcgaggatggagacgacgcagggggaggccgtggaagcagcaggggaaacagtgtgggcgtgggtttggaggacgacgatgtcttggtgtcgccacggggtaagaagcgggcggcggcgcgggtggtcaccagtgatagcgaggatgaggctgtgaatgacggcgagcttgggagtggcaaggatggtgttgatgatcaggaggaaggtggtaagcccagcaagaagcgtgggttttgtggaatctgtgacagcgacgatgaggataccgctgagggtgtcgaagtggttacttcgaaggctgcttcaccggcgcagattgagagtggggaggatgaggatgaaacgattcccatttgtcaggtgctgaagaagatgaggaaagagagggcaaaccatgatggtggtggtgatgatgaattaggtgaagcgaaagggtgttctactcccccaacaagacgctcggctcggttggttaaaaatcagtctaaagggggacgggctgcacgccgggttctcaactttgttgaacccaaggaatatgaagggagtgaagatgatatggaagaggatgatgatatggaagatttcataataaatgatgaggattcttcagaaaatgccagtgaatctgttgaagaatcctgcgacgaaccggaagtgtctggtacatctgttctgaatgaagaatcctctccaggaccagaagagtctgacagtgaggtagactatgcagatgttatggctcgcataggccgtaaaaacaaagctaaagactggaaatttgagggagatatgctagcagcattcgatgaacatcccgagctctgcctgaaggctgtttgtgctctctatcggaagcaaactgaagaggaacaaatgcat

SEQ ID NO: 13496 - DNA, 508 bp, Setaria italica
  Peptide Sequence Number=SeqID_79470
cgtaattccaaggtaagctcctgaaagaagcaaaagtgatctatgatgagaaggaaaatagaagtgttcagtacaggggcggacacagtagaggtacatgggtgaacagatgtacacccaataatttggacagaactctttcagctagtatgtatatacatatatagttacgtaactaactgagtcagactgtatttgcaagtatctgggactctggaagccagcctgcttgctcagcctgctgcctcaaccggccccaatccccccttccgcctttcaactaatcggcatcagttcatgtgacctcgactccaacgcctgtttctttcgtctctcaactttctcatccgcttgcgctgcccgccggcacctgacagaggagcgcaagagcggaggaatcaaggttcgtgctggcttgccggctgctgatctgacggaggtcctgttggcgccggctgcagtgccatgcttgctgcagctgcacagtcggccatggaagacgcagaac

SEQ ID NO: 13497 - DNA, 232 bp, Setaria italica
  Peptide Sequence Number=SeqID_79471
agcagcggcagcagcaggaagaggggacgaggcggactcgtccgcagctgccaccaccgcgaacaacagcaagcgccctcggctggtgtggacgccgcagctgcacaagcgcttcgtggacgtggtggcgcacctggggatcaagaacgcggtgcccaagacgatcatgcagctgatgaacgtggagggtctgacgcgggagaacgtcgcgagccacctgcagaagtaccgg

SEQ ID NO: 13498 - DNA, 430 bp, Setaria italica
  Peptide Sequence Number=SeqID_79472
aagagagtagttggtataaaatggtattactggatatttgtcatgatctttttgctagtcaacatcaccgggtggcactcctatttctggatctcgttggtcccgttgtctctgctgcttctgatcggggcaaagctggagcacatcataaacaagctggcctacgaggtggcctcgaagcacgccgctggccgaggggaagggggcgccgtcgtgcgcccttcagacaagctgttctggttccacagcccccggctcgtgctcgtcctcatccacttcatcctgttccagaacgcgttcgagttcgcgtatttcatctggacactagcgaccttcggtatcaactcctgcatcatggacaaactagggtacagcgtatcgaggatcgtcgtatgcgtcatcgtccaggtgctctgcagctacagcacgc

SEQ ID NO: 13499 - DNA, 482 bp, Setaria italica
  misc_feature (454)..(454): n is a, c, g, or t
  Peptide Sequence Number=SeqID_79473
agagaagtagttggtataaatggtattactggatatttagtacaatgatctttttgctagtcaacatcaccgggtggcactacctaatttactaggaatactacgttaggtacccgttagtactactagctagcttctgatcggggcaaagctggagcacatcataaacaagctggcctacgaggtggcctcgaagcacgccgctggccgaggggaagggggcgccgtcgtgcgcccttcagacaagctgttctggttccacagcccccggctcgtgctcgtcctcatccacttcatcctgttccagaacgcgttcgagttcgcgtatttcatctggacactagcgaccttcggtatcaactcctgcatcatggacaaactagggtacagcgtatcgaggatcgtcgtatgcgtcatcgtccaggtgctctgcagctacagcacgctccccctntacgccatcgtgtccccatactggggga

SEQ ID NO: 13500 - DNA, 597 bp, Setaria italica
  Peptide Sequence Number=SeqID_79474
tttgttcttatttgttattgttggtcctagtgtcctagtaggtttcgttctaaagtaagttgttattgtagtacactgagggccagtccgcagtggaatgagacagccctgcttatcacatacgatgagcatggtggattctacgaccatgtcccaacgccggttgtcggagtgccccagcctgatggaattgttggcccagacccgtactacttcaagttcgaacggctcggggtgcgtgtgccctccttcctcatctcaccgtggattgagaaaggaactgtgatccatgaaccaagtggtccgcaagaaagctcacaatatgagcattcgtccattcctgcaacagtaaagaagctatttaatttacactctaacttcctgacaaagagagatgcatgggctgggacctttgagaactacttcaaaatccggaagacaccaagaactgactgtccagagacactcccagaggtgacaaagtcactgcgaccatttggccccaaggaagattcatctctgtcagaatttcaagtggaattgattcaacttgcctcaacaagactttaaattaggttagtaattactaattagtta

SEQ ID NO: 13501 - DNA, 505 bp, Setaria italica
  Peptide Sequence Number=SeqID_79475
atcaggtttagcaaggtctgacaatggaggcatagctctacgttttagaaacatgatcctatctcggcgaggggagatataataactgggagtcggtggcacatcaacaatctcttggatttcctttggagggagacgatatccgagatctccatcgtcttcctccagagcagggcccgagaaggaaccggcggcgaactctgccgtcgcgaggccgatgcgcctggcaatcctccgacgaggcaaaaggcgcagaggcgtatgggtacggaatggagccgagtaagatggtccggcgatgaaattggcgcgggagaagcacatgcgctggtcaaatctcggaagcagcatggaataagcgatttttcgaactgtccccttctctcctctggcggccacggggatgaacgagtccgccggcgcgcgcgattgttttacctccctccggcggcctctgctgtccctgtggtctgtggaatggacaagtctttgaggagagcttggg

SEQ ID NO: 13502 - DNA, 799 bp, Setaria italica
  Peptide Sequence Number=SeqID_79476
ctgttgccgattggaggtactacttggcaggggcaacttactagcaccaggcagtactactttaaaatctcgcgaggctgcggcactgggaggtaaggtacgacgacccatcccatccatctcctctgctccaaaaccaaacatcaagaaccacagggaggtagagatgatagaggagagagagacatagatggccgtttctctcactgcctctcctttcaatttctgtacggcgagtgctcaccggatccaaggagaacaaaggcctcttctctttctcgttcttcctgttgtgcttggagggtttatttgggtttttttcctcttcggtttcatggttggtttcatggttatgcaacttctgcttggattttcaaaggtatctggctgatccgtgcgaagtcattgagtaaggcgcttctaggtgcggagaggctccggagagattgacagaagagagtgagcacacggcgcgatgaacagcatagcgtgtgtgctgtcctcgtcgcgtgctcactcctctttctgtcagcctctccatttcttgaggacttaactcccaccgagatccgctagtgggagtgtaaaaccgtttattattcaatttcattccaattctatccaattcatatgtttttatgtagtcttttccttccaagaaagggattatgtgggctacttttggaagaaactcaatcactaaagacagagcacgcatgcctctagtaccgtggctcttctcctactttacacctccacttccttatctcctagatcttcacacacacttggtttttcc

SEQ ID NO: 13503 - DNA, 375 bp, Setaria italica
  Peptide Sequence Number=SeqID_79477
tgtttgctcgtcagttcaactcgtaagatcaactccttttttggaggaagttctttcataacatctttcttgaatcagtattcatggacaataatacgagtttcccaagcaataagtttgaaatcctttgaacaggggcagccaattaaacaatcattgaattgaagtagattcgcacttcgaagaagatgtggcttcagcattccatgaagcttctcaatttgcttgtcttggtttatatccttgaactcctcttggagctcagttatactcccaaaactttcaccctcaaggaagtgcataagcatgaaaagctcatcaagattatctgaactggggttcctgttaatgcacacgatgtacggtgttatattc

SEQ ID NO: 13504 - DNA, 519 bp, Setaria italica
  Peptide Sequence Number=SeqID_79478
agttgggggcagaaaaactgtgtttcatatacagtgaaatagagaatacataagaaaatgaaattaaacaaacaaaattgatggttcttctccagttgttcttgtgtatatgattgatttagagtataaactgcccctttactgcaatgattacgaatattctaggtttccaaacataatcaaaataattgccaagctccaggacatttttgtaaatcattttgtgaatttgagaataatttaaataacttcacatcacaaaaggtgttgcatgaaatatcttcccaaggtgaagaaaattacttctcaattgcagcatcatcataatgaatttggcgagactcatcattctcatcgtcaaaaagctcctttgatccatagcgtataatatcatctagctcctcctgattgacattattagcttttgtgagtcgaccaacaactaagtgctccaatatcatctttttctttgtaagctgcatcattctctcctcaattgtgccctcggctaacaagcct

SEQ ID NO: 13505 - DNA, 1262 bp, Setaria italica
  Peptide Sequence Number=SeqID_79479
gtgcagcctcaaaaagcccattatctctgtcatctgatatatactgccaccttgcatatccatgcctaatgaagggaaaaccaatcaattagcaattggtaaagaatgaactagccatgagggaaaaaacatgcaaagtgatcttataatatacaaaagcaattaaaggtgttcaacgcgcagatcaaatatttgtagtttagtccttaaaacactgcagcttccattaagcattctaaaagaacagctttcattaagttatctacataattacaattgtaaaaatctctagatggagtcataataaaattgaagttagatatcaattgtggagctcatctgggtcgtacctgatacttcagtttgcttacttccattcaagttaagctgaattgttttaattaaacaagtattccccgacacaatatctcaaaaagcactagggactaggcggcacctaggcaccacctggaagcgtgtgagaggatgcctgttaggggaaccctaacttgaccaagaagcatgatacagacccaaccaaaagattaaaaatacagcctgctgtacaactgataacccacaggtctgcaagtgacccaaacccctctgccatgtcaatgcaaggccgcaactgctggcactgaagaaaaagtaataaaacattgaccttttaagctattctagccacaaaatttaggtagttacatgaagggatgattttgtaaagcttaattgtaacaaagtgaaatgtcaacagatacatactttagtatcccttttagtaacagtaaatcatgttctgctttccatattcttccaccagataagccttggaactcacaaagcaagtaattaggaaagaggtttgtaatttttccttgtcccatggcagccaccttctcctcgataagggatatatttgctattctgaccaacacattcatcaacacgaatcccttcctttggaacaccatctgaaaaatagtctgaatcattaatgtcctcaacaagatgggccatgacaagttcagcatatctctgaatttcctcaacactttttcctttcagacgaggaagatactctttccagtcatagttctgaaaaccgtatctattgagtgtctgtaggaacattgctcgttgagcagtgttgaatccaagaactctcaaggtacgtccttctccctccatcaatggaatcaaatcaacattacgtgatttttcttttagaatattggcccctcttccagaaacatttcctt

SEQ ID NO: 13506 - DNA, 693 bp, Setaria italica
  Peptide Sequence Number=SeqID_79480
cccgcatttcgcaatctagaatcttctccatctctgtcaacggacttacgcattccgggcagctccatttatcagatgtaatgtttaagcaaggaaccaagcattttctgtgaaatgcatacgtgcatgttgaacaagggacaagattatcactttttccgcatcgctggcaagcctcttctttcgcatcctcgcgctcgatccgctcggcaggcgcttcgttttgccgatctttccccttcccggccccgccgcgcggcgggaggtcgtcgtcggactcgtcaagcgtgtacagcggccgcctctccgaccgcacgcgcagccgctccacgagactgctcatcgtggcgctgcctcctcagctcgacacgcgacgggatcaaaacccagcaggcgagaaagcagcgcaactccctctctgcctccgccaagctctcgctccacccctagcgccgccgcctccgagtgggctagggtttggtgggtttggggagcggcgatgagtggaggggggttatttctaccgccgcggaggggtgaggtgccgtgtggggaaagtgcggcgagaatggaaggtagtagcgacgaggtgacgctcggcgtgagctgtgggcggaggaggcgcgagggcggcgagggggtctctctctctctctcctctgcacgagagaggagagggggagggtggcagtg

SEQ ID NO: 13507 - DNA, 4287 bp, Setaria italica
  Peptide Sequence Number=SeqID_79481
ttgacagaaatggcttgtgtaaaaagtgaaaaacatacaacgaaggcaaacgaaaccgggtaacttagcactatcagaacggttcgccggcacgcattagcagtaaaggtttgcgatgatgtctcatgtctggggttgctttacttgatgttacaatatatggtagattctgaccaccagtcaaagtaaattaacgggattccctttcctatcactctggcatcagccgtcgatttccatcgcctctgtcttggcagccggaggttcaccattcgctgccgcagggcctgaatcttgcgggggcgcagcagcttctttggagttggcatctactgcttcctctttgatggcactggcggtaccgttctgttggggttgcagggcctgaacaacaccctcgcacaaagtttcaaactgatgaaggctactggccaaactagaagacgccgacttggcaccgaagaacgaattgagcgcagaagcaccgctgtcttcaagcacgccacacatcttattgtaaagatggggaacttctgatggaccacctgtgccatcaggagctacttcattggtaggaattggctcaagattttgcaattcttgcaattccaccaacaattcattgatatctcgaacagctggagcatgacctgctggaacaccttgttcagcaatatcatcaggaacaggagtatttgactttatcacagcatattccagatccaagcatctctccaggatatggtatctctttctcaagaactcaactatctttctctggatctccttgaaatgggcacctgctgagttcacctgggcttccctgtgcgccttccagatttccattttccacatttaactgaggacccattatttcattaatggaagggagattcagctctcgtcgtgcagcctcaaaaagcccattatctctgtcatctgatatatactgccaccttgcatatccatgctttagtatcccttttagtaacagtaaatcatgttctgctttccatattcttccaccagataagccttggaactcacaaagcaagtaattaggaaagaggtttgtaatttttccttgtcccatggcagccaccttctcctcgataagggatatatttgctattctgaccaacacatcatcaacacgaatcccttcctttggaacaccatctgaaaaatagtctgaatcattaatgtcctcaacaagatgggccatgacaagttcagcatatctctgaatttcctcaacactttttcctttcagacgaggaagatactctttccagtcatagttctgaaaaccgtatctattgagtgtctgtaggaacattgctcgttgagcagtgttgaatccaagaactctcaaggtacgtccttctccctccatcaatggaatcaaatcaacattacgtgattttcttttagaatattggcccctccttccagaaacatttccttgcaaacttgtgtcattatctgacacatcctcctcaaacgagtaatcctcatcttcagagcttaagtcatggatgtcatcctcatcagcagcagccatctgtttgcggcttcttttcccttttcccatagcggtatgttcttcaactttctgtacatcgtatttatccttcaatagttcatcccaatagtttgctcttgcggagtttgcagcttcagctgcagcctttctgcgtgcctcctctttttccgcctgagcctttgcctcgtcaatgtattcaaagttcgcgaccttgaatccttttaagaattcgtcatcttcatcatcttccacagattcttcatcatcaacttgcttacgatctaacaacttctcaattgcagcatcatcataatgaatttggcgagactcatcattctcatcgtcaaaaagctcctttgatccatagcgtataatatcatctagctcctcctgattgacattattagcttttgtgagtcgaccaacaactaagtgctccaatatcatctttttctttgtaagctgcatcattctctcctcaattgtgcctcggctaacaagcctgtatatcatcaccttgctagtctgtcccaagcgatgagctcgtgccatagcttgcaaatccgcatgtgggttccaatcactatcatagataattacagtatctgcagtcgccaaatttattcccagaccaccagctctggtagatagaagaaagcaaaaacgagtcgaagtcggagcattgaagcgatctattcgtatctgcctttcagcaccacctatcttgccatcaatacgctcatagctccatttcctgtaactcaaataatcctccagtaagtccaacatgtgttggaactgtgaataaattagaactctatggccctgctcttttagtttcaccatcatcttgtccagcagctgcatcttacctgacgaatctaaaagcctccttaaaccttcttctggattggcaggttcagaatcaggttcatccgtcatgaatccatggcaacagagtttgcgcagctccattacaacatttattagggatatttgtccaccattacgacgggctaacacttcataattcttggtgagaattgccttatagtactccttttgtttgctcgtcagttcaactcgtaagatcaactccttttttggaggaagttctttcataacatctttcttgaatcttcgaagaagatgtggcttcagcattccatgaagcttctcaatttgcttgtcttggtttatatccttgaactcctcttggagctcagttatactcccaaaactttcaccctcaaggaagtgcataagcatgaaaagctcatcaagattattctgaactggggttcctgttaatagcacacgatgtacggtgttatattctttaagttgaccaaacaacttggaatctttgtttttcaaccgatgcccctcatccacaaccaagcattcccattctatgttttttagaacagctgagtccatgttgatcatctcataagatgtcaacaagacatcaaattttatcctcaaatgcttcttttcttcattagatggagatgatttctttttcttaagcttctttgctttctcttttgggtagtaaaactcatacttcttaataatttcccgagatgcagcagctccaaaatacattacaacattcatttgaggtgcccaagttgcaaattcacgctcccaatttcgcagggttgaaaggggggcaacaaccagatgcggaccaaacttgtcttcaaacagggaagccagaaaagcaatactctgtattgttttcccaagacccatctcatcaccaaggattacacgcttgttatgatgccacgaatagcgtaagaagtttaacccttcaagctgatagggatgtagcgtgccaccagaaagaaattgagggctctccttgaaatggcgtggatcacgagagacagcctttcccttgtcaccatatttcttgcgcctggactggatctcattaaagcgttcgatctgaggttggaacgccgagatgtcagactcactttcccaagtacattcctcatatgtaagttccttccatttcacatagtactcctgctcgcctgtggagctttttctgctagaaaggatcctgtcaacagttgtccactccggtctaattgcaataaattcatcatcagatttctccacggaatccatttgcttacggaagttattcaacctagttttcaatcgagggtgtatcttggcagcttccaaatattctttttctgaaacccaagagcagtgaatgtgtgataatcctttccactttataagatagtgcctgatcttctttgattcaggctctgaggaactggtatcttcacgagaggcatcccgcatttcgcaatctagaatcttctccatctctgtcaacggacttacgcattccgggcagctccatttatcagatgtaatgtttaagcaaggaaccaagcattttctgtgaaatgcatacgtgcatgttgaacaagggacaagattatcactttttccgcatcgctggcaagcctcttctttctagtaaatagtttcttgaaacagagtaacaactaatccacctctccacttccgtcaacactactccctcttcgcctccaccaagctctcgcttcacctctagggtcaccgcctccaagctctacctcattcaagcgctatcgttctcttcctccgccaagctctcactccacctctagagccgccgcctccaagtgacctctctacctctatcaagcgttgctccctct

SEQ ID NO: 13508 - DNA, 1239 bp, Setaria italica
  misc_feature (1178)..(1178): n is a, c, g, or t
  misc_feature (1194)..(1194): n is a, c, g, or t
  misc_feature (1216)..(1216): n is a, c, g, or t
  Peptide Sequence Number=SeqID_79482
catctctcttacccacctcggcgcatcgcatggcggcgcccgcactcctccctccccctccgatggacggagacggcgccgccccgcccgtccccgcgaccccggacccggcctcgcccccgccggcgccggagccgaagccccacttctgcgccggcgtccgcccgtccgggtgacctcggagttcgacagcgagcggcggctcttctcgcaccgcttctcctgccgcgtcctcgacggcctcgccaagctccgcctccgcgtcagccacggtgcagggggaggagggatcgcctggggcccgcccgatgtggccctcctggcgcggaacttctccgtcgtcgtcgaccccgcgtcccgcggcgccgtgctgcggggcgccgccgacctcgccggctctctgcgcctgcgcgcttcgcacaacacgaaggagcaacaaggagaagtgtcagttactgcaaatttgggagattcaccatgcaagattgaattatcatctctggttcctcctaatggactgccaagagcaactttcttctttccaaatggtgaagtttcaataaaagagaagatattggatgagggtaacaaaattttgtcagtaaacggcctagtgaagtcacgtgttttgaaaggagtttgcacaactgcgtacaacgataatgcaatgaacattaaataccgctacaaggatgatgagatatcatttatccccagcatctcgctaccatccaattcactagcattcgcattcaagcgccaattaacgccatctgacaagctgagctattggtacaatttcgacacaaattactggggtgccatctacaagcacaaggaaaataagcatctcaagtggaaagctggttatgagtcagacaacaggcttggatgggcatcactttgggttggagatgctggcggcagtacaaaggaggtgcctttgaaggccaaagcccatttcacgcttaaagtcccccagggcaatataaagaattctgtcgtagtgtttcatgtgaaaaaaagatgggatttttagcttctagcgcacagctaaaagagagaaccaacaagaaaactggaatgcatgtaaatttgtaacctgtccagctaatttgttatgcacagatgccatgaataaattatgtgatgttttttgcaaaaaaaaaaaaaaaaanaaaaaaaaaaaaaaanaaaaaaaaaaaaacaaaaaacngagacacgacaaggaggtagaga

SEQ ID NO: 13509 - DNA, 258 bp, Setaria italica
  Peptide Sequence Number=SeqID_79483
cctcctcaaatctcatctctctcaactgcttcaagaagtaaatatcaatttccttcagatttggaaatgcctcccttctgaatactaatttctccccaacataagcattccgataaagacgaaggagcatgagattgggcagtgtcccaagaacctccattgttttaccttcctttagcctactccttgataagtgcatcttcaccagctgcttaaggttaccaaaccactttggcagatccaaaagagatccattct

SEQ ID NO: 13510 - DNA, 315 bp, Setaria italica
  Peptide Sequence Number=SeqID_79484
gcaacgtccagcgcgttgacgcccccgtccaccgctgcaggggactcactcacatgctgcaaaaagggcaccagcagcgagctcaacttgaaccttgacctggaagaccccgatgatgacaccgatgctgatatgagcacggatgagccacgcgacgtagaagatagcaacccgcgtccagaaagccggttgaagcggaaagcattttagccccgtggccacctatagagatgtggattggagcaccagctttgtcttccaccggaaccttccgcccacgaagcggatttcgtgtaccataatctaagcatgtaa

SEQ ID NO: 13511 - DNA, 380 bp, Setaria italica
  Peptide Sequence Number=SeqID_79485
aaagcagattctacttcagctattgaccctgtttggaacaaggcacagatccttaagagagcttccaggagaaggtttgcgaacagctgattgctttgatgtccctggcggagatatcgaggtctccatgaaatttcaggaacacgcacagtatctgaaagagcaggccaactgctgttattggtgcaaaatttttcacgacagcaacactatatgtactgtactactaatgttacagctgatgttgttcttaagagaagtacaattctggtgtaattacaatcctatctctgcagggagaaatgcttgagtggacatcaactccactatctaagactgttttgccatccgtaagaaactatccaaataacctaagacag

SEQ ID NO: 13512 - DNA, 491 bp, Setaria italica
  Peptide Sequence Number=SeqID_79486
taaccaagctgaccctctctatttgatccccaagtaaacaattcccccacctctgtagcaatcacagtatgatgtttggcagcagccacaacattcactcgtttacggcctaatcctactgtcacttggcgaggggtaatcacagcagttgtctggccactgtgaatatccggatgaccaagacgaccacctcgaccaaatccccatgtgtacagttcaccgtcagaactaactgctacactatggaactttgatgcagcaactgtttttatatatgacccatgcaaggtatctactttgcatggtagtttttgtatgtgggcattgccagttccaagctgataatttgtcccacttccccaactgaagacctccgttgcaactgcatcaggagaatctccattggcctgtgatactgggcaggagagaaggtcaacaggtgtacggcccttagtgtcctccaaagtgagggaagcaccaaactgcaaaag

SEQ ID NO: 13513 - DNA, 3550 bp, Setaria italica
  Peptide Sequence Number=SeqID_79487
ttttttttgggtcttagtcgccgaagtgaacctctgaaattaaattgtcaaatgcctgagtgcggacgcaccacagtttgagctctgattgcaacaaccaaagagactttggtgggaaaaaaaagacattggttgaagttaaaccaagccgggtgatctcacatgacctatacatccatctgtgatagctaaatgagatcacttcagcgaaaacgaaagcaaatgttgctttggaattttattcagctaaaggaacctatggtgaacgaaactgactgtacacttcaatgtacaatgaaccagtaaaatgtgaggtgagcctaaaagggatcagtaactcttcggagaggcaaaggccgcagtcatcactagacctgcggcttgacgatcctcacactgctgtagaagcgcttgaagtccttcatcgcctgctcctcaatctggattgagcggatggaggacggggcgtcagtctctggcttgaaccagcggttgggtacgttgtccttcacaccgccaacctctggtgatccaccatgggatggtatagcgaagcctgatgtccgggttttcgggctgtgggagatgctatggtgacgcttctcctgctgcatctgtatgtccctgagcgaaggccgtgacacattgggtgaggtagcagaagacgaccatggtggtgtgctcctgtcaccttcagaagaaggcagcgaacgagcaggtgtgacagctatagggcttgaatgcgcatctgggatgaatgaagaaagacgcacacgcccagcactgtcaggtgagttctcaaagcgatcttttgctttggccaggactggctcatttgttttcctctgctcactttggatatcacgaagggaagcaggtccctttgttatctttgcaccaccccaggcaggtccttcatgctttggtgtgacatgcacaacaggggcagggagacttggttttggggtgtcatcgagagcaccactcaaaaacagtgacaagccacctttcctatttttcttttttgacgaagttggttgggaaggtttcttctctaatggagaagcaatgccttttgtgttgctgaaagcagcatcctctgtgtgtttgattggatcagcagcacacacctcctttttctgcagagacattagttggtaggacttcctggaggtccttaacaggaatttgttgctcggtttcacttttcgcggagggagtattagactgttgtgcctgcttgtttttcctcttctgtttcttggaaacctcaggttttctgtttgtcctactttctgctggacaaacagaggaagttctagagtatgcctctgagggaacaccaagttcagcaagttcaccttcaagggcagccctagactcgagcttcgctagctgctgatcatcaagttgatggcctgtaagttgcttagcctcaagaatctcaatttgttgcagcttcttgcgaagtgccctgatctgcttagagacagcttgttcagcagtgcagtctttctgaaggaagttttcctgacttgacattccagatggccttgatgcagacttcccgcatttccggggcttaaggaattctattgcttcatcttcctctccatcactgtcaatgacagcaggatatgtagctgtcattgtgggaagacggcgctgacaccaggcctctgaggatttttcatccagcaatttttctaagcttgcaagaatttcaggagacgcattcataattgaaggagctccaactgtgaaaatgtaatcgaggttgcgaatagctaaatcctcacaatgcttcttgagctccttggcttccaaggaatcagcaacttcaagaagttgtatagcattttttggctccaataaatactcaactgcaaccttctcacagaggcttttcaagctaggtacggttttgctcatttcaccactgcttcctgataaaccactgtcaggctggacatcattaaacaggatatcttcatccaattcttccatcccactgttccattctgacatagaatttatgctttggatttttggtttgggcggatactcaggatgatatatactagagagcacaagcatatgtgtttcaccaacacaaactgatgttgctctcttaacaccgtgcaccctagtaaaaagtggcatttcatccttacgtttctttgcatcccacatgaaaacatcaccagttgatgtagccacagcagtccagtactttccagctgagatgctcacaatatttcttccacacattgaaaatatctgttggcatttcagatcaggatctgatgaaacccagtagaaaagagcaccatcagctgttaaagcagtactgtgcattgttccagcagccactgaaatcacctgaagccgttccatacgatggaacttcagatttgtatttccacccttcttaaggcatctagctattacaacacgccgtggggtgacaaggcgatgaccccaagtgaacacctctccatcaactcctaacacgattgtatgatattttgctgcagatacacctctaaatacttttcctttcaagtactccaccattcttggaatacaatttgatgctgaatttgaagtgccatatcctagctggccctccttattgcaaccccaggtgaacacttcaccggtatcagcgactgcagcagagtgtttgtttgcagcagctacagcaattatcctttgtttgagggaactaacacgccttggtgttgattgggtatcaacagaagggtaaccaagctgaccctctctatttgatcgtgaatatccggatgaccaagacgaccacctcgaccaaatccccatgtgtacagttcaccgtcagaactaactgctacactatggaactttgatgcagcaactgtttttatatatgacccatgcaaggtatctactttgcatggtagtttttgtatgtgggcattgccagttccaagctgataatttgtcccacttccccaactgaagacctccgttgcaactgcatcaggagaatctccattggcctgtgatactgggcaggagagaaggtcaacaggtgtacggcccttagtgtcctccaaagtgagggaagcaccaaactgcaaaagaacaccagcaatacacaggtgaccaaaatggagtgccctatgcaggctactccagccagattctccatcccttgcatctggatcagcaccggcatctaggagcctcctcacgataggtagatgatttctccatgttgcaagatggagggcactaagaccaaatgcattcctaccatcaatgttcccaccactttttttcaacaatgccaaagcagattctacttcagctattgacccttgtttggaaacaaggcacagatccttaagagagcttccaggagaaggtttgcgaacagctgattgctttgatgtccctggcggagatatcgaggtctccatgaaatttcaggaacacgcacagtatctacagggttattgaggcaaatcagtagactactccatcaatataacattagaaatcacaa

SEQ ID NO: 13514 - DNA, 346 bp, Setaria italica
  Peptide Sequence Number=SeqID_79488
taccatctggattatactactgcatgggttagtacgtagtatacaacttcacaaatggtttcccttgaggttttgttgctattctgttcatatcagaagagtctgcaatatacttgataaattcctacctatgcatgttcttaaatcacaaaaaatgttgctattcactattcaggtagtaataagatatagtggtacttgtatattttacctactatttgtgttgtttttattttgcgaataaagtgtctatgcttatttgttggtattgttgttttacgtctgtcatgtctattgtaaacaatgctgtgttctgatgtgctggatgaaaaaaatgccactcttg

SEQ ID NO: 13515 - DNA, 248 bp, Setaria italica
  Peptide Sequence Number=SeqID_79489
cgcctagtcgatctcctggagggaggcaccggtggcggcggcgccaccagcagcggcggcgacgtcgtcggcggtgaacttgcccttggccttgtcggcggcgcggccgcgtgccttgcggtcgaggagcgccttgcggtccttgtcgagctccaccgtcaacgtgggcatccacccctccaaggtgatcgtcaccaagctgaagctcgacaaggaccgcaaggcgccccttggccttgtcggcggcg

SEQ ID NO: 13516 - DNA, 140 bp, Setaria italica
  Peptide Sequence Number=SeqID_79490
cccttggccttgtcggcggcgcggccgcgtgccttgcggtcgaggagcgccttgcggtccttgtcgagcttcagcttggtgacgatcaccttggaggggtggatgcccacgttgacggtggagccgttcactgagacacg

SEQ ID NO: 13517 - DNA, 174 bp, Setaria italica
  Peptide Sequence Number=SeqID_79491
gctttagtatccttgaaatgtctcgatgagagcgataaggagtaaaagacggtacaaccaccatcagatccccgcgcagcgcctagtcgatctcctggagggaggcaccgccgacgacgtcgccgccgctgctggtggcgccgccgccaccggcagcgcctagtcgatctcctg

SEQ ID NO: 13518 - DNA, 684 bp, Setaria italica
  Peptide Sequence Number=SeqID_79492
gtgtctggtaattggaatgagtacaatctaaatcccttaacgaggatccattggagggcaagtctggtgccagcagccgcggtaattgtgaaacgaggcagccgttctcttccattctgtaattccctaaccgaggacgcgatctgatgattccgatccggaagaaaacccgtccagagccgtggttcttccgggctgagcgccggctcaagcctgcggtgaggaggagcacgaggtcaaggcagcacgcaggcacggaccggtgctgggtctgccggtgcagccgtcgtgtacatgtattgtattggcaggggaccctgtttatagcacgtagtgtggcggcctgcgctgctgtcgttggagctgcacgcgtgctgatgaacttcgagcagagttttgttgtacagcttccacgatttttctgctccagtttagtccgttgaagaaggcaggcatgctcgctgggtgcggacgtgcggtgcagcaatctgagtagtttttgcattggcatctgtcatgtatggtaatcacctacataagttgatgtaattggctcaattcatttccatattatggatatgaattaggatggcactgataagaaagactctttagattatgccatttcattcatgtcaaaatgtgcaaggggaatctccctgtccctgaacaaaaaaaaaaaaa

SEQ ID NO: 13519 - DNA, 3334 bp, Setaria italica
  Peptide Sequence Number=SeqID_79493
ggaggtggcggtgtcggcgccggcggaggaggcggggaaggatgagggggaggggggcggcggcgggtggcgcgtgaaggcgaagctgatcagggtgctggtggtggtgtgggtgctggtggcggcgtcggtctggacggggctgcactaccgcttccgccgcgcggcgatgcgcaaggccgaggaggggctcgtcagcatgtgcgaggagcgcgcgcgcatgctgcaggaccagttcgccgtctccgtcaaccacgtccacgccctcgccatcctcgtcgccaccttccactacgagaagcacccgcccgcgctcgaccaggacacgttcgcggactacaccgccaggacgtcgttcgagcggccgctgctgagcggggtggcgtacgcgcagcgggtggtgcacgccgacagggagagcttcgagcgccagcagggggtggatcatcaagacaatgaagcacgagccgtccccggtgcaggacgagtacgcgccggtcatctactcgcaggagaccgtctcctacatcgaggggctcgacatgatgtccggcgaggaggaccgtgagaacattttgaggtcaagagcatcagggaaggcggttctcacgagaccgttccggctcatgtcgaaccacctgggtgttgtactgacttttcctgtttatcgcgatgatcttccatctgatgccaaggaggaggatcgtgttacggccaccgctgggtaccttgggggagcttttgatgtagaatcattagtggaaaatttgttgaggcagctagctggcaatcaggaactggtggtaaatgtttatgatgtcacaaacaactcaaaccctcttgtcatgtatggatccgaagttcctcttggtaacccctcaccatcgcacatctgcatgctagattttggcgacccatacagaaagcaccatatgatttgcagatacagaaacaagcctcatgtcccatggtctgcaattactaccccatctggtgtatttgtcatatttatgcttgtgggctacatactctatgctgcttggagtcgctatgataatgttaaggaagattgccgaaagatggaggagctgaaaaagcgggcagaagcagctgatgttgctaaatctcagttccttgcaactgtttctcatgagatcagaacgcccatgaatggtgtcctaggaatgcttgacatgctgttagacacagacctaaagtctacccagagggattatgcacaaaccgctcaagtctgtggaaaggctttaatatccctgattaatgaagtgctcgacagagcgaaaattgaagctggaaagttggatcttgagtctgtaccatttgatctgagatccatccttgatgatgtcatttcgttattttcttcaaagtcaagagagaagggaattgagcttgctgtatatgtatcggaaagagttcctgaaatcttgttgggtgatcccggaaggtttcgacagataattacaaatttagtgggcaactcaattaagttcacagaacggggacatatttttgtacaagttcatctggcagatcactcaaatcttgcaacagaagccaaagttgaaccagttgcaaatgggatgaatggacataaagatgagacaactgccgtagcaaccagtgtttctcgcaacacactaagtggttttgaagcggctgatagccgaaatagttgggaaaacttcaagcttttgctttcttatgagaaaaatgagatgccctatgaaaatgtatctgataaagtgactctcgtagtaagtgtcgaagatacagggataggtataccattggatgcccaaggcaaggtgttcacgcctttcatgcaagctgatagttcaacttctaggacatacggtggtactggaattggactgagcatcagcaaatgtcttgttgaaataatgggcggtcagataaactttgtcagccgaccccatgttggcagcacattcacatttactgcagttctccaaagatgtgacagaagagctattagtgacagtaagcctgtcatgttgcaccctcttccatccagttttcaaggtttatctgcactgttggttgatagaagaccagtaagagctaccgtaactaagtatcacttgcaaaggctgggaattacctccgaagttgtcgctaccactgaactggctcttggtgtgttgtttgggagaaatggccattccctaaccagcacgaagctaccatgcatgctgttgattgaaagtgattcatggagctcaaagatggatgtttccctacgatctagactcctggagatgaagcagaatggtcacaaacccgtattacccaaaattatccttctcgcagctgcagaatcagacaaattgaaagcaaactatgcagttgattctgtgatcaccaagcctctgaaagcaagcacacttgccgcttgtctattccaagcacttggtatcacacagacacagccgaaccatgagaaacgcgacagcacaggttctcttcgtgggttgcttcttggcaagagcatattggtggttgatgacaacaaggtaaaccttagagtggctgctggcacattaaagaaatttggagcaaaggtggagtgcgtggagagtggaaaagatgctctagccctcctaaaagtcccatataagtttgatctttgccttatggacattcagatgcctgaaatggacgggtttgaggcgaccaggcaaatacgtgcaatggaagcgaaggtgaatgaggagcaggcagacgccggtgatgattcagaagcagacggcgcgacaagggcggtgaaatggcacttgccggtccttgcaatgacagccgatgtcatccaagccacccacgaggagtgcacgaagtgcgggatggatgggtacgtcacgaaacccttcgaggagaagcagctcttccaggcggtgcagaagttcttggaccctggcaacatgtcaagctaacaccggagtgatgcatcctggtgtgcactgggagctctgattgtgaaacgaggcagccgttctcttccattctgtaattccctaaccgaggacgcgatctgatgattccgatccggaagaaaacccgtccagagccgtggttcttccgggctgagcgccggctcaagcctgcggtgaggaggagcacgaggtcaaggcagcacgcagcacggaccggtgctgggtctgccggtgcagccgtcgtgtacatgtattgtattggcaggggaccctgtttatagcacgtagtgtggcggcctgcgctgctgtcgttggagctgcacgcgtgctgatgaacttcgagcagagttttgttgtac

SEQ ID NO: 13520 - DNA, 360 bp, Setaria italica
  Peptide Sequence Number=SeqID_79494
gtaattgttttttgtagacctagtatccattatgagttgatcgttctgtgttatagatagattggagagggggaacaatatggttctttgttcttggttctgttgtagctttagtgtgtacagcacctgatttgctgggacgcctaaattagatcaactaccgcggaaatgcgcttaaaatccatagtatggtatctcataccggtcaaacttagaagcttgtttatttctggagtttcacagcttgtcctggtcaggcacacccttcatcttcaatatcgattcttactgcgtgtatctattaggctagtcatgagccacgaaaccaaactaaaactgtagggagatgatgtctttgag

SEQ ID NO: 13521 - DNA, 390 bp, Setaria italica
  Peptide Sequence Number=SeqID_79495
ccgtgcttggttctggctcatgaacttgtctttatttgttcatatttttcacctatgcttccgcctttctgcttctgaaattcaatgtaccgcaaagtgctagaaaagaaggcctctgtagatggatcggctacagtgctttcactttgcttctcagtcctaatcagttcaatcaaatcttgctactagttgtttcgttgtgttcttgatctgggtaatttcctttctaaaggaagtacaagtacctgaaaatggtgagggtatgaggttgttcaaaatttcaataaatagagtaacggatccactgcttccccttgtcgcactagccatctgttgagcagcatttgcgattctcaaggcacgctttaaacaaaggagaaccctttcacc

SEQ ID NO: 13522 - DNA, 530 bp, Setaria italica
  Peptide Sequence Number=SeqID_79496
tctccgactcagtcgcactagttctccgactcagtcgcactagtggcagctgaaactgatggtttctgttccactgaagcatgccaaaaaagaagactcaattctcaacaaaatcgaaacctgtcatggtgccgtgcttggttctggctcatgaacttgtctttatttgttcatatttttcacctatgcttccgcctttctgcttctgaaattcaatgtaccgcaaagtgctagaaagaaggcctctgtagatggatcggctacagtgctttcactttgcttctcagtcctaatcagttcaatcaaatcttgaatcacagtgttcgtgatctggggaattcctttctcaaagaagtacaagtacttgttcaaaatttcaataaatagagtaacggatccactgcttccccttgtcgcactagccatctgttgagcagcatttgcgattctcaaggcacgctttaaacaaaggagaaccctttcaccatccattattccatcctgatcaatgccgagcagtctatgcgtgt

SEQ ID NO: 13523 - DNA, 2485 bp, Setaria italica
  misc_feature (2477)..(2485): n is a, c, g, or t
  Peptide Sequence Number=SeqID_79497
tcgtcgtccctctgctctccactcgcgcttctccctccaataattctctccgcctctgctcgctcctgctcaagccaccaccgaatcaggccgagagggagcggaggagggaatccccatgtctccgcccctcgccggagcatatccccggcgagccgtcgcggagctcctgccgtaggaggccagctgagcctgcgagggcctgatccgctcgctcgtggcccgatcgggatcgatgggcggggaggcgccggagccgcggcggctcacccgcgcgctgagcatcggtggcggagacggcggctgggtgcccgaggagatgctgcacctggtgatggggttcgtggaggacccgcgcgacagggaggccgcctcgctggtgtgccgccgctggcaccgcatcgacgcgctctcgcggaagcacgtcacggtgcccttctgctacgccgtgtccccggcgcgcctgctggcgcggttcccgcggctcgagtcgctcgcggtgaaggggaagccccgcgcggccatgtacgggctcatcccggaggactggggcgcctacgcgaggccgtgggtcaccgagctcgccgcgccgctcgagtgcctcaaggcgctccagctccgccggatggttgtcaccgacgacgacctcgccgagctcgtccgcgccagggggcacatgttgcaggagctgaagctcgacaagtgcaccggcttctccacggacgggctccgcctcgtcgcccgctcctgcaggtcactgagaactttatttctggaagaatgtcaaattatcgatcaaggcagtgaatggatccgtgaccttgcagccagctgccctgttctggcaacattgaatttccacatgactgaccttgaagtgatgccatctgacctagagcttcttgcaaggaactgcaagtcactgatttccctgaagattagcgactgcgatctttcagatttaataggtttcttccaatctgccacagcattggaagaatttgctggagggacattcaacgagcaaggagaacttgccaagtacgggaatgttaaatttccatcaagattgtgctccttgggtcttactttcatgggaacaaatgaaatgcctattatatttcctttttctgcgatactcaagaagctggatttgcagtacactgtcctcaccaccgaagaccattgccagctcatttcaaaatgtccgaacttgctagttcttgcggtgaggaatgtgattggagatagaggattaggggttgttgctgatacctgcaagaagctccaaaggctcagaattgagcgaggggacgatgaaggaggtgcgcaagaagagcagggtggggtctctcaagtaggcttgacggctatagccgtaggttgccgcgaactggaatacattgctgcctatgtctctgatataaccaatggggccctggaatctattgggactttctgcaagaaactttatgacttccggcttgttctgctagatagagaggagaggataacagaattgccactggacaatggcgtccgagctctgctgaggggctgcaccaaacttcggaggtttgctctgtacttgagaccgggtgggctttcagatgttggtcttgagtacattggacagtgcagcggaaacatccagtacatgcttcttggaaatgttggggaaactgatgatggattgatcggtttcgcattgggatgtgtgaacctgcgaaagcttgaactcaggagttgttgcttcagcgagcgagctctggccctcgcaatgctgcatatgcggtctctgaggtacgtatgggtgcagggctacaaagcctctcagactggccgtgacctcatgctcatggctaggccattctggaacatagagtttacacctcccaaccccgagaacgtacagttgaatgaagatggggagccttgtgtagatagtcaagctcagatacttgcatactactccctcgccgggaagaggttggactgcccacaatccgtggtgcctttgtatcctgcgtgactgtaaatacactaagccggtgtctttctcccgcaatcctttgctcccgtagcctcccctgtcaacaagaatgttgataacttgatatgtggttattgtatggatctagatggctagctgctacgtactgtaataagctactggtagctgagatgtgcttgaataagcgcttactgttttcgcctgtactgctatctaatcctaggagatgtatactgagtaacgatggacgctgtgagtctgtgcttgctcccccctgatttgtaccactggaggtataaagaatacctgggttttggcagcctactttgagcattaagaagttatccattgtatgtagttgctccaaagttgttgaggcaaactcaaaaactgcttttttgtatgctatgtatgtgctgagtgcacgatgttatgtcagggtaaaaaaaaaaaaaaaaaactnnnnnnnnn

SEQ ID NO: 13524 - DNA, 264 bp, Setaria italica
  Peptide Sequence Number=SeqID_79498
aaggacattgctggcaatgtgagccgtagcagtttgcatttggtagatcttgcaggaagtgaaagggttgataggtcagaagccacaggagagagattgaaggaggctcagcatattaacaagtccctctcctgccttggagatgtcatcaatgcattagctcagaagaactctcacattccttacagaaatagtaaactcacacaactactacagagttcattagggggaaatgcgaagacgctaattttcgcccacataacg

SEQ ID NO: 13525 - DNA, 588 bp, Setaria italica
  Peptide Sequence Number=SeqID_79499
catgtgagagctccctttgatgccaggttgaacatctctttcaggcgagcggatgaactggaaagaacgttcttctcaattcgcttctgatgcctggtggactttgaccactcgattccgagggaaacttgaacactgcttgccctttgcttaggtgcaaggtcctcaatttggtactttatatgaagctgcaaacgcaagagaggagagcaggtcaaacatactgtgtttattctgctaatgtgaagagaatcagaaaagcgagtttgatctttcatatgattagaaaggatctgctgctgattttatctccacatagctaccccttgactatgttacagcacaggatcacggaatatcatgccaattgaccaattgacaagggtgtactcaaatcgatattaccttgcaatgaagcaattgtctttcatattttcttatctctgaggaatcaaagataaagtttgcgattcccctctgacaatggctggtatttttttaatgataaacttataagctaaaaaataactccatttaacagagactttgtacttttcgttaaaaatacatagattttgtacaagctgg

SEQ ID NO: 13526 - DNA, 1719 bp, Setaria italica
  Peptide Sequence Number=SeqID_79500
ttgtgtggtatccaagttctgcaacctctgcagatttcagctacatttgaccaggtacaacaaaactggtggaggatgggcaccataggttcaccaaaattttgaccgtagtggtccgcattattcttccaacacaacaatcagaatcagttgctgtctgggcgtatcttcagccaagcaatgttgctgtctgggtgtaatcttcagccaagcaatgtatgtacaggccatgccagtgttaggaaatgttcagtcactgatcagtattatgcacagggacagggatggtgagagatcaagggtggtcctatctggcatgtgagagctcccttgatgccaggttgaacatctctttcaggcgagcggatgaactggaaagaacgttcttctcaattcgcttctgatgcctggtggactttgaccactcgattccgagggaaacttgaacactgcttgccctttgcttaggtgcaaggtcctcaatttggtactttatatgaagcgtaaagaagtcgccgagaaggactccttgaagctccatcacctcttcaataatccatcctttcttattgggcataggagatttctgctgtgttcctgtcacttctcctccaacgggagacagcttcttgctaaacttataatgaatttgtcgttgatactcattgggtttatctgattcccattgtgtagctgagtatttctgacatccaactttctccattaccttcatttccaaaggacctccttcgaacacctccataagtgaggccatattggttgaaatggttgaggagaaaacttcagtcatctgaaggcccttggcatcctcgataccaacaaaaatcccactatcctcgctctgaagggtgttattttgggactgttcttcagcaagctgtactttaagctccgtgctcagagatcttgctttccataatgccattattgtcctatgggccacgctaaatgatgcaaaagactggaggcagaacttaagctttccattgtccacgctctttgcaccatgctttgcatccatgcctctacctctgtgaagagttattacaacggatggactccatgatgatattgattggggtattccttgtatgtcttcaatatcctcccataaaaagtaaaattttgttttcctcccaaacatgcttgaataaaacccaattgttcttggagataagaaaagatgaccctgtgtaggcaatttcctcctcaagtaacaggtaaactgctgatgagaaattcttctgctggcagagagaagagctcctggaatgcagtattggtccgaggagacctcaatgtcatcttcttaccaacctccttctccattttactcagatactcagtgaccatgccagtcccctttgagttgttcaggaaaaccctcagatgcaacttggactgccaagactgggccaagttacctttaagaggaacccatacatcagctaacgctgacaagtttgattttacaaagttaatttctgcatgtccaagggacgtaacttcatcgaatggtccatcaaaatcatacacatgtacactcatcactgatggtggatcatccatggcgtcaaattcaaatatttcgttccactgaggttccagtgtctggaacttgattgaacttgtttttgttttgccattgcaagtaaataccacataaggatcggagaaaccagtagcatcgactggagc

SEQ ID NO: 13527 - DNA, 2229 bp, Setaria italica
  Peptide Sequence Number=SeqID_79501
cgacgctcatggaccggctcctgcggcagtgcggtgctgatatcccccacgagcgcgccatggattccatcagcctcgagcgcgagcgcggcatcaccattgcctccaaggtcacttctgtttcttggaaggaaaatgagctcaacatggttgatacacctggtcacgctgattttggtggtgaggttgaacgggttgttggaatggtggaaggtgctgtcttggttgttgatgctggagaggggcctttggcacaaactaagtttgtgctttcaaaggctttgaagtatggcttgcgcccaattctcctcctcaacaaggttgataggccttcagtttcagaagaaacctgcaatgaggtagagagcttggtttttgatctttttgcaaaccttggagctacagaagaacagctagatttcccagttctttatgcatcagcaaaagaagggtgggcttccttaactttcaccaagagcccccctgataatgcaaagaatatgtcttcgttgctcgattccattatacaacacattccttcaccaaaagctgatcttgaggccccattccaaatgttggtttccatgatggaacgtgatttttatctaggacgaatactcactgggagagtaagatctggagttgtccgtgttggtgacaaagtgcatggtcttcgcagcacagatgatggagttcagaagatcgaagatggaaaggttatcaaactcatgaaaaagaaaggcacgagtatggtaacagtagagactgcaggagctggtgatataatttcaatggctggattggctgctccagcaattggacatactgtgtcaaattcagaggtaatgactgctctgcctacaattgagttggatcctcccacaatatctatgacgttcggtgtgaatgattcaccattggctggtcgtgatggcacccatctaactggagcaaaaattggtaaccgcctgatggcagaggcagaaacaaacttggcaattaatgttcttcctggaccattatcagaatcttatgaagttcaaggaagaggagaacttcagttaggaatattaattgaaaacatgcggcgtgagggatttgagctttcagtctcacccccaaaagtgatgtataaaacagagcgtggagaaaggttggagcctattgaagaagtaactgttgaggtggatgaagagcatgtgggtttcgtcttggaaacccttacacacaggaagggtgaaatacttgacatgggcccagttcctgggacaactggaagaactcggatctttatgacctgtccatctaggggtttggtgggtgttaaaggaattttcagcagctttacacgcggaactggatttatgcaccgtgctttccaggcgtatgctaaatacagaggtgcactaggcagtgttagaaaaggagtactgatatccgttggtaagggactgatcacttcacatgcacttatgagtttagaagctcgtggaatcctctttgtatctcctggaatggaggcatatgaaggcatgatagttggtgagcactcacgtgacagtgatcttgaggtgaatcctgtgagaactaaagaacttacgaacatccgagcccctggaaaggatgaaaatgttcggctaactccacctcgattgatgactttggaagaggcaattggatatgttgctgcagatgagcttattgaggttactcccaaggtcatacggcttcggaagaagtacttggattccacaaagcgtaagatgatgaaaaacaagcccatggattaaagcttcggtgaccaaattacatcaaacactgccattgctactgtttagttatcatccaaaaggatgcaaatcatattatgtataggtttggtgttcaatgttgaagtgcaaccagaattcttcaccagatcactgaccttgccggcagtttcattgaggctttacacaggtataacagaataagcctaagataggagctactggcttactgcttcagacaaactaagcgagctaggatccctggtgtaaggtggttatatatttatatatattattgcctttttaatggcgaattttgaaacaccctgagatatatctctgaagggtatagtattctttagaagcaagaaacggaaaaatggcaggccggtgttttgtttgaactggcagcttttgtttccttgcatttctcaccaacacatgctaataaaatgtcaac

SEQ ID NO: 13528 - DNA, 215 bp, Setaria italica
  Peptide Sequence Number=SeqID_79502
catgtacaataactgctctctgacagttaacatataatggaataagttaaaccaaagtgttcatcgataaccacgtctcagcatatcagccactgcccactatatagaacatctaaggatatctacgtgttctgtaaaaaacatgatgcgtagcggaacagaatgacaagaaaaaagaggtatgcctgccatcgcctcgcccccagaagaatcga

SEQ ID NO: 13529 - DNA, 684 bp, Setaria italica
  Peptide Sequence Number=SeqID_79503
ctacctgcacagcattcaatgctgtgtacataggtattcgagggaaatgatccataagtttgccaactattggcgccccaataaacactgaaagctttgtgaagaaaccaacaatagcaacaggcaataggcttgggtgaagaattgccagtgcagcaggccaagcgaaattccacagttgttccaccaagttaccaaataagtaactagcatatagagcatgtagtccagcaggatgagctggagtggaggccaaagtatgttgctctccttcagacaagactggcaactcctcaaaactagaaggacaggaggccctatcatgcagtggaaaagggctggaatctagaacatctcctcgaagattaagaaccggaatggagcatcccgatggcaatggtgcgtgatcatcgaaagcctcttctttactgagagtactgacatcaacctcaacatttgcaatgtaacactttgggccaaaattgtgtagcctgagcgcggcggcgggcctcaggcgtagcgtccacgcgccggagaggcgccgtcggacggcaggcgcctgtggcgaggcgaggagagcggaggctgcggcggcggcggcgagcatccccatggctcctctgctgctgcgacggcggcggcgcgactactcatgcagccactccagtaccggacttcggtgat

SEQ ID NO: 13530 - DNA, 372 bp, Setaria italica
  misc_feature (21)..(21): n is a, c, g, or t
  misc_feature (117)..(117): n is a, c, g, or t
  Peptide Sequence Number=SeqID_79504
gctattatatgatctgacacncttttatctagtaactcgtctggcttgtcaagtagaataaaaaccaagtcaaaacgagacaggagggcagcactcatctttagattctcgttcacngtttttgctcggtcataatgaccaccaacaggatttgcagctgccaacacagaggtacgagctgataaactggctacaaggccagcctttgcaacagaaacacattgctgctccatggcttcaagtaaagcctgatgttctgcagacattttatcaaactcatcaatacagcatattccacgatcagcaaggaccattgcacctcaaatgcataatcatttgtcatagaatctttaaccacagcaacagttacgg

SEQ ID NO: 13531 - DNA, 437 bp, Setaria italica
  Peptide Sequence Number=SeqID_79505
tgtcgcggcagacgacgcgcgcgcagccgatggtggtggtggcgcgccacaccacctgcgtgtagtggccgcacaccttgccggcggcgcagctgttggaggcgtagttgtaccactgcttctcgtccacccacgacttcactgcgtccgccgccttccagttagcgccggccgacccccagaagatgttctccccgtagggcccgccggagtgctgcagcttcgtgctccaggtaaccgggccgacaccgaccgcggcgcgggcctggttgtggggcgtgaggtagtcttgaggcgagttctgggcgcttgaaggctgcacggccatggcggcaaccatggccaacacgagcaacgcaactagcttggacgatggctccatagctacacaataatctagaaggcagatctgcgtctgttacgttgagtttagtttt

SEQ ID NO: 13532 - DNA, 904 bp, Setaria italica
  misc_feature (1)..(14): n is a, c, g, or t
  Peptide Sequence Number=SeqID_79506
nnnnnnnnnnnnnnttagtttacttttaccgttaactttacttaagttagttagtaagttaagttttttttttttttctatgtaaatagcaaactcctttattgattttttttagagatggagctcacagctgtaatattcaatggccaactggccctttatttattactcaagtcttattcgtataaaattcagagtcgcatgcacccatgcgtatcagtcgttacgtgtgttcgtgcatgcatgaaccagagtagtagtgtagcaatcagtagggcttctgccctacgatgttgccgcggggctcgtagttgcagatgatgaagaccccgcggttgtcgcggcagacgacgcgcgcgcagccgatggtggtggtggcgcgccacaccacctgcgtgtagtggccgcacaccttgccggcggcgcagctgttggaggcgtagttgtaccactgcttctcgtccacccacgacttcactgcgtccgccgccttccagttagcgccggccgacccccagaagatgttctccccgtagggcccgccggagtgctgcagccggcagtcgccggccctctgcgcggcgtagctctccgcgaactgctgcagcttcgtgctccaggtaaccgggccgacaccgaccgcggcgcgggcctggttgtggggcgtgaggtagtcttgaggcgagttctgggcgcttgaaggctgcacggccatggcggcaaccatggccaacacgagcaacgcaactagcttggacgatggctccatagctacacaataatctagaaggcagatctgcgtctgttacttagttttgtttttaagttactacgtaccaacccaacgaacttacaactagacgttaccgtaccgtacctttacctaagtttaagtacgtaccta

SEQ ID NO: 13533 - DNA, 273 bp, Setaria italica
  Peptide Sequence Number=SeqID_79507
ggtgatttaggaaatccttctcgtggaagcattccttgggcaagcgtacgagaaggtccgcagcgacatcgggcctcgcgaccgcgccggccgcgtggctcccggcgagccgcacctcctccggcggccggaaggtgaacgcgagcttctccgcttctagccccaggtccctgatgaaaccccgcgctgcctccggcgtcgcctgctgctgcggcaccctcttgatgagctccgctacggcgtcagcggcctgggcggcggcgcggagggccg

SEQ ID NO: 13534 - DNA, 1310 bp, Setaria italica
  misc_feature (1)..(53): n is a, c, g, or t
  Peptide Sequence Number=SeqID_79508
nnnnnnnnnnnnnnnnnnnnnnnnnnnnnnnnnnnnnnnnnnnnnnnnnnnnnctttcaaaaaactgccagaatactgatctgcggaacgacagaatgcagtggggcagctcgactcagaactcaaaaattattgtcccttcagaggtcagcctgcggcatagaacaggggttttcctcgagtgcattatattgcattgcacaacacaaatgctatcatttaggcagtaaactactgtatcggctgctgcttctactactactacaacatttcaaaaaaagtagccaatctgccacgataaaaaggcttatacatacacaagcgggcgcatagatatgagccgtcgaaagcagagcggcacaggcgggaataagttatggacgaactaatgaatctcttgtcctcactgttattgtattgctgatctgcatccccgattccgaccaccacgttccaataccgggtaaacaacagttccaacagcaaaccttttttctcacttgtactcgaacgacggtatcggggtgcttggcgtgtcgaagctctccaggatctctgacttgcccccgcccgcgccggccttcttctcctcctccttcttgccgaacagccccccgagccacccacccgcaccgctggagctcgcggcctcaggaggcggcactaccggcggcgccggcaggcccggaaatgcgccgccgcccatgaggttggggtcctcggcgggtagcggcgggttggcgaggacgcggttgagcatgagcccggcgccctcgatgagggccaggaggatcccgcccatgagcgcggaccgccccgcggcacccgcgccctggcgcatggagaggaaccctcccgtggcggcgccggcgatgatggagttccaggggtcctccttctggcgcgcgtacaccatggcgcagtcgaaggtggagaagaggccgccccagacggcgaagctgccccccacgcgcggcgcgttcatgcgcacggcctgcgcgccgcccgacaggcgcatcccgttgggggagttgtaggtgcccttgaggaagtggaagacggagccgccgacggcgcccatcccgaacgcgccgcccacgtcgtccaggatccggtccgggcacggctcgcgcgacgtctccggcgtgcccatgcctcccctccccggtgctattccccctgcttctacttccccggcgtccgcggcggcggcggcggcgggagggagggaaagggaaaccctagcacggagcttgggccctggcgtggaaaggaagttggtgcgaaatggggggaagagaagcgaagcg

SEQ ID NO: 13535 - DNA, 267 bp, Setaria italica
  Peptide Sequence Number=SeqID_79509
caagtctgtcacttatgcacttcctcggttgtcgaccttaacaatctatctaacaaggatctgcaggaatggcatgaactattgattggcacaagcgaggcaaagaagcaacgcaagaagcaaaaaaagaagcaacacaagaagcaacaaaagaagcgtgagggctgaggagaagaaagatgaacctgaaggtgacgagtcaattgctagccccttgcaagctacattgtgagattcgactgaaaactccccatcgtgcccgcgcag

SEQ ID NO: 13536 - DNA, 269 bp, Setaria italica
  Peptide Sequence Number=SeqID_79510
tcccgtgcgcgccgcgccacgccacgccacgccacgagtggctcagagcactgtagcacgagcgacgactgttaattcttggttctcgggatcgccagcgctggattcgacgatcgcagcggaattcgcctggggatcgttgcttggctgcggctcatccgggggcagaaaaggctcggcgtctgggttggttggtgggtggcggtggcacgatggaccacccactgctgccggggatggtgacggtgaaggaggagtggccgccgggc

SEQ ID NO: 13537 - DNA, 388 bp, Setaria italica
  misc_feature (345)..(345): n is a, c, g, or t
  Peptide Sequence Number=SeqID_79511
taattaaccgtacttagaattagtttgttgtggcatgaatgcacgtagatggctttttcactcttcacatcattttacattatggccggctggttgctcagtatcctcaatgctttggtttgttaactgtggtagcattgattccgctctcggagctctctgatcctcttatcgccaagaaatatggggcaaagcccgatgctgaaaccttggatctactcaacaccttagccaaggagaaggaggtggtccttaaatccttgcttggtttctcttgtcatccccttgccaatgtttgatctacgaggtttcaagttccttattgcaatcaggttatggtggttntcaaagtcctctggggagatcccccgtgagaagctatgccagg

SEQ ID NO: 13538 - DNA, 1087 bp, Setaria italica
  misc_feature (912)..(1087): n is a, c, g, or t
  Peptide Sequence Number=SeqID_79512
gaggcccccaccgccaccgcctttggcagcccaagcagtgacctccacctcgccagtcgccaccgcgtcctgcccgagcagtctccttagtcctcacgcagcccaccgccgcacaacaaaccaagaagctgtaggagagggacgaggagtgaggagatggccggcgctgggggagagaggtgggtgggcctggcgacggacttctccggggggagccgcgccgcgctgcggtgggcggcggacaacctgctgcgcgccggtgaccaggtgctgctgctgcacgtcgtcaaggagcccgactacgagcagagcgaggccatcctctgggaatccaccggctccccattgattccgctctcggagctctctgatcctcttatcgccaagaaatatggggcaaagcccgatgctgaaaccttggatctactcaacaccttagccaaggagaaggaggttatggtggttgtcaaagtcctctggggagatccccgtgagaagctatgccaggctatcagcgacacgcccttgagctgcttggtcataggaagcagaggcctgggaaagctcaagagggtgctcttgggaagcgtcagcgactacgtcgtcaataacgcaacctgccctgtcacggtcgtcaagtcccacgatggctgatcttatcatggaaatgactgaatgtgttgctgtaataagaggatggttggcctgttgaagaacatgcactagtttccagctagctgaaacatgttgaaccaggcagttctattgtaataatggtcaaacgaccttttgaaggtcatggacatgtaaaaagtactgttttccagattagctgcaccatgcttttgtttctgtatgagtgatgtttatagcttccaaggtttgaaacattggatcatttaaaaaaaaaannnnnnnnnnnnnnnnnnnnnnnnnnnnnnnnnnnnnnnnnnnnnnnnnnnnnnnnnnnnnnnnnnnnnnnnnnnnnnnnnnnnnnnnnnnnnnnnnnnnnnnnnnnnnnnnnnnnnnnnnnnnnnnnnnnnnnnnnnnnnnnnnnnnnnnnnnnnnnnnnnnnnnnnnnnnnnnn

SEQ ID NO: 13539 - DNA, 231 bp, Setaria italica
  Peptide Sequence Number=SeqID_79513
aaaaaagttttggaactgatcttcctcgacttcctcatcggtacctgtgttctgtggcacctcctcagcagtcacaactgccttatcctcctcaacaacttcatcatctgtccctgtgagttctggcacttcatcagcagttaccactttcttgtgttcatcggcatggacagcatcagtttcgaaatgatcatcgacaacatcttcatccattgtgactgtgctctgttg

SEQ ID NO: 13540 - DNA, 309 bp, Setaria italica
  Peptide Sequence Number=SeqID_79514
ccgcctcaggcggcgacttcacggaggtcgtgatcgtgcggcacggggagacgtcatggaatgccgcgcgcatcatacagggacacatggacgcagagctgaatgatattgggaggcaacaagctgtcgcggttgcccatcggctttctaaagaagtgaaaccagctgccatatactcatctgatctaaagcgagcagcagagactgcgcaaacaattgcaagaatctgcaatctaccaaatgttgtgttcgatccagcacttcgagaaagacacattggagatctgcagggcatgaagtttcaagatg

SEQ ID NO: 13541 - DNA, 898 bp, Setaria italica
  misc_feature (16)..(16): n is a, c, g, or t
  Peptide Sequence Number=SeqID_79515
cttttagttttttttnttttttttttctagaatgcacgccactttattcagttgaccaaactctccaaacggtcgaacacaaactgtcccaaagaaagaaagaaagaaagaaagaaacaggcgaatggccatccagtcagaccagtcagaccgcggtcaactcattttcggccgagcatccaccgcctgtactcctggacgagctcgtgcaccttctccggcgggtacacgttggcggcgacgctctcccggcgcgagcaccgcgccgcccacgccgccagcgccgggcactcctccgccacgctgggcccgccgtggcgctcgtacgtgaggaaccacgccgcgaacggcgccgccgcgacgtccacgtacccgaacgccgccccaccgaagaagtccccctccccgagctcggcctccagagcgcgcagcacggtcgccatctctgcccgcgccccgggctccgcctccccgccgtcgccaccaggcgctgacagccacaggcgcttcccgcagaagtggagccggtccgcgtactccccccagaaccgcgcccccgcgcgcgcgtaggggtcggacaccggcgggaggagcggcggcgtccccgggaaggcctcgtcgaggtactggaggatggcgagggactcgcagacggggcggccgtcgtggaggagcacggggaccttaccgtgcacggggttggagcggcggaggaggtcgctcttggcggtgaggtcctgctcggcgcgctcgtaggccaggcccttctccgccagcgcgatgctcacgcgctgcgcgaacgggctgccgaacacgtccagcagcaccaggccgctgtcgctgccgtcgctcttgacgcctgccatgtattgtgacggtacgcggtgctgccccggcg

SEQ ID NO: 13542 - DNA, 281 bp, Setaria italica
  Peptide Sequence Number=SeqID_79516
ctgagtggtaaccgataatgctcaatcaagatcaccaaggtcaagatgagcaaacactgcagtgtgcagtttcatcgcttgtggaaggtcagcctcaaactgaaaccacgccgagatcgacgacgacaggttgttgtagcagatcaaaccacatgcccttcgaagcctcgcggttcttgcggcctcgccttggggttcttgttgggtagtggggagaggaagatggttgggactctgaagcaagttggtgggggcgagcgagtgaggtgttgaggggaggg

SEQ ID NO: 13543 - DNA, 566 bp, Setaria italica
  misc_feature (1)..(104): n is a, c, g, or t
  Peptide Sequence Number=SeqID_79517
nnnnnnnnnnnnnnnnnnnnnnnnnnnnnnnnnnnnnnnnnnnnnnnnnnnnnnnnnnnnnnnnnnnnnnnnnnnnnnnnnnnnnnnnnnnnnnnnnnnnnnnngaactgtgacatagcattgcataacaggaagcactgcatttttggctgtaatttaggtaaaaaaaagaacactagtagctgacagcctctttcctgaatggttatcatccaatcactctcacagaccctcatcactcagcaactaccttttaccccacacaagcttcacataaccaagccttgaagcgagttcaaaagaattttagaaaatttcaagccagagaagcatgaaaactatacaagaagcttcacaagcctctcactcacaccactgcaaccggaatctccaacctctcaaggtcaacagcacaccgcacacttcaacctcacatcctggaacaactctgttgtacctcaaggatctcatccacacaaagctccaaagaaagaagggggagcagggaaggaaggaaggaaaggagaagctacagctttacaagcttcttccctcagggaacaaac

SEQ ID NO: 13544 - DNA, 2097 bp, Setaria italica
  Peptide Sequence Number=SeqID_79518
taattaattactaacggttaggtctagtattgtcctaattgtctagtttattgttttaaaaaaagttaaacagaattttaaaagtgtttaaaattttcgacccagagaagcatgaaaactatacaagaagcttcacaagcctctcactcacaccactgcaaccggaatctccaacctctcaaggtcaacagcacaccgcacacttcaacctcacatcctggaacaactctgttgtacctcaaggatctcatccacacaaagctccaaagaaagaagggggagcagggaaggaaggaaggaaaggagaagctacagctttacaagcttcttccctcagggaacaaacggcggaaaaagggcaaaaagatcagcgaaaactaggttcgcagcgccatgaacaaactctgccttctcgcgtgctctgggacaaggcgctccacaactcctggaggaacgcctttcagctcttgagatctgaagttgaagagaggaggcagaggccgcccattcggtagacgagtgtttgggtctctcagctcatcaaagaagggatgcatgcaggcttccaaagcagtgcaccgtagatttggtgagtactgcagaaacctgctaacaagatccactgcttcaggtgggagctttttttgaaaaaccttgtgccatggatgagctttaatttgcgggaacttgaactccgtgtagtttgggttcatgcacttgatctcttcccttgttggagtacccaaaaccttgatgatctcaaccagttggtcaactccactttctccaggaaacagaggctggcctagaagcagctctgccatgacacagcctgttgaccacaaatcaatagcagtagtatattccgttgcaccaaatatgagctctggtgcccggtaataccttgagcatatgtaggagatgtttggctctcctttgaccaagactttagcacttccgaaatcacaaattttgagctggtgtgtatgtgggttaacaagaacattctggggtttgatatcacggtggcagatgccaatgcagttatgtatataagcaagtgctcggcatatctgatatgtgtacagtttgacataaatgtggggcatccgttgattcattcggttgtactgccttgcaatcctgttcactgtctctggaacaaactcaagaacaagattgagataaagctcgtccctttcagtggttgaaaagaagtaatgcttaagcccgatgatgttaggatggtcaagcatatgcatgatttgcagctccctgttcttgtaacgcttgtcttgaagaaccttttttatggcaacaatttctcctgtttctcggcatttggcctgatatacaaccccaaaagaaccagttccaaccacatgttcagcaatgtatgtgaccgactgtttaggcaggccgttatgcccgcgaattgtagtcgctttttatgtgactagcttcattactagaactatcagtcacatctgagcctgaccccatgtccctttcatcatcagcatctgctttggcatcccacaagtgcatttccagcatctcccttcccagaaactcgaccgagctggctgatccctcgaacccattcccttgccttgaggagctcgcaacaccacgatgcctttgtccagaatacgccatgactcagctgagtggtaaccgataatgctcaatcaagatcaccaaggtcaagatgagcaaacactgcagtgtgcagtttcatcgcttgtggaaggtcagcctgacatgggtaatgcccggtaaattaaacgacaactcaaactgaaaccacgccgagatcgacgacgacaggttgttgtagcagatcaaaccacatgcccttcgaagcctcgcggttcttgcggcctcgccttggggttcttgttgggtagtggggagaggaagatggttgggactctgaagcaagttggtgggggcgagcgagtgaggtgttgaggggaggagggagagggagtgaggtagtggtcagtggagggcagctgctagctcttggtccttccaaacttttccatttccggtaaaaagaatttggcatggcatggaaggaccagagaaatt

SEQ ID NO: 13545 - DNA, 301 bp, Setaria italica
  Peptide Sequence Number=SeqID_79519
gataagtgcctcaccatccatcgcaagtaactgaatatcagtggtcatgtagtgtttcctcatttatttaactaattaagaaatatcatggtgttattgtttattatcttataacaatcaaaacattattctattctatcatctaggatgtgaatctaacaccatgtagaattgatctgcgcacattttgtactttctgcttagttaatagtgattgtgactaaacggatttttctcacagcaaaggctaagttctgcactgccttaccccattcactaattcattctatgctaaaccaaa

SEQ ID NO: 13546 - DNA, 379 bp, Setaria italica
  Peptide Sequence Number=SeqID_79520
ttcctgcaaggtgttccatggctgattataagaacagacatgtactttgtgccgtccctgtttctaattccagctttccaagatgaactcagcaggctatttccagagaaagatactgttttccatcacttggcgcgctatctttttcatccaacaaacaatgtttggtattcggttacaaaatactaccggtcctaccttgccaaagccgaaaaaagagtgggaattcagatcagaatatatgaaaccaagggcatcttgcaaagaaatggcccgttcccacacattttgaatcagatcctttcatgtgcacagaatcagaagctcctgccagaaatcgccatgacagagggagcagcagctgaaactcagaataagg

SEQ ID NO: 13547 - DNA, 273 bp, Setaria italica
  Peptide Sequence Number=SeqID_79521
ctttctctctcttcaccccccaatctccgagccgagctcgagctcccaaaccctaggcctcaccggggagtcagctccgctgcgccagctatgccgttcgccgtggaggcttgacggggccggccccccaagtttatctcttcggcggcgagcgcggcggggttgctgtgggaggccgggcggcgggggggcggagatggagccgaggcggatctcggcgagcccgcgcccgtgcagtgggcggcgggtggtggcgaggaagaggccgcggca

SEQ ID NO: 13548 - DNA, 412 bp, Setaria italica
  Peptide Sequence Number=SeqID_79522
aatagtatcaatcctctatccttatggcatggaaggtaatgtttatttgaaataatatcatctagccctgtgcttttacaggaatctagtgttgtttcaaataaggaaaaaaaacaatttggcaccgcaaatcattagttcctgatcttgatcttagaaagttcaaagtacaggtgatagtggaaataggaaccagaacatgttttagagctataaggtatggcattcttacttgacggggatgtaatacagggatgtcatttcgcatttgttttaacacataaaaacaatcaagtgagcctgctgcaactttatttgatacacagattaataaccaatgctgatgtccttgattgtacattgagggatttgaataaaattctgcagttaatcactgtatgatttacccgga

SEQ ID NO: 13549 - DNA, 1476 bp, Setaria italica
  misc_feature (1468)..(1468): n is a, c, g, or t
  Peptide Sequence Number=SeqID_79523
acgggctttcacgcccctcgcgcgcagcgcgtacgctctgcttgaataaattggaagtcctccaaacttctaatggcttcagatatctctgttgatattcggccggactttaactcatttgatcattttctaagcatgcgatatgttgcaacagatagaccctggatgaaattatatgggataagagttcagcctgtgctgccattcagaagtttgagctgcaaacctgatccggcacttattcatcagtgcctacctgatgaactacttcttgagattttcacaagaatgaacccatatactttagggagggctgcatgtgtctgccgcaagtggaaatatactgcacgtaatcctactttgtggcgcgctgcatgcttgaagacctggcagaggagtggaatggaggcaaactatatgatggttcggtcattgtatgattcttcttggaggagaatgtggctgcagagaccaagaattcgaattgatggtctctatgtgagcaggaacacctatattcatactggagttacagagtggcaattcaagaaaactgtcaatgtggtttgctactaccgttacttgagatttttccctagcgggaagttcctctataagatttccccagataaagttaaagatgctgtcaagtgcatgcatttccgggcatcaaaggctgattgtgtgtttaaaggcgactatgtactgtcagaggatggccagatagaaatggcactcctgtatccagggcatcggtacacacttgttaggatgtgccttaggcttagaggcaccaaaattggtgcaaacaacaggttggacgtgctaaagatcctaaccactggagtgaatgcaacggaactgaaaaactggacaggcagcatacttgaacttgttgagggctgggaggaggatgagacacatgaccctgatgtccctgccgtttcccacagcaggggcttgtctccctttgtatttgttccgtttgaggaggctgatacttcagtgctaaacctcccagtggagaagatggactactatgtccctgggtgagctcctcatgacgacgtatgacggagatgattgatggccctattgcaggttggggtgatgataatggagatgatcagcgatttcatttcctcgagtaactcttgctatagcaatatgtaaatatgcaaatgttgttgtatttcctcttttcaggttacctgtacgcagctgtatgaataattatacattatgtttgttgatgcttggaaacacactaggcaggaaataagttcttcgtttgttgatgcttgcatactaagtgggaggaaatgaagctgtgtgtcaaaacgagtggaaccacccttttgaatattgtgactctgtactatagaaacaagcagtcaatcattgtaaactcatgaatctgaatatgcattttctgattgtacaaagttaacttaaaaaaaaaaaaaanaaaaaaaa

SEQ ID NO: 13550 - DNA, 291 bp, Setaria italica
  misc_feature (280)..(280): n is a, c, g, or t
  Peptide Sequence Number=SeqID_79524
tcagcgaccccttcaacctggtggttgccgtcatcgccgaggtcgtcctcgtcggcggcgccgagtactaccggatcatcaacgggctggacctggaggacaagctccacccgggcggcccgttcgacccattgggcctggccagcgaccccgaccaggccgccatcctcaaggtgaaggagatcaagaacggccggctcgccatgttctccatgttcgccttcttcatccaggcgtacgtcaccggcgagggccccgtgagaacctcgccaagcacctnagccgtacccc

SEQ ID NO: 13551 - DNA, 700 bp, Setaria italica
  Peptide Sequence Number=SeqID_79525
acattgagaaattgagatgtcactgtgagtcacagatccctttcccttctcatcagcatgattcaagcgaactgtagtcacatcacctggcgctcggctgcatccgcgacgataggcaaccgtggcgtcttcccgagcaggcacgcgcccccgccgtagaccaagcagacgagcaggaagaggaacaccgtgctctccatgctctggaagatctcgaatccgaccccgccggatggcgcgaaggactgcgcgaacaggtcggggaagatgagcagcacgtcgagcacgacggcctgcatggcgttgaagcggacgaagcgggagaaggcctgctggttccgcacgacggcgaagtagagcgtgaggaagaggaggaagggcgtgagcggcgaggagtggaagaggcgcgccgcggggcccagcgggcggagcagcgcgctgaagaaggggaactgcgcgaggaggaagcggccgtggtgcgcgccgtcgaggaacgggtagaggtaggcgaccgcggccacgaggcggtcgggagcctccacggccccgctgttgtcgttgttgttggaggcgcgcggcggggcggcgaggaggcggcgcggggatcgggcggggcacggtggaggtgggagggcgcggcggcgggggctgcagaggaggtggccggatgtgcggtggagcgggcgcgggacgagaggag

SEQ ID NO: 13552 - DNA, 268 bp, Setaria italica
  Peptide Sequence Number=SeqID_79526
cagctagacatgttcctgttcatgccgatacgacaaggaggccctgtgctgctaatgaagcttgtggtgcattgcaaggttcctccaatcctagagctaaatctttgcttcctaattctcgggacaatgctactattgatggtatgtcacaagggagtgctgaaatggactgttcagatgatgagggtaataccgtttcacgatttccaactacaaataagcctcatggtgagttattggcattgatatcgtcctccttagtggtcgg

SEQ ID NO: 13553 - DNA, 4109 bp, Setaria italica
  misc_feature (4083)..(4109): n is a, c, g, or t
  Peptide Sequence Number=SeqID_79527
gtccaccccaagttcccagtagagctgggtttgatttgaattctgaaatctttccgaataacggtatccatgtgatcaccaaaggtaagggaatcactgatactcagatccaggaccatgccaacaggtcttttacttcgctatcaatgaccagtggccacggagggctgtttaatgcatcaagtgagatcccttctgcggagagtgctgcaaggaggtttccaccagttgttgaatcgcaacgtcaaaattttttggctctggatttacagttaccatctcgtcaaaatggcaaagatagtaactatggctctattgtgaaggaagagaaagtagaccaagctctttccggcctttcttcagcagaagcccacaataatgttcatgttgcaagtgaactcaatgcctcttcttattctaacagtagcgatgggagactacctaacttggatctgaatgtgccgctggacccagctgattcacttgaaggtttgcctacaatgcatgaaagtgggaatgggttgtttcaccatagaacaattcagcatcagaaagctcaggtggccccagcggcacccatttctacaacaagcaatggagttggtcaaaatgttggcagtactgtgaacatgtctaattcatttgggctttctcataagtgtgggccagctgatgttaccttagatttgcaacttaaaccaccaactagacctgagctagggataaactggaaaggacttgttcctgctccagaactgagtctatctctgtttggtaagcccatggacgaatgcaagtctctaggtgctcctaatgctttatttgattctgaaattgccggaagttccaaaaagggcagtgaggagacagcttctacaccggggtcagataaggtgctggttgagaaaatcgttacacctgggccctgcaatgcaaatccacaggatactacatcagcaactgtttctggaattgatcagatgacatctcataatttggtgaagaaagaacctgaagaaacaccccaacagcatattcttaagggtgctgaaaaggcacatctattagaacgacaaagtgttgtgccagctagcaattgcgctgaatctgaaatgactgacagtccaccccaagttcccagtagagctgggtttgatttgaattctgaaatctttccgaataacggtatccatgatgggcttaatgtagcgactgataatgttccaataccagctgaaagtttgcttgatattacccaagctaagaccatgcctgctgttcctgaagttgaaatagatgtgaagcgcgaagaatccactaatcctgtggtagcaccagtaggtggtcattctgcatcattaatggaagcaaaatcattgccttcactaagtactgttgccagccctgctgttggattatgtgaatcttccagtcagccctccgtttctactgtttgcaaaccaccagctagacatgttcctgttcatgccgatacgacaaggaggccctgtgctgctaatgaagcttgtggtgcattgcaaggttcctccaatcctagagctaaatctttgcttcctaattctcgggacaatgctactattgatggtatgtcacaagggagtgctgaaatggactgttcagatgatgagggtaataccgtttcacgatttccaactacaaataagcctcatggtgagtcattggggaatggcccgaccactaaggaggacgatatcaatgccaataacttttgcaaagagctaaagaaagaacaagacagtgatatgcatgaggactgctcatctgtgacaaataaggtcaatacgcaggctgttgatggtgacaagcgtattaaaaccagagtcagtgttgtcagccatgcaggtgagcaggggcatcgaaatgaggtttttgttaccgaaaaatctaaagacaaacaatcattgaattcaggtaagaattctccgccgactaaaactgacaataccatggatgatgttaaggctgccacaggctctggttcaacagatctccaaaggccatcagctctgcaaaaatctactgcccctaaactgcaacctactaggcaatctcctaagacttcagatttgtgccttgagaaggatagaagctcagatataaagtcagaaatgtctccacatggcaaacaagctgcaagttttaatgagaaccatgcaaaaactgctgctgtgaagatggagcatcagactgaaaatgaagaggtcgctagacactcagatttgcaacgaagagattcagtactgggcaaagattcagaggtcgacggggcttcaagcagtcaaccacatagtgaatgtaccaagggcaagtcagcatttgaaaagttagaacatgacaaattccaacctgacttatgtaagacatctcctctacagaatgaaagagatggacagcttgttgggtcacactggagagatctggggcatgcttatgtgaacaggaatgaaagatgggagaggttcatggagtctgagcgggaaaagaacaatggagaatggcatggtggcagacatgcatctgacatgaccaaccaacgaatgacagatcaccgtggtggttggcggggtgctggcccccgtggccatccaaggaactttcgaggtccaagaatgagaaatgagtttgctgatgaacctattggtggcaggagacgctcatttgaagatgaacctgggcatttgaaccgggttccacataggcggcggcgttcaccaccacccgactccctcatgagagaggtggacattgacggcttccatgggagagagattccagaccataggctgctggctcatgggcagatagaagatctcccagatgacatgatggaagataggttttttatgccacgttcccatcgacaccgtggccaaggtgaccatggattcatccagagagataggagccactcccctgcacaaagaaggggtggccatgtgcatttccaccgtggacgatcaccggaagcaatgcccagatcaccgccattaatgcgaaatgagagaccatacttgtcccactgccgtcacagtcgaggccatgatgagagaggaggcatgcagagaaacgcaaggagacgaggcatggaaggggatgcctttgagccactactgcatcctgctgatctagctgaactccacgcagaagaggaactcactggtagaaggaagtatacagagaggagaacatatcttcggtcttcggtcagtgatgaagacgagatgctctcctaccatacagaggatgacatggaatttgctgaagccggtgggggtccacgggagcatgatagccgcttcagaaataggatggcccacgatagagcgaggggagagcaagaggatgggtacaggcaccgtgcccatcaaggttggcgagatggtgactcaaatgatggtaggccgaaaaggaggaggtactgactcacagcaataaccgactgatgcagaagacattggcctttaggaggactgactcccaacactgttttgccggcgtcttctcttccatatattggtttgtttgttgcattcgtttctcaggaaaacatggtgctgtggtgtgatatctacatgcacctgcagcttccaaaacttaccgtctaaatatcagccctggatcctgcttgataagctgggctgctcgtgctcgtggaggtcaagacactgaaatttcaggcaagttaaaagtgaacgaggacaagcctccggcatgtgctattctcgcctggctggaatcgagcaaggagacgaacctctgggcaaaagctacactatacttttacaagcatggtgctggtacggctcttgtattgaagacattatctctatgatttggttggagttggtggggagaagctgccgtgggaccgtacccttgtggtctggtctccgtcgttgcagtctttggttggcctcgctcgctggaccttgctattcaatggttgtacttgcacaactgccgggcattatgcgccgaataaaaatttgtgtgtttttggcacccatccacagtggtgccgtggaaaaaaaaaaaaaaaannnnnnnnnnnnnnnnnnnnnnnnnnn

SEQ ID NO: 13554 - DNA, 258 bp, Setaria italica
  Peptide Sequence Number=SeqID_79528
tgtgacttatttctaagctgggaatgagtgccattgtggctgtgtttgttgtccatccatgcctggtatgggctagagattttgtagcttgtcactttctaccatcaaacattgtcaaccttagaaacaaaattttcacattgtaccagaaattaatcctgcagttagagtcaaggcactcttgacatctagcagttcgtaggaacaaaaaggtaacaaaaaactacaaaccacatccatcatgtgaattacgcacag

SEQ ID NO: 13555 - DNA, 452 bp, Setaria italica
  Peptide Sequence Number=SeqID_79529
gctgattctgtggctacacaatggtgcgccgcttttaatctctccaacagcccattggataactgatgaattgtgccatggtacctaactttcctgctactattgttcttatccatcaggtcatgatctgcatacattcaggcattcacatggatatgggaagcgttcctgatagctgaccatattgcgcagcgttatgcagcgatacagatatttttttttcaaaataacaggccaatactgtccaggcttaccttttcaccaaggaaccaataaattgtaaaatggcacatgaagagatgaccacccttgactttgctactatatcatgcaaactgtgagacgaaaacttggtactggtgtgtagtgtggtgaatatgctttcagcaagaaggaatgcaaagatctaaatgtacttggtttatttgcatagtgcaattggctcttgtgaa

SEQ ID NO: 13556 - DNA, 448 bp, Setaria italica
  Peptide Sequence Number=SeqID_79530
gccacttctccccgccgcccgtggccgtccacttcccgatgagggcgccgcgcccgaggtgctccaacttcaaatagtctgatatccattgccggattcagtagtagctttttgctctatttgtcctgctattggattcctgagttgcacttcaaatagtccggtatctcactatgaattgcacttctgagcacttaaattcctgaatcctgtctcatttcccattgtcttttcagctcccgtgtgatcgacctgatccgccacatgcacagcaccaactagatgagcgagctgaggcttggtgatacaggggagttggtgtttctccccagaagaagagtgtagagagccctctaccgagaataaatttttgtatggaattatgtctgaaactatatttggtgtatcctagtggttggttgagctgtaatggctcatgtttttatct

SEQ ID NO: 13557 - DNA, 469 bp, Setaria italica
  Peptide Sequence Number=SeqID_79531
tccttgtcccttctaattggtaaagtttgtaccggtaattggtcttttccgttgttccccactgttgatgtttctgttgttgatctgactgttaggcttgagaagtctgctacctatgatgagatcaaggctgccatcaaggctgaggcagagggtaacctcaagggcattttgggttacgttgacgaggaccttgtttccaccgacttccagggtgacaacaggtccagcatctttgacgcaaaggctggcattgctttgaacggcaacttcgtgaagcttgtgtcctggtacgacaacgagtggggttacagctcccgtgtgatcgacctgatccgccacatgcacagcaccaactagatgagcgagctgaggcatggtgatacgaggggagctggtgtttcttcccagaagaaagtgtagagagccctctaccgagaaataaattttttgtaatttgaatttaaaa

SEQ ID NO: 13558 - DNA, 488 bp, Setaria italica
  Peptide Sequence Number=SeqID_79532
acttcgcagggatggagacgacatcagtgctgctgacatggacaatgatcctactgagcatgcacccggagtggcaagaccgcgcaagggaggaagtcctgagcctgtttgggaagaacagaccgggatacgacggcctgagccgcctcaaaatcgtggccatgattctgcacgaggtcctccggttgtacccgccggcgatcgcgttcagcaggaagacatacaaggagatggagatcggagacgccacgtaccctgccggcgtgatcttggagctgcccgtgctgttcattcaccacgaccccgacatctggggaagtgacgtgcacgagttcaggccggaaaggttcgcggaggggatcgccaaggcgtccaaggataggctggcgttcttcccgttcggctgggggccgcggatttgcatcggccagaacttcgcgctgctcgaggctaagatggcactgagtatgatccttcagagctttgag

SEQ ID NO: 13559 - DNA, 813 bp, Setaria italica
  Peptide Sequence Number=SeqID_79533
ttagaaaacgaaaccccaatactacgaatcccgtttcaagcccagccatcccacctcgttttctccgtcgacgcagcctctcatccccatggcgaagatcaagatcgggatcaacgggttcggcaggatcggcaggctggtggccagggtggccctgcagagcgacgatgtcgagctcgtcgccgtcaacgaccccttcatcaccactgactacatgacctacatgttcaagtatgacactgtccacggacagtggaagcaccatgaggtcaaggtcaaggactccaagacccttctctttggggagaaggaggttgctgtgtttggctgcaggaaccctgaggagatcccgtggggtgcagctggagctgagtatgttgttgagtctactggtgttttcactgaccaggagaaggctgcggctcacttgaagggtggtgccaagaaggttgtcatttctgctcctagcaaggatgccgcagccttctcctggtcagtgaaaacaccagtagactcaacaacatactacaagactaccaagactagcaccccacgggatctcctcagggttcctgcagccaaacacagcaacctccttctccccaaagagaagggtcttggagtccttgaccttgacctcatggtgcttccactgtccgtggacagtgtcatacttgaacatgtaggtcatgtagtcagtggtgatgaaggggtcgttgacggcgacgagctcgacatcgtcgctctgcagggccaccctggccaccagcctgccgatcctgccgaacccgttgatcccgatcttgatcttcg

SEQ ID NO: 13560 - DNA, 756 bp, Setaria italica
  Peptide Sequence Number=SeqID_79534
tttttggttttctttatttgtttgtagggtctgatgaccactgttcacgccatcactgctacccagaagactgttgatgggccctcagctaaggactggaggggtggaagggctgctagcttcaacatcattcccagcagcactggagctgctaaggctgttggcaaggtgcttcctgccctcaatggaaagttgaccggaatggctttccgtgtccccactgttgatgtttctgttgttgatctgactgttaggcttgagaagtctgctacctatgatgagatcaaggctgccatcaaggctgaggcagagggtaacctcaagggcattttgggttacgttgacgaggaccttgtttccaccgacttccagggtgacaacaggtctagcatctttgacgcaaaggctggcattgctttgaacggcaacttcgtgaagcttgtgtcctggtacgacaacgagtggggttacagctcccgtgtgatcgacctgatccgccacatgcacaacaccaactagatgagcgagctgaggcttggtgatacaggggagttggtgtttctccccagaagaagagtgtagagagccctctaccgagaataaatttttgtatggaattatgtctgaaactatattgggtgtatcctagtggttggttgagctgtaatggctcatattttgtctgaaacaggtccagtcatttgcttgtattaggttaccaattcatggctgctaaagtgccttaactattgaacc

SEQ ID NO: 13561 - DNA, 252 bp, Setaria italica
  Peptide Sequence Number=SeqID_79535
tgtcccctttagctgctaaacttacaaacagatttgcaaagcgaggctaacaagcataccagtggcaattttgtcaggcctaattgatgttccttgatcttggctctgttcctccactctacgccttttagcactggattttgcatgcagttgacagcagtcagatttacattacaaaatctacaaaactagtcatgattagttcattcttaacacaacttcatcccatgaatttttctcatccttttcctt

SEQ ID NO: 13562 - DNA, 735 bp, Setaria italica
  Peptide Sequence Number=SeqID_79536
tatccgtcacgattagttttgcatgtgatagtgatatgtccacattccacaaaatgatgacaattagtgcaagctaaaaaacaatgctttgtttgtaaatatcataataactcttaaagtataacagacagcatgaagggtaactgtaggtctagtggcctacctgtcttacatcccgtgaagaaagagcagtttcaacagcctacagacgagaagtacaagaacagatggttacatatgaaaaacttttgtgctcacaagattcaggtctactgtgaggaatagactgtagaaataaagagccataagatgtaataaaactatatactgaagcaacaaaccgtgtcaaagaaaattgtgtgtatgcgcttcaatacatataaaacggtggccaaagcaccatcactctccctttcatcctgcatcgactctgacaaagatttaacaccaaaaccaattggcggcagcttgaagcaaagtaatgatatctctccatcagaatcaggttctctttatgcttctgccagacctggaaaaaaatcatttcaggctggccaaacatgaatgataaattacaataaaagaagaaattatcactctgatcgagaaataaaaagctccaaccagcttctatgctttgataaatgtgtgtggttgtttctactgttaagtttatatgttggaagaaaacaggaaaatacagcagagcgacctaagaaaactaaacagcaacca

SEQ ID NO: 13563 - DNA, 1809 bp, Setaria italica
  Peptide Sequence Number=SeqID_79537
cgtggaccagatccaacatcctggccctgcacgaacgggtaacaaaagctaaatttccgtccccccaatcctgcacgcctacactacatgtcagacacctttcgagccctacatagcttatgagtcagcagggcctgtagcagtagtggccacagcgttttctttggcgccatccttctccttctggccggctacatcattgtcctcttgatcgttgctcgtttccttctgaccagctacagcattttcttcttttttatcgttgctcgtttccttctggcctgctacagcattttcttctttatctttgctcggttccttatctgtgctcttttccttcggtggaatgacaggaaaatcttcctccggttgccggtgccaccggaaattggcggcttcgatccagcgtgggtggaccaaaaacttcttgttctttacagcccagcgggccttttctgttcccagatccacagccacaacgtgggtcactgtggaatctacatctgtggagcaaacagcgcccagatgctcggccatcttccacatcatctgctcctgtgggcgagaggtatttgggaacacccgactgaagacaagtttgcagccttccaggacttcctttcgtactgtcttgatcacctgtcttacatcccgtgaagaaagagcagtttcaacagccgtgtcaaagaaaattgtgtgtatgcgcttcaatacatataaaacggtggccaaagcaccatcactctccctttcatcctgcatcgactctgacaaagatttaacaccaaaaccaaattggcggcagcttgaagcaaagtaatgatatctctccatcagaatcaggttctctttatgcttctgccagacatattcagtgtcatcaagaatcactgcaacactttcagccccaagaatcacatcaagacctttctggtggcgctgggtgcaatctgagttcgaaatcacttttgaaggaaaatagacattactagggtcaagaagcttcgctatttcaattgcataagctttgtcacccatggtgtatatatacatctcaaacatattgcttgcttctttcaaaaaattacgaacaaatggtctcaacttcgtgagcatctgcattgaatctagtgagaagatgcttctgtccggatcatcttttaaagcagcagtccgaatacccaactcattctcagcagaagaaatatcttggagtttggtcgagttgatcagtgtatgatccaggtctaaaataagcactagttttctttcacgcagcagattcttcaaatcagcgccacgtaatctgtcaatttctgaagtacctagcctcaagcccttgtggatgtaaccaaaagcaactcctgaagcatcttcttcatcttgtggcttgccacatctaaagcaaagccccccaaaatatccaggatgtggacatacctcaacttgaacatttttagatgggccagtggcaattttgtcaggcctaattgatgttccttgatcttggctctgttcctccactctacgccttttagcactgttctgttctaggagttcaacttccacctcctccgaatcctcatcctcgccctcgtcgtcggtatcgggcgaggcggaggaggggtcgccagggaaggcggagtcggcgccggaggcgagctcgagctcggagtcgaggagggcggcgaagtcgtcgcttccgctcgacgacgacggggacggcgacggcgcctcggcgaggctcatgggcgcggcgcccgaggggacgccgcacaagggcaaggagctcgtcgggtgggtgggaac

SEQ ID NO: 13564 - DNA, 361 bp, Setaria italica
  Peptide Sequence Number=SeqID_79538
ttctgccatcagtatatactcttcctcaatctttgctttctgaagccactggacaaacgcccatggcctattcaggaccacatacccgtggtccttgccggcgggcagcgggtcgacgacgaaggtggggatctcgtccatgagcccgtcgggcttccccgagtgcagcacgcgcgtgaaccctcccatggcctccccgccggggcgcgcctgcatccgcttgtaccagtagtacatgacccggcactgccaccggctgtaggccgcgtccgtggccgtgagcgccacgtggaacgggcgccggcgcgcctcgccgcccgccgcctcgcgcatccacgccggcatcgccaccaccgggtcc

SEQ ID NO: 13565 - DNA, 1065 bp, Setaria italica
  Peptide Sequence Number=SeqID_79539
tggcattttccccatacaagggacatattttgatattggccacagcttatattccatcatcccaccgaggaaggtttgcgctagcttcattgaccatttttacaagcgtaaccacactttctgggactccaggaggtggcagtgtcagattccttggtggtggcccatcttggaatgatcttttgtcaaatcgccattcaccaatttttccataggtcagttcacccttgagtgaatagtcacatccataggtgaagtggatgataaatgtgttcccaagctttgtatcaaatggtggctgaatcatgaagtccttacgaaggatatgctgaaccccatgcaatgcgctagcaacagcatatgcatacatttccaagacccatccaaaagctttatctgtctcctcatcctctttcatttgtatcgagacattcatccatgtgggggcaatcttctcaagaagtgtcttcttaataattacaggagaattcccaataggatcaacatctgtgacaggacctctttctttaggatagtatttcctgataactttttcatgttctgatggtgtgatgtaaaagaaggggaatgctgctggatcattgtcaagggccaaatttggtaaaggtttgacaaatacatgatctggttctgccatcagtatatactcttcctcaatctttgctttctgaagccactggacaaacgcccatggcctattcaggaccacatacccgtgcacaagggtattgaaatgtcaggggacagaccatcaagacaaaatgtcacacaagtgaatcaagagacatcgccagagcacatggtaccgtgatcctttattccgcgagcaagtttcttgccaaatcataatctgaaaactaaaggtttttttaaccatcggtttatcactgcaagtcgaaccggcggcagcaaattttatatcggaaaacataaatataaaaatcttctgtagccccacattgccccacgttgaagagcaagagcaaacaaacaaataaacagggcgaaggagatagaaaagaggtggtttagctgttacggttg

SEQ ID NO: 13566 - DNA, 1004 bp, Setaria italica
  Peptide Sequence Number=SeqID_79540
ggaaccatgtgcctatccatccccattcacattggtctgaacatagatactaccaaacatgtcaacttactcagtactaccaagtatcccagacataacacatcagctatacacaactgcaattcacagcaataatcatgtaaacaacatctggagctgctcgatgcgagcaccgcggacctcctcatctgtcagggctccagaaatcatcctttgcttgcgcacttgcacctgttgcattcgctcctcaacagtatccttcacgatgaagcgtctcacttggaccgctcttttttgcccaatccgatgaattctcatgatagcctgctcttccactgcagggttccaccatggatccatcaggaaaacattggatgctgcagtaagatttagccctacacctccagctttgagtgacatcagtagcaccagcttgtcctgactttcactaaactccttcagaacttttcctttatgcttctggttcaacttgccatcatatctaaggaacttgatacccttatgattgaaggggatctccagaagatcaaagaatgaagtaaactggctgaatacaatgctcttctccctttttcttctgcaaaccctcccagaatcatgataagtttgctcactttgcaagagtccttccagttattttcagcatcaacctggaagcgacactgagcaggcaatatgatcaggtcagatttgctgatgtgacttcgacagagcggacatggccctccatctggagttctccagctagaaagaaggcactcgcggcacatccggtgcgcgcaaggcgtgagcacaggatcatcagaagctgactcaaggcagataggggcactcggtagtagcaccctggcgaatctcttcagccacctcttccacataagcacgtgagggtagtgcattctgtcttccagaacaactttggactccttcaaggaaccgctgtgctagctggtcaaggtcagcatactttggaggatcagctc

SEQ ID NO: 13567 - DNA, 821 bp, Setaria italica
  Peptide Sequence Number=SeqID_79541
ccgccggctcagcgtttttcttcttcctcgcattcgtttccagcttgctccctttgggcgatggtgaatctaggccgacgacgccaacaatcgcgccatccatgtcatagacgatcctttgacatcctttatccaatgtgggtactactacacgacccgatctggtttttctcagtttgagagattcaggtgtggacattgacaatgatgtggtcctaccacgggtaagcggagagtcatgggcatatggaactgggctggtcaatggagatcttgtagcaccccgcaacttttcaagtgcagacctttgcttctttggcgggcctgaaggcttctcatttgaaggtatgtgttgctgtttttcctggcaaccttgactcttcaaagaagccactggagttgttttacaacctaagagtgaagtattgtccaccccttcattgactgcatcattggtacattccactgtaggagttaaagaaacattggtagcaacatcatcatgacctctttctcttgtaacgctgcccacaatgaagcttgtttcaacgctattcacctcctcaggtacagatgtgcatctttcactattatcattcaaagcagcagcaccttcatttgttggagtgtcaccaatgcaagtgtttttcacaagtcttgttgtctcatttgacagataggaagagttttgcacatctaaacaaacagaagttggcattccttcatctactgctgccttcttattcaatgccacgtggccagttttttcccaacaccttgagtcttcaatgaaatcactggagttctctgatcacttgtgg

SEQ ID NO: 13568 - DNA, 239 bp, Setaria italica
  Peptide Sequence Number=SeqID_79542
ttgcaaggcaaggccgccgccaccgccgaagctaagcccggaagccgccgccatggggaggctcagcgccaagtccgactatgagagtctccgtgacgcccgcatctccgagaacatggcccggatggagatgctcggcctgcgccgctgcgcgggggagctcagcgacatcgccgcagtctccagccagcgcacggccgggagcgcgactccccggaagacccccaggccgcgggtca

SEQ ID NO: 13569 - DNA, 551 bp, Setaria italica
  Peptide Sequence Number=SeqID_79543
cgacacaacattatacgacctggggtatctgggatggatccacgggggtttgctgcagcagcgatttaagcatcaaagaaccactcgctggtaatccaaagggcccctctccagcagcctcagcaggtgcccaaaggccaacgatgagtgcttagggaaccactccgcacaaattgctggcgaagctcgcgtaaaaagatcttccaacgacatgatctccccgtacgaatatgctccgaacacttcagctagatcatccaaagatttggcacgacaccatactgaaatattggatgccacatagtaagctttctggttctgctcttgcagaggtgaggctggcccaagggaaggtgcttgtacttccttcgtgagctgcaaaccgagccatggaagaaggcctgtgatgtgcatcaacaacctagtctcggggctcccaaatatagaatcacatgtaggtatcgtgatcctagatagcacctcaattgcagatccatggctaacagtggacatgagcccttttcagtcacctagtcggtcttgtctaccct

SEQ ID NO: 13570 - DNA, 1020 bp, Setaria italica
  misc_feature (1016)..(1016): n is a, c, g, or t
  Peptide Sequence Number=SeqID_79544
ttcaatcatcagtcccttcaattttcccagtatattagcacatcatgtaatacatacaccacagatagacagacagacagaaagaaagaaagaaagtaagtttcatgtttggtttccctaaccaaaacaacaataatacacaattaattctgaaactatacattggactgcagtcaaccgctgcccagccatgactcaaaattgtgcatcagcccaccccagttaagagcaatgctgtacaagtacaatacaaggctgccatccatcaaccaacgcctctacccgatgtttgccacaaagggcaccaggcgcttgtgatccctcttacgcccaagggcacacgtgtccagaacccgtccaagcagcagcctcgtgttctgcagcgcaacatctcgcgccaccactccgctatccgcggcgctgccaccgctttgccccatcaaagaccccaatcctgacccaccagcatattggagcggtccactcctagccttgaaagacgacatgctctgaagaaccttctccccagccccatgtccattctcaccaaacccaacttcctcgctttgccccccagtcacgccgctgcagctccgcaatagggcctccagcacattcagtgcctccgagcataatgtgctctccactagttgcgacacaacattatacacctggggtatctgggatggatccacgggggtttgctgcagcagcgatttaagcatcaaaagaaccactcgctggtaatccaaagggcccctctccagcagcctcagcaggtgcccaaaggccaacgatgagtgcttagggaaccactccgcacaaattgctggcgaagctcgcgtaaaaagatcttccaacgacatgatctccccgtacgaatatgctccgaacacttcagctagatcatccaaagatttggcacgacaccatactgaaatattggatgccacatagtatattgtcttccgtaactactttctagtcttagtattctattcctaaagtatttggtntact

SEQ ID NO: 13571 - DNA, 703 bp, Setaria italica
  Peptide Sequence Number=SeqID_79545
acgggcagccacacattaaggtccaatcccttcggtgaatcccctcccgtctcggtggcgattggttgttgctgtcgtgctccagactccagttttggcccttctgttgttgaatttgcattgcagttatatggttttggtgtcttatgcatactctatgcagcattatagcctcttggagtttctgttgtccatattcagattatactgtgccatgacgttgagtttagattctaaagtcatattaaactggatcctgcaaacatatagaggtattctacaatttctagatagattccttgttgccaatgagcaaccttgtcttactagctgctttaggttggagtttagtccttgactgacgtatccatcttatgttaacttctgcaagttaggtggcttaaggtaccccctagtaaactagatgaacaaggagacaacagacaaggaattgtgtgctcattttttatgatccgtgagaattactagataaatctgttgtcttatttctgcatgagaaccaacaatctgttgtttatgattaatacatcagcaaatgtttacaaggaacctttagagcttccggtgatgagaaaatgttgaattcatgtaaggtgtggttgaaatcaatgaggtccgatcgtgtatggatgagaacaataagatgtatttttagcttgtacaacacgcctttattctggtt

SEQ ID NO: 13572 - DNA, 606 bp, Setaria italica
  Peptide Sequence Number=SeqID_79546
cctcgcagtccgccgccgacgccgcgcgctcgaaccccagcagctccttgttcaccggctccacgccctgccgccgcaccgcccggtacagcccgccgacctccccacccgtggtgccgcacaggctgcccccgacggaggccgccggggcggcggccgtggcgcatcccgaaccgtcggtcgcgttggccaggcactcgcaccggccgcttggctgcgccctacagacgctgtaggcgccgcaggtggtgggcagctcgcacggctcggtgatggcggtgtagtcgagggcccaccgggtgccgtcccagtagtaggcgcggaggttgccgtcgggctccagggtcatgcggcggaacgcgcggacgccgcggttgaaggtgtcgaatgagagcacgtcggcgggcgggccctccttctggtacatggcgaggaagccgtcgggctccacgcgcgcgtacgtcggcccgccgccggccacgatctgggccttggcctccagcgccgtgtgcttgaagtacatggcggcggcgacgccgctcgacgacggcggcggcggctcgatgtacagaccgaagtagttgctccccagccgcatggcgaagc

SEQ ID NO: 13573 - DNA, 315 bp, Setaria italica
  Peptide Sequence Number=SeqID_79547
tttttttttctagagcattctagctcaggaaaaaagagagagataatttattattccgcttgttcctgaaacttattaaaaacagctagttatgcccttcgtgtagcagcagcaaacacctgggccaagtggatagtacatgatgaaatatacagtcttacaagtaggctatgtctaattgtcagcacggaagccaacagatacacacaaacctaatgtatcaaacgacaaatctaattacacccctttcggaagtccggtgactgaatcgatcagtgcttggttttcgttcggtctaactaaccttttgggtcc

SEQ ID NO: 13574 - DNA, 558 bp, Setaria italica
  Peptide Sequence Number=SeqID_79548
ttcaaataaagcggatccaaacaactataccatattaaagtatggactttggactcctagatttgggtgttgttgatcaggaatagtagagggaaccatttcaaatggaggcctaaagtcggcactttgttcacagtaggcagccttgctgaaaatggctaagtctgaaaacagcagtatatggccgaatttggagttgatttcagagggatgtagatcacaaggtgtaggtgtttttgggcaaaaatggaatccttgaagatggtagaacacaaatggaaagaagttggactacaaggaaaggatttggatcactgaactcattcacaaagtaaggtaaatggtattgtcaggtaactgacgaactgaactttgagttcagagcagttcagttaaagaagaaaggaaaaaattcaaatttcactgtgctcggatatttatcccggggtagagccaaaataaaagttgaaggattcaagtttatctacaactttgcttaagcaacttgtgaaccgtcggatttgaaatcagccgtggtggagctctgaatttttaggg

SEQ ID NO: 13575 - DNA, 1161 bp, Setaria italica
  Peptide Sequence Number=SeqID_79549
gctgcctctgcgccgactgcgacttcgaggaggggcaccgccgggacggcgacccgccgccgctccacgaccgtcgcgccgtggaagtgtacgccgggtgcccctcgatcgccgagctcgcggcggtcctcggcgtcggcgggagaaagaaggcgacgacggtggccggggatgggaacggggtcgggtggtggcccgactgggaggagctccaggtgctccggctggaggacgtgatcgtgcccaccacctcgtgccatggcctccagccgctcctcgcgccatcctccgccccaaagcaccggagctccggcgggaagctggctgaagaggtaattcggcagctgggggagctcgccaagtcggaggcggcggcggaagcagccgaagctgagcagtttccttcgtgggcttcatcagagtatggcattggagatggcgatttcgaggttttccacaacaaggctgcaagcatgtccgtcccttcttgtgaggaagcgtggatgacgaccgacgacagcaacggcgcctgcgggatggcgcatgacgcagcgcacgaccaggccccagcggcggcgagctcgccggccgagccgtccctgtcctcgttcgtggcgatgtcagagatctgccccagcatggccatcggcaacagcgtcggcgacgtcgtcgacaacggcagcagcaagcgagacgccgcagaagcaacagccccgcggcagcatgccgcgccggcgccggcgaagaaggccggctacgacgtggcctaccccgaccgcggcacggtgatctcgcgctacaaggagaagcgcaagaacaggaggttcgacaagcagatccggtacgagtcgcgcaaggcccgcgccgacggccgactgcggatcaagggccgcttcgccaggtccggcgaggccagctgatcgatcgggatgcttggcggcgaatgggcgatcccaccgacggtgagctaggtagctagggtgtgggcacggcgaagaaggggagccgggcctctctgctctgtatctatttgtgactaggatgtcgacggcgcgccatgcgttcgttgttcgcgcttcgatttgatgctcgcatcacgtgctgctgctgctgtcgaacatggtgatgcttccttgtgcgagcagaaataatcaactagcc

SEQ ID NO: 13576 - DNA, 793 bp, Setaria italica
  Peptide Sequence Number=SeqID_79550
tacacacacacacaccataccacaaattcagaccctaaagattccacaccctaatcgacgatggctgaataacaggtacctaaatttgacaccctaaacttgaaatatccgaactttcaacaaaagaaggatcgataacagttaagctcgaccgttttcagatgctgatgagatctcgagttggggaggactgcgagctcgatggctgtttctgctgctggtgctctttggcttcatcattcagtgcttcaacagagtcagctgacactggaggattgggcgcggcaccatcatcgccgctgggaagctcatctccttgcctcgaagttggcttgggaagctcactgagcatctgcaccacctcccgcattgtaggccgctgcacgctctgctcctcgacacaaagcagcgcgacatagaagatgtgcatgacctcgtgcaccggcacagtcgaaagcctgggatccatgatcttgatcacctgctccttgttcgagtccgtcatcgttttgacccactggactatgtccacaccgtccccaaactctcctactggcttctttccagtgaccagctcaagaagcacgacgccaaagctgtagacatcgctcttctcatcaaccttgagggtatatgcatactctggagcaatgtagccgtatgagccagcaatggcagacatacattgtgatgcgcctgagtcctgcaagaacttggcgagcccgaaatcagcaacatgcgcttcaaaatcagagtcaagcagaatgttgttcgatttcacatcgcgatgtag

SEQ ID NO: 13577 - DNA, 200 bp, Setaria italica
  Peptide Sequence Number=SeqID_79551
attccctgtgtaatattatatataccgtgaatcgttttgagctctcgtaccacgaaacaaggcattagggatcaataggtatattctcacccctacatgccttgttttgagctctcgtaccacgaaacaaggcattaaggatcaataggtatattctcacccctacatgcagccctacgaacaactactcacactgagtc

SEQ ID NO: 13578 - DNA, 373 bp, Setaria italica
  Peptide Sequence Number=SeqID_79552
tggcgtcaggcaaggcgcgctagcctcggagaggccgccggcagtggcggtggcggaggaggcgggcgaggatgcgggaggaggggagggagagggtccctacgacacgatcgtgatcgggtcggggatcggcgggctggtaggacggacgacgcagctggcggcgaagggcgcgcgggtgctggtcctcgagaagtacctcatcccggggggaagctccgggtactaccgccgcgacggcttcaccttcgacgtcggctcctccgtcatgttcggcttctccgacaagggtaacttgaatttgatcacacaagcactggaagcagttgggcgtaagatggaagtcctacctgacccttccacggtccatttc

SEQ ID NO: 13579 - DNA, 665 bp, Setaria italica
  Peptide Sequence Number=SeqID_79553
caaaaggaaggagtcatttgaaaaccccctcgcagggcgtggaggtcgaagttttggatcccatgacgatgaagataagagttctagtaaccctcagtctgggaaagcattgtatgacttcacagcaggtggtgatgatgaggtaatgtcaatccttctatgttcagaggttgacagaacgttcactgttctgaaatcttttctttgttctgggcactgaggacaatctttggtgtttttggtgatactgtaattcactatcttagctattcgaaagaactgttatgaatatattactgtaatcatctacttcaatagcaaaatgagcagaagaaagtcattgtcaaattaactgagctgactttttcaattgaatgctaagacgagagcacttattcatgtaaattgtttcagttgagtttaaccactgggaagaagtggaaattgaatacgaggtcgatggttggtattatgtgaagaaaggaggcctggaagggatggaagatggcaggtctggttcctgttctgtaatgtgagctcatgataatggccgtgtgcatatttgtcgacacttgttgttcaagcggtttggagaccatgagcacaaaccatgagcttaagaatggcaggcaggaatgcccttgtgcgatcttcacacaaacttg

SEQ ID NO: 13580 - DNA, 763 bp, Setaria italica
  Peptide Sequence Number=SeqID_79554
cggacaacggtagcatgcgagtgtgtatatgttcgagccatggtcatcaaagctttaatatggatgcaaaatccacatgaatcttttgaagaactaaaatctatcattgcatgtgagctgtctgacccagcctggccttcctctctcctgaatgatgtcctactgaccttacatgctaggttcaaggtatcagatccctttcagtgtttacactatatatacttaaatagtgctttgaccttgttctcagtaagctgttcactttccctattttaatgtgttattgtctgctgcgtgcatcaaatcacatctggtattagaagcagatttaaccgttctgtactggcattgactatttacatttttaagtatggtaagcgacattgttcttttaaaaaatgatgctacctttttctgagactgccaatggattttttacatgagatttatttcttttcatacttctttttgtactttctctacctccttttcgttttcccatcgctttatttttgggaggcgcagcgcccattttaattgtagttagttttattaatatcttttcctttacctgattcagtgactgactttttttatctggtttcgttacatgataggcaacaccagatatggctgtgactctgcttgagattgcaagaatcttcgccactaaagttcctggaaagattgatgctgatgttctacaattgttatggaagacatgccttgtaggagcaggaccagatgggaaacatacagcctt

SEQ ID NO: 13581 - DNA, 488 bp, Setaria italica
  Peptide Sequence Number=SeqID_79555
ccgaaactgggatgcccttgcagatattgatgctgtcgggggagttactcgagctgatgttgtacccaggatagttgatcagctttcagcagaatcctccagcgacgatgttgagtttcatgcgcggagacttgcggccctgaaagcgcttacatcagcttcccctggcagttctgagatgatggaaaagctcaatgaaattgtgtttggcattttggaaaaggtggcagatactaaacagaaacgaaagaagggtatctttaccaagcaaggtggtgataaagagtctatcatacgtggtaatttgcaatatgcttctgtaagtgcactaaggaggcttccacttgatcttggtaatccagcattcctgcaccgagctgtccaaggggttgaattttctgacccagttgctgtgaggcactcattgtcaataatctctgaaatagccgcgaaagatccatactccgttgccatggcattgggcaaaa

SEQ ID NO: 13582 - DNA, 1058 bp, Setaria italica
  Peptide Sequence Number=SeqID_79556
tacggtcgtaacggcgagcgcggccatgtcggcgctggagagcgggcggccgagcatctccgcggggaggacgaagtatatctgccccgggcggagcagctcgtcggcgccgagcgccggcacgtccgcgtcgaagtagagcgcgtcggagctgcacacgaaggcattgctgctgccggcgccgttgaggacgtcggatgcggagacgggggaggacgccggcgcgaactcccgcagcgagccgtcggccgcgacgaccagggccggcgccgccgccgccggcggcggctggtgaagcgacgcgctgcttctccggtggtggttgctagagaggcccgatcccatgaaacttgtggtggacacggatgcgtggtttaggatggttggtattatgtgaagaaaaggaggcctggaagggatggaaagatggcaggtctggttcctgttctgtatgtgagctcatgataatggccgtgtgcatatttgtcgacacttgttgttcaagtgtcgaccatatgcacaaaccatgagcttaagaatggcaggcaggaatgcccttgtgcgatcttcacacaaacttgttaagcacctaacgactcagccacattgtagcatcgtaaggataccttccatgttcttgcggggcgtgatttacgtgttgatttgtttgtacaccacgagtccattcaattcattgtttttgctgaggtcgtcacttgcttgagaggttaaccattcatctgtgccattctgctctgtcggcattcaagaaggcagtttcacgtctccagttttatcagttgtgctatatatatgtagtcaaaattgtagaggcatcatttccctcctcccgaccattattttgatcttgtgtattggtgtgattcaagtagtgagtagtgatgcctctacaatttgactacatatatatagcacaactgataaaactggagacgtgaaactgccttcttgaatgccgacagagcagaatggcaggcaggaatgcccttgtgcgatcttcacacaaacttgttaagcacctaacgactcagccacat

SEQ ID NO: 13583 - DNA, 574 bp, Setaria italica
  misc_feature (522)..(522): n is a, c, g, or t
  Peptide Sequence Number=SeqID_79557
ttaaaaatgtaaatagtcaatgccagtacagaacggttaaatctgcttctaataccagatgtgatttgatgcacgcagcagacaataacacatcaaaacaggagctcttcaggacattcttcatttacatgatgttcttgccagggtttaccttgcaaagttgtgtcattcaatatctagggcgcgtgtattggatcgtaagtgctttatttttgcctgccctgaattcagatgtgtgattcataatattaggggtcgtatatcaaattggttttaatcatatacaatttatgcagagaggcctgacataaagtctcagtatagttccctcctttatcaacttcttctggatcccagcgacagggtctgctttgaggccataaattgtgtgttgggaaaaagttgacaacacggaaaaggtattaaatgatgtgtgtgtgtgtgtggtgtttgggggggggcgatagttgtattgttcaattgctttgcttgttactaaatggtagaacgtatataattatnatcatgtcttgcagcatggaggacagagctggtggatggataatataacgtt

SEQ ID NO: 13584 - DNA, 3332 bp, Setaria italica
  Peptide Sequence Number=SeqID_79558
actagttacgttaccaagggactaaataacttagacctacttaggtaccaaccaagttaccaaactcaattgagatctacaatatgcttctgtaagtgcactaaggaggcttccacttgatcttggtaatccagcattcctgcaccgagctgtccaagggttgaattttctgacccagttgctgtgaggcactcattgtcaataatctctgaaatagccgcgaaagatccatactccgttgccatggcattgggcaaaagtgcacagcccggtggagctcttcaggacattcttcatttacatgatgttcttgccagggtttaccttgcaaagttgtgtcattcaatatctagggcgcgtgtattggatcagaggcctgacataaagtctcagtatagttccctcctttatcaacttcttctggatcccagcgacagggtctgctttgaggccataaattgtgtgttgggaaaagttgacaacacggaaagcatggaggacagagctggtggatggattcggttaactagagaaattctcaaattgcctgaagccccttctgtagcatcaaagggtgttctgtcaaaatctagtgaaaaatcttcaaaagcaaggcgacctcagcctctcatcaaacttgtaatgagaagattggagagctcattccgtagcttctctcgtccggttcttcatgctgctgcaagagtagttcaggaaatgggcaaaagtagagcagctgcttatgctttaggtgcttatgatgagggggcccctcttgatgttgaatctcttgattctgaacttgagaatccaacagctgaagctacccggaagcctaatccgctatccaacggtcatggtggcatggacacaatagcagggttattagcatcactgatggaagttgtgcggacaacggtagcatgcgagtgtgtatatgttcgagccatggtcatcaaagctttaatatggatgcaaaatccacatgaatcttttgaagaactaaaatctatcattgcatgtgagctgtctgacccagcctggccttcctctctcctgaatgatgtcctactgaccttacatgctaggttcaaggcaacaccagatatggctgtgactctgcttgagattgcaagaatcttcgccactaaagttcctggaaagattgatgctgatgttctacaattgttatggaagacatgccttgtaggagcaggaccagatgggaaacatacagccttggaagctgtgactatagttcttgatctgccgccacctcagcctggttcaatgtctggattcacttctgttgatatggtatctgcctccgatccaaagtctgcaatggcactccaaagattagttcaggctgctgtttggtttctgggagaaacgcaaattatgctgcatctgagtatgcctgggagtctgcaacgccgcctggtactgcactaatgatgttagatgctgataaaatggttgctgcagcaagctcccgtaatcctacacttgctagtgctctgacgagacttcaaaggtgtgcatttagtggcagctgggagatccgcattgctgctgtccaagccctgactaccattgcaataaggtctggtgaaccttatagactgcagatatacgaatttcttcacgctttggctcttggaggagtgcagttaaacttttcagaattgcaattaagtaatggggaaaatcaaggtgccagtggtactggtcttggatctttaataagcccaatgctcaaggtcctagatgaaatgtatagagctcaagacgatcttgctagagatattaggcagcatgataatagtaaacaagaatggagtgatgaggaacttaagaaactttatgaaacccacgagaggcttcttgattttgtttctttattctgtttcgttccaagggctaaatacttgcctcttggtccaaccagttccaaactcattgagatctaccgcaaccggcacaacataagtgcatctggtggtctaagtgatcctgctgttgctaccggaatatctgaccttatgtatgagtccaaagatgtacgtaaagagaccactaccatgcagtctggaatcgaccctgatctggcaatggcctgggcagcaggtttggaagatgatgattgggcaaacaatgctccagctgtggataaagtaaaggacttccttgctggtgctggaactgatgctcctgatgtggatgacgaggaatacatgaactctaggccatcagttggctatgatgatatgtgggctaagacaattctcgaaacatacgaggcagaggaagatgatggtaggtactctggtggatcctctcctgagtcaaccggttctgttgaaacgtccatatcatcccattttgggggcatgaactatccgtcattgtttagttcaaaaccatcaagtcacggggcttcccaacagacgatacgtgaagaaccaccatcatattcaacatcagtactgcaaaggaaggagtcatttgaaaaccccctcgcagggcgtggaggtcgaagttttggatcccatgacgatgaagataagagttctagtaaccctcagtctgggaaagcattgtatgacttcacagcaggtggtgatgatgagttgagtttaaccactggggaagaagtggaaattgaatacgaggtcgatggttggtattatgtgaagaaaaggaggcctggaagggatggaaagatggcaggtctggttcctgttctgtatgtgagctcatgataatggccgtgtgcatatttgtcgacacttgttgttcaagcggtttggagaccatgagcacaaaccatgagcttaagaatggcaggcaggaatgcccttgtgcgatcttcacacaaacttgttaagcacctaacgactcagccacatggcttcatggaaggtatccttacgatgctacaatgttcttgcggggcgtgatttacgtgttgatttgtttgtacaccacgagtccattcaattcattgtttttgctgaggtcgtcacttgcttgagaggttaaccattcatctgtgccattctgctctgtcggcattcaagaaggcagtttcacgtctccagttttatcagttgtgctatatatatgtagtcaaattgtagaggcatcatttccctcctcccgaccattattttgatcttgtgtattggtgtgattcaagtagtgagtagtgatgtaaattttgtttcagaatggattatgtagtatatacaacagtgaaatcacatacagcattgttttatttacccaggttgtgtgacccttcttttttaccaaaaaaaaaaaaaaaa

SEQ ID NO: 13585 - DNA, 217 bp, Setaria italica
  Peptide Sequence Number=SeqID_79559
gcctcggaggcgcggccggcctcagcttggctgccatgggcggcacgggcgcacggcacgatcggcgcctgcagcgaggcatgggcggtgtggccgcatggcacgaccggcccctacggtggggcataggcggcacagctggccggtgcagccaggccacgggcggtgcggccggcccctacggcggggcacgggcggcgcaagttgatggtgggaa

SEQ ID NO: 13586 - DNA, 598 bp, Setaria italica
  misc_feature (1)..(16): n is a, c, g, or t
  Peptide Sequence Number=SeqID_79560
nnnnnnnnnnnnnnnnccttggtctagttcttcttttagtttttttttttttttttttttttttagaacaaactgcaaggaacttttttatttctggtgatagcgagtaacaaaacgtagaacatcagcaaaaccctgctctgaatctgataggataagagagcgctagctgagaacagggcatccagcccacacacgcacgcacaccacggcgaccggaggccgctcttcctgtattgtattgtatcttcattctccctttggccgagccgagatgttgaggcgtcaagttgcacagcgaccaaccaaccgaggacttcctccacggccatgccggcccgccgccgtcaccggagcgcgcgcgacgacgacgccaagccaaacgaacccccaccaccccttcccctttggtatgttatatcagacggcggcaaacggggccctcctcacgccctggcgtaggtgcgggcgaggtgcgcggcgcggaggtcggcggggtcggcggcggcggcccagttggcggggcggtagtggcccgtgacggggtcggggacccacgagatctcggcggcggcgccgcgcccggcctccttggcct

SEQ ID NO: 13587 - DNA, 1835 bp, Setaria italica
  Peptide Sequence Number=SeqID_79561
aggactagacgactagacaagagcaggtacttacattccgatgaaacccaacgcaagaaaatcacatgttcttttgatcgatacattagagagtaagggtatgcatggttgtgtaaaattactcatgccaaatccgcagcatacgggaatgccgcttattaacattatgggttccacaaggaaaagtaaaaaaacaagtgttccaaacaattatagatgctttgtaggaaacgcacaaagtccaaactaagcattccgagctccatgagacttccagaggttgttccattccaccatggcatcggctgctttggtgaagattgcattctttggtcctagtttctcccggacgatgcttgctagctccttaacacaatcttcaacagtaactgcagtccttgatagtttgagtgattggaagaatggaagaacatcatccatgactttcactccttcccattctttcaaactctccagagctttacctgcttccgcatcacttctcatcacataaggcagtccagtcttcataccataccccaagctgtcgcataccactttagcacacaaaccattccatacgtcttcaagggtatcccatctgtgcttcccttcgttgcgtagccggagggctgggaacatagcaggccccaatacctcacggttgaatgcaacgtttatcccactcacaggcatcatggcgccaagcggaactgtcatcacagcatccacataggttgtgttccgctgatttctcttcacaacatgagtcattgggtcgtagtccgcgttatgcagccacaaaccacatgagagcatgcagtcaaccccttcgcgcaggctgaatgggtaaccacggacaaaatcagcacctttcctgtatggatcatagagtgtgttgaaaaagaaaggcgtggcgggtgtcttcaaattgaccatgtgctgtgcaacagcatcaacagtcgacccagccgtgtcctttgctgggaggcaattgtcatcaattgaaatcacatacttcttgcgtgagacaagatacccaaagtaacggcatgagtgaccggagaagttgatggacgtggcgccaagcattccatcaatatctgacttggtgtaaaccttgagatcaaagccagtggggatttgaagatcctctttcatgtctggatctttgacaacaatgatgtggaaacgagagaaaaatggccgccatgcttcaaagaaggtgttcaggttgggctggagtgctgcgatcacaatgtcaacctcactgtcttgaattcccgtagacatcttctcaggtaatcaaaatgatctaagcaacagcaggtctagaacctctcagagcaccgtgtgggaaggaccggaacgactggttgcttaatgtttagcaattgaacagccaatatgatttcctcacaaccagttgccagaaacaacttcagaactttctctgtcagcttcccagcactcagagttctctacacggaagaggtcgatgacgaggtggtcgggaatgctggagaggtcggcgatgtgggcgatgcggaggagcgcggagtcgagggtgagggagagcagcgagggcggtcgcatcggcccagatctggatctcgcacccccccttttatagccccctccgcgggaagcaaaggcgcctcccctcccgcggccgtgccacgccacgttgcccctcggtcctcgcctcccgctccccacgctcgcttcgtgttgcgtttgccggcaggcagggcagcgcggacccgaaagcccgaggggggcgaggaccgcgacccacgcaccaatcggcgactttcacgcccgtttccccgcgc

SEQ ID NO: 13588 - DNA, 544 bp, Setaria italica
  Peptide Sequence Number=SeqID_79562
ttaagagtcacacaataatgcaagaagtccagcacattgtctatggaaccatgggccgcaacttccaacagtgaaacatcgtctatcacgatggtgaattggcctgcattttctccactcctggttgcctccgccactctttgaatttcactgtacagtcgaacaaagctatcagcaatggcgccatccctagctccacctgggaatgcttgcaattcaaagaaatgaagcctctcgttcctcctatgcagggaaaggttacatcccatcttgcgcaggattcggtcgtaatgggtgaaaggctgcgcgagggcgaggaaggcagccgccccgccgccggcgagcgcgcgcttgaggaggaggtggaggacgaaggcccccggcgcctccacgcagtcctctactaccaccaaccgcgccgcggagcccatcgcctcggtcaggaggtctcccctccgtactcctccatggtcccctgggtaaacacccttcgccggagagcgagactggcggcggcggcggcaaaggagtttgagaaaacaga

SEQ ID NO: 13589 - DNA, 424 bp, Setaria italica
  Peptide Sequence Number=SeqID_79563
ccctcttgatagtaatctttccctagagaagttttgtcatgcgtccaccagtgaccggtattgaagataatgatatctgcattcttatacctcggaaacgctcgatcgactatgtcaagcctgagagtttccctggtaccatttccgtttccgattggcatctcccattcctgaacaaggaaaggggatcggaagaactccacggtgcaattgtagtcctggaacaagaacgagtaggagccctcagccttgaattggtgcctgccggatacctcaaaaaccttgctcttgtctttgacagaattcctcaagatacaaatcaaggattcccacatgttcctgttgagtgagtcaccgacaaacaccaatctctttcccctcagcctctccaacatatcagctgggttcaatcttgggattctgc

SEQ ID NO: 13590 - DNA, 633 bp, Setaria italica
  Peptide Sequence Number=SeqID_79564
cgccgcgccgctggcggctcggcctcgcttcccgacctctccgcgttctacgatgtcggcggccgcggcggcggtggggggctcgccgccggcgggtacctcgtggaggaggaggaggaggaggggctggtgggcccacacgcgaacggtggcgcgctcgaccccgccgacttcctccagatccccgagggcttgcccaggctgcacgtgggccccgacggcaataaacaacttgcccgctcaggttcaaacagacgagttgcagtaattagacctaactcacccaagtcccctgctgccagtgcaagtgcatttgggagtgcagatggatcagatgaggacgatgctacacaaaatgggggtaaacttgacaatggctacattaacacaaatgggaaccttgaaggagaacacaaaggaaatgcaagtgtggaaaatggggctaccaaaccattagcagcagcaaacttgatacgatcacatagtatatccaatgatcttcatgcagttcaacctgacccagttgctgcagatattcttcgaaaagaacctcagcaagaatcgtttatcaagctgttaactgcaccaaaggagattccaactgctgatgagattgaggttttcaaaatcctt

SEQ ID NO: 13591 - DNA, 387 bp, Setaria italica
  Peptide Sequence Number=SeqID_79565
gggactggcttatcaggctggcattgatatcttacaatcaggccgaggtaccagtcaattggtgccctgctcttggaactgtcctggcgaacgaagaagtcatagacggtctgagtgaacgtggtggttatcctgttataagaaagccaatgcgccagtggatgctgaggataacatcttatgctgatcgacttcttgaagatttgaatgatcttgattggcccgagagcataaaagaaatgcaaagaaattggatagggagatcaaaaggcgctgagcttgaattttctgctgttgaccaggaaggacatgacctaggtgccaagttattagtttacacaacaaggcctgacactaatttttggtgcaacatatcttgttgtggca

SEQ ID NO: 13592 - DNA, 110 bp, Setaria italica
  Peptide Sequence Number=SeqID_79566
ccattgcaagcttacaggtggaagcatctgatttagcgaacttccttaccatggagtcggaatgggggttaccgagatgtctgcagaaagtacatcagctcaccaaggat

SEQ ID NO: 13593 - DNA, 312 bp, Setaria italica
  Peptide Sequence Number=SeqID_79567
gacggcaggcagtcgctgcagggtcagcgagtaggatgctaatctttctcgatcagggctgacggcaggcagtcgctgcagggtcagcgagtaggatgctaatctttctcgatcagggatgacttgctggcttatttacatgggagcaaaggccccgtatatgctttggaaacaccacctaatatcagtaccatgtaaataagccagtgatcgggaggttgttgaaataagttggagtgatttggtgagagactccatgttactgtatttcttcgttcgccttcaatccaatcttgctttccatacaaaaaa

SEQ ID NO: 13594 - DNA, 226 bp, Setaria italica
  Peptide Sequence Number=SeqID_79568
cagtaaaacgaaaagatatgttccgcttctccagtaaccagattgaaacaaagttacaggcttacatgcatacaggttacgtacaacacaagcagttacatatgcttgaacatctaacgtcagattgaaatcaaatcgcaccatgggagcaaaggccccgtatatgctttggaaacaccaccctgagacacgcaacaggggataggaaaggcacacaggggatagg

SEQ ID NO: 13595 - DNA, 437 bp, Setaria italica
  Peptide Sequence Number=SeqID_79569
tcctcggctgcaagcagtagttggaggcttcaattctccaccggcagcatattttcccattacaccaccgcaccatctaaagtagtcgcttctaatgcctaaaggtgcagctagtaatatgtcagtgatccatggagttagtggcctcaatggcttccggtcaggttcagttcctggagaatcatcagatttttttatctgtggaatcactggatgttgcctgatcggatgtgctgctacattcagcttcactatgttggcgctcaactttgaatattggcctattgtagtgggttaagactctaactactgcttgcagccgaggatctgggaagcgactactttagatggtgcggtggtgtaatgggaaaatatgctgccggtggagaattgaagcctccaactactgcttgcagccgaggatctgggaagcaccc

SEQ ID NO: 13596 - DNA, 227 bp, Setaria italica
  Peptide Sequence Number=SeqID_79570
aaactttcagtaagacacaagtagcattgctaagagttggatcttggtttcgaggcaagtagcattgctaagagttggatcttggtggcatagatggatgaactgactggcaacttcaactcggtgttgattaacaggctcttgagctaccaaggtatgtcagcttcaaatgagaagtggatcgatggggctccagttcacatcaactgtgccacgatcctggggtg

SEQ ID NO: 13597 - DNA, 474 bp, Setaria italica
  Peptide Sequence Number=SeqID_79571
gttgattgaagaagttaacacagtactcttagaagaacttgtgtcttactgaaagtttcttggtttcgaggtgctcttactgtttagtgcagcagtttctgtagtttctttctttccctttgagagcctttctagcttcttgggcaggctcttgagctaccaagtatgtcagcttcaaatgagaagtggatcgatgggctccagttcacatcactgttctgccctccaccccaggatgtggcacagaagcaggcacaaattttggcctacgttgagtactttggccagtttacagctgacagcgagcaattcccttaagatgtagcacagctcattcaaagttgctacccgtcaaaagaaaaacgcttggtagatgaagtattggcaacttttgtcttcatcatcccgagcatggtcatgccgttgtacatccaattcttcacgtatcatagatgggactctgtgctatgatag

SEQ ID NO: 13598 - DNA, 571 bp, Setaria italica
  Peptide Sequence Number=SeqID_79572
catgatagcccagaagcattggtgattcttgctagtgcttcagaccttctacttcgtgctactgatggaatgcttgtcgacggtgaagcttgtactttaccacaacttgaggtgacatctctttcagtcatcagatttcttcactggagaatacaattactccctctgtcccaaaatgacctacaatttgaaacggagggagtaacaaaatcacctgttctattctgctgtcattagacaccatcaacttacattttccatatgcttgctgatgaatacatgcagcttctggaagtaaccgctcgagcagtccatctcattattgaatggggagattcaggtttatcagttgctgatggcctctctaatctgctgaaggcatgctctcttctctgatctcctacccaatgattagaataacactcatgactcatgcatccttcacagcacagcatgctaactaactatgacttgcagtgccgtctatcacccacgatccgctgcctttctcacccaagtgcacatgtgcgcgcactcagcatgtctgtccttcgcgacatcttgaacaacg

SEQ ID NO: 13599 - DNA, 481 bp, Setaria italica
  Peptide Sequence Number=SeqID_79573
gcggggggagcaagctacctggaggacaagctggaggaccacgtcgccgagaaggtggaggaggacctgtacgccggcggcgacgatggtgactacgacgacgactactaggtagagaggatcgatcgacctatcatcattctatcggaatcggaatatggatggaatcaagtcgagtaagccagtgatcgggaggttgttgaaataagttggagtgatttggtgagagactccatgttactgtatttcttcgttcgccttcaatccaatcttgctttccatcgattacgtacgtactatagaacacgtaatccaggaacatgacccggtgatgtagatcgcatggtacagtatggtttctgtttctttctcctccatctttttcttcatttttctggactaattatttaagaagaccgtacgtcgcccatagactccttgaatcgtcatcgaggcaaaccaaaagcgaaggagcttgatt

SEQ ID NO: 13600 - DNA, 562 bp, Setaria italica
  Peptide Sequence Number=SeqID_79574
aggtgggttaccgaggttctcaaaactctcctaagatctgtattgtcagagaaacaagaactgtgcttctctgttgtctcattgctctggcagaagctcatagcttctcctgaaatgcagatgtctgcagaaagtacatcagctcaccaaggatggagaaaggttgtagatgcgctttgtgatgtcgtttcagcctcaccaaccaaagcttcagctgctattgttctacaggctgacaaagacttacaaccttggattgctagagatgacgagcaaggtcagaagatgtggagagtcaaccagcgaatagtgaagcttatagctgagcttatgaggaaccatgatagcccagaagcattggtgattcttgctagtgcttcagaccttctacttcgtgctactgatggaatgcttgtcgacggtgaagcttgtactttaccacaacttgagcttctggaagtaaccgctcgagcagtccatctcattattgaatggggagattcaggtttatcagttgctgatggcctctctaatctgctgaagcatgctctcttctctgatt

SEQ ID NO: 13601 - DNA, 1460 bp, Setaria italica
  Peptide Sequence Number=SeqID_79575
tttaaaggattccatgaagattattgtacctggaaaaactaatgggatcaataaagagctacacaatagcatcagctcagcaattcttcatactcgcagaatacttggcatcttggaagctcttttctccctgaagccatcatcagttggtacctcatggagctatagctcaaatgaaatagttgcagcagctatggttgctgctcatgtttctgagttatttcgtagatccaggccatgcctaaatgcactctcttcactgatgcgatgcaagtgggatactgggatttctaccagggcatcatccctttaccatttgattgacttgcatggtaaaacagtgtcctccattgtgaacaaagctgagcctcttgaagctcacctgacccttacaccagtaaagaaggataatcaacaagactcagaggaaaacagtaccagttcatcggatagtggcaagttggaaaacaagaatggttcaacctcacataagaaaaatggtttctcaaggccactcttgaaatgtgcagaggaggttcgaaatggcaatgttgcaagtacatctgggaaagccattgcaagcttacaggtggaagcatctgatttagcgaacttccttaccatggatcggaatgggggttaccgaggttctcaaactctcctaagatctgtattgtcagagaaacaagaactgtgcttctctgttgtctcattgctctggcagaagctcatagcttctcctgaaatgcagatgtctgcagaaagtacatcagctcaccaaggatggagaaaggttgtagatgcgctttgtgatgtcgtttcagcctcaccaaccaaagcttcagctgctattgttctacaggtcaagatattgctgtattcacatgtttgatcaaaactaaatttggttcaaaaattaagcttttgttcttgattaatttatttcaaaacaggcattttcttttacatgatgcctatacatgaagatgtactattatacgatatcctatgtcatctttcttgacgcatatttgtttcgcaggctgacaaagacttacaaccttggattgctagagatgacgagcaaggtcagaagatgtggagagtcaaccagcgaatagtgaagcttatagctgagcttatgaggaaccatgatagcccagaagcattggtgattcttgctagtgcttcagaccttctacttcgtgctactgatggaatgcttgtcgacggtgaagcttgtactttaccacaacttgagcttctggaagtaaccgctcgagcagtccatctcattattgaatggggagattcaggtttatcagttgctgatggcctctctaatctgctgaagtgccgtctatcacccacgatccgctgcctttctcacccaagtgcacatgtgcgcgcactcagcatagtactagtaccttacgacgaacaatacttagaaacaaaca

SEQ ID NO: 13602 - DNA, 1422 bp, Setaria italica
  Peptide Sequence Number=SeqID_79576
gttcttagttttgtttttttttttttttttttgttctagattcaatcggaagctgtggggatatgtatatttataggcgagttcttgctcccggttgtagcagtaaaacgaaaagatatgttccgcttctccagtaaccagattgaaacaaagttacaggcttacatgcatacaggttacgtacaacacaagcagttacatatgcttgaacatctaacgtcagattgaaatcaaatcgcaccatgggagcaaaggccccgtatatgctttggaaacaccacctaatatcagtaccatgtaaataagccagcaagtcatccctgatcgagaaagattagcatcctactcgctgaccctgcagcgactgcctgccgtcagccccgtggccgccgatgtcagctccaggaatggccttgtcagcaaggggaggggggcagccgagctccttagccgctgcactgaggaaggcaagcgtcagcccagtggcgcggcggctgtgagcttcccactctatgcacctctccacgtccgcctgccagttgatggatgctgctaggcaccggtaggacgagttctgaataccgttccgttgttgttctccttggatgatcttgctgggggttatgtgtccgttgttcaagatgtcgcgaaggacagacatgctgagtgcgcgcacatgtgcacttgggtgagaaaggcagcggatcgtgggtgatagacggcacttcagcagattagagaggccatcagcaactgataaacctgaatctccccattcaataatgagatggactgctcgagcggttacttccagaagctcaagttgtggtaaagtacaagcttcaccgtcgacaagcattccatcagtagcacgaagtagaaggtctgaagcactagcaagaatcaccaatgcttctgggctatcatggttcctcataagctcagctataagcttcactattcgctggttgactctccacatcttctgaccttgctcgtcatctctagcaatccaaggttgtaagtctttgtcagcctgtagaacaatagcagctgaagctttggttggtgaggctgaaacgacatcacaaagcgcatctacaaccttttcttcctatcctttggttgagctgatgtactttctgcagacatctgcatttcaggagaagctatgagcttctgccagagcaatgagacaacagagaagcacagttcttgtttctctgacaatacagatcttaggagagtttgagaacctcggtaacccccattccgatccatggtaaggaagttcgctaaatcagatgcttccacctgtaagcttgcaatggctttcccagatgtacttgcaacattgccatttcgaacctcctctgcacatttcaagagtggccttgagaaacctattttttcttatgtgag

SEQ ID NO: 13603 - DNA, 3909 bp, Setaria italica
  Peptide Sequence Number=SeqID_79577
aaaaaatctttttctcgcctctcctcgctcctcgccgtttctctctcctcccctcctcctcacccgccgcccgccgcgaaatctgagcacggacgccgccggctcgccgcggagagcctcggattagagcgcgccccgtcgagagattttgaagcaactatgtttgggattggttgatatgatacttgttcacgttgggggatgcagatcccccctctgtgggggttgattgaagaagttaacacagtactcttagaagaacttgtgtcttactgaaagtttcttggtttcgaggcaagtagcattgctaagagttggatcttggtggcatagatggatgaactgactggcaacttcaactcggtgttgattacaggctcttgagctaccaagtatgtcagcttcaaatgagaagtggatcgatgggctccagttcacatcactgttctgccctccaccccaggatgtggcacagaagcaggcacaaattttggcctacgttgagtactttggccagtttacagctgacagcgagcaattccctgaagatgtagcacagctcattcaaagttgctacccgtcaaaagaaaaacgcttggtagatgaagtattggcaacttttgttcttcatcatcccgagcatggtcatgccgttgtacatccaattctttcacgtatcatagatgggactctgtgctatgatagacatggtgccccattcagctccttcatctctttgtttagtcatacttctgagaaagagtactcagagcagtgggccttggcatgtggagaaattcttagagtcttaacccactacaataggccaatattcaaagttgagcgccaacatagtgaagctgaatgtagcagcacatccgatcaggcaacatccagtgattccacagataaaaaatctgatgattctccaggaactgaacctgaccggaagccattgaggccactaactccatggatcactgacatattactagctgcacctttaggcattagaagcgactactttagatggtgcggtggtgtaatgggaaaatatgctgccggtggagaattgaagcctccaactactgcttgcagccgaggatctgggaagcacccacaacttatgccatccaccccccagatgggctgttgccaatggagctggagttatattaagtgtctgtgatgaggaggtagctcgttatgagacagcaaatttaacagcagcagctgttcctgcacttctgctacctccaccaacgccggcgttggatgagcatttggtggctggcccttccccctctggaaccatttgctcgcttgttccatagatactatgcaattgctactccaagtgctacgcagaggctgctttttggtcttctcgaagcacctccatcatgggctcctgatgcactggatgcagcagtgcaactagttgaactacttagagcagcagaagattatgctactggcatgcggcttccaaagaattggatgcatctgcatttcttgcgagcaattggaactgcaatgtcaatgagagccggtattgctgctgataccgctgctgctttgcttttccgcatactttcccaaccaacactactttttccaccactgggacatgccgaaggagttgaagtacatcatgaaccattgggtggctatgtatcatcttataagaggcagttggaagttcctgcatccgaagccactatcgatgccactgcacaaggaattgcttccttgttgtgtgctcatggccctgatgttgagtggagaatatgtaccatctgggaagctgcctatggtttgctacctctaagttcatcagcagttgatttacctgaaattgtcgtagctgccccgcttcaaccacctacactgtcatggagcctgtacttgccattattaaaagtattcgagtatctacctcgtggaagtccatctgaagcatgcctgatgaggatatttgtggcaacagttgaagctatactcaggagaacttttccttccgaaaccttggaacaatctagaaaaccaagaagtcaatccaagaaccttgctgtcgccgaactccgcacaatgatacattcactctttgttgaatcctgcgcctcaatggatcttgcctcccgattactatttgtggtgttaactgtttgtgtcagtcatcaagctttgccgggggggcagcaaaagaccgactggtagtgataaccattcttctgaggaagtcaccgaggactcaagattaacaaatggaagaaacagatgtaagaagagacaagggcctgttgctacatttgattcatatgttttagctgcagtttgtgccttgtcttgtgagcttcagttgttccctttcatttctaagaatggttcacattcaaatttaaaggattccatgaagattattgtacctggaaaaactaatgggatcaataaagagctacacaatagcatcagctcagcaattcttcatactcgcagaatacttggcatcttggaagctcttttctccctgaagccatcatcagttggtacctcatggagctatagctcaaatgaaatagttgcagcagctaatggttgctgctcatgtttctgagttatttcgtagatccaggccatgcctaaatgcactctcttcactgatgcgatgcaagtgggatactgggatttctaccagggcatcatccctttaccatttgattgacttgcatggtaaaacagtgtcctccattgtgaacaaagctgagcctcttgaagctcacctgacccttacaccagtaaagaaggataatcaacaagactcagaggaaaacagtaccagttcatcggatagtggcaagttggaaaacaagaatggttcaacctcacataagaaaaatggtttctcaaggccactcttgaaatgtgcagaggaggttcgaaatggcaatgttgcaagtacatctgggaaagccattgcaagcttacaggtggaagcatctgatttagcgaacttccttaccatggatcggaatgggggttaccgaggttctcaaactctcctaagatctgtattgtcagagaaacaagaactgtgcttctctgttgtctcattgctctggcagaagctcatagcttctcctgaaatgcagatgtctgcagaaagtacatcagctcaccaaggatggagaaaggttgtagatgcgctttgtgatgtcgtttcagcctcaccaaccaaagcttcagctgctattgttctacaggctgacaaagacttacaaccttggattgctagagatgacgagcaaggtcagaagatgtggagagtcaaccagcgaatagtgaagcttatagctgagcttatgaggaaccatgatagcccagaagcattggtgattcttgctagtgcttcagaccttctacttcgtgctactgatggaatgcttgtcgacggtgaagcttgtactttaccacaacttgagcttctggaagtaaccgctcgagcagtccatctcattattgaatggggagattcaggtttatcagttgctgatggcctctctaatctgctgaagtgccgtctatcacccacgatccgctgcctttctcacccaagtgcacatgtgcgcgcactcagcatgtctgtccttcgcgacatcttgaacaacggacacataacccccagcaagatcatccaaggagaacaacaacggaacggtattcagaactcgtcctaccggtgcctagcagcatccatcaactggcagggcggacgtggagaggtgcatagagtgggaagctcacagccgccgcgccactgggctgacgcttgccttcctcagtgcagcggctaaggagctcggctcgcccccctcccttgctgacaaggccattcctggagctgacatc

SEQ ID NO: 13604 - DNA, 961 bp, Setaria italica
  Peptide Sequence Number=SeqID_79578
cagtatctgttcgtctcttccccgagagggcaacctaccacactagctaagtagctaccgaaatgatgctctccggcggccgccaccgcggcctggtcctgccgtgtctcgccgtggtggccgcgctggccgccgccccgcgcggcgccgacgcgtacaagaactacaccgtcggcgacgacaagggctggtacgacggcctcaccctccccggggtcgactaccaggcgtgggccgacggcatcaagaacttcagcctcggcgatttcctcatcttcaacacggacaagaaccactcggtggtgcagacgcggaacgcgacgctgttcaagagctgcgactacaacgactcgggccccgacgacaccgtcgagtggtccgccgccgcgccggagttcagcaaggacgccgtcaccgtcgccgtgccgctcctcagggagggccgcacctacttcttctcgggcaactacgacggcgagcagtgcgagaacggccagggcttcgccatcgacgtggcgcacggccagggcctgccgccggacctcaggccgcccgccgccgacgcgcccgcgccctcggcgaagcccgccgacggcgccgccgtgctcgacttcagccaccccaagaacgtcaccacgcccagcgcgtccgacggcgacctgagcggcgacgataccacctcgggctcaagccggactctggccaggatctgtctggccgtgatgccgctggtcaccgcgctctttgcggtgtaagcaggcgagtgcatctcgcacatgcctggactatgagatttgttgttgtaatttatctgtaatatggctagtcaagtagtagcagggtgttcacaggtttattagttagtgaaatgcttttgattgtatagtgtgccatttcttcgatttgtatggggtgatgacaacaataataatagcaattccattctttggaaaaaaaaaaa

SEQ ID NO: 13605 - DNA, 270 bp, Setaria italica
  Peptide Sequence Number=SeqID_79579
cgggcgagagccccgtgcggagcggcgacggcgcgggggaagaagggtcgagcgacgggacgcggtagcggctgccgcggtggtggcggaaggcgcgcgcggcgacgacgaggacgaggaggagcaacgcggacgccgcggcgaagaggaggaagatggcgatcgcggccgccatcaccgccgcctgcacgccgacggacaggatgcgcgcgccggcgccctgggtgcggggccgtgacgccggctcttggcgacgtcccggtcatggtg

SEQ ID NO: 13606 - DNA, 735 bp, Setaria italica
  Peptide Sequence Number=SeqID_79580
ttggtaagtctaacgttcgttctttaggtaaagttacaagacgaagtaagaacctccgccgctcgcgaggttgcgcggccggtactcgccaagctatgctccacggccctctcggtggaatcaaggatcttctccgtctcttgcacagattggttcatcataaggctactttccttcagctggcgtgctaactcgaccatttcatcagttaaatcttcttgcagcttcctgtgcttctcgatgtgagcctgagcttctgcatccaatttgataggtgcaccgatatctcctttcctctcctgttggcttgcacgaacctcgacatgagctctatttagtttcttctgttagttcagtagttgtaacagtaagaaaaggtggacatcaattttaacttacgctgatctccttcgcaatcctgatgataaagatattgggctttctgccttagctatttcctcagagatttcttcttctctgctttcaacatctggcttttcattttcaggcactgaagctgctagcctggcagcaagtgcttcaatcttttctgaatattcagaaagcttagctttagaaacacttgatatcccttctggtgtggtctctgctcctagctgctccaatagctccctggctgtggtaacataatggacaagcttagccggattctgctgacgaggagccgcctccagcagccttctaaggttcacttccaccttgttgagcctcatg

SEQ ID NO: 13607 - DNA, 1169 bp, Setaria italica
  Peptide Sequence Number=SeqID_79581
gatccacggtacaccgtccgtcttgctgtgaggctacactcctgaattgggattctgatcatgttagaacccatgaacaaagaccgagtagacgagagtgcccgctgctgctgccgcactcgtccttcaagctaagtgatccgtatgagcagaaccaccattacaaacacgcaggtcatcacaaggatgagcagccactggaagcacgtcgtcttggaagtcagcgagtagacctccgccgctcgcgaggttgcgcggccggtactcgccaagctatgctccacggccctctcggtggaatcaaggatcttctccgtctcttgcacagattggttcatcataaggctactttccttcagctggcgtgctaactcgaccatttcatcagttaaatcttcttgcagcttcctgtgcttctcgatgtgagcctgagcttctgcatccaatttgataggtgcaccgatatctcctttcctctcctgttggcttgcacgaacctcgacatgagctgctgatctccttcgcaatcctgatgataaagatattgggctttctgccttagctatttcctcagagatttcttcttctctgctttcaacatctggcttttcattttcaggcactgaagctgctagcctggcagcaagtgcttcaatcttttctgaatattcagaaagcttagctttagaaacacttgatatcccttctggtgtggtctctgctcctagctgctccaatagctccctggctgtggtaacataatggacaagcttagccggattctgctgacgaggagccgcctccagcagccttctaaggttcacttccaccttgttgagcctcatgtcgaagaagtgacgagcctgacctggggcatgaggggtccagccagaccactggaaatcttagcaaattaattgtgctcgcgccttgggttatcaattttcctctcgcaacagcggaaggaacggatcccaagtctggacgggagggaaagaggaggaaggaggcctctccaggtggtggaaggaaccttgattgttgttaccgtcgccggcgttgagatctcaagcggcggtcgaatacggaaggtcagggagaagaagaaacagagcaggagcgaatcgttccgttccggcgcagggctgtcaaacgagccgagctcgaga

SEQ ID NO: 13608 - DNA, 744 bp, Setaria italica
  misc_feature (1)..(31): n is a, c, g, or t
  Peptide Sequence Number=SeqID_79582
nnnnnnnnnnnnnnnnnnnnnnnnnnnnnnntttttttaacgatttctgaaaacacagcaatcaccggttttatacagattacacgcagcaatcatccagttttatacagattacacgcagctatcatccagcaacacgaaagagcacattgatccacggtacaccgtccgtcttgctgtgaggctacactcctgaattggggatttctgatcatgttagaacccatgaaacaaagacgagtagacgagagtgcccgctgctgctgccgcactcgtccttcaagctaagtgatccgtatgagcagaaccaccattacaaacacgcaggtcatcacaaggatgagcagccactggaagcacgtcgtcttggaagtcagcgagtagacctccgccgctcgcgaggttgcgcggccggtactcgccaagctatgctccacggccctctcggtggaatcaaggatcttctccgtctcttgcacagattggttcatcataaggctactttccttcagctggcgtgctaactcgaccatttcatcagtcccctaacgaccacctcacccttgacccggacactgaggaagttaatgtgcttaacttctgcaagttggggtgtgcgtcgtctgtgtgcaacaacatcaacgctgctctgggaaatgaagaggcgaacgatgccgttgagagttgcgaccaagcctgctctagcttcttgtctagtcgttgtctattgtttggtctagtcgt

SEQ ID NO: 13609 - DNA, 322 bp, Setaria italica
  Peptide Sequence Number=SeqID_79583
caaccggaccatggccgtcacgctgcccagggcatgcaacaacgcctccgtcccgctgcagtgccgagacgcgacgacgtcggctcagtccccagctccaggtccggtcgcagatgcgcctgctccctccttggctccgcttcgtaagaacctttgcagaaacttgtgtaattggtgagacatttcattcttttcagtggaaattttactgatggatgacatggtttccttcaaactgtgcagcgcccgtgacgccggcgccggtggcaacgccggagcctgacacaccggcgccggcggcccctgtagtggagcccacagc

SEQ ID NO: 13610 - DNA, 731 bp, Setaria italica
  Peptide Sequence Number=SeqID_79584
cgctgatctccagcttcaccccgtgcctcaacttcatcatcaacagcaccgcgtccccgacggccgactgctgccgctccctgggggcgctgatgaaggcgagcaccggctgcgcctgcctcatcctcaccggcagcgtgccgctcggcgtgcccgtcaaccggaccatggccgtcacgctgcccagggcatgcaacaacgcctccgtcccgctgcagtgccgagacgcgacgacgtcggctcagtccccagctccaggtccggtcgcagatgcgcctgctccctccttggctccgcttccgcccgtgacgccggcgccggtggcaacgccggagcctgacacaccggcgccggcggcccctgtagtggagcccacagccacggcgccggtgagccaggggcagacaaggccgacggttgtgcccagcgctgcctggagggcgagcgccgacgtgtccatggggcctgccattgtattgctgcttgcagtagctggagccgccatggtgtgagatactgagatgtgatgatcccctggatgtggttattagcttaagaataagcgttggatttgtattcattggtggagtgttttggattgcattattaatatttctttgttagcaatttggagttctgaccttgcagtgcatgtaattagtctattctttcaggttggttgagaatggcaagattaatgtactgttatggtgcaacgcaaaaaaaaaaaa

SEQ ID NO: 13611 - DNA, 866 bp, Setaria italica
  Peptide Sequence Number=SeqID_79585
aacttgcagattaatcgctgctgaagagacatgtggtgtgaccagactgaggtgtttaaacatgccatcaactcttagtatcttgagctttgttgagtggataatgatatcagcaaagctgagcaacctagagagaaccagtttctctaagtttgggcaactcgctactaattcccctatattgttttctgttgcacagaaatcaataaaatgaagggtatgtattcgcttaaaacctgtaaacacaggtggcaactgaaaaacacaaccttgcaggcaagcgtattccagttcctcacaggagaaaaaagaagaagggatcttgtaattcctccagatctttgtcctaatttgaatttccttaactccatttcttgacaacataagcatccatctgtggatgtgtcctccaggggatagcaaatgaacccgtcggacattcagttcgaacttcagaattgggccattatggagggagagaaccataatgatgaaatagacaaatttgttactttcaccctcttcaataccattacctaaatcaaaaatcatcttccctgaaagtcaattctgtcattgaagcccatgtgtatctccacttccttgacaagaggcatgttcctacagcttcttttataggcaaacaacaaagaattttgtcctttataacatctggtagattgctgatgatatcaacatttgcaacagatttatgtcttttcttttgggaacctccacgatccattgggcccacttctattgcaagaaccttgcccggggtttggggctccggctgggctgcccccgatctcctccgctaccctgtcgcccaggttggcttcgggctcctgtccccttccttctcc

SEQ ID NO: 13612 - DNA, 903 bp, Setaria italica
  Peptide Sequence Number=SeqID_79586
ctaaaattgcttcaccaggaaagaatggaccacagtctcaaaggaggattacttctgcatccttcgatgctcttctcatcttcaggagacgcctgagggattctttgtccagtttgttgttgtcttttatttgcgctattctaagtacgggtgcatcttcaagcaaaagtttcaagaagcctgactctgcacaggagccagcaaagttgttcagaacaactgtatccaggttattgaagagaccggactggtgatcaatggagtcccagaaattcgaggtgggtgtgccatagcccctgtaaataagctgtagctcaaggcatcgcaagttgggagcaacttgaaacaaacagtgagcagcgtttgcttccttcagattaccaaggtcaatccccagggttatctcagtcaatcgatttaacaatcttggtagtttaccaggcaagattccatgagctgcgcactcaaaagcatgcccgagcaatgaaatattttcaatatctaaaagagaaccgatgaattgagaaagattaaagttgcaccccgccctcggaacataaccagtgttaacttgcagattaatcgctgctgaagagacatgtggtgtgaccagactgaggtgtttaaacatgccatcaactcttagtatcttgagctttgttgagtggataatgatatcagcaaagctgagcaacctagagagaaccagtttctctaagtttgggcaactcgctactaattcccctatattgttttctgttgcacagaaatcaataaaatgaagggtatgtattcgcttaaaacctgtaaacacaggtggcaaactagaaaaaacaacaaaccttagacaaggacaaagacgtaattaccaagttacctacaacaaggtaagtaaaaaaagta

SEQ ID NO: 13613 - DNA, 235 bp, Setaria italica
  misc_feature (222)..(222): n is a, c, g, or t
  misc_feature (227)..(227): n is a, c, g, or t
  Peptide Sequence Number=SeqID_79587
tctatcttacaagccacaaggctggtggattgcaacagaatacggaaacaatagcaaacaagatgaaatggataattcattccataggtaagtcagtgtcaaaaagcaataaatgcatttaacctatcgtgaagcaatcaacaattttccaaacaatcagaatcagctcgattgacagtaccccaacattttcaaaaggcagcaacatattcgatggtttanaaagntagaaaat

SEQ ID NO: 13614 - DNA, 673 bp, Setaria italica
  Peptide Sequence Number=SeqID_79588
gacctcggcgatgacggcaaccaccaggttgatggggatgctgttgccgaagtagctgagggtgttgccgtccaggagcagggcgccggtcttgaaccagacggcctcagggccacagttggcgccgaacttgttgcaggcttcggggatgacggcaccggcggcgccgagcatggcccacctggcgtggatcagctcgtaggcctggtacttggcgaagtcctctggcttcttgccgaggccaaaagggtcgtagccatagtctccagggacctctccggtgaggtactccggcacctccgagcggtccaagagaccatccggcaggtagatcctcctgtcagggccgtaccacttggcgagctcgtcgctgatgtccggggatgaggacgttaccgcggcgggcttcggcttctgggcaggcttcttgctgaagagagagacgatcttctgcgctccggcggtcggcgcagcggtggcgtaccgtgaggagccggcgaagttgatctgggtgccgaggatcttcgatggagcgagcgccgccattgccgcagacccacagttcagaggaagaattgcaggagggggatggtgatggtctcttggaccgctcggaggtgccggagtacctcaccggagaggtccctggagactatggctacgacccttttgg

SEQ ID NO: 13615 - DNA, 290 bp, Setaria italica
  Peptide Sequence Number=SeqID_79589
atttaacaccacgatgctccccccatttcagaagagaatcttcagcctcatggttctctgtttgagaaaccatctgggcatcatccgtctttccaacagatctgagtctaacaactatctcattctgtagtgtctgcaatacttccttggcagcatcattggaagttagaagcaatttgtccatgattttgaacaaaagatttagtgattcaagttcattccttgcagaaaatggaccaatatcacctccagcaaaataaagctctagctcatccatatggactacccta

SEQ ID NO: 13616 - DNA, 972 bp, Setaria italica
  Peptide Sequence Number=SeqID_79590
agttctttgccactttcttcgttttctgtacagaatttgatggaccattcacagctttggttccaggtacaccttgttctgattgcgttgtctcagtttccttactgctgcacacttctttctgtagtttgactttgtttttcgaaagatgcgctctaaattttttgttggatgaagttcttttctcttgcttcttctctgatgtagagatttttgaaaaattgtgttgaacagtttcttctggaggggcatatagtgatgatgtgctagcattattaagggtcctagtggactctgtttccctgtgctgattgtcattccaactagaaatggatggttttggttcttgtgctaattgcatgctatctctcttcagatctataggttcttctctgcttccctgagatgatgctgaagtcacattgtccatcactattgaagttttacattcttcttcacctatcatgttcatattatgagcaaactctttgtagtgatctgtctgactactctacgctgaagtcctggacgcttcaatttcttgattgacattgatatcattcacactaacgtccattggtgttttcttgttcctcaactcagatgctgaacagtcaaaacaatcagatgacaaaccatcagctctttctggagctacattgatgctaaactcagaattatcctttgaatgaattatctgatggtaactaatggatggcacagatggttttgttccttgaataatgtccagattctttgcacatgtctctgaaaatgcttcctcactttccaactcacaaaaatgtggtattaatcatattaggatccagattatgataatctgcagaaccaatttgtgcttctttttctgatgtgttcatatcagatggtccatcatttgaaccaattgccatatcattgttataagcaggctccggcagttctatttctccaatattattctattctatt

SEQ ID NO: 13617 - DNA, 610 bp, Setaria italica
  Peptide Sequence Number=SeqID_79591
tcttgtaatttctacttggtcctaactagtacttcttacctaatttaactttgggtaaattctaacctattattattaccggtatgtattaagttaactatctgtgagtttggattggaattggatgagccccaacagtatctgccagagaaacaacttgtcatccctgatcctcttctggactttgttcagtcctatggctctgctcttactatcgatcaaaatggccgaatcctatttgccggccatggagatgagatgagagacttgttatcactttttctagagttcaacatgtctaaacgagaaacaagtggctgcaagactgcatttctagttccatactttgagaggacccctgtcaaagatatttggaaaaagcgttctcgggctaacagccaagtatccaatacaaatttagcaagcatggcaaccgatatttcaaaaagcgctgatgtgaagtcaaaatcttcatcaaagaagaaacagagagggaaaaacatcaaagaacgtgaattgcatcagagaaactatatacatgctagcgaggcatttctatccatcctgctggacaaggacaaaagcagctcgacaattctctcacttgaaa

SEQ ID NO: 13618 - DNA, 838 bp, Setaria italica
  Peptide Sequence Number=SeqID_79592
cggccatgaagatgagatgagagacttgttatcactttttctagagttcaacatgtctaaacgagaaacaagtggctgcaagactgcatttctagttccatactttgagaggtaatattgtgaagcatcgcaactgaatatttatctctgaactgctatttaagaatttgcctgatcttgtgagcgtacataatgtcagtaagattgcaagtgcagagtattcttggtgactttgcttctgatttattggcaggagtttttctttcccttttttctgtcaaagatatttggtgagaactattgacttgctacagcttgctcattaattatgtcagaaatcaggatagcaagattctgtattctaaatcttccctggttagctgcacatgggttaatatgatgcataatatatccattatcttctaataagctcatggatgaattggtatagaactagatattcctgaattagttaacaagcaaggagcatggacagtaacaatatataactaggtaataagagatgcatgaaatattgaagtatcttaaaactacccttcaacctatatgatgcaattcctgtacctgccaatgatatgcttgtaagttataaactaatattcattgtttgggttgttatattttaattttatggttcatttctgtactacattttcagttgtgtcatttacatggcatgcatctttgcatacgcaggaaaaagcgttctcgggctaacagccaagtatccaatacaaatttagcaagcatggcaaccgatatttcaaaaagcgctgatgtgaagtctctctctttcttctttgatgaagattttgac

SEQ ID NO: 13619 - DNA, 1638 bp, Setaria italica
  misc_feature (1615)..(1638): n is a, c, g, or t
  Peptide Sequence Number=SeqID_79593
ccgccgcctcccccgtcgtcctcccaccgtccaaggagctccatggagtgctgccgttccaggggaagaggccgcacgacgctgccgcggccgcggtgcagctctgcgcgccgctgcagcagcagcagcagcatccgcatcaccatctcgagggtctgcccgtgcagatgatgatgccctgcggcaatcaggcccaggccgtgcctgccgcctaccaggccttcgccatgcccgacacggccacgctcatcgacgtgcaagattcccaccctgattcagttcgacttagccttgggattgctgagcaatgtgcaaggcaagagaaaatcctcaagtttctgatgtcagtgacgtcagggtctgacgtgaaagaacttgatgaatccttgctatctgaattcactggccaacagactctaccaattaacttgggaaatcaaccatatataccggatgataagttaactatctgtgagtttggattggaattggatgagccccaacagtatctgccagagaaacaacttgtcatccctgatcctcttctggactttgttcagtcctatggctctgctcttactatcgatcaaaatggccgaatcctatttgccggccatggagatgagatgagagacttgttatcactttttctagagttcaacatgtctaaacgagaaacaagtggctgcaagactgcatttctagttccatactttgagaggaaaaagcgttctcgggctaacagccaagtatccaatacaaatttagcaagcatggcaaccgatatttcaaaaagcgctgatgtgaagtcaaaatcttcatcaaagaagaaacagagagggaaaaacatcaaagaacgtgaattgcatcagagaaactatatacatgctagcgaggcatttctatccatcctgctggacaaggacaaaagcagctcgacaattctctcactgaaaaaggctggtccagagatcaatgaacttttgactcagtgttctgttggcatagctggaactggcttggctattcttctgtcagttatgtgcaagatggctaccggcatgagaactccttttgcttcagctcgactgctgagcaccagtgttggatttgggctcttttggctctcctgggcagtcaatggtttgcgtgacaccattgccagcattttcagaagcccaagtaacattaatatggaggaggatgaggtagcagtgagaatacagaaaagcatgaatgaaattctcttcagagccataactctcttggccatcactgcattgaagtttgcatgagctgctacctttgttagttttcccctacccagccatgatgtataatccaccattttggctcaggagttctgcttctgtaggactaagttcaccatcctttttggttcaggagtactgcttctgtaggactaagttccaactgtccaaatcatgattctagtttcttattgatcctgtagaaagtgagctaagttgtaaattgtacagaattttgcatggagtggtgtatatgaaagatgaaatttgcttatctctgtgaacgttgaataatttaatgtccagagattatacatatttctatctagcaaaaaaaaaaaacnnnnnnnnnnnnnnnnnnnnnnnn

SEQ ID NO: 13620 - DNA, 917 bp, Setaria italica
  Peptide Sequence Number=SeqID_79594
ctttgctggtgagagttgtggatcgaggacttctaactgctcagggtcaagcatgagtgatacagtttagaactgcaccgcaatcacctaattttcctgataatggatgtttcagcccacctgtggtaaaagatcaatcaaatcaacagagttcctatgggctcactagttcacagagaactgtatcagcaggaaacatagattcaatctctcttaagtcaggcaagtcaagcttgtttgatttgatttttgaggatgataatgttcaaaggactcagaaatccacaaactccgctgctccaagtttcatagccttttctgatgctattagtgccccaaatcaagatctctttaattccacagctgctcagaaacaccatgtaactaacttggatcaatctctagacctatttgcaaataggcctaccgaaactccatctgctgataaagcaataccagcagctccgtcaatggacaatgctgggtgggctacatttgatacacctccagagcaaaagcaatcttcagtcactgggctttcttatgttcctgccacaagcaatgataaacagactctgagtcgagatttgttttcttttgaatcaaatgatgagccaacatggtttgagagctctaaggataatgcttcagttaccaataaatctattgccacatctcttgatacaggcagttctcagccttggagcgcttttgatgcctccagtactagcacccagtacactgtcaagggagatctatcattgcaaggttctaaaggaccggtggatgaaaatagttctcagctctggcattcatttgatgatgttaatggggccgtttctcatgatcaactatgtgctcaacggcgaattgatgagcacagtaatgttgtaagcatttccctttcaaccagccaa

SEQ ID NO: 13621 - DNA, 2501 bp, Setaria italica
  Peptide Sequence Number=SeqID_79595
gcggccgacgacgccgcggccgcgctcgagagggacagcggcgacgccctccgccgcgtcccgctggcatgccgggacgcgctacgcctccgcgacgatgccgttgctctacgcgcccacctcgcctccgtcctccaatccctctccctggctgagggctcatctgctgagtcaatagctgcactagcgcaaattgatactgtgaaacaacgcatggaagcggcatatacaacattgcaggatgcagctgggttagctcagttgagccagagtgttgaggatgtgttttctagtggcaatcttccaaaggctgcagaaaccctggcaacgatgagacattgcttgtcagcagttggagaggttgcagagttcgcaaatgtgagaaaacagcttgaagtattggaagaaaggttagatgaaatggtgcagcctcgtttagtggatgcactttctaatcgcaaggtcgatgctgtgcaagatcttcgtggtatactgatacgtatcgagaggttcaagtcactggaggcacagtacactaagatccatgtgaaacctctaaagaaactttgggaagattttgacctaaagcaaagagccagcagggtagacatggagaagcttggtggtgaaagcattaatgctctctcattctcaagctggctgcctaatttctatgatgagacactgctttaccttgaacaagaatggaagtggtgcttgactgctttccctgaagagtacaaatcactagtaccaaaagtacttgttgagaccatgagtgagttgaattcaagttttgtttctcgtgtcaacatagcaactggggatgttgttcctgaaaccagatctgtttccaaaggtatactggacgttctatcaggtgacttaccaaaaagcaccaagttgcagaataagcatcttcaagcactaattgaactgcacaatatgactggcacttttgctaggaacattcagcacttattttcagaatcagatcttgcagttgtgctgaatactttgaaagctatttattccccatatgaaacctttaaagcaaggtatgggcagatggagcgtgctatactttctgctgagatggcaggtatagacatccgtggggctgtccctcgtggtgttggtgcacagggtatagagctgagcgaaactgttcgcagaatggaggaatccatcccacaaatgatagtacttcttgaagcagctgtggagagatgcattagtcttacgggtggttcagaggcagatgaactggtagttgctcttgatgacatcatgcttcaatacatatctaatctacaagaagcattgaaatccctgaggatagtctgtgggctagagagtgatgccttgaagaaagatgcaggtttagagaaaaaggaagcacaacgattagtagatgtttctgaagaggaagaatggtctattgtccaaggtgctttgcagattcttacagttgctgattgcctaacaagcagaacctcagtatttgaagcttctttaagagccacgcttgccaggattggaacaaacttttctctttccggctttgtttcaagcctggataaatcacccgcagcaattgctgatgagaatgcagacttgcctcttggaggacgggccgcacttgatattgctgctattcgcctacgtgatctgccagacaagtctaagaagctcttaactgtgctagaacagtcaaaagatccaaggttccatgctcttcctctcacatcacagagagttgcggccttctcagacacagtaaatgatctcgtttatgatgtgctcatatctaaagttcggatgcgtctcagtgaggttgctcgcctcccaatctggtcatcggtggaggaacagggtggtcttcctcttccaagcttcagcgcctacccgcaagcttatgtgaccagtgttggagagtatctcctcactttaccacagcagttggaaccacttgcagaaggtatctcaggcaacgagactggcaacgatgaggcccagttctttgccactgagtggatttttaaggttgccgagggtgccactgctttgttcatggagcagctgcgtggaatccactacatcactgaccgaggcgcgcagcagcttgccgcagacatagagtacctgaacaacgtcctctctgcgctctcaatgccgattcctccattcctgtccaccttccacgcctgtgtctcgaccccgagggaccaggtccgtggtctgataaaatcagatggcggaagccagctcgacctccctactgctcatctggtgtgcaagatccggcggatctcgttagattagtgaagcgaatttgttgattctgagttttgtctcacttctcacgctttggttttgtattttttttgcgacaaatgagtttgacttgtgtaagttgtaaccgtactgcttgcagatagggaaaataatcatataggagtacagaataattcattgcaaattttacgaaaaaaaaaaaa

SEQ ID NO: 13622 - DNA, 236 bp, Setaria italica
  Peptide Sequence Number=SeqID_79596
catcgacggagtggtggccgtcggccacacctgctgtgccgccatggccgccgcggcattgccgtcagggtggctctgactgctgcagggagcgtaagcggcaagaaggacggcgcggcggcagcgccgcctcgaagcccagcttctgagccttgaggaagtacttctgcgcgtggctgcggatctgagtggccgtcttggtggcaacgaactgctcgatgcgtttccagtcgcgg

SEQ ID NO: 13623 - DNA, 1610 bp, Setaria italica
  Peptide Sequence Number=SeqID_79597
cgtcctcatcccgtgccgtcgcgctgccctagaaccctcgccccccccgccgctcctcctcgaattcccctcgctccgatcgcccccgacgcgcccgcgccagatcggcggaattccgggcccggatcgaaatcgaacccgcccgctcccccgatcagtaacgcaccgcctgaggcgggttggatcctcgggcgggggattctcttgatttcggtttcttcttccccgtcccgcgatgggggcgccgaagcagcgctggacgccggaggaggaggccgcgctcaaggccggcgtcgccaagcacgggcccggcaagtggcgcaccatcctcagggacccggacttcagcacgctcctgcgcctccgctccaatgttgacctcaaggacaagtggcgtaacttgagcgtagttgctggaggttatgggtctagggagaaggcgagaatggcgttgaagaaaggcaggcgcgtggtgcctaagctcactgctgagccaatggatgttgatgcgaatggtttgggcaatgttcatgatgcagtcatcgatgcagaaccattagcaatggctgtggagcccttggcagtcgaggagagttcagaaaaatcagttgctaggcttgatgacctcatattagaagctataaagaagcttaaggagccttctgggtctaataaggcagccattgctgtctatattgaggagcaatactggccacctgctgattttccgcggctgctgtctaccaaattgaaggcattggttaattctggaaaattgatgaaggtaaaccaaaagtacagaattgcaccaagttcaccttccttgggtggaataagcaccaaggtgtactctgctgaagagatgactggagaaaatgatactaagcagctaactaagcctcaagtggatgctgaactggagaagctgaaaggcatgactaaggaagaggcagctgcctttgctgccaaggcagttgctgaggcggaagtagcaatggcacaagctgaggaagcagcaagggctgcggaggtcttagaaaatgatgctgaaactgcaatagcttttcttgaagccctcactttgtctttgagagacagaaatgccaattcgacgatgcttcgagcttgctgatcctttacccatgccgtcatgtggttttggtcagcagaacaacagtgttctgctgcaaagattttccggatagatgagtttcttgtatagttttatagatcattatgcttcaatgggaggggttgtcaacatctcgctgctggtcctgactgcttgcagccagtcgactgtataatgacaagaatggtcgggaaagttgtcttcatttttttcttttgtttttcccccattgtgttgctttgtaattaaactctagccttttcccttttgtagttgatgaagtgatgtcgtcaaatagaacaactgtagtggaaagaaaatgtcagaaagctgccttagttaatgcaagttgctgcgataaaatgtttctagatacgattatttgatgccagcatcttaacattgtagctgattcacagttgtagtggattattataccaaggatatacctacaacaaatagaaatgaggcagcggcc

SEQ ID NO: 13624 - DNA, 427 bp, Setaria italica
  Peptide Sequence Number=SeqID_79598
atcagttgccttttctgctagttaggaggtattgataattctctgaattctctactagtccagtagccttctcaatttagttccctttgggagagtggattcactttcagtatacttcttggttcctcgagcgagcgtgtacaactgttacattactttatcgtttctggagagacaaaaattctgcatacgttagactttacattacacatacgtagctgactcattcattggtgggggtagtttagttaccggactttgttgctagttccccaagtggcgtgtaaagccgatggcgattgagggtacaattttccctattctgaaggtgggacggatttgctgagatctctgccttttgcttccccatgaaaatgaaattcctccaacatcaaagaaaaatacaacaggacggaaatggcaccca

SEQ ID NO: 13625 - DNA, 618 bp, Setaria italica
  Peptide Sequence Number=SeqID_79599
gtcgagcgagagagagagatggagcagcagcagcagctgcgcgacggcgatggcggcgcggcggagggggacatcgagcggctccccgccgacctcctcgcgcacgtcctctccctcctcccctccttccgcgacctctccatggcggggggagtgagccggaggtggcgccgggcggtggagcggtcgctggcgtcgcggcggcggctgagcttcgcggggcagcgtaccggcgacgacaccgccgcgcgcctcgttcgcgccgccgtcaacctccgcgacctcggcatttcacgaagctgctgggggtgccaaatctccgacgaaggcttgatcaagatttcaaccgcggattgcgtcgggaagctgacgtccatatcgctctggggattggctggaattacagataagggcgttgttcagctggtttcaagggcttattctcttcagcacctgaatattggtgggacattcatcacagacgagtccctgaatgcagttgcaaatagctgcacagatctgaagagcatcatcctgtggagctgccggcacgtgacggaggccgggctggtggcgctggtgaacaattgccggcggctggagtgcatcaacgtgggc

SEQ ID NO: 13626 - DNA, 472 bp, Setaria italica
  Peptide Sequence Number=SeqID_79600
ttaggacctagtaacgttttacctgaatctgcactgtaacatccagagcctattttcctgaacggtaaattcaatgtccatcatttctttgtagtggctctccagtatcttgcagttctcaacgagctctacataagcatccggcatctgtgccttcatggcatcaagatcctccggggttctgattccagcaaccacatcctcaccctgagcattcaccaggaactcgccatacagcttcttctctccagtgctaggattcctagtgaagagcacgccagtgccagaagtgtcccccatgttgccaaacaccatggactgcacgttcacagcagtgcctttcagaccagtgatctggttaatgctcctgtacttgttggccctgggctgtcccacgagttgaacacagccaacactgctagctcaagctgcttcgtgggatctgagggaaatggctccccttggcttcgac

SEQ ID NO: 13627 - DNA, 266 bp, Setaria italica
  Peptide Sequence Number=SeqID_79601
gtaggaaggagggccgcggcggcggcaaagggggcgccggcgctgccgccgcgcctgtggggggcggtgccggcggcgtgcggatgccggtgatcgaggtgcggtaccaggacgggacgctggacgtggtgctcatcagcgaggccgagcggccgttcaagctgcacgaggtgatcacggtgctggagcaggagggcgccgaggtcgtcagcgccagcttctccgtcgtcggggacaaaatcttctacaccgtccactcgcaggcg

SEQ ID NO: 13628 - DNA, 512 bp, Setaria italica
  misc_feature (457)..(512): n is a, c, g, or t
  Peptide Sequence Number=SeqID_79602
tctggaacgaaagtttgtattatgtggattaggctttgttcagctgttcagatacgtaccacgcgagcaactttacaattcccgattttgtctttcagcatgatctggaggtgaatggcgggaagggcctaatcgttgacccaagaactaagcacatttatcagagggcgtccagttcatgatggtaacagttctgaggaccaaagttcattagttcttgcactgtaccattctgatgtttgcttcttgtaactttattccatgttgatgtttctttctgtatctagttaagttggtctattccattcgttcgttcttctgccttcccatctgtatatgttgatttgtataactgaataaaagtggtctctagtctagatgatcaattttcactcagcctgtacaaaatttggccacctgaaatagaagtttatttcaatgcttcaaccaaattttnnnnnnnnnnnnnnnnnnnnnnnnnnnnnnnnnnnnnnnnnnnnnnnnnnnnnnnn

SEQ ID NO: 13629 - DNA, 951 bp, Setaria italica
  Peptide Sequence Number=SeqID_79603
ttttttttttttttcctttgtgtaattctgatagactgatagcagcagcatataacatttactgcagcatacacatgtatctataatatatatagcaagtagcactagcagacaccaaaaccccatccacacaagcaagctgacggtttgatagcaaaagataagtacatcaacacatcagattcatccacaaggagccacatcagaaaagaaacgagtacatcaaagggcaactccactccttgaaacaaccacccacatactgtacattctgaacccatttttgcacggatcacttcaaattagctcatgccagcaaaatgcaaactccctctaaccggaaaccatattgaaagtctgcttctccaagcatctgttctggctctggaacctcaggcgctcaacacagcaggcatcatcagatggaattgtacgctccaaatgagggacaaccattattcatgatctgcatgatggtagcgaaaggcctccacagaatgccgaaatgatcaagtagagtagcactactatggcaaccgtcaacacagctagaagcttggcgttcttcatccagagcgctctgcggagcctcttggattgcttgcggaagtgaaaagcgctgtcttgcatggtggacgtcttgtcgacgagaagtgagatgcgatcgcctctgtcaagaattttctctatgttgtcgaccatgacggtgtgtatctcgctgacttctccacggagacggttgagcgtgtcggcgctgggattgctggagaagaactccatttgctggtggagcaccctggagaactcatcgttcatggcgtacgccagcgcggagtgggcgactctgccgtaattcttcatgaacctcatctggatgtcctccaggtagagaaggatctatacaagtaataattaaagtaaaactaaaaaaattaaaaaaagttaaaaaaa

SEQ ID NO: 13630 - DNA, 924 bp, Setaria italica
  Peptide Sequence Number=SeqID_79604
gtcctcatcatgtccatctgatcaggatgatgaggagcacgaacaggccatagttactcgtactcttgcaagcttgaacctggcaaatggcggcaagacgctacatcaaaggaaacagcaaagcaataaccgtccatcatcacgaagatcttatgctaaaccaaacccgtcgtcataccgatcacatttaccaaaccaggcttatcctagtgttccaccggagcaagcaatgtaccatatgtggcaccaggtgcaagcaacacaaccagcacctcgttttccaatggtaccatctctgggtaatacgaggttcccaccagcagcagctttgctctccatgtacacctcacctcgggggcaatttgccacaactgcctgccaagatggagtaggtcttcttccatgttttcctgaagctgctcctggcctcccaaggtacttctcgccttaccctgtcacctttgtgccaagaagtcctttgccagctactgttcccaaaattcatgagagaaggcaagatcatgctgaaacagttgagtttcctgatgccgctgtcttctcccaatatggtgatcagcacaagtttcaagggaaagaagactgtactgggactagtgcttccccttgtcctcgcagtggctcaagctccaccgcacatccatctttacagaagcgggatccgaatgaagaaaaagaaactttgggcagtaagcatgcagagccaaataagtcccaaggacaacagccaaagtcgtcaccatcttgggttaacccttctattccagcccatggttctatccagcgaaagcattatactagctctgttcagcatgatgatcctcctcaaacgagtcggtcttcgttaccagaattgtggtcttcccgctcaccagctgcgcccagatctggagcagcagttcctgt

SEQ ID NO: 13631 - DNA, 249 bp, Setaria italica
  Peptide Sequence Number=SeqID_79605
gggagaatacggaggtttattatatcagtacaacggtataaatgatgcttcccatggcctgcatcggaagcgtaaaaggcatctggatggtgctagtgatgatgatgaggcagatggatatagtaaccgaataacagaggagcactaccgtacaatgctcagtgaacatgtccagaagtacaggaggtcaaagttcaaggagggtgcttttggttctgatcctcctcgtgtggcaagtcccaaataaaa

SEQ ID NO: 13632 - DNA, 511 bp, Setaria italica
  Peptide Sequence Number=SeqID_79606
ggactcgccggacggtgtggagctcaccattggccagttcgacgcccgcgtggccggtgggaagagcgcgggaggccgcgggttcgcgcggcaaatggtcgaacaccttgaagacgacggtgacgaggagttcgtcgtcaacagccgagacgtatttgaggtcaaaagggggcggaatgctcgggctgttgtacccgaggtgctcgacgacgacgatgacgtcgtggtgttcgacccggactacggcgtcgacagcgacgacgaggaggaattccacatgttcccgatcaagcaaagtcacgaagctggtgccactccacgcacggaactgggagagctagagtacgacgaggaagaagacgacgacgacgatgagattgtagtgttccacccagactacgacgacgaggacgaggacgaggacgaggaggcctttgaggaggacgacgactacgaggaaggggacggggaggcgaaggagaagggcgtgcccgccgtgatgcgttgcttc

SEQ ID NO: 13633 - DNA, 475 bp, Setaria italica
  Peptide Sequence Number=SeqID_79607
catggctagtacgcatacacaagcagaagctcaagtatagaaacaatgccacctactcaaccgaaaacgcaggtcctaatgatcacttcagatttcagtttaggtacttattaaaccagtggctcatgtcttgcagagcttcctccgcacttgcgactgcagctgcgtcttcttcactgtatctcacagcccatccatgcgttactccaggaaaaatcttgacaatgtgatcgatctgctcaaactgctttaacaattcaggcggtgatgatttgtcgatttcagctccaagtacagaaatgggacatttgacctcttcgatgtcatcaacagttagtaaagaaggatgtaacaatacagcagctcggatctcatgaactttcgccagctccacaaccacctttgcaccccaacaatagccagcagccccaattttcgacactcccttctcctttatagcagcaattactggttt

SEQ ID NO: 13634 - DNA, 968 bp, Setaria italica
  Peptide Sequence Number=SeqID_79608
gccgtgatttctatatggttgataaatattactgtctgaactccaagaccaaggacgacatggacattgcacatttccacacaaagagtttactaaaattagttgaaaaataaggtgtcctaaatcctgtaccaaagaagtaccagaaaagtttcaagggaaaacaaacagagcttcctccgcacttgcgactgcagctgcgtcttcttcactgtatctcacagcccatccatgcgttactccaggaaaaatcttgacaatgtgatcgatcccagagttagctgaaagaacctgctcaaactgctttaacaattcaggcggtgatgatttgtcgatttcagctccaagtacagaaatgggacatttgacctcttcgatgtcatcaacagttagtaaagaaggatgtaacaatacagcagctcggatctcatgaactttcgccagctccacaaccacctttgcaccccaacaatagccagcagccccaattttcgacactcccttctcctttatagcagcaattactggtttgcctcttcaaatgcttttgcggattatgtgattgcaaccacattccagggttattgggattgctggggtcatatggatccccatgcaggaaatctggcaccacaacgaagtaaccagatgaagcaactttgtcggctatcttcctcaggtttggcgcttcaaacccgaaggcgtcagagatgaggacgacggcggccttcgatccggcggagccggcgatgtaggccttctgcccgccgaagtcgtcgacgacctcaccgagtccgccggccgagttcagcgccggcgggttctcaaagcagtgggagctcgccatgctctcagttctttctttattgtttcctccactgttcttgtctgtggatgctgaagctagtgggcggcgcgtgcagacgagattcagcacgatattctttggtactccctccgtcccaaat

SEQ ID NO: 13635 - DNA, 433 bp, Setaria italica
  Peptide Sequence Number=SeqID_79609
aaaattaacgcactactactgacatcttatactataggagtaggaagtatctcaacatggatgatcatagaccatgatgctgtgtttgtgtctcatctcttcctccaagaatgaacaatttctatggctatagtgacaattttggacgacatagagtagcaatctattttacaaaagttgcaagcaaaacagacaaaatgaaaaagaaattaaacaagaacctccctatggacaccatccacaagcaaaaagcaagaacaaccggacgaccaagggggacgaaagcgacggcctcccctcctcccttatcgcctccgccgccccattagtgacgcgcagccacagccgacggttacgccggcgcgccgcgtcgacgtcagcccctcgccgcggcggcaggaggcgggcgcggcgagtgcgcctggtggaggaa

SEQ ID NO: 13636 - DNA, 470 bp, Setaria italica
  Peptide Sequence Number=SeqID_79610
tgtatcttgcaagaagatctcctagaggaaatcatagctgacttcttgggggtggctaaatccaccaagctctgtggctagagatgaccaatgttttgcaccaatagccatcgtaagcatatgcatatggatcgatggctggtgaaaatccggtgaaaggagccatcgatgaatcgctatagaggctgataattacaggaattcaccacatggctactgaagtggatgggcttaaatggctgtaggtagatattggagcaccaaaaacaagcgggatccccagttggacctggttgtatcatgtatatgttaccattttgctcccaactcaataacgtagtcctggaggctttccctccaaactcgggaaggcgaatttttcttctttttctggctggtataatagtgaaatagaaatgtacaattttggtattaaggtactgtgtaaattaatctctgctggcatttat

SEQ ID NO: 13637 - DNA, 411 bp, Setaria italica
  Peptide Sequence Number=SeqID_79611
gtgaggtcatcctccccgaaacgctgcacaaaactctcgatcctactaaacctgtggctgccgacagcagcaccaccgctagcacccctcttgggccgtgtcggaaacttccttgtctcagcaatctcgctcagcgacttctccaccatcccatccatctcatcggtgatcttggccttcttcttggctgactcgggcatctccctgtacgcctttaagaacctcaccatatctggagtacaaggatggttgtgctccaattcgacggattccaccttccacctgtcatccacccgcttatcacggatgagcagcatcgccttgcatcccgtcttctcagcagcgccacgccgagacttcttctcctgggcagccgccccccgcttgctgcggagcgggtagctcgtgccg

SEQ ID NO: 13638 - DNA, 251 bp, Setaria italica
  Peptide Sequence Number=SeqID_79612
ggtgatcagctgcgaaatatgattcttgttggtttcttttttttgtaattcctgcaagcatctgtgggtggtgtctgcttttgtattctttttgttgtggatctgaatccctgtaagatggtcttgtctccgtgaaatgtgtgcagagttttttctgttgacacattctgtttgtatgaatcagaatgtgaaacagaccatactgaaaatggaaaatggtagtttttttgagtgattttgataattatgaa

SEQ ID NO: 13639 - DNA, 2001 bp, Setaria italica
  misc_feature (1955)..(2001): n is a, c, g, or t
  Peptide Sequence Number=SeqID_79613
agactacaaagaaataatggaggtggtgcatttgcagttgacaagagtgttgttgtgttctcgaattacaaggatcaacgtctatacaagcaagcaattggaattggtgatccacctgtgcctcttacacccgattatggtgcaccggacgtcagttatgctgatggcgtatttgatcctcactttggccgttatgttactgtggtggaagaccgtcgaaagagcagcttaaaccccactacaacaatcgctgctataaacttgagcggtgatgatactcttgaaccaaaagagctgatcagtggcaacgatttctatgctttccctcgcattgatcaaaataagaggcggatggcatggattgaatggagtcatccaaacatgccctgggataaatcagaactttgggttggccacttctctgaaagtggagacttggcaaaacgggtttgtgttgctggtggcaatcctctgttggttgaatctcctactgaacctaaatggtctcccgaaggagaacttttttttgtaactgacagagggagtggattttggaacatttacaaatgggtagaacaaaccaatgagattgttccagtgtatgcactagatgctgaattcacaagaccattgtgggtttttggcatcagctcctatgattttcttggaaacagcaacatcattttcagttacaggcagcaaggaaggtcatatcttggtgtgcttgattgcgattctggttcagtttcaatgcttgacatccctttctctgatttatctaatgtggttgcttcagatgattacttctatattgaaggtgcttctgcaaatattccaatgtctattgcaaaggtgacattaaatgagagcaaaacaaaagtagtcaatttctcaatagtctggtcctcctctccagatgtcacacaatataaacctttcttcagcacaccagaacttgttgagttccccacatccaagcctggccagaaagcttatgcctatttctacccaccttcaaatcccaattttcaaggtttgccagatgaaaaacctccattgcttgtgaaaacgcatggaggacctacagctgagacacgtgcaattttggacctcagtgtccagtattggacaagtagagggtgggcatatgttgatgttaactatggaggaagcactggttatggaagagagtatcgcgagagacttttggagaaatggggtattgttgacgttgatgattgttgcggctgtgcaagatttctggtggagagtgggaaagtagatgggcggcgcctttgtattactggtagatcagcaggtggatacactactttagcttcacttgcattcagagacacattcaaggctggagcttctttgtatggtgttggggacttgactctgttgagagctgagacacacaaatttgagtcccattatctggacaatcttgtgggaaatgaaagagcttactatgagagatcaccaatcaattttgtcaatcagtttacatgtccagtgatattgtttcaagggttggaggataaggttgtgccaccagatcaggcacgcaaaatatacaatgccttgaaagagagaggtttgcctgttgccttagtggaatacgaaggggagcaacatgggttccgcaagactgagaacatcaagttcaccttggagcagcagatggtgttctttgcaagattagttgggaacttcgaggtagcagacgatataactccaatcaagattgagaacttcgattgatccagttcgaagttttgtacatgtatgccaatgacatgcttagcaaagtaatttagcatattagtttcttttgagaatacagtactaaacgttcaccgatcgaaatcttattttgccctgtatgtacctctgttccaactatacttatttccgttcatgtgagatggagatgattatgtactaccccnnnnnnnnnnnnnnnnnnnnnnnnnnnnnnnnnnnnnnnnnnnnnnn

SEQ ID NO: 13640 - DNA, 659 bp, Setaria italica
  Peptide Sequence Number=SeqID_79614
ggtttgttacgctggcccaagttcagtttggccctatacgggtatgggccagggttcgggggggttttctcaaccagggtcatacggacccttcttaatgcaatgccgtgggtgcggttcttcccccaccggtcaaggtttttttactattcacactgattgcaacactgtagcatgtgattttttgggttactttttaatgagtaagttgatgccacatgcatgtatataatgcaatacgtttcaaggtagtgaataaatttgctgagcattagaagattgtttggccaagatttgcaaactgaacctgcctttgggtaggttatgaattcaactgctctgttagaggtatcaagaatcttttgtgtatccattcataatatgccaacagaagcaatagagcggttcatactagtggcgttggttgtgctctatgttaaatggattcttgatatagatacaggatctcttgaaaacaaaggaggcatcaacacgtggagtatatacgtatattagtatatgtaggaatgaaaagaaatgtagaagggttgagtcacaaactcacaacatagttcatgcagtggaaataatgttttttttggctagtgaatgttgtaagagggtggtacaatttggatggagttagttggaattgggct

SEQ ID NO: 13641 - DNA, 1593 bp, Setaria italica
  misc_feature (1585)..(1593): n is a, c, g, or t
  Peptide Sequence Number=SeqID_79615
tcaggagaaattagtactattgtggaaggtgtggactttatctctgacacagccattggcactgctcaggctcaaagtttctctagaatcagttctagccagatttggcccaacaatccttttattggcacctttcagacccactagttgatcttcttggaagcattcatgagactatgtcagaagcaacaggaagtagacggaatagtttcttccccgtcttcaacagtttttcttttccagaacatgaacatatgaacgagcatagggatgataacagtgatcaacagaccaggggggtttattatgctggagaagctaataatggagatggtttgcgaacttctctgctttctcagacagcaaatgttgaagttaacgatacaaatacatcttttacttctgaagggagctcttcatatttaagtaaggcatggtacatcagcatttgcgcaagagtttgtggcatcttttattgataatgacattgaagaagaagatgaagaaacccatgggatggcattgccttaccagcctgcatatcggtatatggaaaacactaggcgacatccatgcagatatcgaatcctccggctatctgaaacagctgatatgaagtctaaatggcgggtgctcttcagccaggaatcaggcatgccttgtgttatggcatgctatctcaagcaattcagcagtcagcaggaatcagtgtccttctccgctacactcctgaaatacttgaacaggttggagtggttagtttgttttcagacattggactttctcctcattcaacatcaattctcataagtgcccttaatgctttgctgttgctcccttgtataactgctgcaatgctgctgatggatgtctgcgggagaagggctcttatactggccactactccaatcctgatgttatcactgagcgttatgtctttgtccaccctggtggatatgggatcattggagcgtgccatcctcttccacctcgcgttaaccatttgcttctgctcctacgttgttggtttggggccgatacccaacattctctgctctgagatgttcccaaccaaggcccgtgcgacctgcgtgagcttctgttctctttccttctggttcggaggtctgctttcagcatactgcttccctgtgatgctgagtaccatcgggctcggcggagcatgtgggatctatgcacttgtgtgttgcattcctctttgtctcgtctactatagaataccggagacgaggacgcttaacttggagttaatcgccgaggtcttcaagctttcaaggcagctgccgtatgtacagtaggttgctcaggactgaaggtagaggtagctcaggctgggtgctgaactgctgatggatgatgtgtgtacatataacaattgtagcttggatgttgaaagttttgtgctagctttaggaggattggtgatagtgtacttagtggttatttcttctttcttaccaggttggtggcagtttttgtagtgtttacagcaagaaattattcactacatgattcctttctgagatcgaaaaaaaaaaacaaggttatacagaattaaaaaaannnnnnnnn

SEQ ID NO: 13642 - DNA, 1372 bp, Setaria italica
  Peptide Sequence Number=SeqID_79616
acgcgtacgtacgactgctcacaggtatacaaattatttgaaatagggacatagtacttggtgaaatgaagtcaacggtgttttctgcagttgttgtttcaattggttatgcattacttggatgggattttgcagcattgttagaggctaacggtcatatggaaaaggaatttgaattggagaatttaccttctattgagggtataaccatagcagtctcagcatttggggctattgtgataacaatattctctggatccctattagattggcttggaagacgtgccgtactggttcaatcatctctgctattattgtcgggtggtctcctgatgctgtggtctcctaacatctatattctacttctagctaggttaattgttggatcaggaagtggtttggttttcacctgtgtccctatttatatatccgaaatatctccttcaactatgaggggattactagtaactatgccacagttcatgttcttcataggaactatcttttcctattgcctgatattctggttaacactgatgccttcacctaagtggagaattatgattggtgcaatctttgctccttccattgtctacttggctttgttggtgtactacttgccagagtcacctaggtggcttgtaagtgatggaaagattagtgaggccagagtttctctacagtggcttagagggaagaagcatgatatttcaggagaaattagtactattgtggaaggtgtggactttatctctgacacagcctgttgccagttgccaactgcttcctgatttattcacatggttttcatccagaggtgattagttcagaattgatagggagcagactaaacagcatgatgactagagaagtttacagtttcaactgatgtctgacggcatgatcatacacaaaatttacagttttggaaataatactgttgagtcaaattgtggcataatgaactagattgtaatcatcacctgatttcatttctaagtatctgaatggaagctaatccagtcctgttgttcatctctgctgtaaaattatacacataaggagcatttgacagctaggcacttaacataagaaatagaacaagtcaataagggggatctgaataccgcttacaggttgtgagacaatattataaagtgctttataaaaaatttggggttaagggcgctttaattatgcaagttgtattaaccgtggttcttgttttggtaaatctagccaaccattgattatttattcatttctaattttgcctaaagaagcataaatgtgtcatgactcatgacatcacatagacctgcaggagaaattagtactattgtggaagtgtggtactttatctctgacacag

SEQ ID NO: 13643 - DNA, 210 bp, Setaria italica
  Peptide Sequence Number=SeqID_79617
tggatccaattttatcacatggaatgccttctgcttaatctttgacttgtccactttactacaccaatagaaacaagccatataccagttggccttgtttctattggtgtagtaaagtggacaagtcaaagattaagcagaaggcattccttggatccaattttatcacatggaagcactttgggtctgtatgaggtgctgatcggaaag

SEQ ID NO: 13644 - DNA, 813 bp, Setaria italica
  Peptide Sequence Number=SeqID_79618
gtctaattacaaaggaaactgtacgaggacatggcacagtcctataccgggaaggctcaaggccaactggtatatggcttgtttctattggtgtagtaaagtggacaagtcaaagattaagcagaaggcattccttggatccaattttatcacatggaagcactttgggtctgtatgaggtgctgatcggaaagccccatatatgtgacatgatcacagattccgtggtacattgtttcttcatcgaagctgaaaagatagaggagctgcgtcagtcagatcattcaattgaacttttcctgtggcaggaaagcgctctggtcattgctaggctcttgcttcctcagatatttgagaaaatggcaatgcatgagatcagggttcttgttgctgaaaggtcgacgatgaacatatacatcaaggggtaagacatcgaacttgagcagaattacgttggcattttgctggaaggattcttgaagaccaggagccagctgatcacgcctcctggggtgcttctgccatcaaatgctgacttgagcttatttggactcgagtcctcagccgtgaatcatatagactactgtcataatgcacccagctaccaagtggaggctagagcgcggatcatcttcttcgatatggtcaggacctccgaggcagaggccgatcttcagcgaagcgtgtcgctgctgtctcacggccatgagccaccacgaagcgtgtcgctgctgtctcacggccatgagccaccaccacggacaatgagcaaggagcacagcggcttgctgtgttggccagagagcttcaggg

SEQ ID NO: 13645 - DNA, 984 bp, Setaria italica
  Peptide Sequence Number=SeqID_79619
ttcagtcggctcttagtgagaaggttggaaactacattcacaacatggctacattttttggcggtcttgtcattggcttggtcaactgctggcaaatagctttattgacattagcaaccggccccttcattgttgctgcaggaggaatatcaaacatatttctccacaggcttgcagaaaatattcaggatgcttatggtgaggcagcaagcattgctgaacaggcaatcttgtacattaggactttatactccttcacaaatgagacccttgcaaagtattcttatgctacttcacttcaagcaacgctgcgctatggaatacttataagtctggtgcaaggtcttggtctcggatttacatatgggcttgccatatgttcttgtgctttacaactttgggttgggaggttcctaatctcacatggaagagctaatggcggtgaagttgtagttgccctgtttgctattatcttgagtggacttggacttaatcaagcagcaacaaacttctattcctttgagcaaggacgtattgctgcatacagactctacgaaatgataagccgttcaacatctattgtaaaccaggatggccgtaccttaccttcagtgcaaggcaacattgcggaactcaatgtttacttcagttatctgtcccgcccagaaataccgatcttaagtggattctaccttacagtacctgctagaaagactgttgctcttgttggcagaaatggttcaggaaaaagcagcataattcctctaatggaacgcttctacgacccaaccttaggtgaagtgcttttggatggggagaatatcaagaatttgaaactagagtggttaagaagccaaataggacttgtgactcaggaaccagctttattgagcttgagcattagggaaaatattgcctatggtagatctgccacaactgaccaaattgaagaggcagccaaaacagctcatgtgcatgctttca

SEQ ID NO: 13646 - DNA, 468 bp, Setaria italica
  Peptide Sequence Number=SeqID_79620
cactagaaaaaggatgcacatgagctgttttggctgcctcttcaatttgaaactagagtggttaagaagccaaataggacttgtgactcaggaaccagctttattgagcttgagcattagggaaaatattgcctatggtagatctgccacaactgaccaaattgaagaggcagccaaaacagctcatgtgcatgctttcatcagttcactagaaaaaggatatgacacacaggttggtcgggctggcctttctctgacggaagaacaaaagataaagctttccattgctcgtgctgtgctctcaaatccatcaattcttctactggatgaggtcactggtgctcttgattttgaggctgagaaagctgttcaggaagcactagacattctaatgcttgggaggtctaccatcatcatagctcgacgcctcagtcttatcaggaatgctgattatatagcagtaatgga

SEQ ID NO: 13647 - DNA, 449 bp, Setaria italica
  Peptide Sequence Number=SeqID_79621
gctgctgctggacgcccgccgacccgagatcctctcggccccgggatcggattcctcccctgcgccgcgcccgtcgatcccagtctcgatcgctgttggtcaccagcaaggatgaagcgcaagcgcggccgcaagccagcggggaagaaagccgctccggcgtccgccgcggcggagtccccctcgccggacaccccgtccagccccagcacggaggcgaccaacagcacgccagatcaggcggaggaggatagcgccccgcctgccacccaagcaccggtaccagcgcctgaaccaccacaatcagcggcagtagtagcacctcctccacattctgagccaccgcagaagcccgccgccgccgccgccccagttaatcctccggtggacataccgtacgccaagcccaaagtgggcgctgtgtacggccgcgtgaagctcaagttcaa

SEQ ID NO: 13648 - DNA, 405 bp, Setaria italica
  Peptide Sequence Number=SeqID_79622
gatgaactattggaagaagttgtttatgatttgtggctttgaagcttcagtctcctggtcaacgttgaagtctccctaacactacttgtatattggccttacaacaactagagtcataactcgtaaatagaagatatcatactgacaataacctgtttttgtggcaaaatcctgtaatttgaacatggaggaccgcagaaaagaacatgtgcttgtgaatttgagtatttcactttaggagcccaagtacagcataagtcattcttaaatatgccggcggcagctattatgtgacattttcccgagaaatggatgtaattaactttcaacagatacatgattgatggcttcgacccattaaggcatgttttgggggccaaagcattatagcatgtggctgctaag

SEQ ID NO: 13649 - DNA, 835 bp, Setaria italica
  misc_feature (823)..(823): n is a, c, g, or t
  Peptide Sequence Number=SeqID_79623
cattgcttcctccattctcccttcccccaacgtgcgctgttctgcgcctccaggagacgatcgacttcgccggcgacccttgccggcggcgacagctagccacaggcacagtggagtgctgaggtggaagcactctgctgtgaatgggaaatgccatgaataaagacaaagttcatgacaaggagactcacggaacaagcagcgatataaacgagaatacatctgtggacaaggtgaagggtcctaatctacttgagcgagcaaaggaagagattgaagctctcgccggagctgttcatactaagatggaacaccattccagtccccttgaaaaggatgaatcgcataaggaagacaaggaggggagcctgcagaaaaataaaaacccacacgaatgaaactcatggaacaagtgctgacataagtgagaacacaccagtcgacaaagtcaaaggcccgaatgtgtttgagcgtgccaaggaagagatcgaagctattgctgaagctatccatccgaagaagggatccggcagtaattgagttgtcgtcttcactggctgcaaaaacattgacatgagtatagcggtatagccagatggatgcatatactttccgacatatccacccagtggtcttttgtatacgcgctctggagctgtaagagctaagagctgacttgtgtgcatgctacactgtttttcgctgtgctattgtggtttgtttcttaccagaggcaatgtaaaaaccccgaatatggaattgtgatgctgaaattattgcgcttgacaatgtattactccctccgttttaaactaaaaaaagngactagccaagg

SEQ ID NO: 13650 - DNA, 925 bp, Setaria italica
  Peptide Sequence Number=SeqID_79624
tttttttttttggtaaatctttcaggattttcttttagaagtttgcaacacaagatccataaaaaaataactcaaacacaaccaacatacagaccttgtagttcttacaaggaacaggagcaacaattgttacacattttcacaccaaggatatgatgcatcacacctcacatgccaagtcgattcctttcaaacatattgatcataagtctcttgaccacatcagctgttgagatgtctacagacagattcagaaaatgtgctattctatcactcttaacttagaaagttacctttcgaagaaaggagacgcaaagccttattggcattcttcaaaactgcattcgatcttggcacctggttcttcctttgctccaagaaatcaagggcattcttcacgtgttgagttgaccggacatccttcaacaaaatagtttcaggcccagaagtttctgttctcttcttctttttctgaaccttctgctttacattttcttcctcagagtcagatgagaaggtttgcttctcacgagctgctagcatttcaattacactactggggagcatgccaggcatagtatgtgtctcctcattctcctcacgctggttggtaccttgatcttctatttcctctggcgcggggttatctggtttagaggatgttctccgttgggcccaacgttttctccgctcctttccctcccgtgttactctgatggcactgtccttctcaactttactgatcttttcgtgcttctcaacaccctggacggcggtgagttcctccggggcgctgtcggaatcgcttccgctgtccatctgacccagctgctctctgtattcccccttttccttcgctagaggagagcgccgggagcttccgctggtgaaacccgccgccgccgccgcccagagggtttttagc

SEQ ID NO: 13651 - DNA, 555 bp, Setaria italica
  Peptide Sequence Number=SeqID_79625
ttaacattatctagcacttcatcaactcgaccaagccattgacctgagacgacataatcacccacatggaattccctgattcgtctcaaatccttagaggatacaccctttatcatatctccattgggaccttgcaagtcaaccacaagatcgacatccacaacaagccccatctgaccagttggatccgaagcagaagcaactaaatctccatgaaggaaacttctgtcaactacaactacatcgtcaatatcttctgtcttttcactaccgtctatccataacacacgaactttgttatccggcaaagaactctggctgccaacttcagctccattactggcatcatcaccatcagcaccaccattttcagccccacaagaagccttacgttcacgcacctcaggttcagactcatcatcgtcagtgatgctaccttcagaatcatattccccagctacctccagcactaatccacgggcatcttccttggacttcaagctgacaatgtcttctctgtaacaaaaacatctggtactcttcaggctcactagc

SEQ ID NO: 13652 - DNA, 271 bp, Setaria italica
  Peptide Sequence Number=SeqID_79626
caaagtacttacacatcttgatttttctaatagaatgttctctagtactcttcacattttttggctaatagagctgtaaaaacttgaccaccaaggaggaattaggtggccttgtaaataagaagaaataggctcagttccgtaaatagagctgtacaaagtcatactttacaaaatcaataatgaactaaggatatctaataatgtagaaaggtacgagaacattattattcattcggagttctattattgtgatctctattagaagcag

SEQ ID NO: 13653 - DNA, 317 bp, Setaria italica
  misc_feature (16)..(16): n is a, c, g, or t
  Peptide Sequence Number=SeqID_79627
atgaggatcgcaccangtttttaattagcatatttcatggtattgctcacctgcctccttattattggcatttaatttgcaaatttcaatcagaaaaaggtaattgccagtgatactcacccctgacatggactcccatgccggattaaatcttttgtaaggatatcttaaaatgacaggctgaactggtgcttttgcaagaaaagcaccagtcttgaatggaaggaggtaatccccatttgtagttgtgccctcagggaagagaagcatcattggcgcatttttctgctgatgagcacgctggattctctcagtta

SEQ ID NO: 13654 - DNA, 775 bp, Setaria italica
  Peptide Sequence Number=SeqID_79628
ttttttgaagtggaaagaaaggatgcatatttcaatgtttagcaaagaaaataaaaggtgaaaacacctaataagcctgcaatggtttaagaacaaagtaaggctattatatttgttagacaatcacatgttagtcaacaaatacatcgggtacatcatggcaactcaaaacacatactcacgactgtgacgccgagtatacgaaaatggcaaattccccgctatgcctcacttgctccctatttgtaactcctggtttaaaagcctatctgattcttgcagcaaaatggtgtggtcatctacagatggtctttgacgagtaagattggtgacaaaatctgttttcttttcctctacaacaatggtgcagggacaactaggaaaaactaacagcaagcatttccaaattttatccaaactagctttgacacaacaatccattcagtgccgcatggtacactcgcttctccgcaagcccaaggtctgaaagaattaagtttccctccactgccattaatttccgcacgttatttgcatagagcttaggatcatccttttcttgctcagaaggatagtagacaggcaaatgggtcacctctacataatttacaaattgacagaggagcagaaatacatggcgtgcccctgacatggactcccatgccggtatttaaattctttttgttaaggtatatcttaaaatgacaggctgtaacttggttgtctttttgcaagaaaagcaccagtcttgaatggaaggaggtaatcccatttg

SEQ ID NO: 13655 - DNA, 1427 bp, Setaria italica
  Peptide Sequence Number=SeqID_79629
ggcttgtttgtaactctgtatacagctttatgtcccaatagggtattcacaacactcctctcagccatgacaacactcaagcatgtatacagagttacaaacaagccactcaactgtcagtattatggaagcacgacagcatggcattttaatcatctttctgatgtaaagcacgaggtagactattaccattcagtgccgcatggtacactcgcttctccgcaagcccaaggtctgaaagaattaagtttccctccactgccattaatttccgcacgttatttgcatagagcttaggatcatccttttcttgctcagaaggatagtagacaggcaaatgggtcacctctacataatttacaaattgacagaggagcagaaatacatggcgtgcccctgacatggactcccatgccggattaaatcttttgtaaggatatcttaaaatgacaggctgaactggtgcttttgcaagaaaagcaccagtcttgaatggaaggaggtaatccccatttgtagttgtgccctcagggaagagaagcatcattggcgcatttttctgctgatgagcacgctggattctctcagttacagcacctgaaacgcctttgaaatctgatgttttagactcccgctgaacaaaaatgcatccaagacatttgcttatgagaccaactaggggcaatctggcaactgatctcttagcaacaaaactgggaaaaaaggctgacatgtgataaagaatatccacataagaaacatgattagatacaattgccccaggcctttccatttctttagactggtccacatgctcaacctcagcatctgggaagcggcagtcgtattcccgaatccagtagaacccgaagacgaacaacatggcgcgagcgagcgcacggccgcaccacacaactccctcccgcctccacccctcgagccgtcgcgtacccatccccttcgccgccctcccgctcctcctccacacgcagcgtgcacacgcgacacacgaggtagtagaccacgagcacaagcatgcctgccacgactcggagcgggatgagcacgacagccgcgaacgccagccggaacgcctccgccgcgcccacggggccgaggcccatcggcccatacgcgtcccgccgcgcgtacggtgcgtacctccggtccagctcctctatactctcctgcaccggcgcggtggaggccgcggagggggaggtggagggcgacgagaggagcggcctcgtggcgaccgtgtcctcactgctcatccggccgccgacgctctcgggctcggacggggcggtggtagcggcgtcgttgggagccatagcggtgaaggcgaagcggaaaccctaaccctagcgctgacgccggatgggcatggtgcggacgccgagacggagatgcgagtcggtggcgac

SEQ ID NO: 13656 - DNA, 1069 bp, Setaria italica
  Peptide Sequence Number=SeqID_79630
tagataccacgaggagacagtttatgcatgtactggagaagctgggatttacttgttccaggatcacccacaagtaaaatattgatgtcacctcggaaactagctccagaaggaagcttcaagggattgccaccaaaaagctggcaaaggaggcctcttttaacatcatccaactcccatatgtttggcgccaatgatctagtcaatctgtcatagatatcaggcaacttcgaaagctcttttagtttctcaaccttatcactaagaaagtcctcttcagtagaattgttagcgttggaattgtcaatatccatagtgtccacgtgaagcctagacttgtcggtcttctttacgtgaaggcaatcaatgtacgtcttgaatatagacttcactgtcctttgagcaggtccaactctaatactcatagccctatatattccagtgatctcaaccctatctccaggctttccagcatcaacaagtttatcatgcatcaggacactaactgtatgtggagtaccaccttctgctatctcatctggtgtttcctgcaactttatgatctgcttgtctgcaaatctgcatcggttatgcaccagggtcatagaatttgtggctttacattgttctttctgacaaatgtgtggttcagttactctccctctatcaaccatgatgggctctgagtagaaaccacaaactaggcagcgaaacacagccctccctgagctctggtatgaccgagctgcatctaattatcatgccctttatcgacaccatcttctcaatgtcagatgggttgagattcctcaagcaaatggacgacttgaggttgtagatcctggtctggatgtgcttctcgaagagtggctcgatgcgtgctacgaggtccatgagcacgatgtcgaaaatggcgagcacctcgagcgggtagcgcaccatcttgctgtacaggtccgggtcatggtcgaagacatcgtgcgcgtcaacgtcgagcgactccccgccctcgagctcgaggatgcggtggatggcgcgcatgtacttgccctcgtccattaccgggtac

SEQ ID NO: 13657 - DNA, 255 bp, Setaria italica
  Peptide Sequence Number=SeqID_79631
cttgctgcagtccagaaggcccgtctcccgttgcaccttgttccaggttttctctcccctcccagtgccacgagatcataggaaggccgttctctcccgggaaagtcaatttgactgtgcatgcatgcagagctgttaagagtgctccaggcactgggcagtgactcagcttggatcgtgtgggctttgggtaaagtttttgcatttagctttgttcacccagcatctttgtattattcttcccactttcaaggg

SEQ ID NO: 13658 - DNA, 412 bp, Setaria italica
  Peptide Sequence Number=SeqID_79632
cagatgctgcggcgcctcgccggcggagccgctaccgtgcattcgtcggcggcggcggcgttccggaggttgctccacatcggcggcagaggcggatgtggtgctgggcagccggagagcgtgtcgtaccgcatgtcgatgctgcggcgcccctcttccgtcggcaagaaggggctcacctggaactcgtgcagtctcatcggccgcctggacgcgccggtgaggccgtaccgcaatagctccgatgagtaccccagggtgtacaccttcctctcggtttccccctcgtcgcccgcatcctcctcgagctcgtccacgttcaagttgagtccctctctccttgagcacttccaacttcgcttgctgcagtaaaattttttgtgctcctaggaattgggtggattttcttctc

SEQ ID NO: 13659 - DNA, 1385 bp, Setaria italica
  Peptide Sequence Number=SeqID_79633
tggatgcatccacccgagggaataggcgtctaaattatagtagtatcgggcaccactcgtgcggccacacagggcgaaacgaacaatctttacagatccatacgtatccctgaccaaaaatctcgggatgcaacacaccgggaggccgcgagtaaaagccatcaccgtaggtactcgggtattcctgtcctgctctcgcatcgccaccgcggcagggggcgaagaagatctcactgtctcccgctctccctgctccgcagccgctgatcacgccgcgtcatcaccgtccggaggcgaggcgaggcggcttgctcgcctgctggtcctcctccgcgctctgcggctggcgatcgagctgcgtcctacggccggccagctagcgatgccggcggcagcgtcagaccctgaggctcagccacgccacgatgtcgtccatgatcttgtccttctcgggctcgatcaggaggtcgtgcagcaggccggggtagagattgagggacttgtccgcggacgaggactgctcgtagagtgcccgcgagccgtcggggtcggtcaccatgtcgtcggcgccgtgcagcaccaggatggggacggtgatccggtgcaggtgctgctgcaggtaggacgtcaggcggaggatctcgtagcccgtcctcacgcggatggcgcccgtgaacacgagctggtccgtgtatttggcgcgcagggcctccgggtcgcgcgacaccggtggcccgttcctgtgggacgccgtgaactggtacctcggcgcgaggagggcgaaaactggcgccatcacccttatgattgggtgggcaggctgtacacgaacagctggtgatgtcaggacaacaccactaataagagtttctacctctggatcaagtgcagccttcagaatgatgcctccgccagtggaatggccaaagcagaagcatggaagaccagggttctcagctgagacttttttgaggtacattttcaaatcattgacagcatgatcaagagactgcacatatccatgaagaccatcgcttccaccatggccggtccagtccatcccgtacaccttgatgccgatctcattcaaccgcctcgctaaatgatcatatctcccactgtgctcgtttagcccgtgcatgacaacaactagcgcccttggtttaatggtggaggagggcgggtacggccaccagcactgcgtgaagagcgtctcgccgcggggcgtggggatgaggtcgtactccctgccgccctcccgcgcccggcggatggctatctccctccgcgccgacgcctgcctacgcgcggcgaccatgggcgaccccgacggcacccgcagcaccaccgacgccttccccttcttcccgctgggccccgacgcg

SEQ ID NO: 13660 - DNA, 507 bp, Setaria italica
  Peptide Sequence Number=SeqID_79634
ctaccatgtgcctgcaacagtggtaagagagtgaaaatataagcttcaaaagatagtgaaactatataatttatcagtgataagtgcaatgtaatatattaccatagatatcaagtggtcgcactccatgtcagaaagaaaacctttatacaagaagaccctaaattatggtaagaaactaggtacttgtccagtaaaaaagaattaaaagaagaattgaaaaataaaattctgaaacatgattttcaacgcagacaaaattctaggcacaaaattgtaagtatcccaagatcaagatctctcatgaaccttgcaattaggataagatgcaatgtattgaatatgaaaacttaataagtttttcgttcatcgaactaaaagaagtgatgaaataaaccttggatgccatgagagccgtttcgactttgaagggtcaaaagcaaactgcgagcttgcaaaaaggagccacctgaggagttcactaaatatgattgcacggtattcaaa

SEQ ID NO: 13661 - DNA, 118 bp, Setaria italica
  Peptide Sequence Number=SeqID_79635
cgacgacgtctacatcctcgaccacgccgaggaggaagggatcgagctgccctactcgtgccgcgcggagggcgaagcaggcaggcgcgcggaggctgctgagcaagtccgcaatggc

SEQ ID NO: 13662 - DNA, 822 bp, Setaria italica
  Peptide Sequence Number=SeqID_79636
attagctgctgctcgcctctgctaatagctccaactcctccagctccaagctctcccttcactacacacgccgcaagtccgcaatggccaccgtgctcagcagcctccgcgcgcctgcctgcttcgccctccgcgcggccccggcgccggcgccgtccaccgtcccgctgccggccaaggctccccgcggagccaggctgcgcgcgcaggcgacctacaacgtcaagctcatcactcccgacggcgaggtggagctccaggtgcccgacgacgtctacatcctcgaccacgccgaggaggaagggatcgagctgccctactcgtgccgcgccggctcctgctcctcctgcgccggcaagctcgtctccggcagcatcgaccagtccgaccagagcttcctcgacgacgaccaggtcgccgccgggtgggtgctcacctgcgccgcctaccccacctccgacgtcgtcatcgagacccacaaggaggaggaactcatcgtctaatgtatatgcctacgtgctcctaatgctatgcttgcttatttatctcggttgatttcttggttatacatcgtgcgtgctagtgcaattactcaataagcgttgtagacttcaaccatggagagacgtcctactctatgtactatgatgcatttcgtttttcttgcatgcaatacagtagctatttggtttgcaagtgttgagctaatgtatgatggtttatctcgcttagcattttgtccaagaaattaatactccacgtgagatttgctacgtggttatcaagaagtctgaaccttaatgaatcgctcgtttatgtaaa

SEQ ID NO: 13663 - DNA, 1068 bp, Setaria italica
  misc_feature (1024)..(1068): n is a, c, g, or t
  Peptide Sequence Number=SeqID_79637
cagcctcagggcggaggccaagggcgagtggctccccggcctcccttcccccgcctacctcgacggcagcctgccgggcgacaatggtttcgacccgctgggcctggcggaggacccggagaacctgcggtggttcgtgcaggcggagctggtgaacgggcggtgggcgatctgggggtggccgggatgctgatcccggaggtgctgaccaaggccgggctcatcaacgcgccgcagtggtacgacgccggccaccgtcgcgctgccggccaaggtcgcccgcggcgccaggctgcgcgcgcaggccacctacaacgtcaagctcatcacccccgacggcgaggtggagctccaggtgcccgacgacgtctacatcctcgaccaggccgaggaggacgggatcgacctgccctactcgtgccgcgccggctcctgctcctcctgcgccggcaaggtcgtctccggctccgtcgaccagtccgaccagagcttcctcgacgacggccaggtcgccgccgggtgggtgctcacctgccacgcctaccccacctccgacgtcgtcatcgagacgcacaaggaggaggagctcatctaagaagttcgatcactacctgctacgcgcttgctatatctagtatctgtcttgctcttgcaagagatcgagtttgacgacgccggacaattccctttcttgtatcatgcatgtcagtgtcaccatgagaccttgcaattaagcatcggcatcagcagcttctccatcgtttgttactctgcttattgctggtctctgtatcattcatttttactgcggatgcatgataggcttcgctcaagtaattaataacgtttttcctctttatttttgtacaaccaatacatatatatactatatatatatacatatatatactatatatatatgtgtgtgtgtgtgtgtgtacgtatgtacctgactaaacgtgctacggaaatgcagcttgagtagtcgtctgaatctgatgcttatttgttatgccatgccaannnnnnnnnnnnnnnnnnnnnnnnnnnnnnnnnnnnnnnnnnnnn

SEQ ID NO: 13664 - DNA, 412 bp, Setaria italica
  Peptide Sequence Number=SeqID_79638
attttcttcttcctcctgctgcttctcctcctctcgcttccattctctgctctcgccggcctctccagacgcagggagccatggtgcgggcgagtcttctcgccgcagcgagcggagctgctgcagccacgcagcagcacgctcacctcagcggggtcgccatcgtggcgctcgcggtggccgcgacggtggccgtggcggcgatcgcggcgttcgggtgcgcgcagggcgccaagaagccgcctcggcataacaacaacaacgtctactactacggccagggctacccgccgcctcccgctggggcgtacggctacccggcgcagcagcccggcccccggctacggctacgcgtacccgcagcagcagagcgccgggcggccaggccgcagcgggctcggctccgactacc

SEQ ID NO: 13665 - DNA, 255 bp, Setaria italica
  Peptide Sequence Number=SeqID_79639
aaagcttctgaaactggtcacgtttcacctttcatccatctcatgtctatatgttcaagatggtgccattggttcctcagcagaatgtgatgcaaaggtccgaatcattagtgataacccctctgctgttatgttactgtcaaatatcctttggaaaataccagatcgtgcgatttcccatgacacaaaccctttgactatatatgctaccagttccataagtaataacattaagtctcttcttggttctgggac

SEQ ID NO: 13666 - DNA, 156 bp, Setaria italica
  Peptide Sequence Number=SeqID_79640
gatgtgatgtgtaggcgaggagggcagctggtgtatctgtcgcctgctgatggcatcgtcgtcgtggacaagaagaaatagtaattccggatggatggaataagaaaacaggctacacagttggcatcaaatgcatcgtttacaccggctatttct

SEQ ID NO: 13667 - DNA, 1152 bp, Setaria italica
  Peptide Sequence Number=SeqID_79641
ctcgttgtactgcccatcccaatcaactgatcgcccgcaaaacgagtagcagctgcagcaaggcaggcacgccggccggccgcgcaggttgattcgccggactcccaagcgcagttactgaatttacaccatgacttctctggagaccgtgagaggagatcttgcgctggtcattttgtacctgaacaaggctgaagcaagagataagatctgtagagctatacagtatggatcaaagtttctgagcaacggacaaccagggcccgcgcagaatgttgacaagtcaactagtttagctcggaaagttttcaggctttttaagtttgtcaatgacctgcatgctctaattagtccccctgccaaaggaacaccacttccactgatcttactcgggaagtcgaagaatgcaatgctgtcaactttcctcttcctggatcaaattgtgtgggctgggaggacaggaatatacaagaacaaggagcgagcggagttcctcagcaggatagcattctattgcttcctcggttctaacacctgcacaaccattattgagctagctgagctccaacggttgtccaagtcaatgaagaagctagagaaggagctcaagcaccaagagttgtacaagaatgagcaataccggatgaagctgcagaagtcaaatgagcggcttcttgctctgatcaaatccagcctcgacatagttgttgcggtggggctactgcagctggctccaaagaaggtgaccccccgcgtcaccggggcgtttggctttgccagctcgctgatcgcgtgctatcagttgcttccaagcccagccaagagcaagtgatgtgatgtgtaggcgaggagggcagctggtgtatctgtcgcctgctgatggcatcgtcgtcgtggacaagaagaaatagtaattccggatggatggaataagaaatggggcgtcgtggacaagaacactgcttaccctcttcctctccgtgtagcaaagcagtcctttgtggctgatgattactgtacgatccggtttgtaagattggggcgcagtgacttgtcatgaaataagaaatagccggtgtaaacgatgcatttgatgccaactgtgtagcctgtttttcgtggaaggcctttgttacactcactcaaaaaaaa

SEQ ID NO: 13668 - DNA, 1194 bp, Setaria italica
  Peptide Sequence Number=SeqID_79642
cccggcgcccccgcagcctcccgcggggacgacgtctccagcgacagcgactgggagggcgtggagagcaccgagctcgacgaggagttcagcgccgcctccgccttcgtcgcggcctccgcagcatccggcaccagcgttcccgaggaggcgcagctgcggctctacggcctctacaagatcgccaccgaggggccctgcaccgcgccgcagccgtccgcgctcaagctcaaggcccgtgccaagtggaacgcttggcataagctaggtgctatgcctacagaagaagctatgcaggagtacatcacaattgttcatgagctattccctaactgggatgccggttcaagcatgaaaaggaaagatgaagatagcatggcttccgcatcaggttcaaagggacctatggggcctgtgtttagcagtttgatgtacgaggaagacgaaggaaatgaatcggaacttggtgacatccatgttttggcgagggaaggagcgactgatgacatactaaagcatctggctgctggtgaggatgtcaatgtgagagatactgaaggtagaactccattgcactgggctgttgaccgtggccatctaagtgctgttgaagttcttgcaaaagcaaatgcagatctaaatgctaaggacaatgaaggacaaacggcacttcactatgctgtcgtttgtgaaagagaagacattgcagaattgctcgtcaagcatcacgctgatcttcagatcaaggatgaggatgggaacacagcacgggagttatgcccttcgagctggtcttttatgaaccaggcaaactgacaacacgaatcaactggatatgttgacgtcttctgccaagaaacatgctgccgtacattagctgtatcctaagctcatagaacacttggtcgcgtgttttttatgtggacatctggtgtatctgctatcctgtataaagcttgggaaatcagacgagctgtggacatctagtgtatctggtgtcctgtactatgaaagcttgggaaatcagatgagttgtttttatcggcctcatcgattcggttgtcagaaccaaagttaatgcagtatttagtactggatgatgcttgcattgctttacacagaaagaaattgtactaatggaatttagtagactagaaacaaccaaatagaataacaataggttacaatacaaaa

SEQ ID NO: 13669 - DNA, 275 bp, Setaria italica
  Peptide Sequence Number=SeqID_79643
cggctttaagcggttgactggagtcggggatacgtctggatgctcctgttcaaccaggggaagcaccaatctgccgccttcgtcccgcccaagcctgagccccttcgctccgccgattttcctccccgtacgaatcctgcgattcctctcgcggattgcgctgcgatttggcccaaccgattcagggccgcgtccgattcgtttcccctattcggcgaactctcgaggtcgtctccacgtgctctcgggaattctgcgcccagctcgtcggatct

SEQ ID NO: 13670 - DNA, 427 bp, Setaria italica
  Peptide Sequence Number=SeqID_79644
gtggtgcgcgtgctgaacgatgatgagggtcgacatgtgttcgatgagcttgaggcaggggatggggataatctgcgatcaggagaggttgggacggaccttgcacgccgtagcgcttggtcagactcgcttgatttgagccctggggacatattccggacgccctggttgaccctagcatttggttgaggctccctccttgatgttgccattgtgtctaagctattctgccaacaattaaaaaatgcagaaattaatgacgcttcaagtactatctctatctgcctctgggttatgaactgcaaccattttgatgccatcactgaaaaaagtctagatccgcatcgtatattaccataattgggcttgatgactagcaaatcaacatgttatgaatgcttatatcttttcatgtgctagtttcatc

SEQ ID NO: 13671 - DNA, 1493 bp, Setaria italica
  misc_feature (9)..(9): n is a, c, g, or t
  Peptide Sequence Number=SeqID_79645
ttttttttnttttttttttttttttttgttgaattaattgagtcgattcagaacattgaagtaagagttgacacagatgtagtatctattggactgcccctaccaagctgtggctaaggtaaaactgcaaacttacctcattagcatattctagcacaaatccaattctgctataagatatgataagtacaatattcggggacttgattcggagaattaacaattgacaatcacgttgagatcctgaatttagcacaccagtggctctctgcttgacgactttgccaactaactggtccaatttctactgaaatactacagatgcaacatttaatttgtttatatcgatgacaaaatcggtgatatttgaatccttaagtatagaagtgctttgatcagcgacatttcccatttccgtagctgctcttcttctccaaatccctcaagaactcggcgaatgccacttcagaagaacccccttccttggtagcctccagcgccttctcccttgccactgcgagcctctcccgaaggatcttcccttcctcagtctccatcaccagtctcacctttgcttccacctcctccgccttgacaagctcctcgtacccctgcaactccaccgcgatcttcatctcctcaaccatgaacaccttgttcatcccctgctccgcgtacagcggccagcatatcatcggcagcccagacatgatggcctcgagcgcggagttccatccgcagtgcgtcacgaacgcgccgaccgcctcgtgccgcaccacctccgcctgcggaacccagttcttcaccaccattcctctgcccctcgtcctctccaagaaccccgccaggagcagtcgctccaagtccggttcgggaaactggccatgctcttccggcgggctcctcaccgcccacaagaaccggtggccggagctctctaatccgccggcgatctcctgtagctgcgcggccgagaaggcgcccttgctgccgaagcagaggaacacgacgctccgctcgggctgcgtgtccagccaggcgaggcactcgtgcatctcgccgttctcccccttgttcccgtcgttgaccagcgggccgatgcagtagactctcggcgtcggccggccgggcacgcagacgccgtcctcgagcgccttcagggccctgggctccaaccagtcgaagctgttgaccagcacgccgctcccctccgggatgcgcctgaactggtacagccggaccttggtcgggtcgctctccttgtcctgcatcgttatcaccatgtccagcgcttgaatcggcggcatgccggggcagcgcaccagcgtcttgcccatgtccctgaaggacggaagggttgggtagaggtacggcaggttgaggaagacggcgaggtcccccaccgcggacgcgaagaagaagtaggcggggacgccgagctccgccgcgacgtcgagcgcgtcgacgcagaacatgtcgagcaggagcgcgtc

SEQ ID NO: 13672 - DNA, 454 bp, Setaria italica
  Peptide Sequence Number=SeqID_79646
tatataagttcaaccatcacgagagaagcatgccacccttgcttcagtccaaatatttcaagaaggccatcgtctgaatgggcttcaacaaagccttttttctccaaatattcaggcttcaaatttccccatgggttccttccacttgcgtagttgtgaaggtttaacgcaacaatagccctcacgctcgaaggtacaggaatgctctcccactcagagctgtccatcctcttgattgataaacagataatgttcctcaatccccttaattcagggtcactaatacactgtgtaaagaaccatccttgcttgcaggtgtatcctgcataaattaacttattggataaaggtccatttgcaagaaatggcttctcatcacgtaattggtgaaatccataagccacttgagcatccattcctatgctgaagtaattatagaacacaccatcaaagc

SEQ ID NO: 13673 - DNA, 960 bp, Setaria italica
  Peptide Sequence Number=SeqID_79647
gcggacgccgcggccgtggcgccgacctccgcgccgtcgtcggccgcctcggccatcgatttcctcaccctctgtcatcgcctcaagaccactaaaaggaaaggatggataaatcatagcatcaaggggcctgagtctattgctgatcacatgtaccgtatggccttaatggctctgattgctggtgacctgcctgctgtggatcgagaaaggtgcatcaaaattgctattgtgcatgacattgctgaagctattgttggtgacattaccccatcggatggtatacctaaggctgaaaaaagtcggcgtgaacaagctgctctggatgaaatgtgtgaagttcttggtggtggtccaatagctgatgagattaaggaactgtgggaagaatatgaaaacaattcttctattgaagccaatcttgtgaaagattttgataaagtggaaatgattcttcaagcgttagaatatgagaaagaacatggcaaagtgctagatgaattctttctctccactgctggcaagttccagacagagatcggtaagagctgggctgctgaagtaaatgccaggagaaaggagggatgcgggaagcagaagtaggagcttctgatcgccttcatagaactttcacggatacatgtcgtcgcgatgaggggtggtgtgaccaactggtgactggagagtttaaaaccccccccgagtcactctccataagccaacttcaacagtggcacctaactgattaccatggcagtccagctttagtaaggaataacgggaggggtatggaggaaaaatctaccaatgttagtttggttagagctgaaatgtccgaaattgcaagacttgtggtagcaacagtgtaatgtttcgttctagcttgggatccagcgagggataatatacgttttttttggttaacccagggaataatgaaaaggtgatggtgtttgcccc

SEQ ID NO: 13674 - DNA, 336 bp, Setaria italica
  Peptide Sequence Number=SeqID_79648
tagggacggcgaaggccggaggggaacagcgacgctgttgccggggccggcgacgcggtgccgttgctcatgggagagggggccgccgccgcggcggccgggggagcggcggaggagagctcgcggacgagggcggcgagggcctcggggttggcgccgcggtcgcagagcgccatgagcagcgacagagtgtggcggtcgaggccggtgtcgaggatctgggacagctggaacgccagctccagagactccttcgcctgcctcgccgcagccgcctccgtctccatctccggcggcgccgtcgcttccgcccctggtaggtggtggctccctggg

SEQ ID NO: 13675 - DNA, 460 bp, Setaria italica
  Peptide Sequence Number=SeqID_79649
cgactggaaccaccttcattcagagtacgagcaccatactgaatggctgttccaccttccaaaagttttctgacagcagggtgctgcttgaatttctgaaatacgatcgcagaatatttagagaaacgatgatcctttgtgtttgttaaactgtacagaatctgtctgtcttctaaaccacccatctaatgcatcaaaatgcatctacaaagaaaaccacatacctggaattcatcgtatggactcaggaaaggatttcgataattcaatgcaacaaccagaccaatcgctaactgaacaaatgagaacagataatggattaagtataatcacttactacttagccatcagtaatctaaatgtctaaaactccaaataaacattgcaggaagccatgagaagaaacccatccatatctagctatccagcctacagctaaaggcccccatgaatccgtgat

SEQ ID NO: 13676 - DNA, 436 bp, Setaria italica
  Peptide Sequence Number=SeqID_79650
aacagtatgaataacagaacctggctcatgctttccttcttcaatctcccaaatctaagaataaattactaactcatttacaagtattagggggaaaatgtgaaagttgttaaagagagagctcataagtcataatccaataaactaaaatacaaatggaacagtgtaattcctgaaaaacattgaccaggtaaaaacaaacaaagatatgtaaaaataacataaatacagatgaccaaagctgtattaacacaacagtcctacagcatatatggcatattgtccgtacaacaatgcacgagagctgacataactcaggcagagaggatcatgtgttcattatgaggtataaagttggttctatcaaaaatttaaaacaaggtatttgaaaactggaagtggtataacaaatatcaaatacctccttaattccaag

SEQ ID NO: 13677 - DNA, 994 bp, Setaria italica
  Peptide Sequence Number=SeqID_79651
gcattgccttgcaatgaagacagttttttgtgcattggacagcaagaattggaaacagtggctaattagagacatactcgtaaactcgggctggacagtaacgtgattctggtccagcatacactggaagatttactttttcaggtagagtaggatccctcaagcggagatgaggaggctgatcatgctcatggtttgtattgctcctgtaccaaaggaatgatggatgattagagtatagaatgaaaatatatttggtaagtacatttctagcggctacgccacctcaaacctgtaataagcacaatatacaccttccaaatacattcactcaaccgcctcttgaggttcaaaagtctaattgaaaaataacttgccattaatgatcaattgggtaagtctcagggtgacacaaatttgtgtaatcaattctatgccatgtctagatacatctaaggcatttggtgtacttctaaacccatgaatagcaaagcaatagttaacaggcacagatatggagaagataaaatcctttttttcattcttgctgcaggcagtacctgtataaagaagttggaacatcgaaggttatctgtccatctggtttaggatattgaataggtgcatgcatattggctgcctgtgcataaggaaatcttttatcattctcaatggtgagaaaaagggttgatgctgtgcatttgcatggtttttttacaaagcactcagcagtacaggcaacagcagtgctgcacactcacatctgttgcttcatggtcaggtttaccatgcttcaatgtataaggtgtctttcctttgaatatgtagcgttccagtgcagacaaacccatgcccggaataaatccgtattcgaatgctggtctataattcctagctttatgaagctcttcccatatccatgacttcttgagattctcccagtacagttccatggaagatccttcaatgagagccttgaaagtcgcttccgccg

SEQ ID NO: 13678 - DNA, 1736 bp, Setaria italica
  Peptide Sequence Number=SeqID_79652
tctaacgaagtatttatgattgatttcatttcatccatatgaatcgagctacaacgcacgaagccaggcttcgtgcgctgtgtgaggatgttagctggctgcaccacatcctgatcagtgatcagtatcaagtaccaagctctaggaacatcctgtgcagtgcgagctgctagtgaagttgcttattatactagctacatgatgcagcttccagctctaatgaagacaggaatggctcaggttcgtgctgaatgaacagcatcacaggtttccttgacatctacatcacagtataaccagggccacctccgccttctggaacagtccactcgatgttttgctttggatctttgatgtcgcatgccttgcaatgaagacagttttgtgcatttatgtgaagctttggatcacctttctcgtcagagacatattcgtaaactcgggctggacagtaacgtgattctggtccagcatacactggaagatttactttttcaggtagagtaggatccctcaagcggagatgaggaggctgatcatgctcatggtttgtattgctcctgtataaagaagttggaacatcgaaggttatctgtccatctggtttaggatattgaataggtgcatgcatattggctgcatctgttgcttcatggtcaggtttaccatgcttcaatgtataaggtgtctttcctttgaatatgtagcgttccagtgcagacaaacccatgcccggaataaatccgtattcgaatgctggtctataattcctagctttatgaagctcttcccatatccatgacttcttgagattctcccagtacagttccatggaagatccttcaatgagagccttgaaagtcgcttccgccgcaagcatacctgatttcatagccgtatgggttccttttattttgggaacatttagaaatcctgcagagcatccaataattgcgcctccagggaaaactggatatggtatcgactggaaaccaccttcattcagagtacgagcaccatactgaatggctgttccaccttccaaaagttttctgacagcagggtgctgcttgaatttctggaattcatcgtatggactcaggaaaggatttcgataattcaatgcaacaaccagaccaatcgctaactgtcgatcatcaaggtggtataggaatgatcccccatatgttttcttgtccaaaggccatccaacagtatgaataacagaacctggctcatgctttccttcttcaatctcccaaatctccttaattccaagagcatatgtctgatgctgcccttgccctctttctctgagcttgtggttccttattattttctctgataatgaacctcggcaaccctcagcaagcagtgttattcgccctcttagttctacaccaggttggaaagtttcccttttggtgccatccttagcaataccaacatcattggttgcgacgcctgtaactatttgattttcatcataaaggatctcgctagcagcaaaacctggatatacttcaacacccaactcctctgctttcgtggccatccatcgcaccaattggcttaagctgatcacgtagtttcctttgttgtcaaatggagatggaagtgtccatgctcggttcttcgttaacaaccagaacttgtcagaagatacaggaactctgattggggcatcctcctgcctccacttgggaatcagctcgtccaacgccttcgtctcgaac

SEQ ID NO: 13679 - DNA, 275 bp, Setaria italica
  Peptide Sequence Number=SeqID_79653
ccggcggcgctgcacagctcgctgtccctgcaccgcacctgcaatgggcgatccccgcttaatttaatccgtttcgcccaccgacacgcggaggaatcggggccgtcggccgtcgcggacagctcggggaaggaggaggaacctacctggaagcaggcgccgcagccgacgccgcccctgtagagctcggggctggccgcggcgaggaagccgccgtttaaggacgcggccagggagccgtacccgcaagaaccggctgcacgggcgcacaattc

SEQ ID NO: 13680 - DNA, 282 bp, Setaria italica
  Peptide Sequence Number=SeqID_79654
ggcgcctgcgccgtgctccacgccggcccgtgctcccgcgtcatgaaccgccagttcgacgacccgacctgcatttgccaacaaaaaacacaccggcaaccacgttaatcaaccgccggtgaactccaatccaacgttgctttgttgacctcagctttcaaactcgttatgagaaaaaggaggataaaatgtcttgtttggagcggggagaagtttgcttaccgtggcgacgtcgacggcgacgatgtcggtctggccgccctggtacaggaacctgatgga

SEQ ID NO: 13681 - DNA, 1234 bp, Setaria italica
  Peptide Sequence Number=SeqID_79655
ttttgtactctccctctccgattccattcatcatttcatatttttccatccgtccatccatccaagaatggacggtattgagcaaaagatgcagaaaaaaaaaaggcaaaaagaactgtacagtttttcacagctcagcccgcgcgtcactgccactcgtgcgtgtcgcaggggtagcacccttcctgcgcgacgtcggcgacctgcaccccggtgtcgtagacgcggccggcctcccaccgccgcggcagcacctccgactccgcccacacccacttgccgtcgtacccgccggtcaccaccaggcggaactgcaggggccccgccggcgcctgcgccgtgctccacgccggcccgtgctcccgcgtcatgaaccgccagttcgacgacccgaccgtggcgacgtcgacggcgacgatgtcggtctggccgccctggtacaggaacctgatggacagttggctcggcggccggctcttctcctccacgcggatggacaggttgcggttcgcgtactcgcatgggatcctcttgtactcgacgtccacgacgcgatgcgcccggagccgcgcggcctcgccggcgcgggccatggccgcgtacgccgcggcgctcagcaccaggcccgtgcggttcgaggaggtccgcgcctggtccgtcaccaccaccttggtgccggcggcgctgcacagctcgctgtccctgcaccgcacctggaagcaggcgccgcagccgacgccgcccctgtagagctcggggctggccgcggcgaggaagccgccgtttaaggacgcggccagggagccgtacccgcaagaaccggcgttgagggcgagcgaggaggcttggtaggtggccttggaccggcgcacgcagcggtcgcagccgcgagccggagacgggaccgcgacgaagacgaggagcaagacgagggacagggacgcggcgctcctcatgacgacgagctcgaggtcgaagaaggcttgaattgtgattactcgggagaacagagcagaacaggggattggattgctgccagcagcgcgagcgccggctttatgctccacgcctccacgcgggcgccgcaaggctgccgctctggtttctggttctggccgcagtgcggaagctagctggtgcctgcgagtactccttctagtaaccagagtaggccctagactggtgatacttggtgctgcccctccaacaggccgcagaatgttttggacacgcg

SEQ ID NO: 13682 - DNA, 297 bp, Setaria italica
  Peptide Sequence Number=SeqID_79656
gttcatggtgttcttggcgcggacggagcccgcgcagagcatggcgaagccgagctgcatggcgaagacgaggtacgccgagaagagcaggtacgtggcgtccaccgccgaggccgtgtccgtgaactggctgcagaggtagtccgtggcgttcgccgccgccgggcccagcagcggcgcaaggtccgccgcgcacgtcgacatcttcgctcaccggagcccctaaccaatcgcacacgcagctggagtggaggaagaaaggtatggggatgcgaggggattgggagggtgtggcgt

SEQ ID NO: 13683 - DNA, 650 bp, Setaria italica
  Peptide Sequence Number=SeqID_79657
ttttttttttttggtagagtataatatatctcgtcgtcgtcgttgttgttatacaatcttatgtagcaatagcataatacggtgagatccaacaaaacagacgggtggcctgcgtgcattctgcacggtgcgcatatgtatatgcattactagtatagcggcactgagtcgctagaactcgccgctggacgcgttggcgatctgcgtgctcatcaccgccttgggcctgacgctggggtcctcgtcgtcgtggtacgcgtacgcgaacccgccgtgccgcgtctggtccatgccggccatctcgtcctcggcggagacgcggaggaggcccatcttgctgagcgccaggaacagcggcgccatggtgacgctcacccacgccgcgatcaccaggaccatcaccacgttcgccgccagcagccggccgccgccgcccatgaagagcccgtacggccgccccggcgcgccgccgccgtagatctgctccacgtactcccggcgcgcgaagagccccgtgaagatgaccccccaagcgccgcacccgccgtggagctgcgcggcctccagcgggtcgtcgaaccggagccttgccgccagcgcgttgagcccgatgagcacccacgccgacacgaacccgcagatgacggccg

SEQ ID NO: 13684 - DNA, 1839 bp, Setaria italica
  Peptide Sequence Number=SeqID_79658
taaaccctagctcctacccatacccatcacatccaccaccacacacggactttctaaacacacatgtacaaaagaaaccccaaccaaaaacaacactcggtacgtgcatgatcgtcaccctactcttgttttacaattcttcgcgagaccagaccaaagtggccaagcatcggcccaaacggtgccggcagcggcaagtacgaccgtgatcatcaaaatatgacgcgatgacagaaagaggcaagcacgtagttccttctcgatccgtttgattttcacacctgattgccggtcgccgccgccgccggctcgacgcggttctgcgcggaccggagcatgaagccaccaaccccggccttgtcgccggggtcctcgtcgtggtacacgtaggcgaagccgccgtgccgggtcatgtccatgccggccatctcgtcgtcggccgagatgcgcagcaggtccagcttcttcagcgcgtagaagagcgggcccatggtgcagctcacccaccccgcgatgaccaggatctggatgacgtgcgcggcgaggaggcgcccgccgccgcccatgaagagcccgtagggcctccccgcgccgtagatctcctccacgtacctcttcctcgcgaagagtgccgtgaagaggatcccccacgcgccgcacccgccgtggagctgcgcggcctccagcgggtcgtcgaaccggagccttgccgccagcgcgttgagcccgatgagcacccacgccgacacgaacccgcagatgacggccgcccaggggtccaccaccgagcagccggcggtgatggcggcgaacccgccgagcaggccgttgcagacgtcgagcacgttccagtgccccgtctggaggcgcttcccgaagagcgtggtgagcgccgccgtgctgccggcgagggtggtggtcacggcggtgcggcccacggcggaccactgcccgtggacgctcccggcggggccgtagctcttgaggatggtgaggaaggaccccgggttgaagccgaaccacccgaaccacaggaggaaggtgccgagcacgacgagcgacgcgctgtggccgttgagcgccacggagcggccggcgtggtcgaagcggccaatgcgggggccctcgatcagcgcaccccagaggccggcgatgccgccgaccatgtggacgacgctggagccggcgaagtcgatgatgccggagccgaagaggagctttccggacgtccgggacgccgaggcccagccgtcggcggaccagacccagtgggacaccaccgggtacacgaagccggtgaggaaggcggagtagatgaggtacgccacgaactgcgtccgctcggcgatggagcccgacgtgatcccggccgcggcgatggcgaaggcccactggaagaggaagaagtcgtagtcgaagccggcctgggggagccgcttgaggccgaagaagtgcctgccgatgaagccgttggagggggtcccgtacgcgaaggcgaagccgaagaggtagtagaagagcgcgccggcggcggcgtcgagcacgttggtgagcatgatgttcatggtgttcttggcgcggacggagcccgcgcagagcatggcgaacccgagctgcatggcgaagacgaggtacgccgagaagagcaggtacgtcgagtccaccgccgacgtcgtgtccgcgaaccggtcgcacaggtagcccgtcgcgttcgccgccgccgggcccagcagcggcgcgaggctcgcggcgcacgtcgccgccatcgacaccgacctgccggctcgccgcttcctcttctcctttcttttaggagcaatgggaagcaggagatgttgc

SEQ ID NO: 13685 - DNA, 419 bp, Setaria italica
  Peptide Sequence Number=SeqID_79659
ttctgttcaggtgaaggaccttgtacttccttatcagaggtagaatctgttttccccaaataaacacttacaatcttcacctggtttcggatatagtttcagctcatgatgtcgcattagcgaaaaaaggaagatgcaatcaaacctgattatggtaataggagatatcagaccaactaacgggtggcatggagcgaaggaatcccatttcaactcttcttttcagccttggaggcagttgtctcagaactcggacctcgtcccttagtgatgctatgaagtagtccacatcgaatatatcttggaaatcactaggatcagcccaaaatgaagctttatccagctctggtacgataagagtgacgttcagataccttgcaatcgtcaccatatcacaaatctatttgaccaaaaaaagg

SEQ ID NO: 13686 - DNA, 415 bp, Setaria italica
  Peptide Sequence Number=SeqID_79660
atttcgggggtaaatctcaatgcattataattgacacgacatctagtttctgaatctccatgggtaagccattatttgcaagccgagcatctgttctgttcaggtgaaggaccttgtacttccttatcagaggtagaatctgattatggtaataggagatatcagaccaactaacgggtggcatggagcgaaggaatcccatttcaactcttcttttcagccttggaggcagttgtctcagaactcggacctcgtcccttagtgatgctatgaagtagtccacatcgaatatatcttggaaatcactaggatcagcccaaaatgaagctttatccagctctggtacgataagagtgacgttcagataccttgcaatcgtcaccatatcacaaatagctgctcgcatctggttaag

SEQ ID NO: 13687 - DNA, 298 bp, Setaria italica
  Peptide Sequence Number=SeqID_79661
cttgtctctcgcttcccccctctccctctgctctccaaaaccctagcgctccttcttcgtcggcgatggcggcggcgcaggggggcggttctggtccggcgaccggcgaggagggggcggcgggggagagccgcaagctcttcgtgggcggcatcccgtcgggcgcgcaggagggcgagctgcgggagcacttcgcccgctacggggaggtgcgctccgtcatcgtgatgcgggacagggagacgggccacggccgcgggttcggcttcgtcgagttcgaggacgaggccgacgccgg

SEQ ID NO: 13688 - DNA, 783 bp, Setaria italica
  Peptide Sequence Number=SeqID_79662
tccgagtcgtctagcagaccaccacacccacggctccgtaccatccgtcgccgccggcgcgcgctcaccagacgccagccaccgcgatggccgcctccgccacggcctcgaggcctctcgccggggcctacgtcccgctccccctccccgcgcgggggctgccgtctagggtcgccttgctcccgcgggctccgccggcggttcagggcctcaccctcgaccggcccgcgcagctctcggtgcgagcgcgcggccggtcggtgcggtgcctcgcggggctcagcccggagatgcgggcgacgctggacaaggtggtggggtcgagcaaggtggtgctgttcatgaaggggaccaaggacttcccgcagtgcggattctcccacaccgtcgtgcagatcctccgctcgctggacgtgcccttcgagacgctcgacgtgctcgccaacgaagcgctccggcaggggctcaaggagtactccagctggccaaccttcccgcagctctacatcgatggcgaattcttcggcggatgcgacatcaccgttgaggcatataagagtggagaactgcaggaaactttagagaaagcgatgtgttcttagagaccattgaaccaggagcacacaacatacaattaatcaaaatgttgtagtatttgctgtaaaattcaggcatgttaaagaactgaagatgctcagtgcactttcattgaaataagattttctgcaatttgtgattttaatcgtacagtttccattgcaatgttatgctactggattgttt

SEQ ID NO: 13689 - DNA, 267 bp, Setaria italica
  Peptide Sequence Number=SeqID_79663
taacaatcaagctttttcttaattaattgataaaattagtcttgcgatcagatgggtaagccttgttctttttaatctctgctctaaaacagatgtttacctaccatgcctgttttaatgtttgactatcagcgaggaaaaaaccatctttgagaccactttaaaatctttgtaatatatcatttgaactaacatataataagaaaatgtgattgtcacatgttttattggacatagttaggacctgagctcagaatgtcttgtcaa

SEQ ID NO: 13690 - DNA, 596 bp, Setaria italica
  Peptide Sequence Number=SeqID_79664
ccaccgcgctcgagtgggccatgatgcacctcgtcctcgaccccgccgcgcaggaacgcctctacgacgaggtcgtcggcaaggtcggcaagaccgcccggatcacagaggccgacgtcgaggccatgccctacctgcaggcggtggtgaaggagacgttccggcgtcacccgccgagccacttcgtgctgtcgcacgcggcgacgcgggacacggagctgggcgggtaccgggtgccggcggacgcgagcgtggagttctacacggcgtgggtgaacggaagaaacccggcgaacgtaggaccggaacccggaaggacgtaggacgaccccgaagacggttacctacgaagggacggacgaagggactttacgtaacaaccgtaacgtagtaacgggaataggtaaattatggcgggggttaatttggtgcggccgcggtataaatactactactactccacggtgatcggtggatcgatcgtagctgttggttggttgacggacggacggatgggatgtgcaagcacgatgctatcatagctgttggttggttgacggacggacggatgggatgtgcaagcacgatgctatcat

SEQ ID NO: 13691 - DNA, 838 bp, Setaria italica
  Peptide Sequence Number=SeqID_79665
atccagcttggcccaatttagaaattggaatgcgtcgattcaactaaaaagaggagtttgcacaaatttcacaatagaggtgttcgataagcgcggcgcatcataaataggaaatcatttcatctttttgtttcaagaaaagacttcacttgaactctagctatagtaattgcatattgataaacactactgcacacgaattcgaaggattaaacccattttgacaagctaaaggattattgaactgcacatgaaattcttggtgccaacattggctttagtttagttacgttacgttacgttaccatctgggaaggaaacccttccgggcacggtctaactaagcaattgtcggttggtacggtcgcggacgcggcgtcgagatgatgagcgggcccggcgaggcgtacgtggactcgctcttcgacctcgagccgcccggccgcgggaagcgcctcggcgaggacgagctcgtcacgctctgctccgaggtcatgagcgccggcacggacaccagcgccaccgcgctcgagtgggccatgatgcacctcgtcctcgaccccgccgcgcaggaacgcctctacgacgaggtcgtcggcaaggtcggcaagaccgcccggatcacagaggccgacgtcgaggccatgccctacctgcaggtaaacgccactacactctgctttgctactctccagctttcgataagcagcacctttccaaatttctccccttcatccagcttggcccaatttagaaattggaatgcgtcgattcaactaaaaagaggagtttgcacaaatttcacaatagaggtgttcgataagcgcggcgcatcatt

SEQ ID NO: 13692 - DNA, 480 bp, Setaria italica
  Peptide Sequence Number=SeqID_79666
tacgaattcgaaggattaaacccaattttgtacaagctaaaggattattgaactgcacatgaaattcttggtgccaacattggcttggtaccaggatacttcacttggccttcatctggaggacagacacgcagaggagagttcaatggtagctggttacattattttattggttcatccatcagcagctaaaatcagtgaggtgcatgggagtatcttgaatttgatgtctcccatgatttccttttatacctgatcctgacttgcgaacaaatgtgcggctactaatttcagacagttcacgctggaattaagacgttgaggtggcgctaaacttgctgccctccaaacaattaatgcttctagaaaaggataacgttaatctctgtcatgaaagtgacgtgcttgaggttgatcactgtatcgcgttagggtcgagtcgttaagattcttcttcagttactaaaccgaaaactagaa

SEQ ID NO: 13693 - DNA, 257 bp, Setaria italica
  Peptide Sequence Number=SeqID_79667
gcttgctgccttgcctgtctcacacacacagagcccgtgcccggcgacagcggcagcgcccgatcccctccggtcatggcgtcgtccaagctgcagcttccggcggacgacagtgtcctcctgctcgtcacccactccaatctctccaccttcgccgcagacatccgcgtctcgcaacagaccaccgtcgaggcgctcaaggacaagctctggcgcaagaccggcaccgccgtcgcctccatgcgcctccagctccg

SEQ ID NO: 13694 - DNA, 671 bp, Setaria italica
  Peptide Sequence Number=SeqID_79668
gtggggtggtggcatcatcgggcgcatcttggcaggatgccccggacagaagggcgttgttcgtcgtcgtcagcagctttgctgaaacctttcttttctgaaaaagagctacgcaacctttactgaactttacgcctcatctcgcccctccttttttctttcagttgtacagagcagcacgcatggagctgctgcatccatgatcctccgtcgtccatccactgggacaagtgttcgcagttcaccatatatgggcaagtgttcgttatttacagcattgtaattcctgtgctagctacgagtatgaggagatgcgaacagctagctagctaggattggtcgaggaggttttggaggtagaggttgaggatgtatctgccggtggagaggacgtcgaggcgcttctcgctgggctcgtaccgccccttgcgcagctggtaccggtgcgtcaccgccgacaccgtgtacgcctgaccctcgatcgtcacgctctcgccgcagtggatgttggtggggaagcagcggacgccgaggcagcgcggcggcggcgtgatctcgacgaccttgaacgggtgcttgtgctccttctccttctcccgctccctgtcccgcccgtccttgttcttccttgtaggcgaaggatgtggaggcgaccatggccatggcggacc

SEQ ID NO: 13695 - DNA, 460 bp, Setaria italica
  Peptide Sequence Number=SeqID_79669
ttctcagtatcacatcaaatcaactaaagtttagctgtttctcctttgcgaaagctactagaaagttgttctagctagccagctgatttgtgcctgcgagttgcttcgtgcacaaccgcatggatttctggttacgtacttgcgtgcaacctgaccctgcaccagtgtccatcgaccgagcgcaagcttttcagtttccagagttgaggtgagatcctaattcctagtagcacatggcaatttagctgcagcacttatgcatcggaagacgaaaattactgctatgaacagacagacggctaaagagagacgtacggtggggaagcagcggacgccgaggcagcgcggcggcggcgtgatctcgacgaccttgaacgggtgcttgtgctccttctccttctcccgctccctgtcccgcccgtccttgttcttcctgcacaccaccgtcgtaagtcgtcgt

SEQ ID NO: 13696 - DNA, 528 bp, Setaria italica
  Peptide Sequence Number=SeqID_79670
cctcaacctctacctccaaaacctcctcgaccttgtaaatcctgtgctagctacgagtatgaggagatgcgaacagctagctagctaggattggtcgaggaggttttggaggtagaggttgaggatgtatctgccggtggagaggacgtcgaggcgcttctcgctgggctcgtaccgccccttgcgcagctggtaccggtgcgtcaccgccgacaccgtgtacgcctgaccctcgatcgtcacgctctcgccgcagtggatgttggtggggaagcagcggacgccgaggcagcgcggcggcggcgtgatctcgacgaccttgaacgggtgcttgtgctccttctccttctcccgctccctgtcccgcccgtccttgttcttcctgcacaccaccgcgaagcgcggcttgtaggcgaaggatgtggaggcgaccatggccatggcggaccgctcgctcgctcgctttgcttcccggtgccgaagaattcgatctagttgctgctgttcctgcgaggacgatgaaccgtg

SEQ ID NO: 13697 - DNA, 245 bp, Setaria italica
  Peptide Sequence Number=SeqID_79671
gtggaggtagtaggaaaataagagcggagaacgcggcggcagcacagttggtgcccggcatgaatgcaccctccccttgcttgatgctcatcccctccgtatctgctgcatgggcaatccgtcgctcctcctagaacaatccactgtctgatttcggtggctgttcttggctgccgacacgcggaatctggatccagtcccttccctctccgtcgattcgttcccagccaaggaggtgaggcgct

SEQ ID NO: 13698 - DNA, 392 bp, Setaria italica
  misc_feature (336)..(392): n is a, c, g, or t
  Peptide Sequence Number=SeqID_79672
gcggcggcgttgaagagtgtttggtaggcaagctgttgactccccgtttcatccttccttgcagttgcggatggatgcctgttaataatagatttcttagttttttttcttttttttctctatcaccttgctttgtagagtccttaaggcttaaattaatcttctgtaactttgcgttcgagcgaggaagctctgctctgctctgtaaatatactgcttcgatttcttcagaagaagaggagaaaaaagaaatcgaagtcagcatctcttcaaagttctaaaaccgagactcttgacaaacggaaaaaaaaaaaaaaaaaaactaagagaactagnnnnnnnnnnnnnnnnnnnnnnnnnnnnnnnnnnnnnnnnnnnnnnnnnnnnnnnnn

SEQ ID NO: 13699 - DNA, 318 bp, Setaria italica
  Peptide Sequence Number=SeqID_79673
taaggttaacctaagtacgttgtcttttgtctaagtctgcaaactcgccggcccggccggccgcctcgccaacctcacgctgtccggcaactatttcacctcggtggcgccggcatgcgcggcgctgatcaaagacggcgtgctggacgtgaagaacaactgcattccaggcctcgccaaccagaggcgcccggcggagtgcgcggcgttccacagccagccgaagacgtgcccggcggcgacccctcgggtggcgtgccccgccgcgtctgccaagggcgcggtggcggcgccgggggaggaaggctagggactact

SEQ ID NO: 13700 - DNA, 1613 bp, Setaria italica
  misc_feature (1579)..(1613): n is a, c, g, or t
  Peptide Sequence Number=SeqID_79674
tcacattcctttcccgaacttctccatcggtcatcttcttttaggaaacgcctagtgccgtcttttcaatacaatcgagatatattggcattcatgcgtccatggacgacttcagtatatcactctccatcttcctattcatctattgtattgctggtacagtagcataccctgaattactaccccacaaggcaaacccacagccacatgatttcccaaatgagaaactatatcgctcctatctggtgatccagcgcttcaagagcaccgttaccagcgaccccaagaacgtcaccgccacctggaccggcaatgatatctgtggagagacaacctacgtgggtttccactgcggagcactgcctgggcgagataatcagttgacagtcacaaagattattttgaatgggtatagtctacatgcaccgaagctgcaagggtttgtagatcagatccccgatcttgcgcttttccatgctgcttccaacaattttggtggcgacattccacgcctcgttggactcgggtatttgtacaagctcaatgccagaagcgaccttccattacaccctcaggaccgatacgggggacaagtcggagtcaatccacaatttcaaagtcagtgcctgaccgctaccataaacttcacattccatttcggaattccgggtggtaagggacggcaaattcctggtgttacggatgctaaggcgctccttctcaaccacaacaacctctctgggccacttccgctggaccttggcttctccaagttgagctacctcgccgtcgccaacaacaagctcacggggccaatcccatcatccataggtcacctgcaagactccctcttcgaggtgctcctcctcaacaatcagctctcgggctgccttccccacgagctcggcatgctgaacaaggcagctgtgatcgacgccagcatgaaccagctcaccggcccgataccagcatccttctcgtgcctcagcagcgttgagcagctcaacctgggcgggaaccgcctctacggccaggtaccagacgtgctttgcaagctcgctggcccggccggccgcctcgccaacctcacgctgtccggcaactatttcacctcggtggcgccggcatgcgcggcgctgatcaaagacggcgtgctggacgtgaagaacaactgcattccaggcctcgccaaccagaggcgcccggcggagtgcgcggcgttccagagccagcccaagacgtgcccggcggcgaccactcaggtggcatgtcccgccgcacctgccgccccaccggggggagaggaatgccatcagggactactccagctacgtcacgtacgctactctgcatgattgaggcgccacgggatgcactaggagacatagtggatgcctaggtggtattttggctatttgcccttgtatccttgtgtttttagtgtgttggtgtgcatgcgtgtgttgtccgtgtgttcctatgtatgtgcggctgtcacgtctagatttcacttcttgtactaccaaatctattgttaaaataaaaaaaggaaatctatatttttctcgagtgagttggnnnnnnnnnnnnnnnnnnnnnnnnnnnnnnnnnnn

SEQ ID NO: 13701 - DNA, 995 bp, Setaria italica
  Peptide Sequence Number=SeqID_79675
gtcgcgattcctacgggccggagtggcggcgccgcgcgttcatccctccccttggaatcttctggcccaggtgcgtatggtatggccggcctgatcggagcgcgcgcaggcccgggaagtttgctgcctgttcgtcggtcgtccgccaccgctcggccgccaccggcttcgcaagtggctgttcggtttgcaagcccgctgtttcgctctgctaaggtttgcaagagctgtggtttagtggcagcagcactggaggtctccaaggacggtggcacggctgttctggccaatcgccagccctccaaaggggttatcgagacattgcagaatgccgatgcagtgtgtttcgatgtcgatagcacggtcatccaggatgagggtatcgacgagcttgccgatttctgtggggcagggaaagctgttgccgaatggacagcgaaagcaatgacagggactgttccatttgaggaggctctggcagccaggctgtctttaatcaagccatctctctcccaaattgaggagtgcttggtgaagaggccgccaaggatttctccaggaatggctgatttggttaagaagctaaaagctaacaatactgatgtgttccttgtgtcaggaggcttccgacaaatgatcaagcctgtggcatctgagcttggtattcctgctgaaaacataattgcaaaccaagttctctttggaacttctggggagtatgctggatttgatcccacagagcccacttcacgcagtggcggaaaagcacaagcagtgcagcaaataaaacagaactacggctacaagacggtcattatgattggagatggtgcaactgatcttgaggcccggcaacctggtggagcagacttgtttatctgttacgccggtgttcagttgagggagccagttgcagcagaagccgactactttgttttggactcctaagagctaattaccaagttgccataagttgactacttaccgcaattctg

SEQ ID NO: 13702 - DNA, 1061 bp, Setaria italica
  misc_feature (1011)..(1011): n is a, c, g, or t
  misc_feature (1014)..(1061): n is a, c, g, or t
  Peptide Sequence Number=SeqID_79676
agctaacaatactgatgtgttccttgtgtcaggaggcttccgacaaatgatcaaggaaagtacattattccactctacagcaccacttcggtagtcctgtaatatcataccatggttcatttttgctgccttttataagatattgaaattttgtgcttgtattattatgaagttggagcaaacttcactttggggttttattgtttgttagaaatatattgtttgttcattgtaataacaaacaaggatgcatcttctgctagaaaatctaaatacgtacaatttctttaacacaactagactatatttgtagtgcggaacttttttaatattgtgggcatgtgattttttttatatctatgtgttatttttaaatgattccattaagaactcatcggtttttgtttgccttttctacagcctgtggcatctgagcttggtattcctgctgaaaacataattgcaaaccaagttctctttggaacttctggggagtatgctggatttgatcccacagagcccacttcacgcagtggcggaaaagcacaagcagtgcagcaaataaaacagaactacggctacaagacggtcattatgattggagatggtgcaactgatcttgaggcccggcaacctggtggagcagacttgtttatctgttacgccggtgttcagttgagggagccagttgcagcagaagccgactgggttgtttccgactttgaagagctaattaccaagttgccataagttgactacttaccgcaattctgaaccttccattttttatgctgagcggtgaaataattgcagccacatttcaagctgtagatttcagtagcaattattggatttagctgaactatctggttgcttgtaagtatttgttatttcatcccactttttttggatggtcctgaactgttctgatattgtgattgaagtatcttttaagcaactgttgagtatgaaattaatgaattgcatcacaaaaaaaaaaaaaaaaacaangannnnnnnnnnnnnnnnnnnnnnnnnnnnnnnnnnnnnnnnnnnnnnnn

SEQ ID NO: 13703 - DNA, 1327 bp, Setaria italica
  Peptide Sequence Number=SeqID_79677
cggcagcgctgccgctgctgatagcactcgcgctgccgacgacggcggcggcggcggcggggtctgggttcaggtgccgtccgggctcccggccggtgctgttcaacttcggcgactccaactcggacacgggcggcatggcggcggccaaggggtggcacctcacgcgcccggagggccgcgccttcttcccccgccccaccggccgcttctgcgacggacgcctcactgtcgacttcctttgtgaaagcttgaacatcagctatttgagcccatttttgaaggcgctgggttccaattacagcaatggtgcaaatttcgcaagtgctggtgcagcaacacaaccacgagatgttccatttgcgttgcacatacaagtccaggaattcttgtacttcagagatagatccttggaactcatcgatcaaggtctgagtggtccaatagatgcacaagggttccaaaatgctttatatatgatagacataggacagaatgatgtaaatgctcttctgtccaacttgccctatgatcaagttgttgccaaattcccaccaatacttgctgagattaaggatgctgttcagactctgtatagcaacgggagccgaaacttttggatacacgggacaggggctctcggttgcctgcctcagaagcttgccataccgaggaaaaatgatagtgatcttgatcagtatggctgtctcaagacctacaacagagctgcagttgcattcaacttagcgctgggcagcctttgcgatcaacttagtgcgcagatgaatgatgcaacgatagtgtacaccgatctgttccccatcaagtatgatcttgttgccaaccacactaaatatggcttcgacaagccgctcctgacatgctgcgggtacggagggcctccgtacaactacgatttcaacaagggctgccaatctaaggatgtgacggcctgcgacgacggctcaaagttcgtcagctgggatggcgtgcacctcacagaggccgccaatgccgttgtggccaaagcgatactgagctcccaatactccaaacccagtctcaagtttgatcagttctgcagggcctgatacttgttcatacctgatactgtaccttttagtttaggcaaattacctggagatatagctggcacctcaaaatctaaaagcgtggagatggttgccagaattgattatctggttctattcataatataggggagagtgaagtcaattgaatattaatttggtttcccacctacatgatgccacctgaaatgagttgcctgtttgatgaatgcattggtgaatcgtcagctaaaagg

SEQ ID NO: 13704 - DNA, 1438 bp, Setaria italica
  Peptide Sequence Number=SeqID_79678
aatatcacctgatttgagtctgaagcccccataccatgaaccaatatgccagaacacgtggggataaccatcgatggacaagctttgggagaactggctggcctttcagaaagaactgatctgcaaagaaaccaaaatgtgcatggggtatggttgaaaactgataagggatctcgctgtcatcatttaatgatctgcatgctgaaggcagccattcaatgaaacgttcatgaatgtgtgcccttagaactgaatgagcattagaatcttcttggaacttaaagttgacgatgtgaactcctttccgtgcatgagattctatttgagtgcctccaagtagcaaaccgatcaaaatctcacgctgttcttcatccaatttcatgctcacaggttttggtggcttgacaactttcttgctaatgaggagaccactttgaagtttttccaaagaatccactggtacatcatacttctttttacacattaaatcataaatgccctcagctttcttatagtcctctgcagaaagatagcctctaagcatgatgttgcaagacttggcattagtacctatcgtcccatttttatgcatttcaccaaaaatctcctcagccttagtgacatttccaatcctcaccagtgattccagataaatggtgtacaatattctattcggacgacaccgaccaaggcattttgtggaatgtctgctccaatttctcatgcatatccagatccagatacaaatacatcaagctaagaaaggctggcatcagatgtttcatgtggctttcaacaaactcatccattagtttttctgcggtctctctctctctagcttttgccattatctcaattatcttatgatatgatgcaacattgggaggtacattatgacccttcattccttgaacatttcaagggatttcataggctcaccagtccgtgcataaagctccattcggcagatataagcctgagcagggagctcacaatcactctgaagaagcctatgccatgttgcctctgtttctttaatatcaccttccttggagaaggccctcatcagtgataccagcacatcagtagtctcttcaaacgcagcttgcttcatctcatccctaagagctttgattctgtctctatcaatgaaatcttggtaactgtgaatccagatgagccccacataaacatccttgtgcactgcaagattgctcgtgactatattgtgatagatgaactcagcctgcctgagattgtgcttcgcagtgcctcctgtcttgctcacaagtgcacggaacatgaattgtgtaggctaaggcgaggcttgtagccacccatctgtatcatctggttgtagatggtgcatgcctcctcaagacatcgccccctggcacgctgagatatgcaacgacaatatatggaaggtggactcggc

SEQ ID NO: 13705 - DNA, 832 bp, Setaria italica
  Peptide Sequence Number=SeqID_79679
tcctccgccccagaacggacgacctctgggagccctgggcgcgcctcgagtgctggcgcgagcgcggcggcgccggcgcgtccgacagcctgggctaccgcttcgacctcctcctccccggcgtcgaccacgccgtccccctcgccgattcctccatcccgtcatccaagggcggcaagttcgccatcgacctcaccgccgcgcagccgcttagccggggcggcacgccggggtgtagcccgaggggcagcggcgacttcagcaactggcccctggggaactaccgcgggttcgtcatgtccgccgctgtccagggcgagggccggtgcagcaagccgacggtggaggtcggggtggcgcacatcgggtgcgccgaggatgcggcggcgttcgtggccctcgcggcggccgtggacctgagcatggacgcgtgcaggcttttctcgcaccggctgaggaaggagctctcccacccgcaggccgaccttctccggtgagtcggtgacccccgacccgccaccggccaccggcgcggcgaccacgaatcacgagcaaattgtaaataagtagttgcggcagatgcgtgctttagcgttagtttgttggaagtagttcgattcggggtgatcggctagttgatcaagatcaccttttttgcgagcgcgagcgtggtgtgggtgtgattttttggttggttgcttcactttagccatggtagtaggacgtcctcttttttggatttctataaatccagagcaatttgtgaacaagaaacgagcttccagttcgattggagtttaaagaaaaaaaaaaaaaaaaaaaaacaaactga

SEQ ID NO: 13706 - DNA, 321 bp, Setaria italica
  Peptide Sequence Number=SeqID_79680
caccatctcaagagaaaggatgtcacgtaagccaagatagcccatcagaggaatgcaagatcagcggatctgttacttgcagagggtgtgctgtttgcatcaagagatgtataaagtgtgggagatgtatagacgatgagtttcatgagacatttcttctggagaacatctgccctatctgtcagccgcatggagattcatctccctctggaaaatagatgttccgtcttatccattggattggatggatacagtcctaacatagcatttctttccttgttagagatactctgtcaagatggcccacatggattgggtagt

SEQ ID NO: 13707 - DNA, 293 bp, Setaria italica
  Peptide Sequence Number=SeqID_79681
cgaagctgctgctgcacccgccgtctcgccccctgcgtccctagtgttctccctttcgcagtccctcccctaaaccctagcgagtttctagaatcttccagaacctctcgccgccccccaaagtccctacccctcgctcagcagccggcgccatggacctggaccccgaggagcttcgtaccggtttggggatttcggttccccactgttgccggttgtgttgggggatctgggtggagtgtcttgttttggagcgattgttttctggcgatttgggcgtgattatctagggg

SEQ ID NO: 13708 - DNA, 420 bp, Setaria italica
  Peptide Sequence Number=SeqID_79682
ctatcttggcttacgtgacatcctttctcttgagatggtgtgcaagtcattgcgttcagctattcggaatgaaccatttttaatggaagtgcatccatattgactcgcagttgggcgagaagatttctgatgctgatcttctctgcttgacacaaaagtccctgggttctttgcagtgccttagtcttgagggttgcactgaaatctcagatcagggactgaaggctattttagaaagtaatctacagttaacaaaggttagtatggtttaatcctcttgcaaatatttctaactgatgtgactgcttcatgtcttgcagttgaatagttttatttattataccttactagcgaatgttgtttgtatcatatcaaattcttggtaatccattgttatcactgcacctattttatgttgta

SEQ ID NO: 13709 - DNA, 2670 bp, Setaria italica
  misc_feature (2564)..(2670): n is a, c, g, or t
  Peptide Sequence Number=SeqID_79683
ggcttcgagatttttgcggaactcccacgctaccaccttctctccaccaccaccaccaccaccaccgctcctctaagcctgcgtcccgtgtagggtttccgcgcgccaccgtctccactccaatcccagacacaacccccgcccgtcctaccaccgccgcattcggagctctgcatctgcctgcagccgagtcgccaatcgccgcctaccccgcccgaggagcttcgtaccggtttggggatttcggttccccactgttgccggttgtgttgggggatctgggtggagtgtcttgttttggagcgattgttttctggcgatttgggcgtgattatcagggttgagtggatgatggtgaggtcgggtgattagatttgggggttggtcggggagggggttcggtttagtaatttttgggcccctagtttctctgctattggattggattgggatccatgatcgagattgctcggtgaagtttttggtcctagggattgtgtttttttgatcggcccggaccaggaatagagggtttctctttgaggagatctagggccgtgttctgtcgtcctctgtagatatagtcaaaaaaaagaaaaagaaaaaagaacaaaagaggagaaggtagtggaacggaggttggaggccatggcgctgaattgctcatcacggtcgccgctcctggcaaccgatgattgtgccggcatgatgcttgggtgtgggtgccggtcggaggaggcctccccgctgtcatcctgcggggtgaattcgctgtggtgggatgacctggagctggagctggaggaggaggtggacgagtccgaccctgtggatcttttacccacagacccctttgggatgaacctggagacctcattcactgcggcgattgccagttgcatcgaggacctaactgtcatgtccggtgcagggcattttggaaatggtggcgatgatgatcttttcgccgacctgagttatcattatttcaatcaggcttttgtgtttgctccggagccgtgtattggtggctatatgggtgtttttgagggctcctttgggtttggaggcctctctggtggtggaggcatggaccaattttcacggttgccttttgagcctgctgggtccatggaggatccatctagctcttgcgaggcaactttggcatgctgtgatacagttgatgctgctcctgtccaagagggaaatgatgcacatgagggaatggtgtttgttttgggctatcttggcttacgtgacatcctttctcttgagatggtgtgcaagtcattgcgttcagctattcggaatgaaccatttttatggaagtgcatccatattgactcgcagttgggcgagaagatttctgatgctgatcttctctgcttgacacaaaagtccctgggttctttgcagtgccttagtcttgagggttgcactgaaatctcagatcagggactgaaggctattttagaaagtaatctacagttaacaaagttgggcatttttggcgcattccggatgacttaccaaggtcttattgacaatctgaggtcatttaatatggtagcagatattggtattaagaaactcagagttgcaaaccgcttcactttatcagaagcgcaatacgaggagttattgtccttgttgcgaatagacaatgggcaggcattgcacaaacaggagccacgtatctttcatccggatagtcttctaccagatcctcagggtggatatgttcctgatggtttcatgccagatcttcatgatgaatacgctcttgatattgagaaatgccctctttgtccaaactacaagcttgttttcgattgcccatcagaggaatgcaagatcagcggatctgttacttgcagagggtgtgctgtttgcatcaagagatgtataaagtgtgggagatgtatagacgatgagtttcatgagacatttcttctggagaacatctgccctatctgtcagccgcatggagattcatctccctctgaaaaatagatgttccgtcttatccattggattggatggatacagtcctaacatagcatttcttttgttgatgctcccatccatgtggggccatcttgacagagtatctctaacaaggaaaagaacaaaaagaaaggtatactttgctatgagcgtaggtgcagcggatatattgtgtttgcttgcaagaaaaaagaaaaagaaaaaatccagaaaaacaaaagtgaaaggatggattggctgttcaactgcgagcagtgggtagtgccaaactgacaatggaggaatgtgaagtgctcagagtgtggaagtactgtgtgtaagattgttcgagtggggctgcttgatgctgcatgttcttggaacttcagatggaagatattagctttcggcgcccccccaaaataaaatctgatgtacctacctgtgtactatgttatcggacaaatgtaatagttacttgtctgtgttgtagaaacatcgtgccatctgacttgtgccagctacattcgaataaataaaaaactgacttctaaacttaaaaaaaaaaaaaaaannnnnnnnnnnnnnnnnnnnnnnnnnnnnnnnnnnnnnnnnnnnnnnnnnnnnnnnnnnnnnnnnnnnnnnnnnnnnnnnnnnnnnnnnnnnnnnnnnnnnnnnnnn

SEQ ID NO: 13710 - DNA, 407 bp, Setaria italica
  Peptide Sequence Number=SeqID_79684
gaaaaggattgcagaatttccctatcatcgtctttttccttaaaaagagccaaacagtgaacaccagacttcagaacacccgatgtcttccgcacctcgtcctcccgcagtcccctgaagggttgaactgacaaattggaagattgttgattttgttgctgggggcgtggccagtgagcatgggttatgctccatattattgtcttcattcccacagcaagagtctttatcagacttttgtaatcattaatttccttagtgtactctaaaggtggttgcaaattcagtacagtctgtaatgggacttcaagcttcattctcaaattcggttgatccttcccttcctcaccttcttcgagcaactgagggattgttcgcttcaatgtcctgaattttccaacaaatgc

SEQ ID NO: 13711 - DNA, 1023 bp, Setaria italica
  Peptide Sequence Number=SeqID_79685
tcgtactaaacgaatagaactttccaaccttcgagaaaaggtcccatccttcaatatcatgattgggtcaaccaggccagatcataagtgaaatagtttgatcgggtcgaccaggtcaggcccgatcatgagaatctcttgtttaagcaaagcaatgacagtctctattaacatgctttttctaatctctattaacgtgctttttgtaagtagtatcttctttataccgtgcctacagggtgtcatttatttgatggaatcgtctggccagaaacggggaagaatctcttctgtcgtagaggcctcgtcgagtgctcccactccgccaaaaaaagatatgatataaaaaagataagcggataaaagtgtcccaccaagacgccgatgaaagactttgcaacgaattcagcaagtgtatcattgatgaagagctcgtcaaactatcgaaagatatgttctaagagtacataccacacctctgggcgcccgggccgaccgacaggctgagggcaatggagacaatccgttccgtatagaacaaaggcggtgatccattctaaaaaagggaggaagagagagatctctcgttaggtcttggtgatgaccgccggagggggagtacgagaaggcggacatctggctgctatcagtcggctggcgagcctaaccctacggggtcaggaggccgatactgtagtagtcgctccctgctatgatccctcctgccgagaagggtggaaggacaggggagcacgccaacgtctcgatcaataggaagaaaagggagtctttttttcctattcctatttattagaaggaaatctatgatataataatatagggagggagtctttttctgtcttgagggttttatttgaaatcaaaatcgaaatgcctcaacttgataaattgacttatttctcacaattcttctggttatgccttctcttctttacttttatattctttttaataataataatggaatacttggaattagcagaattcttaaactacggaacc

SEQ ID NO: 13712 - DNA, 952 bp, Setaria italica
  Peptide Sequence Number=SeqID_79686
aaaatggcatcaataagcgtagaaagcaggctcacccatgtgctaactatgacgctgaacaaatgattggacaagtggatttacaagctcaggtgcttcatcctgagggcagtgtccaacatctggcaagacaacaaaatcttcgactgtatcaaaagatgcataggctcttccgagctccacaggctcccatggatccttctccccccatgctaccaaaactggacacttcaccaatggaagcaactcttcaggtagaggtcctccagagtagcagatgaactcaaggaatacatccactgcgcctggatcaagccctggctgtagaataaactgaactagctcatctgtcactgcagatgtgtcatgatagcactggcaaagtatatttttcacagattctggtgtagcgacagcattaaaaaatagcttcccaacgatggtgttccttaggagactttggaaggatttgatgaaaggctttccaaaccatggttgcttcttgatatgaagcattcttagtgaaatatccaataaaacaattcctttacatttctgaggttccatgacggctgcctgcagaccaacaagccctccaattgaattgcatatgaagaaagcttcactcttgaccacttcagcacaaaacgtattcagctgttctccccatgtctcaaaagtataaaagttctctccaatctcacgtggattaggcttatcagaatagccataaccaattagatctatcgcatataccctatttgccatggcaagaacaggaatatttttccgccaatggtcactgtttgccccaaacccatgaataagaaccaatgcagggcccgacgtcccggcgtgctggtagcgaatgttgtagcccctccatttccatgtgccggtgcttacttggggctgagtctccagcgacgtgcccggcggggacgcgtcagca

SEQ ID NO: 13713 - DNA, 674 bp, Setaria italica
  Peptide Sequence Number=SeqID_79687
ttagctaggatcaatcaaagttaggatgcgcccaaactggattcatcttgagggaggatttaagataaaaaaattgggagaaaacactagctaggaagaggcagcaaaccgaatgaatgttattactcgaacctgtaaggtatgcagcataagcttaatgatcttccaaccacttcttccagggaaaattatagcaagtgtgcagatgttgccaagggaagtgatgagcttcttctttctgccacataaatcgaacggaacctgccatgcattaaactcataatacaccataaaatcatggctccccgggcttaatcatgaagtatatatgcttctcccaaccggaaataaacaacacaagaccaagtgagactcacctcgcactgcagcctagcttgagaatgaaggcttgatgccaactgaaatcacaaggcacttagcttctttttgggtccaacctcagacaatctactctactactccgcctcggcgacggagagcagcagtaagatataaataatgtgcaaaaacaaaggcgaataaaactcaactcaagtgaaaacaaattaattaagcaaggtcgcagttgaaggaaagaattaatgactactagttctcaattgcaccagagagatcctctcactcttcaaggtgatgagttgagttgtccttgt

SEQ ID NO: 13714 - DNA, 637 bp, Setaria italica
  Peptide Sequence Number=SeqID_79688
acaacacacaacacagacctgcagtttgcagcctgcagaaaggcaaaagtaacaataggtaaagcgagctgaaaattttcacctttcacttgttgctgggggcacagtaggaatagtacggttgtaccagcagcaccaccagagtctgcaaggcttgtccctggcctgatcagctagcagcagctcatcagggtgtgcattatgtgtgtgtgtgtgcgtgtgtattggtccccttcctttggcacaataatagcaatgtactacgtacgtacccccggccggccccctgctgcctctgtctgcatcgtcgagatcgatccatctacatggtccactccaacaagttgaaccatctacccgggcactgctgattcctctccatctatcatcatcaactgccactgctcatcatcagctcatgctcttgatgcttctgtcagttctgtggctggtgcatcgatcatatgcccctgcttgcttcgcttcgcttcattcgcttgccggtcgatctgttcttcctcatcggacggaagagatatggtccatcatatcctattaggtttgcagcataagcttaatgatcttccaaccacttcttccagggaaattatagcaagtgtgcagatgttgccaaggg

SEQ ID NO: 13715 - DNA, 405 bp, Setaria italica
  Peptide Sequence Number=SeqID_79689
acgagctgctgcggcggagcctcgtggcgctggcggcggtcgtggtgttacggggcttgccacggcgtcgctgcggaaggcggcggccacgtacggcttcggcatcctggccatcgccggcgtgctgctcccggactgggagttcttcgaccgcgacttctcccagtggctcacccccatgcccgcctcccgccgcaccgccgcggccgccgccgccgagcgcgagcacgacgtctggaaattcaagccctacccgctcaggatggccatgctgacgacgatctacgggttcgggctatacaagtggtggatgtacgtatctagctagtggatcctcctcttttcccccctgtagtgaagttcttttttggtagaaacaccatgacattgccttctcatgtccca

SEQ ID NO: 13716 - DNA, 3163 bp, Setaria italica
  Peptide Sequence Number=SeqID_79690
gagagagagagagagcctgggggggaccaagaatttcggtgcggaagcggaggcgaaggggagggggaagcagaagggtaggccggtgaagggcgagcacgtcgcgtttgatctcggaattcaaactgtacagtgttagctatttcgataagaaggccccaaaaagttgtcttgtgaccagaaaactgaaaccatggtttcaaaatcatattcaaatctgctagacatgacctctggagatggatttgactttcggcaaccttttaagtctcttcctcgtgttgtaacgtctcctggcattatatctgatcctgattgggatacaagaagtgatgatgattcagttggttcagcatcttttagtgagaggaaaataattgttgccaacttccttccgctgaactgtacaagagatgaagctggacagttgtccttctcattggatgatgacgcactactcgtgcaacttaaacatggtttttcgaatgagactgatgttgtgtatgtgggcagtttgaagattcaggtagatcctagtgagcaggaccaagttgcgcagaagcttcttagagaatatcggtgcatacctacttttctcccttctgacctgcagcagcagttctatcatggcttctgtaaacagcagttgtggccacttttccattatatgcttccaatttgccttgataagggtgagctatttgatcgcagcctgtttcaagcctatgtccgagccaacaaactttttgcagacaaagttatggaagtaatcaatacagatgatgattatgtttgggttcatgattatcacctcatgctgcttcctacattcttgaggaagaggttacaccgaataaagcttggtttcttccttcacagcccgtttccctcctctgaaatctacaggactctacctgtaagggatgagatcctgaagtcgctgctcaatgctgatctcattggtttccaaacatttgactatgctcgccacttcctttcttgctgcagcagattgctaggcctgcattatgaatcaaaacgtggttacattggaatagaatattttggccgaacagtgagcctgaagatcctttcagtgggtgtccatgttggtcggctggaatctgtcttaaatttgcctgctactgttagcaaggttcaagaaatcgaacaaaggtataagggcaagatgctgatgttaggtgttgatgacatggacatcttcaaaggaataagtctgaaactgctagggctggagcttcttctagagagaaatccaaagcttagacagaaggttgtccttgtacaaattatcaatccagcaagaagcacagggaaggatgtgcaagaagctattacagaaactgtctccgtggctgaaaggattaatagaaagtatggttcttcaggttacaatcctgttgtcctaattgaccaccacataccattttatgaaaagattgcgttctatgctgcatctgattgttgtattgtaaatgctgtgagggatggtatgaacttagtaccatatgagtatactgtttgtcgacagggaaatgaggagatcgataagctcagaggttttgacaaagacactagtcacacaagcacacttattgtttcggagtttgtgggttgctccccgtctcttagtggtgctttcagggtaaatccatggagtgtcgatgatgtggctgacgccttgtgccatgcaactgacttgactgagtctgagaaacggctacggcatgaaaaacattatcgctatgtcagcactcatgatgttgcttactgggcacgcagctttgctcaagatctggaaagagcatgcaaagatcattatagccgaaggtgctgggctattgggtttggtctgaatttcagagttattgctctgtctcctggcttcaggaagctgtcttcggagcactttgtttcttgttataacaaggcttccagaagagcaatatttcttgactacgatggtacacttgtgccccagtcatcaatcaacaaagctcctagtgctgaagtcatttccattcttaaaaccttatgtaatgacccaaagaacaatgtatttatagtcagcgggcgcggacgagattctcttgatgagtggttttctccatgtgagaagcttggtatagctgcagaacatggctattttgtcagatggagcaaggaagctgaatgggaatcaagctatccacgtacacagcgtgaatggaagcacattgctgaacctgttatgaaggtatacactgagacaactgatggatcctccatagagccaaaggaaagtgctctagtatggcactatctggacgcggaccatgattttggttcctgccaagcaaaggagctacaggatcatcttgagagggtgctatcaaatgagcctgttgttgtaaagtgcggtcattatatcgtagaagtgaaaccacagggagttagcaaggggcttgctgtcgacaagctgattcgctcattggtcaacaacgggaaggcacctgattttctgatgtgcatcggcaatgacagatctgatgaggacatgtttgaaagcatcaacggtatgacctccaacacagtcttgtcacccacagtaccagaggtctttgcctgctcagttggccagaagcctagcaaagcgaagtactacgtcgatgacaccactgaagtaatcagattgctcaagaacgtcactcgcagctcttctcagcgggaggatgtcagccatggacgtgtgaccttcagagacgtaatcgatttcgtggagtaggcaccaccagttatttacctaaaattattagctgcaaagcatgtacattccatcgtctccggtctctcaatggttcatttttaggagggtgtgttagtccagaggtctagagtagccgacatgatttgtcaccattacaagaacagcagaaatgcgagctgaagttcgccgttttgaaggttcaggtgatgtatgtgtaggcaattttggtagggaaggagggctgttgctggaggtttgctgtgtgaaaccaagcctctggcttctgcagccattggttgtctgaatctattctcatgctgctatattgatgattttgttggttcttttaaaacctatcactggggaaaattgcactgttgttaccaaaaaaaaaaa

SEQ ID NO: 13717 - DNA, 465 bp, Setaria italica
  Peptide Sequence Number=SeqID_79691
ccaaaacacatgcgagagtgttcaaggaatcccatcaccaaatccatggcaaatgtccatctataactcaaaagcatgtatgtggatatatgagcggtggactagctagggtctgtagctagtccacaaaagtaggtaaagaaggaaaacaggataaacaattatcaaggcatggctaaaacattggctatgcaatccatcatcatcaagcaatataagtgaaagcgctagcaactaagcatgcataggatccatatgattgggagtgacatgacaccttgtccgtagtcgattgggtcctcctcgatgtagttggggtcttgaaggtctttcgggtcgtagctcgggtctgaacagaacgagatacgacgaaacgtaaattaaacggcattacatctaggcaaaaactccaagaaagctaaatttagaagatccaaataacacctacaaacaacaaactaacta

SEQ ID NO: 13718 - DNA, 317 bp, Setaria italica
  misc_feature (294)..(294): n is a, c, g, or t
  Peptide Sequence Number=SeqID_79692
ggggaagggatcaggcacagggagcgagcgagagcaggaaggtcggagatggaaggggaggaggagggacagtggttgctgcagacagcacaggaggagactcctattggaggactccaaactccaaaggtggcaataattgcccagagcgggggcacctcaccaccactgttcactcgctttatttaccaatgccagtaagtaacatacagggagagaaggtgcgtgtggttggggagagtaggtgggatgggaggagcatgaaatcaacaagcagatggacgtgccaaaagnttcagatcagagagagggaaaag

SEQ ID NO: 13719 - DNA, 706 bp, Setaria italica
  Peptide Sequence Number=SeqID_79693
cctagcagcaacacagagcttagtagagcaatggaagggagcccctgccatgagttccacactgacctcccagccacggacgtgtgggaggtctatggcagcctcgttcttgggcaattggtcccccaattgcttcctcaagtgctgtcagaggttgagcttgtagagggagatggcagcgtaggaacggtcctgcttgtcactttcccttcagcaggagcttccggaccagtaagttacaaggagaggttcaccatgatcgacgatgaaaagtacatcaaggaggtagcagtgattaaaggaggcgttctagatcttggctttcagaaatatgtagtgcgatttgagattgaaggaaaagaagatggaacgaccattataagatcaaccatcgagtataaagttgatgcagagcagacaagcaatgcctcaattgtcagcactgaagctttggctgctattgctgaagccatcaccaagtatatcaaagagcaaatgagcctctagaaagcctgcgaataaacttcagaaggacaagcactcaaacaaaattctgaagaacaacgcgcccaactgaagtgattggcagccaagtttgagctaattcccatgtactattttgttcttatgtttttctcatgtctatcgtatttttatatgttatggacagatgttccaatatgttgtcatgtacaagtttatagac

SEQ ID NO: 13720 - DNA, 443 bp, Setaria italica
  Peptide Sequence Number=SeqID_79694
agtccaaaaaatacatatcacaacaagaaagtgttgccttgaatcaaactgcacagattctacggccagctctaaaaaaaataatgtgcattaagaaaaatcacagtacggatccaacattttcaagaagagcaaaacggaatcagttgcgggatgatgcttgccgatggttgccgttacttgctgccgtcaacgttgcggacctcgcctcgtcgtccttgtcttcgacggtgacgagtctcgttgtttcgaacatcgagcatgctgacgccgggatccggcatccccgctaggggcaaccgtggatctcgctagcccatccaccggatcccgttcctcgcgccttgattcgacccctttttcctcctcggcggcgacggatcctccacgaatccgagccgagccctcacgagctcgtggtgcctccatgccatggatctgcc

SEQ ID NO: 13721 - DNA, 758 bp, Setaria italica
  Peptide Sequence Number=SeqID_79695
tacccaataggaagaccttttgctcgtgtgtctggctaactgaaagtgtgtgactgtatgcaggtgcccgtggcagatagtgcggcggccaccacccagcgtgcgtcttttttttctttcttccttgcagtcatccacccatcccagactctctgatgagcataccttgcagtaggagctctgctgattggccccgtccgtcttgcagataacaacaggcgacagacacatggccatcatccttgtacgagcagcgtcgcccgggctctccgacgccgcccaccatgggagcgggagcgggagcctcggccagtgctcctccctgctcaagaggcggcgccgctggatgctctgctctctccggtacgcctgcctcggcctgggcccgggggagagggagattggccgggcccccgccgtgtactccagcctggccgtaaacccggcgggagaggccgtcgtctcctccgagcagaaggtctacgacgtcgtgatgaagcaggccgcattgctcaagcgccagctgcgcacgcccggccctcttgacgtcagcaggccccgggacctggagatgccgcgcaacggcctcagggaggcctacgcccgctgcggagagatctgcgaggagtatgccaagacgttttacctcggaactttgctgatgacagaggagcggcgccgcgccatatgggccatctatgttgttggttgttaggtaggtacggtattgttagtcttcgttggtatgggccaaacgc

SEQ ID NO: 13722 - DNA, 566 bp, Setaria italica
  Peptide Sequence Number=SeqID_79696
tatatagtatgtcattcattcaccaacagatgtagaagtaggttttcttacatgtgttacaacagtattattgcagctcggggctttcttattaggcttaaataataattattggtaatttaggtggctgcagatgtatatgtaaggcattttgagttgtcatctggtgctcaattgagcagcagctagtagcgctcgtcagggcgcagggctgtcgagctgcagcacgttgccaaaccaggagttatggcaggggtaggcggagcagaaggcctcgagccccgtcatgacgagcagcacgacggaggcgagcagcgtcaggatcttccacgacccgaacacgtacctcttgagcatcttctgcactcgcaccgccggcgtccggtcccggtgcgcgttcactgcccgtatgacgccgtcgagccgcgacaccttgctcacccgcgccgcgcggcacatcccgttccacatgtccgccacctcgcggttgctcttcatgcggttcaccagcacgccgctccggcggagggatcttgacgtccctggtggtgtcgatgatgccgttc

SEQ ID NO: 13723 - DNA, 449 bp, Setaria italica
  Peptide Sequence Number=SeqID_79697
gacgagtccggcatcatcaagcaggacgacgccgagtacatggagtggctcgacgccaagccggagaattccgtggtctacgtctcctccgggagcctggcttcgatggcgagggagcagctcgacgagctcctccgaggccttgaggagagcgggaggccctacctcttcgtcatacggaaggacgtcaaggtggcacttgcggaggtggaggcggagatgatggggcgtctcaagaacggcatcgcggtggagtggtgcgaccaggtgagggtgctgtcccacacggcggtgggttgcttcgtgacgcactgcggctggaactcggtgctggagagcgtggcgagcggggtgcccatggtgtgcgtgccccggctgtcggaccagcacatgaacgcgcagctcgtcgtgcgcgacgtcgtagttggtctgcgtgcgcaggtggacga

SEQ ID NO: 13724 - DNA, 370 bp, Setaria italica
  Peptide Sequence Number=SeqID_79698
tagcttaacatggagcaaaacttttattacaataaatgaactgggcgtagtgaatacatctgtggtatttacaggaatggaagctcaggcttttgagctctaactaaacttattctaacaatgaatgtaaaaaagaaaaaaaatgggggagatcaacatataccaaaaatgaataatgggggaaaaggcataaattaaaagaaaaagaaactatgtgagcagctcattgacatctacagtatctaattcatgaatttccggcagttagcagtctggcagcggcaaggcactttgcgttcatcagcctcatcaggatcaaacagatagtcatacgttagctcatcaccggcacgaacattttcttggctat

SEQ ID NO: 13725 - DNA, 702 bp, Setaria italica
  Peptide Sequence Number=SeqID_79699
gacgtggacgacgaccggcccgagcagaagccgcagcacgggggcctcgacctccaggcggcggacgccgggcagccgccgcagcagcagctcgccaccgccaacggcaagaagaagcgctaccaccgccacaccgcgcaccagatccagcagatggaagcgctgttcaaggagtgcccgcacccggacgacaagcagcggctgaagctgagccaggagctggggctgaagccccgccaggtgaagttctggttccagaaccggcgcacgcagatgaaggcgcagcaggaccgcgccgacaacgtgctcctccgcgccgagaacgagagcctcaagagcgacaactaccgcctccaggctgccatccgcaacgttgtctgccccaactgcggccacgccgccgtcctcggcgagatgtcctacgaggagcagcagctccgcatcgagaacgccaggctcaaggacgagctcgaccgattggcgtgcatcgcgacccggtacggcggcggcggccgccagccgagcatgtcgtccgcgctggtctgcttgccggggccgccgccggtgctcatgccgccgctcgacctcgacatgagcgtctactcgcgccacttcacggaccagtccccggtcatgggctgcggcgacctcatccagtccgtcctcgcgcccccgccacagcagatcgccggcggggtcggt

SEQ ID NO: 13726 - DNA, 279 bp, Setaria italica
  Peptide Sequence Number=SeqID_79700
ctatctattaaaatgcttgactgactcaggagacaagaataatcacaccataagattcacataagattcacaataggcaaaaaaataaaagcatagaccaaaagattcccttctgaatccaatataaaaatctgaactctgactaaattaaacaggtatattatatctataaaaactctactcacgtcaatggacaggatggtaccacccatcaggggacaaagtttgagtaaacaacttacaaattacctttggcatcttttaactggttggtgttaa

SEQ ID NO: 13727 - DNA, 214 bp, Setaria italica
  Peptide Sequence Number=SeqID_79701
cgactacaatacgatcctacatggatcggggatacacacgaccagcgacaaatcgaaggaaataatggcccacaaacaatttcttgagacgacacggaaatcgtcgctgattgacatgcggaggtgctttgtcagcccatcgcatatttctgcgtccatctgctccctgctaactgaccccaacccggacgatcctcttgtccccgagattgcc

SEQ ID NO: 13728 - DNA, 395 bp, Setaria italica
  misc_feature (324)..(324): n is a, c, g, or t
  Peptide Sequence Number=SeqID_79702
ctccaacaagcgaagggacccggggcggggcaggagaaaaaaagagggagagaaggcgtctctctctctctcctctcgccgtccccaacctctcgtcttcgctgcctgcggaaggagtttgtcatggcatcgaagcgtatcctgaaggaattgaaggacctgcactgcatgatggtgggggggatctctctgcaggtccttcaattccttcaggatacgcttcgatgccatgacaaactccttccgcaggcagcgaagacgagaggttggggacggcgagaggagagagagagagacgccttctctcccttcttttttttttcncctgccccgccccgggtcctcgcttgtggagttgtggtgtgcggctgggtcgtacgctaactgtgggcctg

SEQ ID NO: 13729 - DNA, 456 bp, Setaria italica
  Peptide Sequence Number=SeqID_79703
aacaaccaaaaaagccccaatctctcacaccatccgtgaaatccagaacacgagcgcgtaaggtcgaacaccccatgccccagcaccgatcgcccaacgcctcaagcagccccgcaccaaatccggctccgaccgacaacgcccggtaggaaaccaggaacctaccacacgcaacaccgcctcggcgcgctccaaaccggaccaaaccgcagatctacccgagacagccgcggcaaccagaagagaagagcgggaaaaaaaccacacaaaaagctcgagagaaaaaacacgcgcgcctatgggacggatccggatcgggaggggccggagctcacccgcgccgatctgaccggagcggaggccgaaaaaaattcgcccgaaaaaattcacgcggaaaagcgaaggctccccaccttccgcaggcagcgaagacgagaggttggggacggcgagagg

SEQ ID NO: 13730 - DNA, 308 bp, Setaria italica
  Peptide Sequence Number=SeqID_79704
gaaattgtttgtgggccattatttccttcgatttgtcgctggtcgtgtgtatccccgatccatgtaggatcgtattgtagtcgatgtccaactaccatccatagtgagatggtcggacatgctttgcttatgcacttatgcttgctgggaaccttggtgttgggatcggtgttactcggtaattgttcatcggagatacacacgaccagcgacaaatcgaaggaataatggcccacaaacaatttcttgagacgacacggaaatcgtcgctgattgacatgcggaggtgctttgtcagcccatcgcat

SEQ ID NO: 13731 - DNA, 449 bp, Setaria italica
  Peptide Sequence Number=SeqID_79705
aagaggatcgtccgggttggggtcagttagcagggagcagatggagagcaagaccttagaaattgtcaaagcagggctccactgctctttaagaatgtcaaggcatatacttccattgctgttgatattaggatggaagacctttgtcttgaaagcaccttggaggtttgaaggggtaatctggcgggaaatgaatgttcactaagaaaacaccaccagcatagggactgtcaggcggtcccataattgttgcttgccaatgaaacatgtcctcaccggcaggacctgcagagagatcccccacatcgatgcagtgcaggtcctgcaagtattgcaggatacgcttcgatgccatgacaaactccttccgcaggcagcgaagacgagaggttggggacggcgagaggagagagagagagacgcctcctgaaggaattgaaggacctgca

SEQ ID NO: 13732 - DNA, 531 bp, Setaria italica
  Peptide Sequence Number=SeqID_79706
ttcttttctttagttttgtttttgtttagtttttagttttttttttttttttaaattttagtttaaattttcttttccgtttatttgttaacttaatttacagttcgttaactacccgatcccaacaccaaggttcccagcaagcataagtgcataagcaaagcatgtccgaccatctcactatggatggtagttggacatcgactacaatacgatcctacatggatcggggatacacacgaccagcgacaaatcgaaggaaataatggcccacaaacaatttcttgagacgacacggaaatcgtcgctgattgacatgcggaggtgctttgtcagcccatcgcatatttctgcgtccagctgcgggctgtcgactcgtacttcggccggtccgtcttgtacatgtgggcaatctcggggacaagaggatcgtccgggttggggtcagttagcagggagcagatggagagcaagacctggaacatccaacaaagcaacactcaaataagcaacaacacttcttaattttct

SEQ ID NO: 13733 - DNA, 1119 bp, Setaria italica
  Peptide Sequence Number=SeqID_79707
ggcgggcgccggtgcttgttcctcggccgggagaagcaggcccgggcggggagcctgcgggttggaggaggaactgccggagcgtcagccgtggctgtgcgggctcgcgggaccaagcccgtcgcgccgctatgctgcgtcagggcatcgcgaggcaatgagagctcgcataactcagttgatgaggccctactgttaaagaggatatcagaaaaagttctgttccacttgaatgggcggtgcatttacctagttggaatgatgggatctggaaagagcacggtggggaagatcttggctgaagttctgggttattcattctttgacagtgataagttggtagaacaagcagttggcatgccttccgttgctcaaatatttaaggttcatagtgaagcatttttcagagagaatgagagtagtgtattgagggacttgtcctcaatgcggcgattagttgttgccactggagggggcgctgttatcaggccaatcaactggaattacatgaagaaaggtctatctgtttggttggatgtgcctttggacgcacttgcaaagcgtattgctcaagtggggactgcttctcgtcctcttctagaccagccgtccgatgatccatacacagcggctttcacaaaactgagcatgcttttggagcaaagaggcgacgcttatgcaaatgctgatgccagagtttctcttgaagagattgcagctaagcagggccacggtgatgtttctaagctgacaccgaccgatatcgccatcgaggcgctactcaagattggaaacttcgtcactgaagatcccacatcccatggccaagttgattctcagagccgccggatacaaaccttgtagaattttgacctcatgtaccagtagagatagcgctctacaatatttatttgttctttatattgaaaataaatctgaaatgtagaagtatagactatagaacaactgatggagggagccaatgacagaagctccacgactgaaaagaaggttgttacagttaccaagtccagtgtccacccgttggttttcgacaagctttctttgctcctatccggcagagtgcccgtttcagagacatgaatttcgtagaaaggt

SEQ ID NO: 13734 - DNA, 1023 bp, Setaria italica
  misc_feature (1)..(51): n is a, c, g, or t
  misc_feature (1013)..(1013): n is a, c, g, or t
  Peptide Sequence Number=SeqID_79708
nnnnnnnnnnnnnnnnnnnnnnnnnnnnnnnnnnnnnnnnnnnnnnnnnnnttttttttcttggttttaacatgacctggaacaggctaacagcctacattaaaaatgattcacatggacatgcattagacacaggcaacgaaatagaaatctccgatgaacaattaccgagtaacaccgatcccaacaccaaggttcccagcaagcataagtgcataagcaaagcatgtccgaccatctcactatggatggtagttggacatcgactacaatacgatcctacatggatcggggatacacacgaccagcgacaaatcgaaggaaataatggcccacaaacaatttcttgagacgacacggaaatcgtcgctgattgacatgcggaggtgctttgtcagcccatcgcatatttctgcgtccagctgcgggctgtcgactcgtacttcggccggtccgtcttgtacatgtgggcaatctcggggacaagaggatcgtccgggttggggtcagttagcagggagcagatggagagcaagaccttagaaattgtcaaagcagggctccactgctctttaagaatgtcaaggcatatacttccattgctgttgatattaggatggaagacctttgtcttgaaagacaccttcggaggtttgaaggggtaatctggcgggaaatgaatgttcactaagaaaacaccaccagcatagggactgtcaggcggtcccataattgttgcttgccaatgaaacatgtcctcaccggcaggacctgcactgcatgatgtggggggatctctctgcaggtccttcaattccttcaggatacgcttcgatgccatgacaaactcccgcgccgatctgaccggagcggaggccgaaaaaaattcgcccgaaaaaattcacgcggaaaagcgaaggctccccaccttccgcaggcagcgaagacgagaggttggggacggcgagaggagagagagagagacgccttctctccctttcttttttttttcncctcgccccc

SEQ ID NO: 13735 - DNA, 380 bp, Setaria italica
  Peptide Sequence Number=SeqID_79709
ctggctgccttcatatcctctcccatgtcgctcgcgccaccttggttgctgttgttcctccctcttccatacagtgctgcagcacctaaagcccccactgacgcggcggatgcagccgctccatacatggctgaggagtctagcaggtgcaccacttccctgctcaggtcaggtatcatctcccccatcccgacaatgaaatgggcaccgatcttcagagcaaaggtcagcagcttcatgaacttgctcatgtaaggcagcaaggatttcaccgtctggttgtccacttgaatcaggtcacagccgagttggtcttctactacatgcatctctcttcggaactcacacagcatgtgcacccgtagggaccgcatcccagg

SEQ ID NO: 13736 - DNA, 431 bp, Setaria italica
  Peptide Sequence Number=SeqID_79710
gtgcagtcctgcggcacgccgctcgccatcccgctgttaatctacttacgatccaggaagccctccgtggcggcggcttcccggccgtcgctggtcaagctcgccgccatctacgccggcctgggcgtcctcctcgccggcgacaacctgatgtactcgtacggcctcctgtacctgcccgtgtccacctactcgatcatctccgcgagccaggtctcgttcaacgccgtcttctcctacttcctgaacaaggagaagttccgggctctcatcctcaactccgtcgtgctgctcaccttctcggcggcgctggtcggcgtgagccacggctccgacgggagcggcagcgccatcccgaagggcaagttcccggcggggttcgcgctgacgctgtcggcgtcggcgctcttctccctgatcctgtccctgat

SEQ ID NO: 13737 - DNA, 1373 bp, Setaria italica
  misc_feature (1356)..(1356): n is a, c, g, or t
  Peptide Sequence Number=SeqID_79711
cgtcagcaagcgggtgttcgacgcgcagggggaggagtccaacagctacaaggacatgatcgtgtcgctgctgacgggcgcgggcctgttcaacatcagcgacttcgttccggcgctggcgcgcctggacctgcagggcgtgcaggccaagctgcggcggatccaccaccagttcgacggcctcatcaccaagctgctggcggagcacgccgcgacggccgccgaccgcgcgcgtcacggccgccaggacttcgtcgacaggctccgcgccgccatggacgccggcgccgacgacgacagcggcgagaccatcaccgaggtcaacatcaagggcctcatcttcgacatgttcacggcgggcacggacacgtcgtcgatcatcgtggagtgggcgatggcggagatgctcaagaacccgtccgtgatggcgcgggcgcaggaggagctggaccgcgtggtcggccgcggccgccgtctggaggagtcggacctgccggcgctcccctacctgcaggccgcctgcaaggaggcgatgcggctgcacccgtcgacgccgctgagcctcccgcacttctccttcgacgcctgcgacgtcgacgtcggcggcggcggctaccgcgtcccggccaacacccggctgctcatcaacatctgggccatcggccgggacccggaggcgtgggaggcgccgctcgagttccggccagagcggttcctgcccggcggcgcggcggagaaggtggacccgctcgggaactacttcgagctcatcccgttcggcgcggggcggaggatctgcgccgggaagctagccgggatggtgttcgtgcagtacttcctggggacgctgctgcacgcgttcgactggcgcctgccggagggggaggagaagctggacatggccgagaccttcgggctcgcgctgcccaaggccgtgccgctccgcgccgtcgtcacgccgcgactcgcgccggaagcctacgcgtgactccctgcttggtttgacgttgcctagtactcctgcgtacatatttcgttatctctgtacacacttgattgtctctgtctggtattggaacgtatgaatcccggaccatggtttctgtagctagcacgagcatcttcaaccgctgcgttgtgcttccatgatgcccgcctccctctaattctaaacccagaggacgaagaaactctaccggagaaaggaaacggctcgccgtatgagaagattgttgcccgttcacgcttttctcagaacactcaaccgagagaagagttggttttcaggctttagtctaatatggaaatcaaatgcaaataaaagcagagcattttaacaaaaaaaaaaaaaaaaanaaaaaaaaaaaaaaaaa

SEQ ID NO: 13738 - DNA, 345 bp, Setaria italica
  Peptide Sequence Number=SeqID_79712
cggcggggccggtcgaggaggacacggaaaagtcgggggaggaggaaggaggcgagggaggggagcgggacggacgtgtagtgggagccgtagaacgggttggggtcggcgtggaggaccgtcttcccagcggcggcgcaagcggcggcgaggacggactccgggagcccggtgccaaagagcatcacgtcgaacgaggtggggtcgatggtggggtagtcgtgcgtggccccggcggcggcggcggcggtggcggcgggctcgtccgccatggtccggtgacggaatcgtcgtgggttaccgtgaaccaagattggggtttggcttttggtgggctcgatttgg

SEQ ID NO: 13739 - DNA, 295 bp, Setaria italica
  Peptide Sequence Number=SeqID_79713
ggatccccacatccgcggccaagtacccatgacgacgcggctgacagcgacgtcgctgctctccagaaccctccgccgcggcgtcacctcgcgaatccccccgagacccttcgcgcccctcggcctcgaaccatccgcagggatcccccgttcccagcccaggccgtcctactcgaccgcctcgggagatccgggccaggagccaccgccggccatggactccccgatcaaggttgtttcccacctagggggcggaggcggaggacggggatcaggagaggggggagcggcggcg

SEQ ID NO: 13740 - DNA, 280 bp, Setaria italica
  Peptide Sequence Number=SeqID_79714
catcatttcaaatttacaattaatcgtataattccatttttcaactatgaacgtgtatgtgatatctatttgctgtttggaaggacatggatgaactaaagaaagaagttagagaggctcgaaggatcaaaatgttgcatcagccaagcaaggcaatggatctggaaaacgaaatacggattttacgtaagacatttgctgagaagtccacagattgtgttaatctcttgaaagagttggaactgcataaaaggttaaaagaaaatagtaccccatcatt

SEQ ID NO: 13741 - DNA, 826 bp, Setaria italica
  misc_feature (814)..(826): n is a, c, g, or t
  Peptide Sequence Number=SeqID_79715
gtgcttcaattgaatggcattgagcagccaaaagagtcagttcatgttctcaatgtcggaagactgcggatgagacttactaaagggaagtcagtagttgccaaggaattctattcctcatctatgcagttatgtggtgttagaggtggtggtgaagcagcctctcaggcaatcttttggcaacccagaaacgacctcagcttggtgctggcctttgagaccgctcgagaacgtaacacagccatcatgcttgctcggcgattcgctatagattgcaatatcatccttgctgggccaggtgacaaaactccctggtagaggaaggtggcactggtagtgctcctcatatccaatggctcctgtcggtctgcgacccgtgcagtgatgtacatttgcgtgcacagcgtgtttgcatcagttcttcctagtttcttgttcagtctgggctgttctgctcttcctcgtgctgtaggtttctgaaagaaggcgccgtgcgcaccgttttaaccacctcggcgccatctttctatctcactgtgctgtgttttttcagttgcgagcgttgtgatctgttgctagctgtgacagctaagcttgatgcggaacacatctaattgtgtttgacatatgttagtgttgatgttgaagcagtggtaggtaataactaatatgcatggggaacaaaaccttaccacccgccttagtgtctcttgttgaatgatacaactgtacgataaggtttgaaatacaactgtaatatgtaactctaatttctatggttgaaatgatagttcttgcctgtgcacgcaaatgnnnnnnnnnnnnn

SEQ ID NO: 13742 - DNA, 1907 bp, Setaria italica
  Peptide Sequence Number=SeqID_79716
gggcggagagagagagagcgcgaggcgcgagcagaacccgcgcagaaaagcaactacctcccctccctttctggcccgcaccgccctcgccctcgccctcgcaagatccccaatctcgccgcaggtttctcgccgcaggtttctcgccggagcgaccaccaccgcggcgcgggcttgccgattccgcggcccgcagttctctccatgctgctgctgtgagtcccgcgaatcgattcgagctctgttggcgtggaggaggccgcccgagccgcggccaaggcgcgcgcattgcgaggattgtgacgtatttcatagatgacgagggctgcaactctttatggggccaagacacagactgagaccctacggccagggccattgcgtccagcaaatatcatcaggagtaaatttcctacatacaagaatggttcaaatggtatagtgatcaagctggctgatggtccagaaataccacctctcaaggagattgttgcaaaggagactgcagatctacttgatcgtcgtcagcgtctctctgtccgtgaacttgcaatgaagtttgagaagggtctcaatactgctacgctgttgtcgaatgaggttaaatggagacaagtagctttactggagagggatatccttttgaagaatctaaagagtgtattagagtcactgagaggtcgggtgactggcaaaactaaggatgaaatcgaggagtctatatctatggtggagatccttgcagttcagctctccaaaagagaagctgagttgcttcagcaaaaagaagaggtcacgaaattagcaaaatcattaaagcaggcttctgaagatgcaaagagaattgttgaagaagaaagagctaatgcccatacagagatagaaagtgctaaggatgctgtccaaagagttcagcaagcagttcaggagcacgagaagatgtgccaaagtactgggaagcaagacatggatgaactaaagaaagaagttagagaggctcgaaggatcaaaatgttgcatcagccaagcaaggcaatggatctggaaaacgaaatacggattttacgtaagacatttgctgagaagtccacagattgtgttaatctcttgaaagagttggaactgcataaaaggttaaaagaaaatagtaccccatcattcgatttggagggtctccaatgcttaggctcagtcctatgtatagttgctctgagtggtactcacatggatttgtcaaatatttcaatccagtggttccgcatacacccaaaagaaagcaacaaagaaataatttcaggtgccacaagaccagtatatgctctagagccacatgatgttggacgctatttgcaagctgaaattgatgttggtggtgaaattgcagtagcaaagacagctgggccagtagaccctgatgctggattggtggattatgtggagacactcgtaaggaaacctgaaacggagttcaatgttgttgtgcttcaattgaatggcattgagcagccaaaagagtcagttcatgttctcaatgtcggaagactgcggatgagacttactaaagggaagtcagtagttgccaaggaattctattcctcatctatgcagttatgtggtgttagaggtggtggtgaagcagcctctcaggcaatcttttggcaacccagaaacgacctcagcttggtgctggcctttgagaccgctcgagaacgtaacacagccatcatgcttgctcggcgattcgctatagattgcaatatcatccttgctgggccaggtgacaaaactccctggtagaggaatctagtctttggttgtcttggtccttttgtagtaccgttctttcgttagttaacgtttaactttactttagttttccttttattttttcttttatttttgtttta

SEQ ID NO: 13743 - DNA, 261 bp, Setaria italica
  Peptide Sequence Number=SeqID_79717
tcccggtccgccagcgcgtggccgtctgcatctggcgcctcgccaccggggagcccctccgcctcgtctccaagcgcttcggcctgggcatctccacctgccacaagctcgtcctcgaggtctgcgccgccatcaagtccgtgctcatgccccgcttcctgcagtggcccgacgaggccgcggcggcgcggttcaaggccagcttcgagcgcaccgtcgggccgtccccggcgtggtcggcgaccaatagtaacaaccaac

SEQ ID NO: 13744 - DNA, 276 bp, Setaria italica
  Peptide Sequence Number=SeqID_79718
cccgacgccgccgccgccgacgccttcaaggcccgtttccaggccgactcggggatcccgggcgtcgtcggcgccatctacaccacccacatccccatcatcgcgcccaaggtctccgtcgccgcctacttcaaccgccgccacacggagcgcaaccacaagacctcctactccatcaccctgcagggggtcgtcggccccgacggcgccttcaccgacgtctgcatcggctggccgggctccatgcccgacgaccaggtcctcgaccgctccgcg

SEQ ID NO: 13745 - DNA, 294 bp, Setaria italica
  Peptide Sequence Number=SeqID_79719
gtccgggttccttcgtcagaggtgtgtgaaccaggacgtgaggtcctcgccggcggcgtttccggcgccggcggcggcgttcgaggcgccgttggcgatggcggacccgaggaagagggccgcggagtaccagctggcgccggaaggggaggcgtcggggtgaagcggcagcggtccccgaccagctcccgggagaacagtggcgggagcaatgacggcgaccatgagctttcgtccgccgcggccgggggcaggggcggcgggcggcggctctgggtcaaggagcgggaccac

SEQ ID NO: 13746 - DNA, 307 bp, Setaria italica
  Peptide Sequence Number=SeqID_79720
ggagctgagtgtgaggagctccatcagcatcgcctggcgcggtggcctttgtaacataaaaaagggggcgggaggagaagaaagaaagaaaggcatgtgtaaagatgttggtgtaggttcattattaggaagatggtgattgtgctgtttgccgcatgtgctgctgctgctgctagttagtagtagtagtagtagtagttccttgcattaacgggaaaaaaactatcttctttgtttattttttttcacgtagtatttttaactgggtgctgctgtacctggagaagagaatactgtttctggtggt

SEQ ID NO: 13747 - DNA, 271 bp, Setaria italica
  Peptide Sequence Number=SeqID_79721
gttctgctgataggccaggctgtggggcaaaaattctccgaggagacggtgcattggatcagtacataacaagaactaacgtgatgaatttacgggtagggtgctgtcaagcaagaaacagtaaaaccaaacattttctttcttacacaattgtccatctttggtattaccgagaaatttctttgctttactctgtggtattatattatatccttgtaggtgcaaattagcactggaatggaaaatagacctcttcacctgctctgactaa

SEQ ID NO: 13748 - DNA, 214 bp, Setaria italica
  Peptide Sequence Number=SeqID_79722
aattaaaccatatcttacaaggtcaccactctcaacagattctaacaaagatcagcttgttcaggttttgacggaaccaaagaattcactttccagacaatacaggaaaatgtttaacttgaacaaagttagactgcacttcactgatggcgcactgaggttaatagctaagaaggcgatagctaaaaatactggtgctcgtggtttaagagcc

SEQ ID NO: 13749 - DNA, 2266 bp, Setaria italica
  Peptide Sequence Number=SeqID_79723
agcgtcctcctcctcctccccggcctccgcccacctcggccatgttccggaccttcacgaagcttcgggatgcagcggcgccgctcgcgtcgtcggcggtgcggcggtgctccggcgggagccggatccgggccgacgccaattgcccgcgctgcgacgcccacatgtcggtccaattctccctccagcagctcccggcgccaccgccggccgccgcaggggtcgtagatgcctcccagaaccacaaacacgacggggagggtgtgtgcccggcgtgccgggcggcgttcctgttccgcgcccaccggatcgacccgctgcggggcgcgttcctcgagatccccggcgccatcgggggcgaggaagaggacgcggataggggaggcttcgccgatcggatcaagaggatgttatcggagcgcccgccggatgagttccccccgttgccgcaatcgcccccgatgccgatgccgcactatcatccgcgacggaaaaataacaggaggagacagaaggaggaaggaggtggaggtggcggcggcggcggtaacggcggggactcatcgtcgggaggggagggtacgagcgcttcgcctaagagggagtggtggggtggagccagcctgggcgatgagctgccgacgcctcgggagatgtgccggaggcttgacgagttcgttatcggccaggccaaggcaaaaaaggtgctatcagtagctgtatacaatcattacaagagaatatataatgcaaatgtacagaaagaatctgttgccaattctgggtttcctgacgctgcacaagatgatcaaaatattgtagaaatagataaaagcaatgtactcctgatgggcccaacaggctcaggaaaaacattgcttgcaaaaacattagcacgtattgtaaatgtaccatttgttatagctgatgcgacatcattaacacaggctggatatgtaggggaggatgtagagtcaatactgcagaagttactagtggctgctgagtataacgttcaagctgcccagcaagggatagtgtacatagatgaaatagataaaataacaaagaaggctgagagtgcaaatgtcagtagagatgtatctggagaaggtgttcaacaagcattgttgaaaatcctagaaggaactgttgtcagtattcctgagaaaggatcgcgcaagaattctcgcagtgaaagtatacagatagacacgaccgatattcttttcatatgtggtggtgcttttgtagacttggaaaagactatttctgaaaggcgccaagattcatctataggatttggggcacctattcgtacaaacatgagaagttctggagctagcagtccaatgattacttcatctttgttagaatctgttgagagtggtgaccttgtaagatatggtttaattccagagttcactggacgtttgcccattctagttagtctggcagctcttaatgaagatcagcttgttcaggttttgacggaaccaaagaattcactttccagacaatacaggaaaatgtttaacttgaacaaagttagactgcacttcactgatggcgcactgaggttaatagctaagaaggcgatagctaaaaatactggtgctcgtggtttaagagccatcttggaaaccattctattggaggccatgtatgagatcccagatgagaaagcaggaaatgagcgagtagacgctgttgtggttgatgaggaggcaattggttctgctgataggccaggctgtggggcaaaaattctccgaggagacggtgcattggatcagtacataacaagaactaacgtgatgaatttacgggaaactaacgatggtttggccggggaggctcgaggaagcgtacatgctgtcgagaattgttagtttgtaactggaaaacgccgggagaagcgtagatgctgagttctgaccgacttcgtacatcatgtaacatgtctacccaacactcacacaagctctttactgctcaccaaatcgcctgtaatctgttccattcctgctgagctctgacgagcacatagatcgagggcgccatttgttgtaattgatgtaaagagttgccttttgattgagcaaccgtcctgccaagtaaattgttccccatttttttccccctgctgcccgaactgggcagctgagctcaattgttgttgggaaagctgtaaagatcatcattttactgatatgataagaaggcacattttcacaaggcctacacaggatcaagttttaaaaaa

SEQ ID NO: 13750 - DNA, 1560 bp, Setaria italica
  Peptide Sequence Number=SeqID_79724
aggccgccgccaggtccaagcgctccaggcttgccgcgtcggccgccgcggccgtcgtgtccgccgaggagtcggcgtccgcggcctccgcgtcggggtcgccgccgcgcgccgcggggcagggtggacaccaccagcgccggctctgggtcaaggaccggtcgcgcgactggtgggacaagtgcagcagccccgactacccggaggaggacttccggcgcgccttccggatggggcgtgagacgttcgacatgatctgcgacgcgctgggctccgcggtggccaaggaggacaccatgctccgcgccgccatcccggtccgccagcgcgtggccgtctgcatctggcgcctcgccaccggggagcccctccgcctcgtctccaagcgcttcggcctgggcatctccacctgccacaagctcgtcctcgaggtctgcgccgccatcaagtccgtgctcatgccccgcttcctgcagtggcccgacgaggccgcggcggcgcggttcaaggccagcttcgagcgcacctcgggcgtccccggcgtggtcggcgccatgtacaccacccacatccccatcatcgcgcccaagatctcggtggcagcctacttcaaccgccgccacacggagcgcaaccagaagacgtcctactccatcacgctgcagggcgtcgtgggccccgacggcgccttcaccgacgtgtgcatcgggtggccgggatccatgcccgacgaccaggtcctggagaagtcgatgctccaccagcgcgcggcggccgggatgatgcgcgactcgtggctggtgggcggcgccagctacccgctcatggactgggtgctggtgccgtacacgcaccccaacctgacgtggacgcagcacgccttcaacgagaaggtcggggagctccggcgcgtggccgtcgaggcgttcgcgcggctcaaggcgcggtgggcgtgcctgcagaagcgaacggaggtgaagctgcaggacctccccgtggtgctgggcgcctgctgcgtcctgcacaacatctgcgagctccgcggcgaggaggtggacccggccatccggtgcgagctggtggacgacgagaccacgccggagaaccccgtgcgatccgaggccgcgaagcgagccagggacggcatcgcgcacaacctgctccaccgcggattcgccggcaccgcattcttctgaagttctgatcaccgatcgcctcgtctctctcccctcatgctctgtttgggtttctcctctttggtacaaactgaactggtacaaaaacaagtagccattcttttagccggtagtagcctagaagaaagatttttgtaggattgatgcaagtagcagctgtagttgggtgagtctcttgatgattgatctagacgggaaaacaaccaacacaaaaggcggtgtaattaatttaagggatgtgatgtaaacatctggtggaaaattttgggcagatgctgctccaagttcatctgcccaaaattttcctatgttgaaatatatacagtttaattcggaaaacgaaaaaaaaaaaaaaaaaaaaaaa

SEQ ID NO: 13751 - DNA, 1718 bp, Setaria italica
  Peptide Sequence Number=SeqID_79725
cggcctggggcggcacgccgacgccataccagtcctcgagcgcgccgttgcggtcgtcacgccgcccccgccagcagagggcgaggccgacgaccagcagccgcagcaggagcccgaggccgaccagaggggcgaggactggtccctcgccgccttctccggctggatgcagctcggcgacacgcacgccatgctcggccgcatggacgagtccattgcatgctacggcaaggggcttgagatccagatggccgcgctaggcgagcgcgatccccgcgtcgccgagacctgcaggtacttggcggaagcacacgtccaagctctgcaattcgacgaagcagagaagctgtgccgcaaagccctcgagatccaccgggagcacagcgctccggcatcgctcgaggaggcctcggaccgccgcctgatggccctcatccttgatgccaagggtgactacgacggcgccctcgagcacctcgtgctcgcctcaatgaccatggttgccaacggccgtgacatcgaggtggccaccattgatgtcgccataggcaacacctatctcgccctcgctcgcttcgatgaggctgtcttctcctaccagaaggcgctgactgttctcaaatcggcccgtggcgacgaccatcctacggttgcatcggtctatgtccgcctcgctgacctctaccaccgaacaggcaggctccgggagtccaaatcctactgcgagaacgccctgcgtgtctatgccaagcccgcgcctggtgctgcccctgatgagattgctggaggcctaatggagattgctgccatctatgaggcacttggcgatctcgatgaggccctaaagcttcttcaaagagcactcaagttgctggaggactcaccagggcagtggagcactgttgcaggcattgaggcacagatgggtgttctgtactacatgatagggaggtatgcagattcaaggaactcgtttgagagtgcggttgccaagttgagggctagcggtgaaaggaagtcggcatttttcggtgttctgttgaaccagatggggctagcttgcgtgcaactgttcaagatagatgaggctgcacagctgttcgaagaggcaagggcagttctggagcaggagtgtggtgcatcgcatccagatactcttggtgtatacagcaaccttgctgcaatctatgacgccatgggaagagtggaggatgcgatcgagatcctggagcacgtcctgaaggtgagggaagagaagcttggcacagcgaaccctgacgtggaggacgagaagaagcggctggcggagctcctgaaggaggcggggcggtcccggaaccggaagcagaagtcgctggagaacctgttcgggtccaacgcggcgcgggcgaagaaggaggccgggaggaggtggtctaacttcgggttcaggagctgagtgtgaggagctccatcagcatcgcctggcgcggtggcctttgtaacataaaaagggggcgggaggagaagaaagaaagaaaggcatgtgtaaagatgttggtgtaggttcattattaggaagatggtgattgtgctgtttgccgcatgtgctgctgctgctgctgttgtgtgtgtgtgtgttccttgcattacgggaaaaaaactatcttctttgtttatttttttttctacgtagttatttttaactggtgctgctgtacctggagaagagaatactg

SEQ ID NO: 13752 - DNA, 2000 bp, Setaria italica
  Peptide Sequence Number=SeqID_79726
tggttgatgaggaggcaattggttctgctgataggccaggctgtggggcaaaaattctccgaggagacggtgcattggatcagtacataacaagaactaacgcaccgtctcctcggagaatttttgcccaacctccagaccttcagatcgctcctcatccatttctcgacatcacaagcgaagctcgatcaccatccagaaccacagcgaagatcagtctccggtccttccttgttgcagcctccatcgatcccacccacctagatgagcacctcgtacaccgaggcgcagctcggctccttctttgacctgcccgccggcgaggacctcacgtcctggttcacacacctctgcgaggaccaggcgccggcggcgtttccggcgccggcggcggcgttcgaggcgccgttggcgatggcggacccgaggaagagggccgcggagtaccagctggcgccggaaggggaggcgtcgggggtgaagcggcagcggtccccgacccagctcccgggagaacagtggcgggagcaatgacggcgaccatgagctttcgtccgccgcggccgggggcaggggcggcgggcggcggctctgggtcaaggagcgggaccacgagtggtgggaccggatgagcagcccggcgtgccccgaggaggagttccgccgcgcgttccggatgtcgcgggccacgttcgaggccgtctgcgaggagctgggctccgccgtcgccaaggaggacaccatgctccgcgccgccatccccgtccgccagcgcgttgccgtctgcatctggcgcctggccaccggggagccgctccgcctcgtctccaagcgcttcggcctcggcatctccacctgccacaagctcgtgctcgaggtctgcgccgccatcaaggccgtactcatgcccaaggccgtgcagtggccggaggcccccgcggaggtgtccgcccagttcgaggccgcgtcggggatctccaacgtcgtgggcgccatgtacaccacccacatccccatcatcgcgcccaaggccaacgtcgccgcctactacaaccgccgccacacggagcgcaaccagaagacgtcctactccatcacggtgcagggcgtggtggacgcggcgggcgccttcaccgacgtctgcatcggctggccgggctccatgtccgacgccgacgtgctcgaccgctccgcgctctacgcgcagcgcggcgccgcggggaggctgcaggggcagtgggtcgtcggcggcgccggctacccgctcatggactgggtgctggtcccctacacgcaccagaacatgacgtgggcgcaacacgtgttcaacgagcgggtggacggcgtgcgcgccgtggcgcgggacgcgttccgccgcctcaaggcacgctgggggctgcctccagaagcgcaccgaggtgaagctgcaggacctccccgtggtgctcggcgcctgctgcgtgcttcacaacatctgcgagtcccgcggggaggagatggacccgggcctcatctgcgacctcgccgacgacgagacggcgccggagaacgccgtgcgctcggacagcgccagcaaggccagggacgacatcgcgcacaaccttctccacagcggcctcgccggcaccaaattcttctgaatccggttgatcgatggattggtacggcgtcactgcaagcattcgttcctgcatcgtcgccggtcgccgacggttcgatcgatcctctcttcggcttatctactattacttgttcatggccattttcattggaatcatcgatggaattgattctttataatttagggaggtcatcctcatagaacacacagatacacagggattaaaccgtgggttcgttttttgacaggatttagattagtatatagtacatatccaagagcaagaaaagaaaccacatgcgttttcctttggttatttattatgacatcatgtgaaaaagacccagttccagagaggaaaaggaaattgaaaaaaaaa

SEQ ID NO: 13753 - DNA, 333 bp, Setaria italica
  Peptide Sequence Number=SeqID_79727
cacgtacgcccagggcggcggcaggggggaacgcgagctccacacattatccaagcagcacacgcaaagatctacaggcttatgtcatggtgcgtggccgtgttcttattctggagcgtgcgtgtgtctcggcaacgggtggctgcgcttcggacgacgcctatagggtgggggcgtgggctcgtggccatggagatgacggcggctactcccctcgttgaggagtgacggccgcggccgtggcctcggcgtcgtcgacggcggcgtgtttttacctctctactaaggtagggcaacttgtatcctttggcaattgttctggtctgatctggg

SEQ ID NO: 13754 - DNA, 770 bp, Setaria italica
  Peptide Sequence Number=SeqID_79728
catggttctatctctaactgtcctctacaatcgatatcttaaaacaatccctttgaggcaccttatcggtggagttcagatgctatatgccgtggcagttctgtcggatttggtcctcgtgaaacaaataaacctaatgctagggataccaaatgagatccatgtgctttgtttctcagctcttgctgaagcaattgctcagttcaaggtgctgcctttctctgttttgctgtcaagtctctgcccacctggctgcgaaggttctctattcgccttcttcacatctggactggtattttcagcaatagtaagtggagtattcggcgttggattgtccactctaattggtgtgtcctctgtggactactcaaaacctgcctctgggtattttgctgcaaagtttggctgcactgcttccattgggatggatatcctttgtacctgaaaatggaatgctgatgagaaggttgtgatgcaaagatgatcaaagtggtgttttgaccatagaaagcacaaggcaaggttctttagtcctgttagataatgacacgatatagaggaatgtcgctcacccagtcaacactgagtgaggttagatgtatatagtataggtatctagattcccttcaatcggaatagttcttctgattactgtacatctgtaatacggaatagcgcttatgcttcctgcggattataacgcaaggttgcattgaattagtcatgtcgtgaaaggtaaatttgataagcaaattcctcccaaaaaaaaa

SEQ ID NO: 13755 - DNA, 283 bp, Setaria italica
  Peptide Sequence Number=SeqID_79729
atgtcagtaccagttattctacagagggaaagccaaaggttcattttggtatgagccggtttttcaggtcaaaaccctggaagggaagctgctttggaggcgcagaaggtaccgtgtgagaagagctagcactcctggtacattttacttcagtgtgttggataatggtgtcatttccaaagaattctggacaattgttgatgttgcaggaggatttcagttggggtctgttccattatcatggtgcagcacaggctgctggctatcttacactggagcagtg

SEQ ID NO: 13756 - DNA, 743 bp, Setaria italica
  Peptide Sequence Number=SeqID_79730
taaaaatgggactattaacaatctgttgggcctgcctaacagagtgacgctcatagtgtttcagtgatgttgctttatatgctagtcgccacacttgcgaattttatatgaagtatctagctgaatccttatagtaaatcttgtcagtattgttccatctcttatgcctcagaagtttgaaactgtggttcagtgtccccaaagaattctgattctgcactggaattatcaaaacttttgtacccaaactagtattttagttgtacagtacgtttcaatgtttataaatggagcttccttagtatattaaataagcttctttatctgaattagatcacatcatatgtcgaactgcaacttgatttcaaacatgaagagcccttgttaaacctcaatgattccaaactgcaacgaggcaatgagcttttgatctcacaaactctcgtttttgcaggttctccatcaggtggtggcaagaactccggtcatcgcactctgtcagtcggtttcccaggattgatgagcttgttcctagctttgtgggctgtgttggcataagatcaagcatgctattaccagataatgtttgtttgatcccgccgtagatgattaattgttacgatcttctgagacggtgatgctatggctgtgttaagatacaatcaacatttgttttgctgtgtattgatgtgatcagccagtagagtgatgtacctgaaccgtgatttctcattggtttcttc

SEQ ID NO: 13757 - DNA, 833 bp, Setaria italica
  misc_feature (759)..(833): n is a, c, g, or t
  Peptide Sequence Number=SeqID_79731
ccaaacgaaaaaaaaaagggacagcagcaaggggagagaagaggaggcagcccacactacacggagaagaaagatggcgacgtggatggcggtggcggtcgtggcggtgatgggcgtgctggcgcctcccgcggcggcgcagacgtcgagcacgccggactgtgctgcgaagctggcgccgtgtgcgccgtacataaacacgacggggatgccgccggacacctgctgcggcccgatcaaggaagccgtccagaacgagctgaagtgtctctgcgggctctacgcctcgccggagatcttcaaggccttcaacatcaacgtcacccaagccctcggcgtctccaagcgctgcggcctcagcgacaccactgaggcctgcaagggccttgctcctacacagtctcatccaggttctccatcaggtggtggcaagaactccggtcatcgcactctgtcagtcggtttcccaggattgatgagcttgttcctagctttgtgggctgtgttggcataagatcaagcatgctattaccagataatgtttgtttgatcccgccgtagatgattaattgttacgatcttctgagacggtgatgctatggctgtgttaagatacaatcaacatttgttttgctgtgtattgatgtgatcagccagtagagtgatgtacctgaaccgtgatttctcattggtttcttcattgttctttattagacatagatatagataataaaatcaaaaattctttagtaaaaaccnnnnnnnnnnnnnnnnnnnnnnnnnnnnnnnnnnnnnnnnnnnnnnnnnnnnnnnnnnnnnnnnnnnnnnnnnnn

SEQ ID NO: 13758 - DNA, 1286 bp, Setaria italica
  Peptide Sequence Number=SeqID_79732
gcaatctgcaaaggctaagcacttcgaaaaaaatctccactaaaataccatacccttgcaaagcatctataaaagcaggaaggccccagaacccgcaaagcacaaagcatcacacttgcacagttcctccactgtctactactactctactccaccctcctccctcaaggcccccaagcctccagcttcaccgaggcgtaccggcaccggcagtgagcagctgggagctatggctccgccgctactgctcgtcttcctcctcctcccggccctcgccgccggtcaccagcatccgtcctccttcggctcctccgccctctccgagtggcgccccgccaaggcctcctactacgccgccgaccccgaggacgccattggtggggcttgcgggttcggggatctggggaagcacggttacggaatggcgacggtggggctgagcacggcgctgttcgatcgcggagcggcgtgcggcggctgctacgaggtcaggtgcgtcgagaatctcaagtattgcctccccggcacctccatcgtcgtcacagccaccaacttctgcgcccccaactacggcctccccgccgacgccggcggccactgcaacccgcccaaccaccacttcctcctccccatccaggcgttcgagaagattgcgctctggaaggccggcgtcatgcccatccagtaccgccgtgttaagtgcctccgtgaaggtggtgtcaggttttctgtcaacggtcgacacttcttcttcacagtcctaatcagcaacgttggtggcgcgggtgatgtgagatcggtgaagatcaaaggaacggagtcaggatggctctcgatgggccgcaactggggtcaggtgtggcacatcaactgtgacatgaggggccagcccctgtccttcgagctcagctcaagtgatggcaagacactgaccagtttcaatgtcgtgcccaaggattgggaatatggtaaaacatacaccgggaagcaatttctgctgtagaggagtaccaaaagatcagcttacggtttctcatttttgttctgatcctacgagtcagactggtgtatattcctgcacggaacaagcaatatcattaggagaaaattggcctcagatagttgctcttgctcataaatgcattttcatgtaccccctgatagttgctctacagaggcttgatgtatcaatcaaaatagaaggccgtatttgggtcattggatgtctccactgtataacaacgttttaccaggcaagcaatgataatagtatctctgcacttact

SEQ ID NO: 13759 - DNA, 239 bp, Setaria italica
  Peptide Sequence Number=SeqID_79733
acacagtcactagcatgggcttgcagtaacactacagttccaggcatttactggcacacaccaaaccaaattcttgttctcaaaagtttgctttgccttgtcagaaaaaaatggactcttttggtgggaaaattgtagaattgattgacagtttgatcatgtcactgatcagtgttggaatgtgtagtagtactgaataatgagtatgaactgttggctgttgccatgtcatttgagaa

SEQ ID NO: 13760 - DNA, 821 bp, Setaria italica
  misc_feature (1)..(18): n is a, c, g, or t
  Peptide Sequence Number=SeqID_79734
nnnnnnnnnnnnnnnnnncgtcactttttttagtattgacccgcgaaaggagtgttttcgttgatcagaaatcagatggcagcggataaacttagttcaaacatttcatatccagtacagatgacacctgactctagtagcccactaatcccatgggagttcaatcaaccacccaatacaaggctttaagtcttagacaattctaggtagaaaccgcataaataaactacaggtagaagttgaacctagtggccacccctcagagcaagcacaagatggagcaccgagccaccttcgatgttgtaatccttggcggttttgtcatcagcaagttgcttcccagcatagatgagcctctgctgaacaggtgggataccctctttctcctcaacacgctccttgatcctatcaatcgtgtcagtgggctcgatgtcaatctcgatttccttcccggtaagagtcttcaccttgatcatagttccacccctgagcctcaggaccaaatgaagggttgactccttctgaatgttgtagtcagctaacgttctcccatcttccaattgcttaccagcaaaaatcagcctttgctggtctgggggaatgccctccttgtcctggatcttggccttgacattatcgatggtgtcgctgctctcgacctcgagcgtgatggtcttgcccgtcagcgtcttcacgaagatctgcatctcgccgggctgctgtccgcgatctccagctagggttttacggcggctcctctctccctcacccaacccaagcaaaggttcctttgcgggatcgattgatgatgattgatgttg

SEQ ID NO: 13761 - DNA, 915 bp, Setaria italica
  Peptide Sequence Number=SeqID_79735
taatcctcccattgaccgtttccatcaccggagccacaggtttcattgggcgcagattggttcagaagcttctatcggatgatcacaaggtttgcgtcttaacaaggtctgccaccctgcatatccattccgttgcagcttccacgtaccccggagtcacaatagccgatcaaggagagtgggaggcatgcgtcagaggctcctctgctgttgtcaacttggctggcatgcccataagcacaagatggtcaccggaggtatacgccgccttgctttgctttgtctcttccatccacactagataatatagcaccttctcttttgcagattaaacaggaaattaaacggagccgggtcaatgttacatcaaaggtacgtgcctgtttcctctggtctggattatcggctcctctagctattcgattagtataataattcaactagtcgggtcctaacttgattattgctcaaggtggtgaaatacataaaccatgctggaaatgctgacgctcaaccctcagtgtttgtgagtgcgacagccattggatactacggtacacatataatccatgaactagccatctgatcttgccgatgccaatgagctagcatccatcggtttaatctgtagttgaaagagaaacagtcactactcgagcaatccatctgtccaatcaatgtcatgcatttatgctgcaggtacaagcgaaatccatagcttcgatgaatcaagtccatcgggcaatgactacctagcagaggtgtgcagagaatgggaggccacagcacgtcaagtaaaccaggagaatgttaggcttgtgcttctccggattggggttgttcttggcaaggatggtggcgctctagcaaagatgatccccttttcatgatgtttgccggcggtcctcttgggac

SEQ ID NO: 13762 - DNA, 471 bp, Setaria italica
  Peptide Sequence Number=SeqID_79736
ttcctcaagctgaagcccaagcctccgatcggaggatgttcgcggccgaggccgagctccacggcggccgctaagcgtaggctcacgcgcctgcgctgcgccctcaactctgacaataatgtggttcagttacttgcttgctctagatgatgattgattgattcatctctctgcctagaactaactactccgaagagacttccgctcatcctgcagatccatgcttttgtttcagcctcccatgaccgtttccatcaccggagccacaggtttcattgggcgcagattggttcagaagcttctatcgggtctgctccgatccctagctgtatctgtatatatacacatggactagcagccatcatctttgatcacattgcatctgctgcatacatacgcacctgacctgaccatgcagatgatcacaaggtttgcgtcttaaaaaggtctgccaccaaggctaaatctacg

SEQ ID NO: 13763 - DNA, 426 bp, Setaria italica
  Peptide Sequence Number=SeqID_79737
actagggaatacctagttaattccatttccagacagatggatttgattagtgcattcaactttgggacaatacctgtgtgcgtgttgtactccctactacatttactgacttagtgccatatatctacaatgaattgattgctaggttctcttggattcatctggacgacctggtgaacctcatctacgaatctttaactaaccctgcgtacaaaggtataatcaacggaaccgcacccaatcctgtgcgcttgtcggagctgtgcgaacggctggggcgaatcgtcgggcggccctcctggttgcctgtgccggaattcgcgctcaaagcggtgcttggggaaggtgcttctgtggtgttggaaggacaaaaggttgttcctgtgaaggccaaggatctgggcttctcctacaggtaccccctat

SEQ ID NO: 13764 - DNA, 1485 bp, Setaria italica
  misc_feature (1475)..(1485): n is a, c, g, or t
  Peptide Sequence Number=SeqID_79738
agcaagcggtatctcctgctgctgctgctgctgccgccgcccgctgccatgggtttccccacccccttcctcaagctgaagcccaagcctccgatcggaggatgttcgcggccgaggccgagctccacggcggccgctaagcgtaggctcacgcgcctgcgctgcgccctcaactctgacaataatgtgcctcccatgaccgtttccatcaccggagccacaggtttcattgggcgcagattggttcagaagcttctatcggatgatcacaaggtttgcgtcttaacaaggtctgccaccaaggctaaatcagtctttcctgcttccacgtaccccggagtcacaatagccgatcaaggagagtgggaggcatgcgtcagaggctcctctgctgttgtcaacttggctggcatgcccataagcacaagatggtcaccggagattaaacaggaaattaaacggagccgggtcaatgttacatcaaaggtggtgaaatacataaaccatgctggaaatgctgacgctcaaccctcagtgtttgtgagtgcgacagccattggatactacggtacaagcgaaatccatagcttcgatgaatcaagtccatcgggcaatgactacctagcagaggtgtgcagagaatgggaggccacagcacgtcaagtaaaccaggagaatgttaggcttgtgcttctccggattggggttgttcttggcaaggatggtggcgctctagcaaagatgatcccccttttcatgatgtttgccggcggtcctcttgggacaggacgtcaatggttctcttggattcatctggacgacctggtgaacctcatctacgaatctttaactaaccctgcgtacaaaggtataatcaacggaaccgcacccaatcctgtgcgcttgtcggagctgtgcgaacggctggggcgaatcgtcgggcggccctcctggttgcctgtgccggaattcgcgctcaaagcggtgcttggggaaggtgcttctgtggtgttggaaggacaaaaggttgttcctgtgaaggccaaggatctgggcttctcctacaggtacccctatgttgaagacgcgctcaaggccattgcgcaagacttgtagattgccaatgaccaacaactcttctcactacacgaaattaaagtaggacctttgtcaccacatgcgtgcatatactgtgcagatatacctcatcaattcgagaatggacatatcaattctagtaagtcgactacattgttgttttatcaattctagtaagtcgactgcattgttgttggaaaccattcaggctactgtaaccattctagcgtgttggatgggctggtcacagaataagctatattctatggccgaccatagaggatactctctgtacattgcgtggtcggtggtaaaaggggccaatgttgaaaaagctaaatattgctcgggtgttttgacgactaaaaaaaaaaaannnnnnnnnnn

SEQ ID NO: 13765 - DNA, 871 bp, Setaria italica
  Peptide Sequence Number=SeqID_79739
ttggcgcaagagcctgcacagcaaaatgatgttatggtgatattgagtaatgactaatgagtatctacaattctgcactttcgtgccttcctttgcttggcttgctgaagaatactcatcatgctggtgtcactctccatttcaacggctgtttacctgttgcgagatcagatcagaaatgaagcttcttgtggttaatggccagcagcaggctctgattttctcctacgcatttcagcatccatatcaatattcctcacccgttcagccttgttgacagcttggattaacttggcgtcatgagcaggatctaggtacacgtagtcttgtacaaatattcccacacgattatcaatcagcttccaacgaccaacaatttctgtgtttgtaaaatattgttctccacaggcaattttctcaaagccatttaccccctcccaccaactcccaatcggatgcacaatccggattccttggtactcacagtaacagcaacggacttgcgttggtagaccgcacacagggtagcaaatgggttcatagttactgtcttcatcattactaaattcggcgaaaaacaatgtagatgttccattatcttgacttgcccaaaagttggcatgtgtgtactgaaactttgtgtccgaaaatccctgttaccttgccaacacgatcattcacaccacaaatgacacctagatcataataacagcccttagattgctcatagttccgcactgccgcttcaacctttccacggacaaaactttgttgagtgaggaaatcttgcttgtagtttgtgatctggtttaaggcatcttcagttagatggataattggttccagagattcaacacttgaaaatgatagc

SEQ ID NO: 13766 - DNA, 2044 bp, Setaria italica
  Peptide Sequence Number=SeqID_79740
cctcaaccaccccccgccgtgctgggtcggtccacgcaagccaggcctccaccggcgccggcgaccccgcggcggcatggacaggctcggcgctaacccggccaactcgtgcccgctcacgccgctgggcttcctggagcgctcggcgaccgtgttcggcgactgcccctccgtcgtataccacgacaccgtcttcacctggtcacagacgcaccggcgatgcctccgcctcgcctccgcgctcgtctccctcggcatctcccgcggcgacatcgtgtccgtgctgttgcccaacgtgcctgccatgtacgagatgcacttcggcgtgcccatgagcggcgccgtgctcaacaccatcaacacgcgcctcgacgcgcgcacggtcgccgtcctgctccaccactcgggttccaagctcgtcttcgccgacccggcctcgctcccgctcatccgagacgcgatgaagcagctcccgcccgggcacccggcgccgcgcgtcatccccgtcgaggacccccacgagaaggagttcccggccgccccgcccgggaccttgacgtacgagaggctcctcgagaagggcgatccggagttcgcgtgggtgcgaccggccagcgagtgggacccgatgatactgaactacacctccggcacgacgtcggcgcccaagggcgtggtgcactgccaccgcggcatcttcctggtcaccatggactcgctcgtggcgtgggcggtgccgccgcagccgacgtacctgtggacgctgcccatgttccacgccaacggctggagcttcccgtggggggtggccgtggtgggcggcaccaacgtgtgcctccgccgcgtcgacgccaccgaggtgtacgccaccatcgcgcgccgcggggtcaaccacctctgcggcgcgcccgtagtgctcaacatgctggccaacgcccccgacggtgtgcggcagccgctccagggaaaggtgcgcatcctcaccgccggcgcgccgccgccggcggccgtgctgaaccgcacggagtccatcggcttcgaggtcagccacggttacgggctgaccgagaccgcggggctcgtcatgagctgcgcgtggaagggcgagtggaacaagctcccggcgtcggagcgggctcggctcaaggcgaggcagggcgtgcgcacgccgggcatggccgaggtggacatcatcgacggcgagaccgggcgcagcgtgccccgggacgggtcgacgatgggcgagatcgtgctccgcggcgggtgcctcatgctcggctacctggacgacgacaaggcgaccagggcggcgatacgggacgacgggtggttctacacgggggacgtgggcgtgatgcacccggacgggtacatggagatccgggaccggtccaaggacgtgatcatcagcggcggggagaacatcagcagcgtggaggtggagtcggtgctgtacaaccacccggcggtgaacgaggcggcggtggtggcgcggccggacgagttctggggagagacgccgtgcgcgttcctgagcctcaaggagggatcgccgggcgcggtgaccgccagcgacgtcatggcgtggtgccgggagcgcatgccgcgctacatggtgcccaagacggtggtgttccgggccgagctgcccaagacatccacgggaaagatccagaagtacgtgctccggaaccttgccaaggagatggggccgacgcgcaagggcgccagtagcagcagcaagatgtagtgcgtggtgctgtcgtcttgcttggcaatttggcatggacatgtgctctgcagcatgggctcgacatgcatcttcttgggatcagcaaaaggcctccaatctctctctctcgccgatggatgattgcaaagggttgacgattgtgatataacagatttgtctcctttttcttgtggtgactcacaagtgaataactatgattgatacggccgatgtgaaagtttcaaaaaaaaaagaatgatcacgacaaacagatctattatcttctttttatagatgaatcaaaatcaaatt

SEQ ID NO: 13767 - DNA, 655 bp, Setaria italica
  Peptide Sequence Number=SeqID_79741
tagaaggaactttgatcatatagagggaaccgaaatgtcgagccaagacttccttgcctcctcctccaactcctccttgccaatggtggtaggggttactgaggagatacgataagctggactgtgttccttgatgcaaaaagtatgatgattttgttaagtagcacggactgcctgaccagttaacattcgcccatgcattgcaataggcctctctcactcacacatgattgatgtgttggggcctttcatcttatattaacttgcgggttcagatgaaaaatcgtgatcgttccggttatgagagcaactccaaaagctccttaaaatggatcgcaagagcgagaggcctctttctctcaatatgcaatgaatcgcacgtgcctatattggctagctcttggttgtttgaaggaaggtttggttctgcatgtcacgttattgtttgtattaagtaagttgttttctttcttatttcttttttgaaaagcagtaagttgttttctggcgagaaagttaaaggttggatgccaacaccatgtatggtaggaaggatgggtagaagaagtggtgatcgcatgcattaactcacacagttggtgcttgttatccagaactgtgttggggtgataccctgccaaaatttagcacttgt

SEQ ID NO: 13768 - DNA, 681 bp, Setaria italica
  Peptide Sequence Number=SeqID_79742
cttctggagaccaggcagcatgatagatcccttcagctgtcttaaacccctgctctaccatgccttcttgaatcatggtcgcagctagtgcatatgtcacacctggccatatctccctagactgcattgcagacatgtccagtgtgccatctggccacatcccattcatcgctccccttgtaccatccttaaacttcatcacgttgaaagaatatatcttttctaatgcactttgtgccttatccttgtcaacaattgggaagagaccacacgctttggcgtacctggaaaaagcaaacaacaagttcattaaagaatagggtaggtctagctgaactgctttaggctgtttgatttaaaaacaccatggaaccaacattcacacttctgtgatggaaaaccagcatggatgtattaatgataagcacatattttgagtttatacccaccatctaccactgaacctggagcaccattactcagatgccaaactggtacatcataagtactctactactgtatgatttattcaacttaaatatttctgtttattaacccttatgtacatgataaccactaaaaaaatatttggatgtgatggcaagagcagaacgttttaaccataaacatttcaaaagatgctactagcaatgataaaagggagttgatttttcacattgg

SEQ ID NO: 13769 - DNA, 3232 bp, Setaria italica
  misc_feature (1)..(59): n is a, c, g, or t
  Peptide Sequence Number=SeqID_79743
nnnnnnnnnnnnnnnnnnnnnnnnnnnnnnnnnnnnnnnnnnnnnnnnnnnnnnnnnnntttttttttaggaaaaagaaactacaacaaaatatttaccattattgccctctcggtagccatattccatatatttatcaccaccaattatatacgaatgttccagagcaacagcgacgatgttcacaatcaacaatcacacctacgaatgtttgaattgtttggaccttctatactttcaggcatctggggctctgacctgtttcagatcaggaccaaaacctgttttggataatctcatacaccactctaacgaagctcttagacgattcatcttcaggcaactgcaggagcttcgcaattcgtgtgtaagagatctgggtcttggggaaagaatcctgggctatatctgtctgaggagtgttgtggagcttcgggttggacaatgcccactgtattgcccatatggcaagcggacgcatgtagcacagggaccggtactcgtcgtcattgttccaagcttcaggagtttggaatgagtatccaagtccttctggagaccaggcagcatgatagatcccttcagctgtcttaaacccctgctctaccatgccttcttgaatcatggtcgcagctagtgcatatgtcacacctggccatatctccctagactgcattgcagacatgtccagtgtgccatctggccacatcccattcatcgctccccttgtaccatccttaaacttcatcacgttgaaagaatatatcttttctaatgcactttgtgccttatccttgtcaacaattgggaagagaccacacgctttggcgtaccactgcccagccaattgatctgcttggatagatgtgctcactttgttgtcaccatcatcataattgaagtaagaaccattccataacttgctatacacagacttggccttctcatatttgtcccaaaaaagcttttcagaagcttcgtcaccaacttcccgtgccaaggctgatgcagcctgaagagcagccacccaaagaccaccgcagtatgcacttataccagccattgaccacacatcatatgtttgatctgggaaattctcattttcaatcatcccatctttatccttgtcaaattgctccatatatgccattgccatataaactgacggccaaacagctcgggcaaaggatttatcccctgtggccacaacatctctataaacttgcagcacaaactttggattcaaatctttccatcgatcagtattatagagtgtatacgcattcactttgaaccacgggtcatataacccaagatcatgaggaacagcaccgagaacttttcttgcagcccatttcccatcatgcaagatcctgagcttttcaggatcatgcatcatgacagcagcggcaaagtctctctgaacgctaatttgaagttttggaaataacatgaccagtgaaaatgatgcataaaagtggacatcatatgtgttccacatataatactcaatgccctcaaggtacagaaattgcccaatgttctcttcgccatggagcaaagttgttcctatagcagaattcgatgcaatagatgcatgcatcctctcaagtattgatgccattcgatgaagaatgtcagaagcagtattattctgttggatcatctcattgacatcatcatcgtttaacatgtcaagagaaaattttttaccaccaattgctgtcaagctttgaattggtggcaatccatctgtccatatagttcctccagcgttaagataatatagttcattgaatagcgtaactggataccatgcaggaaacctctcgtcttgcaaaataggatcctgccagtcctcaatctgcctctcccaggtagtatgttcaagaatagcatcatgagcaaggcttgctgctgcatcaacatctgtgccataaaacttggtgtaacgcctatgatatgttttcccactggagaacttcacttcaggacaagcccatgcaagtgaaaatgaaacatcctgggttgccttgggagcaatcttaagagaagcggcaatagctgcccctattgatgatcctggcttggagcacattgaagttttgatgggatcaagatgatcaaaagatccatgctctttcacagaattccacatatcttttgctgtgaatccatcagagttcccagatattaggaagcagggacattcagagatatgaatatcctctttctcctgtgcagctatcgcgaaagttacaggtggttgaccatctgctgttctgtgatgtaacagtatgccatgaacgccatccttttctatcatactggagttggaatggtatcccgtgagctcagattttccaccaacagagttagcccatgtaaaaagcaaagtcacatcagcagctgtatgtcctgaattagttactgtgaaagtgaatactgcagctggatagctgctctgttgataattgtgtggaataattggagaaatctgacggcatactatattgagctccggatcaggttctccatcatatactgtccaggccctagggtaaagagcatgataagtagagtgttgtccactcatattccagtcccaggatccaattcctgaaatctcacttccttttggcaaatctggtttcccaggatgcaacactgtggaatattttcgaccatcttggtgggaaatgaaggcagaaaattgattagccagtacaggtttgtcctcacaagttcctggaaacaattgccaacgttggaagtcacctgtgtagcttcttccaatacttcccaatgccaccaagtggaacaccctgaccggattttgcaattcgctttttcataggatcaataacagaaactcgtccttttgaagtttcttcaaggatatgtcgaccaagacgaagaccaataccagccagctgccttgtctctctccatgtaagcctgaatgatggcaaatcatgtctaacatgagttagcttgtgttcccaggtcaacactggaagttgtccaggatacaccttttcctcatcaccattcatatgagctgggggacaattccgagacaccccttttggttgctcatccgtgccattttctaccatgtttcttacttttttgggctagcccttctcctagggcgaatccccaacgagcgagcgagcgatcgatcgatcgatcttctgagctctcttcgtctgtgcgcgctcccggcggg

SEQ ID NO: 13770 - DNA, 291 bp, Setaria italica
  Peptide Sequence Number=SeqID_79744
atgctctcctccggcctcgcctcctctcttctccttcctcccgccatcgtcctccctgcaacgcactagagtggtcgacaaacccaaccagaactccataaaatagtgtcgatctccgcaagcacacctctatctctctccatctctttctctgtctgaaaaaattgctaccgagaacagcagtgtttcccctaatccctagcgcctagcccttgcttgtttgatcccactctctgcctctcgctccaacgccgccgccgacggcgctgccgtgcctccaccgccccacat

SEQ ID NO: 13771 - DNA, 590 bp, Setaria italica
  Peptide Sequence Number=SeqID_79745
aatcaacaagaagtaatcatatatacatacatgccttgctatatcacacatcattccatctacattattgtgagcaggatcgcagtgaatcatagccacactgatgaaaacagtatatcccatattctcacacaggacgattcctgcattcatgtgcaagtatgtactgaacccaaacagaagcacaatcattgtagttcacgtacagaccagtttacaaatacaggaacttctgcatggcttctactgctagaatacacataagggtaaacacagagcttagacacttggttctgattatttccttctttctgattatgggcaattgccgatttccagatgacaaatgttacctagaagggccagaaaggaaatctaaagaaacacaaacctttgtacatatatgtactaatatgagggagcatgcgtagcattctagtacagaggtcagatctcatgtgtgcaaattaaagcacagttcaagttatcgattcaggcaagttatcaagaatccaattgaattggaacaatttcatgctctttaaaacagcactaggattcaggcgctagcataccgcatcaatttgtca

SEQ ID NO: 13772 - DNA, 754 bp, Setaria italica
  Peptide Sequence Number=SeqID_79746
ctgatgttgcaatgtccgcctatttgaatccgctgcaccattcttgttaatgtacaagactatgctatgctcctacaaagcaaaaattcctctgcggtgaccctgcctcaacccattgcatacttgagtgaatcaccagcaccctggaagaacaggcatgacagagcaaagtccgcaacgaagatcccaacaagagaaacaaccaccgcagatgttgtagactcgccaacgcccttggctcctccatgggttgtgacaccccaggcacagctcaccaccgcgataatggcaccaaacacttgagatttcagcaaggagctgatcaagtcccatggccgcagagctctgcgcgccgactccaaaatgatgctgacgctgacgccaaagacggagtcggccaggaatgccgaggaggcgaggccgagcgcgaagctgatcagtgtcagcaccgggagggcaagcacgcaggcaaggacgcgtgggacgacgaggtagtcgacggggtgggcgccgaggacgcggagggtgtcggtctgctcggacacctgcatggtgccgagctcggcggcgaatgcggagccgacgcggccggcggcgacgacggccgtgacgacgggagagagctcgcgcgcgagcgcgagggcgaggacaccgccgacagatcggtggaggccgaggcgcgtgaactcgcgcacgaactggatggtgaaggccatgcccacgaaggcggcggtgaggagcgcgaccccgcgct

SEQ ID NO: 13773 - DNA, 473 bp, Setaria italica
  Peptide Sequence Number=SeqID_79747
aggagttcggtaccatctcagtgagtttagaaggcatcgttcgtactcaaagtggttatgcaaactacaaataactgtttaaccatcgccatgcattgcttcgcaaccatttcccaaaaagccatttccccctctttttaccaattggaagcactatatgaaggaagtgttgctacaggaaatctaaacttcacatcaaccatgcaagtggatccaccttctgctcctgcacctcctcctcttgttactccagctgttcctcctcctgcacctcctgttgaaagaagtaactttgaacaaagcagtagtcacttgggtgcgaatccatttgctttgagtttcgatggccaacggacttctaatgcacataatgaacgcaatgaagctcaagattcaagacaagaagaaggtggacttgggagaaagtgtaagcaaagtcacattgaatctcctcttgaggatatgtggagtac

SEQ ID NO: 13774 - DNA, 377 bp, Setaria italica
  Peptide Sequence Number=SeqID_79748
agagatgctaaaagagacagtggtaatggttggaatgaatctttgtgtatgatactaacggaaccacgagtatgggagaagctaattgcgaatcacccaaaagtagcaaaatttcgcaaaaaccatttcctctcttttaccaattggaagcactatatgaaggaagtgttgctacaggaaatctaaacttcacatcaaccatgcaagtggatccaccgtctgctccggcacctcctgctgttactcctcctgcacctcctattgctcctgttatttctcctcttgcacctactgttgaaagaagtaactctgaataaagcagcagtcacttgggtacgaatccatttgcttcgagtttcgatggccaagagacttct

SEQ ID NO: 13775 - DNA, 1322 bp, Setaria italica
  Peptide Sequence Number=SeqID_79749
tttagctccattcacaagaaattatgtccaatgtagaatgtcactgcatgttgatatattttctgcataatgctaagcaaatatctgtggagacaacaatgcttcggttatgattcttttgggctcagtgagtcttgctatgttttttcttcttccatttatattattatttggagtaccaacttatgtgagcaggctactattgcaagtattgttgttttcaccttccatgaaatatgttgtgtccgtgtctgttcttctattgttgataggatgaatgtcaatgcctcctttagtatgcctccatgcaatatctctttacgatgatggcttcattttagaatgatcaatgtcttcactctctcacattttaaacctatttaatttgaatagtccctatgtatcaacttagttctaggttcttcaacttagaaatgtgtttgtagagctatactgtcaaaatttggaaaaattttaaatggaaatttgctgcttgtttttttttggggggggggggggttatgcccccttacttaacacatagcaaaactattttgatagaagtctatttgtatgaaatgtaacttataattaaagtttggaatagtttcacttttttatgactggtgttggggatcgcccaaaaagatagtcacccttgaggtcgttctgctcaatgtcaatagcacagttcattgggtcatttaatctcgggtaagaccccttaacctcggatggaaaacataatgctgagaagcaaccttagcctcgcaatcctaaactttgacccgaagccagaagacattcgctgatctttttaactaactaaagtctgacctcgagaactcgaagctaaccacgagtatcgagttgtccgctatcttgtgcaggatcgcagttttggaccagggagcaaagcgcgaggttgtgtgtttcccgaatgcgaagctaaggcgatccaggcccccgaagctaggttggctttggacgcgaggtaagcgtggaagcgttgaagttggctttggacgcgaggtaagcgtggaagtgttgaagcagtcaagacggaattcacggaactatgtgagagtgtgattcccggagctgtcggaaggcgtgggaagcgtgatctccaaagaacttttgtgtaaaacatattctaggaatgtagtggttgggtaggggtaaatgtggaatgtaaagtgccctccaagacactataaaaagggagtcctaccataaaaagagagtcctacccctttgtaaattttacattcactcttttatggaatgaaagtataagggttcttcgcgtaaaaaaaaaa

SEQ ID NO: 13776 - DNA, 447 bp, Setaria italica
  Peptide Sequence Number=SeqID_79750
caagggactagacgaacgacgtacggtagactagactacgaactacggcggcggtcggcggcgcggcggagaaggacgcggcgccgaacgcgtcgctaggcgggtacgacgtgatcgacacggcgaaggcggtgctggaggcggtgtgccccggcacggtgtcgtgcgcggacatcgtggcgctggctgcccgggacgccgtgtcgctgcagttcgggcgggacctgtgggacgtgcagctggggcggcgggacggcgtggcgtcgcgcgcgtcggaggcgctggcgggcctcccctcgccgtcggacaacttcaccgccctcgaggccaacttcggcgccaagggactcgacgtcaaggacctcgtcatcctctcaggcgcgcacacgatcggcgtcgcccactgcaacaccttcgcggcgcggcttcttcctccggctccggccc

SEQ ID NO: 13777 - DNA, 232 bp, Setaria italica
  Peptide Sequence Number=SeqID_79751
gaagtaaatttagaaaaaacttaataaagcatataatatcattgtgtgacctctcttatctgcagttgcaatagctttgagcctttttctcctctttcttttcttccttcttttcttctccttgtacattcccattgcaacgcattctcgagcacagccttctatctttcccttcctctcccccactccgtcctccacagctttgagatggctcagcagaaggtggtactga

SEQ ID NO: 13778 - DNA, 2425 bp, Setaria italica
  Peptide Sequence Number=SeqID_79752
caacagacacgtccaaaagctcggcccacggcccatcagtgacgctacagccgtcgacatgggcccagaccggcagataactaactacctacctggacatttctttctgaaatatatcatttgtaccgtacatttcagtcacttgtttaacataccgtaatacttagccacctcaagaacaataataaataattacactaaccaaaagctatagccggcatgctacctgccccatacaacacaaggatacaagtcacacatctcctctacctcttatctactgtgtggtcacgctcttcgccagattccttggttgatccacatcgaatccacggagaactgtcagatggtacgccagcaactgtaacggaattatgttgatcacgggctggagacagtctgcaacccctggaacttcaataactctgcaggatccaattgagcatacagcagatgcatctcccttcgagcacatcactatcaggcgccccttgcgtgaaagtagctgctgtattaccgattgttgcttgctgaagcatgcatcacgtgttgcaatgacaatgatgggaaggttttcatccaccagtgccagcggtccgtgtttcatctcaccagcaagcatgccttcgctgtgcatcagcgcaacctccttaactttgagggcgccctctagtgcagtggcatagttataacctcttccgaacacaaggagggattctgaatcgatcaaggaagaggcaagatccttcatctcagcatcaagtttgagaacttcactgacacagcttggaaggctggtaagtccactgatgatagcattccttctagcttgagtggatatttgatcagatccaatagccaaagccatcatcgccatggctactatttgacttgtatatgccttggtactggcaacaccaatctcacaaccagcattgatatgaactccacaatgtgtttttctcgacagtgtgcttccaacagtatttgttatgccaacacaaagggctccgttttctagtgcataatcaagagcaaggagggtatctgctgtctcccctgactgactgacaaaaactgcagtgtcttccctatagatgggaccttgtctgtccagcaagtcacttgcaacctccatagtcacaggaatacctgtcagttcttccacaaatgttcttgcacctaaggcagcattgtaacttgtaccacagcctataaaaaccacccttctacaacgcctaattgttttgagatgttccttcagtccacctaaaagaacctcaccatcctttagcctacccctcattgtcgttgtcaaagaatgtggctgttcatggatttctttttgcatgaagtgatcataacttcctttctttatttgctcaacttccatctcaagaacagacaatgctcgttgcacagatgctggcttctctttgtgagggtcaaacttgaggattgacacactgccatccttaatatgaacaatttcattatcttcaagagctaaatagttctttgtatgttctacaatagcacataggtcactggagaagaataattctttgggctttccatttgttgtcaaggctttgacatcatgaaatggtttgccattttgttgaccactcaattcattgacaccaagtatcagtgtgctccctcgtttgcatgcaatcaattcatttggatagtgtggactcttaaagataagtgcgtaggctccttccagctgcctcataacttccataacaacttggctaaatgtcacatcaccttcttcatcatgagatttatcgaaaacaaactttgctagtttagggatgacttctgtatctgtatcagactcaaaggtgaaaccatgcctagttagtgtctctttcaggacctcatagttggtgatgatgccattgtggacgaccaagaactcatcactggcaccagaagattgggggtggctgtttcttggagcaggcacaccatgtgtggcccatctggtgtgggcaattccagcatgcacattgaatgcagcatctaggttcacatccttctcatcgacctcggagtagacggatcgcacgaggttctcgatcttgccctcctggcggaacacaagcggcggcgccccggcgtacggcgcatcaggaggggaaggagaggaggaggaggcggggcggtccgcgtcgagcgcgatcccggaggagtcgtagccgcggtactcgaggcggcggaggccgttgaagaggacctcgaggatgtagcggcgctcccgcgacacattgtagttgaggtaggcgaagatcccgcacatcctgggccgggggggcgggccttctagaaccttctgctccggtggagagaaaggttctaggcactactgtgggaggggcaaggaatttgtcttgggtcttggttagttggttgt

SEQ ID NO: 13779 - DNA, 451 bp, Setaria italica
  Peptide Sequence Number=SeqID_79753
attccagttactggatgtaaccatcaaagtttttttcttcttctactcaagtccatgtccatgtatctctttattgtctgtgaatttgtttattcctatcctcagttgagaacaaaacttctacaacatttcatatatctgaacatatttaaatgaagctcggaaatcagaatagattgccgcctaccaggtgactagtggtttaatttgtaaaaagctcatgatggcatgtattctcaacatgatttttttccattaccttgctaaataggtcacaatgttgcttgccgtgcctccagggcaacatgacactaaaatcagtccagcagcataatgagctggcaatttcaacagcttgctcacaaaaaaatcctgacagtggcatcacctgtgcatagatcacttactctggatttttattgcacatggagtggcaaaacatagaatacag

SEQ ID NO: 13780 - DNA, 815 bp, Setaria italica
  Peptide Sequence Number=SeqID_79754
agctgaagcattctgtgcaatagtcattgccacagagaacggctactagttagactaacaagacaaacgaaagggacaatacaaagggggaacactatttgaaccaaaccattacagtactgattaagtagagcacccaaaaggacaggtgcgaggacgacctgagatgtagacacaaaaagtcccattggatccactgcaacgtattgtccagcaagtttggatgtcaggagaggagtcatgaacgctgcagcaaaagtgcttgctgccgtcatcagcactgaaagagcaacatttgccctgcaatatggcaattaatttatccaagttttactttccattgggtactacaatacaattccctggaaatgctggtcgtaaattttgactatttgctttccactgtatttgaatttggtgtagatgcactactttatcaaatcaatttacaaaatataaatccaatcagatatcggatgctatgaccaccctatatcataaggcgctggatggaccactcaaatataccttgcaatttgtttcataacacaactgttatgggtcacaagcaatctgaacgttgttattgacgtcatttgaacatatcaaagataatcttgttgcccaaccatagcaatacaacatctggccatagtttgacattatgtaaaaaaaacattcggtaactaaaagccagaatagttttttttctttaactggtcagaactgttgcataatgttctaatgactaaactatgataccatgatcaagaccagatacttttcagtttggcaaagcactggcaggtgctttg

SEQ ID NO: 13781 - DNA, 1176 bp, Setaria italica
  Peptide Sequence Number=SeqID_79755
ttttcgtaaatgtcgatgaataaataaaagcaaatactaaataaacacctgatgaggttcaaggcacctcctagaaacaaacgaaacacatgtctaatgcaagcctggtgatttacagtgaacaccattgtgctgcgctcgatgcagtcacgcagctgatcatagacgacgcgctgctggcctgctactgatggtcaccgcatgtccgcatcattcccgcttttctgtcgggggcatagacctccagatcccagctaaaatgctgccatagaccgagtggcagatgctcgaaacggcacatggaactgcggtgaggggattgccgaaatgcttcgttgcaaggacaacacctagcacagagttctgcatgccaacctctatagagattgttcttgccgaagcggtatcaatgccaagtattctggagagaacgtagccgaagaaaaagccacttccatgcagacaaccaacagataaaactacttggaccccagatgacaggatagctgaagcattctgtgcaatagcattgccacagagaacggctactgttgctacagcaacgaagggcatcaagggggacactaattgaaccaaaccattacagtactgattaagtagagcacccaaaaggacaggtgcgaggacgacctgagatgtggacacaaaaagtcccattggatccactgcaacgtattgtccagcaagtttggatgtcaggagaggagtcatgaacgctgcagcaaaagtgcttgctgccgtcatcagcactgaaagagcaacatttgcccttgctaaataggtcacaatgttgcttgccgtgcctccagggcaacatgacactaaaatcagtccagcagcataatgagctggcaatttcaacaacttgctcacaaaaaatcctgacagtggcatcaccgtgtattgcagtataaatccagcagacaactccctaggcatcaataatgcgggaggtcggtggtgaggtcatccagcgtcaatgtcatccccattccgagcatggtgaaggagaggccaagcatctgcgcggtgggtccgacccagaggaaggccggcggccgccacagcgcgatcgcgcaggccgacgccacccacaccgggaaccccagcgacagcgcctccccgaggagaaccagcgcgctccgcgcgccggtg

SEQ ID NO: 13782 - DNA, 1124 bp, Setaria italica
  Peptide Sequence Number=SeqID_79756
ttacaaacgacccttttacctcaagacttcagggtttcctcttgattgttcatcacagaagtttccttaataagtgcatgagatagtttatccactttatctgacaaagccttcatctcaccaccaagtttagcttccttttcagcagccaaggtagaaatgttcttgtccatttcctgtatatctgcttttagcttttctgtattttcatccagctcaagaatccttgccctgatttgtttgacatcattgagtgcaccatctcgcactctctcagcctgaacaaactcataggcgatacagaaccttttgagccgatccagttcagcattgccattggcccatttcatgtactggcaccgctcttttctaagcttctctagtgcaggaaggatttcaacatcaaggagtttattaatctcatcaactttgttctgtttcttctcaagtgtcttaagagccgattctttcttcatttcatacattcgtgtgcctgctgcctcttctaacatggacaaaatttctggtggcttcatgttgagcacttttgttatgcgcccttgcataattagaaaatgaggattgtttacatttagctgtactgagtggaaaagggtctgcacccgggaaggttgtgcaagatggccattgataaggtatttgttccgtccaccgactacaatctggcgcgtgacggtgatctcggacgaatcctcgtagccgagcggggagcgggagcggtcggagttgtcgaagacgacggagacggtggccttggtgaccccagcctgaccctgcttgtagacgagctcctggagcgaggcggcgcggacctggcggaggtcggtgatgccgagcacgaagcagatggagtcgaggatgttggacttgccggagccgttgagcccggtgatggcgttgaacagcgggtcgaaccccgacaccaccgtccgccccgcgtacgacttgaacccctcgagggttacctccttgatatgcatctcgccggccgccggggaggcgtcgccggccggagatggggctagggtttggaggctccgggcgggaaaatttcgaggtgccgggttttcgccctttcgggtgttggggttggagatttcgaa

SEQ ID NO: 13783 - DNA, 268 bp, Setaria italica
  Peptide Sequence Number=SeqID_79757
actaataatagttagtgccaacccgaaattaatgaatggtcgatgtttcaagaatcaaccaagaagtatggcatccatgacaggtccaatgtaaatcatatagtagtaaagccccagtacaggctccatttaaaaaactagagtatgaaagaaattgcgcgctgctccggtgaaaccctaaactgcacgctgcagatgtcccgcaccgtcttcttcaccacgtacgtcaccccgcgacgctccggtgaaggagatggccagccgccaa

SEQ ID NO: 13784 - DNA, 588 bp, Setaria italica
  Peptide Sequence Number=SeqID_79758
tttttttttgtattcgtttttgtttcatttgaaggtacaagtagatctggaggcgcgaatcaaccatcctggcacaagattgagtccgcagcaccattcccttcaggaagctccattgaatcccaggtttgtcctgtgatttctttgagcaagccatgaacacataaatgaaatctcctccctgtcattttctttcttttccccaaatttgtttgagctcctcttgagcgtggtagggttattattagggatgtgatttgttttgtgattcagcagccaactacttgatctgtagcaatttttagtgctaacttgcattgtatttttcttcagatttcactagtgagagactgagagttaggatgtgagtcgcattgacctgattcgtttgcaccctggacaaattgttgggttcctgaacaactcgtgagagttaggatgtgagaaacaattagaacttgctttggtgattcttgtcttgtctctattttttactaattcggatccatgtatttttggctacctgtcttgctagtgtgcatgcgggtgttttagctgtctagttatttgtttgagctggctgggaag

SEQ ID NO: 13785 - DNA, 239 bp, Setaria italica
  Peptide Sequence Number=SeqID_79759
cggagcaacaggttagatcatcatcagagagttcaaacagaatcagagagggaatcgagcggaggaaaaggtcgatcatggtactaggattgggaggatgctgcggcagtgttgccattgccgacggaaggagggtgtcgcctgttgcaaagcaggctgcagaaggagaaggtcatctggaagccaagaagcagcagcagcaggtgataataaaagagaagacgaagaagggaggtgag

SEQ ID NO: 13786 - DNA, 231 bp, Setaria italica
  Peptide Sequence Number=SeqID_79760
tccgttttgtgctctgtggagtgtgggctgatcatgaacgggaatgtgccgctcaagaagtgcgtcaatggagggtgctcgactgatgcaaactgtcaatccactgtatctgtgtgtatgtgattctcccattcctttggaacttcgggatctgaaagtaacttggagcgagtgccatatcaaacaaaaaaaaaaaaaaaaaaaaaaaaaaataagagacacgcacaggag

SEQ ID NO: 13787 - DNA, 264 bp, Setaria italica
  Peptide Sequence Number=SeqID_79761
ggacgagcgcctcggcgttggggcaggtggtgtcgtagaaccccacccggagctgcgcgcgggccaccgccgggaggagccacacggcgagggccaccagcagggccactcctccggccgccggcttgccttgcctagcggcgcgcatggccggccgtgtggcagcctagcaactatacctggctcgtggctccagctgccgagtgctggttggtcagatcagctctgtcgagcctgcagtgagcgatgtcaggtcactggctg

SEQ ID NO: 13788 - DNA, 601 bp, Setaria italica
  Peptide Sequence Number=SeqID_79762
aacatttcaggatgcactggtttgcagtgtaaatctcatggatggtgatatgattgtgagtggttcagatggactttttgacaatatctttgatcaagagattatttccataatttctgagtcgccaggagtagatgaagctgcaaaagcattggcggagcttgcaagaaagcattcagttgatgtcacatttgattcgccctactcaatggaggcccggagtaggggtttcgatgttccctggtggaagaagctacttggagccaaactaataggtggtaagatggatgacattacagttgttgtcgcaaaagtgaagaaagtattggtcccagaagacgagggtggtgtcatagaagaacggaaagtgaatgagcaaggcattgctgttgcagaagaacagaaagggaatgagccgggcattgctgttgctgttgcatccgctgaacaaagtgaagaatgatcaatagctatcttgagttcttgatccgccgacattttcactcatttattttttctgcaatggtgtgttatgctgcaagtaaagaagttgaagagaaacacagtttgtgtgattgtgtgtaagctgtgcatatatgta

SEQ ID NO: 13789 - DNA, 437 bp, Setaria italica
  Peptide Sequence Number=SeqID_79763
accgcgaggtttgttaccagctccttacaaccccttctccataggcttttgtgccacatcttgacgctgattacctctttgactatatttcttgaaaagattacacaatccatacataaacaagaaattacacgcctatacatgttttgcatgggttcatagtgatcatacaatgcacacacattagtttgtcacgccaattttagacaacatcgtcaaatctcttctcggcatgcttgaacacttccttcagagacttcttcacattttcatcagcaaaaataaagtgcactgcttcctgagctaggtgaaacagctcaggcttggtgagaccaaaagtggctgcaacgaggtaatactcatttgagaggcttgttgaaaacaggccacagtcatctgtgcataaggatagagggtgctttgcattatagaggtca

SEQ ID NO: 13790 - DNA, 646 bp, Setaria italica
  Peptide Sequence Number=SeqID_79764
ttggcgtggccgcgaccaggctcaagatcgtcgacgtgagcaccaacaagctcaccggcgttcttccctccgagctgtgcgccggcgagcagctggagacgttcatcgccctggggaattcgctgttcggcggcattccggacgggctcgcgggttgcccgtcgctgacgaggattcggctgggagagaattatctcaacggcacgataccggcgaagctgttcacgctgccgaacctgacgcagattgagctgcacgacaatctgctgtccggcgagctcagcctggaagccgggaaggtgtcatcgtcgatcggggagctcagcctgttcaacaaccgattgtccggccaggtgccgaccgggatcggtgggttcgtaggacttcagaagctactgctcgccgggaacaggctgtccggcgagctcccgcccgagattgggaagttacagcagctctcaaaggcggacctttccgggaacttgatttccggcgaagtgcccccggcgatcggcagatgccgtctgctcacattcctggacctctcgggcaacaagctctccggccgcatcccgccggagctcgctagcctccgcatcctcaactacctcaacgtatcccacaacgcactcgaaggggagattcc

SEQ ID NO: 13791 - DNA, 430 bp, Setaria italica
  Peptide Sequence Number=SeqID_79765
tgttgaaccggagcttgtccgtgcagtaatcgtacaccatgttgttcttcttgacgccctcgtacgccgccctctgcgcgccggagagaacctcgtactcgccgccgttccaccacagtgccgccgagtcattgcacggcgtcacgccgccgccgccgcggacggcgcaggccgcgtcgacgtcgaagccgcggaaggcggcggtgaagggcgccttggaccagtccaccttggcccgcccgtcgtccgtcgcccagtcggagccgtcccacacgctcccgcggatcagcatcgccggcttcgacgggaactggtaacccggcacggtggccgtcaggtttctgagcacccgcaccggcgtgtcgtccaggaacatcacgagctggtaggcgttccagaggattttgtagtcgtggaagtcggcggcggg

SEQ ID NO: 13792 - DNA, 345 bp, Setaria italica
  Peptide Sequence Number=SeqID_79766
gccaagcgctggggcgaggtggaggagctcatggaggagatggtgaaggtcgactgcccgcctaacatcgtcacattcaacacactgattgggtacttgtgccggaacgggcttttcgagcgggtgcacgaggtgctcgcgcaaatggcagaccacggatgcacgccggacatcagaatgtacgcgaccatcatcgatgggatctgcaaggaggggcatcttgaggttgctcatgagattttgtagcaggatgccatcatacgggctgaagcccaacgtggtttgctacaacaccgtgctgaagggattgtgtagtgccgagcggtgggaggaagctgaggagtt

SEQ ID NO: 13793 - DNA, 247 bp, Setaria italica
  Peptide Sequence Number=SeqID_79767
accaagtaaagtccactcgaccttcaatccaacgtgtcacaaatcaattcgatcccttcttttggtggtttcattcggttcgcttgaggtttggtaaaatacatattgttctaccaagtggcaagttaatgcttctgctatcgctgctgttttcgacaatctatgtgctccggaggaaaactgctggcttgaagaggactgtgttccagcacgcatcatctctgcgacgagcattctttgatgcact

SEQ ID NO: 13794 - DNA, 1135 bp, Setaria italica
  Peptide Sequence Number=SeqID_79768
gctggaatggtacttgtccaggcacttaaagaactcaggaggacatctgaaatgtttgttcagcttaaaaagatgtttggttcggtggcaacagtacctgctaaagttttccttaccggagctaccatgcaaatggcagcaggatctggatctgaccttagaccaatctttgaggagtaccttgctaaatggagatatacaaatgatgaagtttatgttttgaatggaggacaagacaaccctttaaatggatttgttgtttcatctgttatgtcaaccaagcagtatcttgaggtggcagaattgtatacagtaacattcctttgtattgtctcccaagagagtgaaactgctatctcatgggcagaaaaagcagagctgactgagcaaggccgtcaggacctactaaaaaagctttatgcactgcgatcagctgcaaataaaaagccatccactgttgaaggggtaaaacaaatagcagaaagaaacctttccacttctacaaatggctcaacaccatcgttacatgaggatgctccaagcacagctcctgtgtacgacagccaaaaggtccaagtaaagtccactcgaccttcaatccaacgtgtcacaaatcaattcgatcccttcttttggtggtttcattcggttcgcttgaggtttggtaaaatacatattgttctaccaagtggcaagttaatgcttctgctatcgctgctgttttcgacaatctatgtgctccggaggaaaactgctggcttgaagaggtaaggactctgcaatcgttttctcataagatccataataccctgccggtttgtgtgctctaacgaataatgaacaagtgaatgcttgcgtgtgaatctgcttgaacaggactgtgttccagcacgcatcatctctgcgacgagcattctttgatgcactgcaacttgcattctctgtccagatgaatcctctagctgctgttcaacaagtgccgcaagcccctcgatgaagctggtgataatgttgttattgatgtatgtaataagtcaatggaaagatgactgaggtcatacctgattctgtgtcatagaaaatgtaaagacaactgtgcataatgcagcatgataatgatcaaatttttgttggc

SEQ ID NO: 13795 - DNA, 2044 bp, Setaria italica
  Peptide Sequence Number=SeqID_79769
tcgttgtttcggggtacctaccggggtctagtcttccggctccgaccgtaaggaggcagctcggggaggagttctacaaggacatattccccgggaacgaggcggcgtcgcccaggcggggtggcgtcggggattggggggatgtgttcagcgtgccggcgtcgcctggctccacggcccgcccgcgatcgagcttctccatgaggttcaacagaggcacggatggttcaatgcctacttctctctctcggcaaacatccaacagaaatgatgatgtgacttcttatgcttacagtgttccaacttcaccgaatgcatccatggacaattatctagcccaaggggcagcccaacaagattcaaggaagaagcccttttcatttctatctaggttccgttctcaaagtggaaaaaagaaaaacacgtctaatcatgtcagctccatggacagtgaatgtgaagggactcctattagcttggaaagtatcatggccactgacaagttccatttttcattctataagtgggcaggcaaaggagcctttttagtgctgccagctactgcagaagaaaaggctggagacattattggactgagaaactttcctcaagttgctgtgcaaggtattgacctaatcgatgacgaagacatcatgtcaactgccactggagcatcgaagagtcaacaagactatgaagattccaaatctggaaaacataatacaaactcagcaaccaaggaaggagctattcctttactctttgatgactacatgcaaggaatgaaacagggcaatgatcatacaaaaaatgatgcttcatcagctagcccgaccgctaaaagttctcgatcgccttcaggagagaaaagtcgtagtagcagggtaaaggaaaaggtgaagggtttcataaaaatatttagccctgagaattcaccaaagcgcaaacgagcaccagaaacaccggaccagacatccgtggggaaaaatggaagcaaaagtgaactgcaagataagtttagcatatccagtctggaggccaatgaggatgtacaaacagcccaaatgaacaatcagaatgcatttatccctgcaccttatccagtgaatgatgtgcaagagagaatggacaaaccagtcctgacagataatagtaaaacagaaacaaaaacggatacaatttcaggaagcaataaagctgcttctaatgaatcaatacacgatgatacaaaagacaaagcagacaacacaatagatcacgtggaaatagatattgaagatcttgatggttgtgtggttgagcatgtctcggaaggtgatgatcaagaaaaggagctaataaaggtatccgagtccaaaattcgcgaatggtcaaggggaaaagaaggaaatattaggtcattgctttcgacactgcaatatgtcctgtggcctgggagtggatggaaaccagttcctcttgttgatataatcgaaggagcagcagtcaagaaggcttaccagagagcattattatgcctccatccagataagttgcagcaacgtggagctgccatgcatcagaagtatatagcagagaaggtttttgacattctacaggaatcatggaaggaattcaattcagtcactttcggatagtattagtaccttaatttattgttgctttggcccaatgatttatcacagacatgtttttcccggtgtctgcactctgcagcagttggtcgagcaatatagcaaatggcgaccgaagagagtcgcgctcgcgcattatgaatttagacgttattactggaggcacaggcaatgctgccctgtggccttcgtccttgttcaaaatatccgcctgtgtaacatataacaagtattggttaggtctattgtatccagaagaccgaaatatcatacgaggaatggttcatgtacacctttctgtaccagccgatgtcctaattttgtcggatcttccacagtatggaataaaaatgttgttacaattttagaaaaaactaaaaactttaaaaaactaaaaaaacctaaaaaaa

SEQ ID NO: 13796 - DNA, 617 bp, Setaria italica
  Peptide Sequence Number=SeqID_79770
ctgatctctctggtgtctcgagttgattcccccacagcctttgatgggttaacttttggtgctggaagaacttttggtttagcaacaccatttgttgagtggccatcaatttgcttatgctgatcaatgactcctctaccttcggagatcctcttctctggttcatgttgatgaatgactcctgaactacctctggtgatcttcttctccggcgcatcctgtctacctccagtgacagcgccaccacgacccttcctctccacgaccacgtgatcgaccaaaggcagaacgacctcctgtcggtgccgctcctccgtcgtcacgtaccctccagtgggggcgcggtcgaagaggaaggcgaaggggacgagcagggagcagaggacgagcgccagcaccgcgacgcgcgggcccctccgcctcttgagcggcgccggcagtagcggctgcgccttcatggcctcctcctcctggggttcccggaggccgcggcctctcctctgatcatcgcctgcttcagcgagacgggctccaaacgcgcttcccgagttggaggcagttgtgtgcgatgggatttgctttgatcgcggccggcggcgcagttgtcggttttggtt

SEQ ID NO: 13797 - DNA, 284 bp, Setaria italica
  Peptide Sequence Number=SeqID_79771
ctacagtactacctactgcgattttggatgcctttgcagcgtttgtttttgctgcaagaatccaaagagcgactaagacaagcgtcctgggttggtaatgcaagcatcttggagaggcttgcattgctaaatgatcctgatcatcctcaggaggtggtcaggcccagccaagatgtgatgccaatgccaagtggtatccacaagaaacgaaagcagatgtaggatgggtgcgctggagaggagggtgcccagagtccaaagagacgaaaagcaacaaggaggac

SEQ ID NO: 13798 - DNA, 2791 bp, Setaria italica
  Peptide Sequence Number=SeqID_79772
gggagaagaaggaaaaggcagggcgagagaggggaaagtaccaagccagctagggagcaaggaagcagagatgccaaccgcaagatgctgtgatctccgctcatgagcaaactgtgggcgcagcagaagccccgtcaaggtcaaggccgcctatggatggagatcagaggaggccagccgccgccgccgtggtcaccgtcgcacgggcggcgcgcgcgcaggacagcccggcgcggcgcctgatcgcctggctgcagcttctcctccgggcgttcgttcagaggtacagcaagctcgcgagctgggacgccgcggggcgccccgtgctcgtcgtcctcgcggcgttcgtgctccagaggagcctgcgccgccggtacctgtcatggaaggagtcgtcgcggctgcggctgcgggccgccgccgtcaccgtgcaggcggccgtcagggccatggcggcccgccgcgagctctcgctccggaagcagatcagagcagccacgcgcatccaggcgcaatggcgtgcgcacagggcagtgtggagctatctgatgacgaggagagccgccctgatctgccagcgttcttggagacagagcatggcaagcagggagctcaggaagctcagactggaagatcttgagagggagatgctggctgagatgtgcaggctgcgtgagatggtggacgtgctccagcaggccgtcaatgacgcggagacgagggccgttaatgagagggaggcggcgaggaaggcgatagccgaattggaggcggccccgttgatcaaggagaccgtggttatggttgaggacaccgagaaggttaactcattgaatgccgaagttgaccgcctgaaggatttgctgggagctgaaatgaaggaaacgtttgccgcgaagaaggtgcttgctgaagctgaattgaggaatgagaaactggctaggttgcttggagtcgaggaggttaagaacaaacggttgcaagattcgctgaaaaggatggaggagaaggcttccaatctagatgaagaaaacaaaatgcttcgacaggctgttgcgtcaattcctactatcaagtcaccatcgaccgaaaaccatgaagcgcctaatattcaggagactactgataatgagaaaacaccaaatggtgcagtgaagcccatcatagtggatagggagggtaatatccatgagaagagtgctgaacaacctagctcaaatggtaatgaagctgagaagcaacagcaagagcttctgatcaagtgtctatctgaagatctgggtttctcgatcggtaggccaattgcagcatacctcatctaccgatgtatggtccattggcgattatttgaagaggagaggaccccagtctttgaccggattattcagaagattactactgcccttgagggtcgagacaacaatgacacattagcgtattggctgtccaattcatgcacactgctggttcttctccgaaggacactgaaaatcaacggggtagctgctttggctcgtcagaggcgaagagcatcacccttgaaggtaccacaggaagacgaagatcctagtcatcatgaccgtccactttctgatggacggttgatcggtgggctagctgaagtttatcaagttgaggccaagtatccagctattgcattcaagcagcagctgacagcattgttggagaaggtttatggaataatcaggcacaacctgaagaaggaactgtccccacttctcagcctgtgtattcaggcaccaagaacatttgttgtcagccccagaggatcatgttctcaaggaacagatttggcacagcaagcttccatggcacattggcagagcatcatcaaaatcctcacgaattctctcaatgttatgaaatccaattatgtgcctccattcctgatctgcaagctgttcactcaagttttctcattcatcaatgtgcaactgtttaacagtcttttgctacggcgtgaatgctgttcgttcagtaacggagagtatctcaaagctgggctggatgagctagagcattggtgcttttggctgactgaagagtatgcaggctctgcctgggatgagttgaagcatattaggcaagcagtcacactcttgatactcgaagaaaagcacagcaggagtctctcagagatcacagacgacttttgcccagcgctgagcatgcagcaactgtaccggatcagtacgatgtattgcgacgacaagtatggaaccctgggcattccatcagaagtcatctcgagcatgcggaccaagatggtcgagggctctagcagtccatccgctcacgacgacatcaactcgttcttgttagatgatgactttagcataccattctctgttgacgacattgccaagctgatggtgcacgtggatgtagcggatatggacctcccgccactaattcaagagaacaatggcaccaaattgggacactgagctgaacggtgatacgcttcttctttttttcgtgttgcggtgatgtatatagcgtgtgatatatgacataccacagttttgagatttgagttctgattgcatatacggttttggtttttcttcttcgactggtcttcgtttctcttcccccctgagtgagtttctgattgggttgcgtgtgcatgattgtacagaactgagctggcatgtaatgtaagcaatggaagcaaagaagggctttgtgcttgatttttcagaggagtgatagatgcttgcaagcgaagctttcctgctgtatttgccatgtgtgttaggctgctgaa

SEQ ID NO: 13799 - DNA, 364 bp, Setaria italica
  Peptide Sequence Number=SeqID_79773
ccaaaaatgtcttcgatagcaagtttggtaaaaaacttggcgagagaatctgattcaagcttcaaaagagcttcaagtttctcagctacaggccatttttatcttccaatattaaagaaacatagtatgaagcttgtttatgcggttgactgaaattaaaattttggttagtctttggcagaagtttcctgagattggaagatgttggtcagtaatatcatgaaaaaagatcatcacaagaaagactactatgttcagtattttgcaaatgcctgatgcggaccttgttatcctagatttgagatagcagtcacaggacaagtgttaagtttaatgaaatatattgcaacatgcagcatctcac

SEQ ID NO: 13800 - DNA, 376 bp, Setaria italica
  misc_feature (8)..(8): n is a, c, g, or t
  Peptide Sequence Number=SeqID_79774
cgctggcntaaaatagcatgtgctctgtgagcaaagacaatggtatacatcaatacgagaaagagaatagagaaattcttaaatgaaagtaaatttgatttaatgcaactgatgcacgagccatcatgctcatcaaccatttcgcctttataagattagcagattgtgcagaaaacgtcgcccatcaatttaaattcacgtggtctcaactcccatgtggaaatgctgctttcgcatgcatatgcagagtaagtgtgctcctgtacagtcccgcacgagtagctcgaggaagtgcgcgaggccctcgagcccctccgggtcgctgaacgagcccacctcgacctccatgcacgccgccgccttgtcggtgtcgggg

SEQ ID NO: 13801 - DNA, 732 bp, Setaria italica
  Peptide Sequence Number=SeqID_79775
gggggggggtaataaggggacatggcatgaagcatgatagatattcacttaaagaatcataataacaggatttccaggcagcaaatcgtgtaaagtgtggagctcttagcctcttaagaacttatgacaggaagttgttgctgcttcctttgtaacattttccctgccctgtaagggcacaacgacaccacagaacatctgaatatggactctgcttgcagaactaggtgtgtttggttcaagaaccagagaggttacaactgaagtttagttattaacagtatatggtaggttgatccattagtgctgcactctgcgaccacaatagtgaaaactatgtccttatgaccgtagatacaactgtacattcagcgagacttcctaaaatgatggtaagtgtacacgagtcatcaaatcccacctgtcacagcctgcctaactaaaaacctttcctgttgtcctttctctatcgctgtgtcattttgtcaattatcacactcaatgtgtcactaatacttgcataaaagaattaagatgaagtgaattaggttgaattttttgcaactcgaagttgattaacaaaatgtacctctgtgatatatttcgtatactcatgttctccaggtatttctcgctggcataaaatagcatgtgctcgaggaagtgcgcgaggccctcgagccctccgggtcgctgaacgagcccacctcgacctccatgcacgccgccgcc

SEQ ID NO: 13802 - DNA, 3446 bp, Setaria italica
  Peptide Sequence Number=SeqID_79776
tttgatgatgtaactgtacaaagtgcatagttgtcagaagaaacgcaaaccagcatgtgtacatgactctgtacagctctcagatttctccagaaagtgacatgtggtcgtgcattattggttaagccatgactgaagaatagcatctactgttcaatcgaatctgacactcggagttcattgagccaagtaaaatcgagttcatgagtatgcaacagcctacacgtataaggaaaagaatagcagcctgatatagctattcagtccattgtgatcctgcccggacctcccttgagcgagctgtacagcggcctcgatcgtttgaagccgaatatgtctgtgatcctgtacgttttcggcggatcagcttcggcaaccgccttcttgaactctgccgaatggttgccactgaagacttgcacgcttattgtcctcctttcaggcgcatccagttttatgtactgatcgaagaacgcaatgaattcttcttttttgagctctcttaggagagcgacctctgactcgaccctgtcaaacttgagagttcccgcatcaatctctccccagtagaaatgggattcctcccataagtttttggaacttctccagtttagagtcaatgagtgatttcacatttctcttgaaatccttgtcagacagttcatggattttgctttcaaacatcttgaagaattcatcaactctagcatcaaggtatgcaggatccttaactgtggactgaataaccacctggagtgcccagactccatagtcagatcttagagaaagacttgttatatacccaagctgctcaactgttcgtagctggttgaaggcaggctggctagcaattaaagagaacagctgaagtttgatattcgagctggcatcatcctgatgtacctgaatatattggataactgatgaattctcatttttctgatttaagccctcaatttggtagtagcatttcaactcattttcaagcatgataacccttttagtcagatattgtgatggagaaatgcatttgaacatagtattgggggtattgaatatggtgtcctcaatctcctgcgcaatagatcttgcctcacttggttcaatgtttccttgaatataacattccaaaaatgtcttcgatagcaagtttggtaaaaacttggcgagagaatctgattcaagcttcaaaagagcttcaagtttctcagctacaggccattttttatcttccaatattaaagaaacatagtatgaagcttgtttatgcggttgactgaaattaaaattttggtagtctttggcagaagtttccttcagggcagaaaacctattaggcttaacttcaaaattagcaatttgcttcagtatggcatttaggagaaccctcatcttatcattgtaaccacctaaggagacctggaatcctgctgaagtaagatagattgaatagtataagccggcaatttgagcatcataagcataagcattcaaataatccactaataaatcaacaaagagatcagtagaaatgattgcttcgggagagtggcttgataatgggcaatggaaatcaattataatgtgaacctttggtgtggagaacagcaagtcaggcttataccacaaccgtgaaagtggtgtcttccttaatactgttggaaaagtaaccttttcatgcacttctttaagagataaatcctttggaatgaatatattaggctctgggatatggagtttctctgtaggagcttttttaatccatttctgtatcacaggaggagtaacgttttcaacagaatatggtgtatcataccagggctcagaagaggtagtagatccttcaaattttttggactcccagaatattcttactctttcaggtgacaactgatcgagtatcatccttattctctgtggcgcatactttgatggcaatgctgatccaaccagccactcttctggtgggaacaaccgcatacttgagacagtacccgtcacatagctgattggatggactttgtcttgataatggaactctgtttcatttattgccacaagctcattaaatatccactcatggactccgtcttcttttaatagaagaagatatttgaagatcaatccaacaatatcctccacgtgttcatgaccagcatcagtgagcctcatgcttattgagaaaaaggaatattcagtgctgtcagtgctctctccagccatcaagttcatggcccatcctagttcctttataatatggaagatggagccctcgccttcatgcccaataaggtgactcagataatggcaaggcccttctttgtaaaactggatggtaggtgtaattggccatattattcttagatagtcaccttcttctattggcagtgctttgacaataagctgtaaatgttcctctgaaagaggatgacttggacatttgaagcttctctggtcagtgttctttatgtcactaaacatacgctcgaccaagccctgagtgcaatcgaggctctcctttccataaacaacaaggtgcataagatttgctgaataattctcataaaacttcagaagttcatctctgatgtccaagcccctcccttttggtttagtttctagtgtctcccaacttccagtactgaatttatggtaagggtgatcctttgaagccagatgcttttgaagctgatacattctccagccatcagacaacaaatttttcttgtgctcagaatcaacagcttttatctctctaagaacagcatcctgtgacatcagcggcttaataaagaactgagcaaacctatctaaagcttcttcaaaattgtccacattgacatcaaaatagaaatttgttgtctctgagctcgtatatgcattgtaagagccaccatgctctgtgatatatttcgtatactcatgttctccagggtatttctcgctggcataaaatagcatgtgctcgaggaagtgcgcgaggccctcgagcccctccgggtcgctgaacgagcccacctcgacctccatgcacgccgccgccttgtcggtgtcggggtcgctgatgagcaggatctcgagcgcgttggggagcaccacccggcggtactcccgcttgtcgctgcgcgcgcggatgaactccacatccctgcttcccgccggcgccgccaccgccgccgccatccccactccactcgctcccactccacccgtcccccctactccttcctctcttcgcttccacgcgatcctctagcgatctctcacggccgaatggtggattggattgggggaccaagcttaagcgaagctagttgggactcgggactttgggagactcgaattttctatctcgttgtcaatttatataggcagggggaagttgccgtcccggtgggtggcttgccgcacaggtttgagatttgatttgagagaagcgaagcgag

SEQ ID NO: 13803 - DNA, 467 bp, Setaria italica
  Peptide Sequence Number=SeqID_79777
gaatatcttccataaacggaaaattacgttataatgtcctggtatgagatgccgagggcgcgggcccggcgctgcacgctgaagacgacggagaggaggccgctggcgacgacgaccgcccgcgtcaccggcgcattctggaatccggagacgccgccctgcatcttccgacgggggccgccggtccggtcgggtaggcgaggtggaagcgaggtcgggaggcgccgccgcttcccccgcccgtccgatcgggtcggttccttccggtcgggtagcggggacgcgggtggggcgctgcggtggttcccgtgggaggcgggcggcgcgacggagttcgggaggaggatgggaggacggtcagacgggtgcggtgagacggaaacggaagggacctgtttgacggtggtggtggttgggctgcgcagcgggtgcctttgtgagttggacacaccgccgtggagttctgg

SEQ ID NO: 13804 - DNA, 982 bp, Setaria italica
  misc_feature (892)..(892): n is a, c, g, or t
  misc_feature (917)..(917): n is a, c, g, or t
  misc_feature (938)..(938): n is a, c, g, or t
  misc_feature (952)..(952): n is a, c, g, or t
  Peptide Sequence Number=SeqID_79778
tcttgtttggatggtgtgtttccgacaagacttctggagggacgagatgtacttcctggtgaaggggcaaagtatcttgcaaagaatgatgaaataacctgcgggatcttcattttgcggatgccgagcacatttaggcgatatagagagccagcaaccagaccaaatataccaggaataagggagcgcttccaagaagataaaagaagctgaagaccagctaggtaaatgaatgatttgtcgctgaaatttacgccgaaaaatacggaatcgtgatgtgaccgggatatcaagaaagaatggaacaaatgaggcaaatatgaggccataaggtcctgatgcaagagtgctgatgtagtttgtatctgcaagaaaaaaagagacaaaaaaccaactcaaaaactggaagagaacgaaacaacaagtgcatgagcacatgattatgctatcaactgacataagataaattttgaaacacagaaagaaaataaggcatggtattaagccactaatcaaaaataaaattttaaaacaaggaaacaatgtgaaattatcagaaggcagagcttatctaacacaattattagttagctactctaaaacggtgaagaacattcaaccaagagttctatcctagtttctatagaatcagggaagacaatttacctaagtcttctggaaaagctgaattgatgtcttctctagataatacagttacactttctccagaaaaaaaaacacaaatgccacgttccaaactgcaggagcactttcaatgcagtatctttggaaatattttagctatctgaactcatttttggaatatgaaccaaaattacttctttggaattcataaagattccatatagctagcttgagtccacatcatacngcagcacagcacagtgaaccaaacngcttgcaattgtaccaaacgntgctttgcattaangacatagtgacatatcgactgatatcttat

SEQ ID NO: 13805 - DNA, 515 bp, Setaria italica
  misc_feature (396)..(396): n is a, c, g, or t
  Peptide Sequence Number=SeqID_79779
aaatttattaggccccaatggcattccctcgtatccattgaaacacatgaatggcaacatgaagtaactaagcgtgatccacatctcatcttcaaaagctgtaaacctctgatgaattttacactatgaatgtatgtatcatctatcctacaagctgaatttggaatagtacattctgtctgtacggtggaggcatctaagtattgacacgatcaagctaactgctgcggatgtttgttgatttcctaaactgtcgaccttgaaggagatatcaaacaactccaaatcatggtagaaactgtagtccgtgtggtcattttgtctgttcatcttggaatgcaaccagttccgtcgtcaatggcttgccaacgaagttgcagtacgtcagttcaacgngactgtgcttccagtaggatggtttgttgccacattgatgtcatttcagctctcatcagtgcctgtctagcgtcattgccatcaaagcccattgagaccagcatagcaacagaggactc

SEQ ID NO: 13806 - DNA, 1217 bp, Setaria italica
  Peptide Sequence Number=SeqID_79780
tccaaattcagcttgtaggatagatgatacatacattcatagtgtaaaattcatcagaggtttacagcttttgaagatgaatgtggaatagtacattctgtctgtacggtggaggcatctaagtattgacacgatcaagctaactgctgcggatgtttgttgatttcctaaactgtcgaccttgaaggagatatcaaacaactccaaatcatggtagaaactgtagtccgtgtggtcattttgtctgttcatcttggaatgcaaccagttccgtcgtcaatggcttgccaacgaagttgcagtacgtcagttcaacgagactgtgcttccagtaggatgtttgttgccacattgatgtcatttctagctctcatcagtgcctgtctagcgtcattgccatcaaagcccattgagaccagcatagcaacagaggactctggaggttccacgataggtgcaaatccagttgatgactgattctgaacagaacggcctgtttgggatggtgtgtttccgacaagacttctggagggacgagatgtacttcctggtgaaggggcaaagtatcttgcaaagaatgatgaaataacctgcgggatcttcattttgcggatgccgagcacatttaggcgatatagagagccagcaaccagaccaaatataccaggaataagggagcgcttccaagaagataaaagaagctgaagaccagctaggtaaatgaatgatttgtcgctgaaatttacgccgaaaatacggaatcgtgatgtgaccgggatatcaagaaagaatggaacaaatgaggcaaatatgaggccataaggtcctgatgcaagagtgctgatgtagtttgtatctttcaggataaccaatgacaggatctcaagaagtgatgacactgtgatagtgaacaagcaaaaaaccgagtatttgttagagcctatctgcctctcaaacacgcggaagtaatacagaaggtacagtccaaacattaactccggtgttgattgaaaagcaaatacagctgggaatatcttccataaacggaaattcgttataatgtcctggtatgagatgccgagggccgggcccggcgctgcacgctgaagacgacggagaggaggccgctggcgacgacgaccgcccgcgtcaccggcgcattctctggaagagaacgaaacaacaagtgcatgagcacatgattatgctatcaaact

SEQ ID NO: 13807 - DNA, 1180 bp, Setaria italica
  Peptide Sequence Number=SeqID_79781
tttttttttttttttttttcagtcccaaatgtcgcgcactgcatttggtgtaatgcatgtctcctataaaaccaacatagtaatgataaactgaattactgaaagtctgatattttgaacataacaagtcgatggaggaccgcgaaccacaaacacacaggtgatacaatttgcaattcaaaatccatacagcagtcgatacggagcacagcatgatcatatatgatatatcacgaacaaatatttacggacgaacagactagacggcaaaggcacagcaccagcagatggaccataacaggtagcacagaccctgcaagagcgggcaagagcaggagctggaataggcgagtagctcacatgccacgccccatggtctgctccatgggtggcatcatgacgaagacggagcgcccgttgttgaagccaggatggggggccctgcggcgcagctcgcggccctcctggcagagggcacaagggtggcagaggtagtgggttgcaaggtcgcaggcaacctctaggtgttcgcgcctctcctcatcctcgaccagaccgccgcagcacccacattgcctggtgaaagcctcaaagctaccctcaagattgtagcgtcggcgaatagctgtacgagtgggatgagagaaccatggggctaggcagttccacccaaagagggagttcccaagcataaagagaccagtgtaaggcaagcagctgtttgcaaaagtgctttgtccagccgcaagcctctcaacattactaccatacagaacacacggtgctacgcttccaagaagacacacttcgaggtcgctgctgcagaactcgtcgttgcggccgaggcaggagaggatcccggagttccagctctcccgcgggatggcgtgggccgcgaccggctcgcccatcacgacggggaccccatcggcgtagagcttggtggcctccggagccggagcccgcgggggcttctcgtccgcggggacggcggcgccgaccgcggctgggaggagggggctcgactcctcctcgtggttggtggcggcggcgcccatggcgagaagcggagggggatcggaagcaagctacctaacgcgaggtgaggcgaggaggggaaaggggtcttgggctcttggcgaggaggaaggatgcgggggcggagaggaaccttaaaatt

SEQ ID NO: 13808 - DNA, 957 bp, Setaria italica
  Peptide Sequence Number=SeqID_79782
gtcggcagtgtccattcccgatacaaaactaccactattgtcgaagacgatacactcagccatctaaatacaagaaaaatgaaccgaagaaatggcaattaacaagttgttttcagaaaagaaaaatactaaacggttgacaagttacacacccagacaccctacacttgatagctgttttattccgttcacaaccagtactggttcctcaggaggaacgccaccggctttctgatcgtacgtacacgtgccgcggcgcaccgactgacacgtactaccagcacaccaacatctagaagcagtacagcgagcgcagagcacaaggccaccgccccacgcggcacgtccgcacgtcacttggcggcggcggcagcatcagcatcggcggccgccgccttgcgctcggcgtcgaccttggcggcgatggccttggcctcgtgctgcgcggcctcgagcaggaagcttcctccctcgtcgtcgacggcgacctggagcggctgcgagccgagcccctcggcgacggcgagcatgatgcggcgcatctcgtcgcggaactcggcgcggtcgacggcgccgctgtggtcggcgtcgaactgctcgaagacggcgtcgtagagcgcggcgacctcggcggggagcggcgccggctcggcggacccgaacccgtcgccgtcgaggaggcggaacgactcgagcgcgcggcggagctcggcgcgggacagcacgccgtcgccgttggcgtccagcgccgcgaagcgcgtgtccacgctgcgcgcgaaggccgcctcgtccgccacgaaggcgcgcaccgtcgagccgtccaggatcaccacgctcatggctgcccggggcgccggcgtgcctctctctctctttctctctctctctctcggcgccttgagctagctttgctcgcgatcgagctgtggagtgaaggctggagactagtgggcctga

SEQ ID NO: 13809 - DNA, 285 bp, Setaria italica
  Peptide Sequence Number=SeqID_79783
aatttggctcctctcgttttcctgcttggttcggttcgggttcgtacggtgcagctcgtgatcgatcgatcgaaaaaaaatcatgaagggcactgtcttcccggcggcgtcgccggagcaggacgaggagggggcgccgttggtgccgccgccgatagaggaggagattactgaggagggcgggacgccgtgcagggacggcgacgctgctccggtggtggcggcgcggcccgggcggtcgttgtcgtcgttgggggcgtgctgcggacgaggggcgtggggtcc

SEQ ID NO: 13810 - DNA, 253 bp, Setaria italica
  Peptide Sequence Number=SeqID_79784
gcccattccttctagagtgtttccttgtgtacatagtggagcctttctcctgcatctgatcaattgttggccatgatttgtgatgaacagtcttcctgtgacccttgaccagctcaaaagcgcagatgagcccatccgtccagagctcactccctggaattggctctttccccaaactaggcttgggagctgtgtcttgcatcttggacatgttgctgacctgaggcggctgctcctcctcagcaccattcat

SEQ ID NO: 13811 - DNA, 456 bp, Setaria italica
  Peptide Sequence Number=SeqID_79785
gcggcatcacaacccaatccaatccaaactgcagcgaggccagccaggatcctcctatccgttcctcccgccgcttcggccatggcgccaccaaccgccgcctcggcctccgcctccgcctccgccttcctcttcctctccccgccgcgaagccggagccacctcaagcccaggcccaggcccatcgccaccatcctatgctcctccgccacctcctcctccacgcgctccctctccgagcagctcgagccgctcacccgcacgctcctccacgacaagcccacgccgatcgccgccgaccgccccaccccggagcccacctgggtgaacccctcccgccccaagcccaccgtcctctccctccgccgccagcgccgtcgctccccctccgcgcacccatcctccgccccgctccagccgctcctccgtgccatccgcgcgctgcccgaggacgcc

SEQ ID NO: 13812 - DNA, 1810 bp, Setaria italica
  Peptide Sequence Number=SeqID_79786
tttttttttttttttttaaagttagtaatcaagccaaaataaggcgagaccagtatattaataatatcgattcaagatgactctggctgtgatgtacatacatcttctggagctacttaatacacaacggtaaaacaagactaatacaatggtcaaaatcgtgtccacataaatgctttggctagtttacaaagaatggtatcctggacagaccagaaagcaaagggggaaaaaaacaagaggacaactttgcattcttatacaacacttgatatcataagacgtcacatcccagttgaggatgtccttcctattctttgagcaccaagttttggttgtgccggctttgtccctcgacccctacctgatgacgctaagggtctagctttggttgatggtggaggtgctgcaatcgaaccccatatgtcgtcactgtttgctgcggccgccttcaaaggcttcccagatgattttggagcgggtgccgctattgtaccccagagatcatcctcatcattatgtgacgttgatggtttgacgtctgcagactttgatgcacttttgggtggtgcagcagctataggaccccatagaggatcatcttctgattttggcgctttcagttgatgtgatttggctgaggttgcagctgcttgctttggttgcaccactggacgtttctgagcagcttgtatgttggatagaagagagggtgatggcttatcgtcaaatgggtctacatcatcccatccttctttatcgctgccattctcctcatggatattaccatcatcgagctcaccccatccatctactgaagaccttgctgatgccggtgcagcatgatcaagggagctggatgtggatggtgcatgccctacagtagaagcttgagtacctatacctggagtggcagcggaggttgctgaaacttgcgaattactggcatttgcagtagatattgagccatgatcagaaggtttacccttttgagtaatagagctcatggcccacccaagtaaactggcatttccaggctttaactgaacactagtactttcagccaccatcatgtctcccgtggtaagcttttgatggtgttgcttagctatttgtaagaattgatcggtagcctgaaaagccttggttcgcacatcactatctgggtcaaatgtgaggacaacaacgttaggcaggatgcgagttgcaatttctgtcatctcatagtatgaactagtgacactcagtgccatgattccagctgctctggccggagggaaggtatctcgtaatgcacggactgtgaatgcattgatcaagactcttttcctggtcccatcattcatgtggcttgcaatgttgccaagaagaattgtagtgtttgtcctgattccgggatcttcatccacctgtagcttagagagatacttcaagagggatcctgagattgttcgctgagataattttggtgccaaaacaagcatcgacttcaatgtcagttcacgaatagaaacagtagtatcggagaagccagtggcaacatgaggaaaaacttgttcatcaacagtttgagctgacaatgattccccaaactgatctatgtgctgcaaaagacaagctcggatagctctgtcattggaggcgaaaagcttgacaatagtaggcaaaaccttgatactaaattggtcagctggaagccaggaacccatctttaacagaacagttaacgctggagcagcagctgaaccaaactcaagagaagaagccaatacagggagcaacttttttaggacttatctcacgaggaagc

SEQ ID NO: 13813 - DNA, 1513 bp, Setaria italica
  Peptide Sequence Number=SeqID_79787
tcgttctttagttaagttaatttaaatttttttaggtttagttaccttaaaaacttaagttcttattcgttactttctaattgttctagttttcacgaatagaaacagtagtatcggagaagccagtggcaacatgaggaaaaacttgttcatcaacagtttgagctgacaatgattccccaaactgatctatgtgctgcaaaagacaagctcggatagctctgtcattggaggcgaaaagcttgacaatagtaggcaaaaccttgatactaaattggtcagctggaagccaggaacccatctttaacagaacagttaacgctggagcagcagctgaaccaaactcaagagaagaagccaatacagggagcaacttttttaggactatctcacgaggaagctgttcagctatatttgggagtttccggaaaaagctgtctttctcaacgctgtcttttaaattaagaacttccatgaactggatggtctcaactaacttgttttggaaaaactcactgttatcaataagttttgaaggatttaatctacgagaaggtgtggaattcaagagcctctggtagtctggaagcagagactttgggattgaagcaatatttcgaaggtcttctgttctagccaactttgctccagaaaagagttcataaattaaacaccccagtccccaagaatcaatggcccacggaggtgattttctaattgaggcccagtctgactttgtcagctccatcggcttgtactgcgttccaactaaccattcaaattgcaacatggggctaccagagacttcattgttagcatcaaattctgacagaacatcaaaagcatgaagcttccaatccagagtttgtgtgacaactacactcgccaagcatacattcccatgaacaagcttgcagtcattattgagaaagctcacagctttcgatatctggtgaagcccccatgcaaagtactcatccctctgggtgccaccaagattcagttccttgagcttttcggaaagtggcataacaggctctgttacaatataaattgtgtgcttcatggcaggtccatcaggaacttctgattcagtactgtgtaaaaaggataagatatttggatgccgcaccgttcgtaatctcttaacaccattgcgaccagcaaccaagtgtctgtcctgagggttgctccctgacagagaaaaattgacacaggcgatccatcatccttggaggtgccgcggtggtgcgtccatgagccccaggcggaggcgtagggctcgccgatggtgtaggggaagtccttgaggcccgatccggatcccgcgaccacctccttgaggaacttgaacattttgctctacgcctccggtggtcgatgccccgtcgaattccggcgcggcgcttcgtccgcctcgattgccccctcgcgtcggtgggtggtgtcccgcgcgccgacgcggcgaggtagatccggggcggtggacaagtagcgtcgaggagggtgaggt

SEQ ID NO: 13814 - DNA, 563 bp, Setaria italica
  Peptide Sequence Number=SeqID_79788
aacgaccgacggacggacctgggccctggcgtcgtcggcctcctgcagggcccgcttcctggagacctcggaggagtggagctgctccttggccttcttgagctcgtcttgcagctgcgacagctgggactccagctctgacagcttcgtcgtcggtggcctccttttctctctctcggcgctcatcggcgagcggcggtcgaccttgaggctgagtccggtgggcgactcggccagcctccccgtccggccggccttgttgcttccctgggaggacgtccgagtggggtgttccacggagccattccttgccctggccgccgcctgcatggcgatatctttatttccggagctcagactcagagccgccgctctaccaccacggctccaagaggaaagctgcaaggggacaaaacaccaaagcgggatcgtcagctagctcccgctcgccccgtcatggacttgctgctaaagcggcgcggcaggagagacagggaagccaggcgagctatggagctatctgcaatggcgacggcggagctagcagctacctctctctctct

SEQ ID NO: 13815 - DNA, 523 bp, Setaria italica
  Peptide Sequence Number=SeqID_79789
acaacttagaacaaagaccaaaatttagggaagaatgggctggatactcctgatgcatcagaggaacatgaggatgaacatcatctcagtacagagagggaaaagatcactgatcttaagagaaggaagcatggaagactcaataatagcttacagaagaaggctaataggctgaagtatattgggagtacaaaggctattaaggtggggaaacatcgggatattaaaaaactcccgttgcacagcattctgaagaagtacacgaagcatacatccgtacaaaatggttaaggaaaagcatggcaattcaaaaggccctggagtcatagaactctgccgcaaatcggttaagcgtgtcaaattctcagaagcaaatggtgcacttggcagtaagaagcaatgttccaaaagaccccaactagaaagtatctgccagctactgtctgatgctatgaattcttcttcatcatcatccatagaaatgtccagtgaagaggaacacattattgcagaaagcagttag

SEQ ID NO: 13816 - DNA, 538 bp, Setaria italica
  Peptide Sequence Number=SeqID_79790
aaagcggccgcaagcaaatcctactcctatctatcccgaacctgtgaacccaatcgaatgacgccgacggcgagcctcctcccggctccacccttcgtctccatctccgatgcgcgccgcctccgaaaaaaaaaaaaaaaaaaaaaaaaaaaaaaactcctcccgtgcggccgctgccggcctcgcctccgctgtggcggcacggagtggggctctgtacggacccagatgctatcctctttcgtcgggagcagaagatcgagccgcagaagcgttatctgcgcctccctgtttggagttggagctcccgaagcactggtcattggagtggtcgccttgttggtgtttggccccaagggtctagcagaggtagccaggaatttggggaagactttgcgtgctttccagccaaccattagagagttacaggatgtatcaagggagttcaggagcactcttgaaacgaagaaaatacggaaattagaatagaaggttacccccaatacctacgaaattaataaggacccaactaaactaa

SEQ ID NO: 13817 - DNA, 461 bp, Setaria italica
  Peptide Sequence Number=SeqID_79791
ggcacatgtgtgcgttaaggttcacctcaaacttaattttaacacacctactcgatctgccagcaataaaagtcaagatgcattctgccctctagcttttctccaagtttacttttaaatgtttttctctttgcttctgtacttgggagtcatttgcatatcagcaaatgttctctaccaaatctatgatgtcaggcttgctttttagggcatgctttggatgcgctgctaagtgctaacacaaggattattggtctcatttgctaacttgtttgcaggtagccaggaatttggggaagactttgcgtgctttccagccaaccattagagagttacaggttggttcttggtttattgttgcaatatgtttgatgatcttgttacgtaatgtgataggattttctgtcacttaggatgtatcaaggagttcaggagcactcttgacgagaatcggaattgat

SEQ ID NO: 13818 - DNA, 1123 bp, Setaria italica
  Peptide Sequence Number=SeqID_79792
gaggcttggagatgagaaagcggccgcaagcaaatcctactcctatctatcccgaacctgtgaacccaatcgaatgacgccgacggcgagcctcctcccggctccacccttcgtctccatctccgatgcgcgccgcctccagctcctcccgtgcggccgctgccggcctcgcctccgctgtggcggcacggagtggggctctgtacggacccagatgctatcctctttcgtcgggagcagaagatcgagccgcagaagcgttatctgcgcctccctgtttggagttggagctcccgaagcactggtcattggagtggtcgccttgttggtgtttggccccaagggtctagcagaggtagccaggaatttggggaagactttgcgtgctttccagccaaccattagagagttacaggatgtatcaagggagttcaggagcactcttgaacgagaaatcggaattgatgaggttcccccatcctcgaattataggcccacaacaacgaatatcaaccaacaacccgccgcggacccaaatgctaaacctgaaactgcaccttatactagcgaggagctcatgaaagtaactgaggaacaaattgcagcatcagcggctgctgcctggaatactcaacctgcctcatcacaacagcaagaagcagcacccacaactcaaagtaccgacactgctacatcaggagggaatgatggtcctgctgctcctgctcctgctcctgtcgctgcgaccgagtccgacgcaagccaagcaaagcagtctgaaaaggcggatactgagcgataaagcttatggatggaaagagcaaatcaaggtgagcattttgctcaatttttctgaggtgggggaagagtttgtacgaaacgcttgcagtgcttaggcttattttgtctcttgtgctgtcgtagtagacgttgaaaaaggctgtgtatatttcttagtagtacgtcgtcctacgctgccacggctgctgcttgtgccatcgtcgtcctcgtaacatttctgagcctgctgtaaccacgaggttgttgtatggaacagtgattttagccacgttgagatgaagattgaataggaagggattgattcgcgttaacaaaaaaaaaa

SEQ ID NO: 13819 - DNA, 445 bp, Setaria italica
  Peptide Sequence Number=SeqID_79793
gctaaaggtttagggtgtgatgctggtgcgcttatcatcaaattatttcgcttgtctaatcttgtccaatggctttgcataggttggcataagtactgggcgcatacatgctcgtggacctgttggtgttgatgggcttctaactacccgctgcattctacgaggtagtggacaagtggtaaatggtgacaagggagtggtttacacccacagggatcttccgttgcaatgaggcaagtgatgtttcacgcggcttcaaaaaatgctttaccatggtcactaaacatcaacttgcatcttcactttaccacggtcactaatcatcaacttgtgccttctttgcaggaatagaacctctgctggcgaacaatcgcttggaacaaatggctaggaactacccccgtttaaagtaaccttttacttacaattaccaataggtagacaa

SEQ ID NO: 13820 - DNA, 1449 bp, Setaria italica
  Peptide Sequence Number=SeqID_79794
ggtaacatcaggcgccgttggtgttgggaggcagaggctccagtaccggaagcttatccatagcagcttcgctgatctgcagaacccgcagatggactttgatggaaaggcctgtgctgccgttggtcaaagtggtttgatggcgatatatgacacgatgttcagccaacttgatgtaacgtcatctcaacttcttgtaacggaccgagactttaaggatccaagttttggggaccagctccgtgagactgtttttgcgctgttggatcttaaagtaataccactatttaatgagaacgatgccatcagtaccaggagacaaccatatgaggtgtattcccttaatttggtttctgcactgggagtttgatttattgccatatatcgaccttccaaatcggataataacaacaatatatatcgaccttccaaatccgataataacgacaactgagcccttgtgtttctactttctgattgcagtaatgaacttattttgcaggatccatctggtatattctgggataacgacagtctggccgctctgttggcagcagaacttaatgctgaccttcttatcatgctaagtgatgtggagggactttatagtggcccaccaagtgatcctcaatcaaagatcatccacacatatgttaatgaaaaacatgggaagctaattagtttcggagaaaagtctcgtgttggaagaggtggcatgcaagctaaagtgtttgctgctgctaatgctgcatcaaaaggcgtacctgttgtcattgccagtggatttgcaacagatagcattattaaagttctcaaaggagaaaagattggtacacttttccacaacgaagcaaatctgtgggagtgttccaaggaagctacagcccgagagatggcagttgcagcaagagactgttcaagacgcctgcagaagttgtcatcagaggagcgtaagaagattttactagatattgctgatgctctagaagcaaatgaggatgcaattaggtcctccatgtcagcgattgcacgaatggatcttgcaaggtttgttatctttcctggctttagggtcatcctagcaatcaacgatttctcataaccagcaccttgtgctgcttcaacatcagcttcatttttctagtacctaatttgcatcctcatttgcttctagagcatcagcaatatctgtaaaatcttcttacgctcctctgatgacaacttctgcaggcgtcttgaacagtctcttgctgcaactgccatctctcgggctgtagcttccttggaacactcccacagatttgcttcgttgtggaaaagtgtaccaatcttttctccttttgagaactttaataatgctatctgttgcaaatccactggcaatgacaacaggtacgcctttttgattgctagtctatttagtctagtctagcaaacactttagcttgc

SEQ ID NO: 13821 - DNA, 1397 bp, Setaria italica
  Peptide Sequence Number=SeqID_79795
agactttaatacaatcaccagagggaaataatgtacttttgctcaagctattactatgtccacgtgatacttatgatctttatcctttcaccatatgtagcattctacgaggtagtggacaagtggtaaatggtgacaagggagtggtttacacccacagggatcttccgttgcaatgaggcaagtgatgtttcacgcggcttcaaaaaaatgctttaccatggtcactaaacatcaacttgcatcttcactttaccacggtcactaatcatcaacttgtgccttctttgcaggaatagaacctctgctggcgaacaatcgcttggaacaaatggctggactcccccgtttaagtaccttttcttcattccatggtgcaaagatgatgtctagtgttgtttaaaaaagaggggaaggaactggtactatgtagttctgcgatgcctgctgctcattatgttggatttgcttggaccattttggtgcctgtaaggtgtacttgttgcttgttgtgtacttgccggtgtaactatggtacttcatccggagccatcgcacctctctagctaccacacctctaatacagatgtctcgaaggaagtaccatagttacaccggcaagtacacaacaagcaacaagtacaccttacaggcaccaaaatggtccaagcaaatccaacataatgagcagcaggcatcgcagaactacatagtaccagttccttcccctcttttttaaacaacactagacatcatctttgcaccatggaatgaagaaaaggtacttaaacgggggagtccagccatttgttccaagcgattgttcgccagcagaggttctattcctcattgcaacggaagatccctgtgggtgtaaaccactcccttgtcaccatttaccacttgtccactacctcgtagaatgcagcgggtagttagaagcccatcaacaccaacaggtccacgagcatgtatgcgcccagtacttatgccaacctctgcacctagaccaaagcgcgtcccatcacagaaccttgtgcttgcattatgaaacacagccgcactatcaacttgctgcagaaaagattctgcagccttttcatcagttgtgataatgcaatctgtgtgtgcacttccataacgatttatatgatcaattgctgaatgcacatcatcaacaaattcaagggtgcatgccattgagctatactcatgacgaaatgaatctaccttgggcagtttcagtttgtcatgtgcaataggaccaccataaatgactactccttctttttcaagttccactaatagatcatcaaggccctcactcttgctcagatctttatgaataagtaatgtttccattgcattacacgcagctggataatcaaccttagcat

SEQ ID NO: 13822 - DNA, 2776 bp, Setaria italica
  Peptide Sequence Number=SeqID_79796
agtttctgttcggcgtcggccttcagcaccagcgccggtggcacaggcaggcaccgccgcatccgagccactcgcgaccgagccgccacggcgaggagagaatggggaggggagggatcggaggtgcggtggccatggagactgccgactccactcgggcattcgtcaaggacgtcaagcgcatcatcatcaaggtgggcacagctgttgtcactgggcagaatggccgattggctatgggcaggcttgggtctctgtgtgaacaggtgaaacaactgaactttcaagggtatgaggtgattctggtaacatcaggcgccgttggtgttgggaggcagaggctccagtaccggaagcttatccatagcagcttcgctgatctgcagaacccgcagatggactttgatggaaaggcctgtgctgccgttggtcaaagtggtttgatggcgatatatgacacgatgttcagccaacttgatgtaacgtcatctcaacttcttgtaacggaccgagactttaaggatccaagttttggggaccagctccgtgagactgtttttgcgctgttggatcttaaagtaataccactatttaatgagaacgatgccatcagtaccaggagacaaccatatgaggatccatctggtatattctgggataacgacagtctggccgctctgttggcagcagaacttaatgctgaccttcttatcatgctaagtgatgtggagggactttatagtggcccaccaagtgatcctcaatcaaagatcatccacacatatgttaatgaaaaacatgggaagctaattagtttcggagaaaagtctcgtgttggaagaggtggcatgcaagctaaagtgtttgctgctgctaatgctgcatcaaaaggcgtacctgttgtcattgccagtggatttgcaacagatagcattattaaagttctcaaaggagaaaagattggtacacttttccacaacgaagcaaatctgtgggagtgttccaaggaagctacagcccgagagatggcagttgcagcaagagactgttcaagacgcctgcagaagttgtcatcagaggagcgtaagaagattttactagatattgctgatgctctagaagcaaatgaggatgcaattaggtctgaaaatgaagctgatgttgaagcagcacaaggtgctggttatgagaaatcgttgattgctaggatgaccctaaagccaggaaagataacaaaccttgcaagatccattcgtgcaatcgctgacatggaggaccctatttcccatacattgaaaagaacagaggttgctaaagacctcgtttttgagaaagcatattgcccactgggtgttctcctcattatttttgagtctcgccctgatgcattggttcagattgcaaccttagcaatccgaagtgggaatggtcttcttttgaaaggaggaaaagaagctatgagatcaaatgcaatattacacaaggtcataactggggtgattccagatgctgttggtaaaaagctcattggccttgtgactagcaaagatgaaattgctgacttgctagcgcttgatgatgtcattgacctagtcattccaagaggaagtaagaatcttgtctcccagataaaagcaacaaccaagattccagtcttaggccatgctgatggtatctgccatgtttacattgataaatcagctgacatggatatggcaaaacgtatagtattggatgctaaggttgattatccagctgcgtgtaatgcaatggaaacattacttattcataaagatctgagcaagagtgagggccttgatgatctattagtggaacttgaaaaagaaggagtagtcatttatggtggtcctattgcacatgacaaactgaaactgcccaaggtagattcatttcgtcatgagtatagctcaatggcatgcacccttgaatttgttgatgatgtgcattcagcaattgatcatataaatcgttatggaagtgcacacacagattgcattatcacaactgatgaaaaggctgcagaatcttttctgcagcaagttgataggtattgaagctctttccaccattcttgtggttggaattgcttatctaagtaccatttatgattgatttattcgataaaacttctgttttatgatgattttgaatttaatgagtgtcatgacatttctgttgaactggaacagtgcggctgtgtttcataatgcaagcacaaggttctgtgatgggacgcgctttggtctaggtgcagaggttggcataagtactgggcgcatacatgctcgtggacctgttggtgttgatgggcttctaactacccgctgcattctacgaggtagtggacaagtggtaaatggtgacaagggagtggtttacacccacagggatcttccgttgcaatgaggaatagaacctctgctggcgaacaatcgcttggaacaaatggctggactcccccgtttaagtaccttttcttcattccatggtgcaaagatgatgtctagtgttgtttaaaaaagaggggaaggaactggtactatgtagttctgcgatgcctgctgctcattatgttggatttgcttggaccattttggtgcctgtaaggtgtacttgttgcttgttgtgtacttgccggtgtaactatggtacttccttcgagacatctgtattagaggtgtggtagctagagaggtgcgatggctccggatgaagtttgtatctgtttctaggctatgatagtgtgtgttgtgcg

SEQ ID NO: 13823 - DNA, 253 bp, Setaria italica
  Peptide Sequence Number=SeqID_79797
cacaggacaatgaggataatgctctccttgccatacgaattgtgtttgacctcctccgtaacttccgcccaactgttgaggcggaggtgcagccatttcttgattttgttgttgacatataccgtaaattttccagtaccgttagctacttctttgataatcccaacaccagtgtcagcatggctgcttccatgcccatgcagcatttggaccccactactgatgccccgggcatgatgcaagtcgctggtgg

SEQ ID NO: 13824 - DNA, 527 bp, Setaria italica
  Peptide Sequence Number=SeqID_79798
ttgtagtattcctaaaaagttacttatttgaggaagttggcaccattaacgcccattgatgcgggacaagtgcggggaaaaaaatgcctcgccctggtggagttcggataatgtaagtgcaacgaaacagctcaggatccagtgtaaatgcaatcttgaacctaaaaaactgccttcctcgtgcattttgttagatggctggcttcagtacacatgtccatccacacagtatagcaattttttgagtgtctatatcttcttgtaacctgataattctggttgtggactcaatgactagatgagcaccatgtcaatctctagttccatctatgctaattggagttggcgtgagaacattcacattagattgattagattgatgctagggagatgttgcaagaagaatgaggatagagcaattgtggtggatgactaggctgccctttccaccctaaacctgatgtacagagttaaggagtagaatagattgtgtgatgactaggctgcctttcaccctaaacctgatg

SEQ ID NO: 13825 - DNA, 249 bp, Setaria italica
  Peptide Sequence Number=SeqID_79799
tgacgacaggggcattccagctcaagtacaaggatgacgaggatgagtgggtgatcctggcaagtgactccgatctccaggagtgcgtggacatcctggactcaatcggctcgcgtaacgtgaagcttcaggtgcgcgacctcccgtgcctcatcagcagctcgggcagtagcagctgtttgcaggtgacaggacgggaaacctaggggggtcaccctaaaccgtagcctgttgtagtaggtctagtaa

SEQ ID NO: 13826 - DNA, 1041 bp, Setaria italica
  Peptide Sequence Number=SeqID_79800
ggtcgaaatggaagcaattgcctgacatttggtcaaagaatatagcaatgcatgagcagttacccatgcaagcattcttgcatcctgtgaggtttgtcttaggtacaggcgacgtgaagctagtgccgacatacccaacaccactgtctagttgagccaactgaaacttgtcctttgagttgcacggtgatttgatgccagggttgcagtttgcatatgagctgagtgctgaagggcactgacaccctgtaccactgttgcaaatggtatacggcttgcagtgggcaggcatgtcacatgagtcctgcggaactgtggtagggagagtactcctgctactaacactctggagcatatagaaggtaatcagaccatcattacctaggacagcagccagtgtggtgttagcagcgccttgctgcacaatgacaagctgtgattgaagaagccccgattgatcataaaacgaccaggaacttgaactaaggtttgcagagtatatgttgttgtcattcttgtcgacgatcatcctgttatccttcagagcggaccagtatggttggggcatctgtaagcccgcatacaacatcatgtccccagatttgatctgaagcgtataggtcatgttctgtgtattggaatggctcaccagagtcatcccctcaatgaagctctggccagacagaagtgtgtccgttggatggctgaaactctgccagagaggagaagagctgtccttgccaaacactataagattgcctgagtccagcagctgcatagaggtggcccccttgccggagatattcgcggtccagattgtggagcctccagactgcaggtaggcattgccatccttgtcaaacacaaagttgtctgaatgggaaactggagagttagcattagcagaccagacaatagaagtggtggccaagtggaccactgcaaggaggtaggacatggtgtctgacacgctgttggtgacaaagccaaagccaaacacagaaccattggagagaagaaaaattccattgttatcaatgt

SEQ ID NO: 13827 - DNA, 653 bp, Setaria italica
  misc_feature (74)..(74): n is a, c, g, or t
  Peptide Sequence Number=SeqID_79801
cagctttgttcttgatatgttggctagacattgaaatcaagatgtcctgagtattcaaggcagctccactcccngaaaaatttccatcaacagcttcttgaaatttctgcacctctttggaattatttgtgaatgttgagccatcaaaaccatcacatgtgtttgactccgcacaatctgatgatgacgtatcctgcataaaagttgtcgagggatccataacagggagtggtgaatatgactgaacgcctttgctgtcaatatgcttttcactggcaggatcttcaggcaccataattttggaatcatgaaggtgcagtggtatagatttttcagtatgaatgagcttttcctgattagcatactgatcatcacaagttggcgtgctatgtttcatggtgtcagtgtttttcgaactatcataacagggaccaagcagctgtggattagttttaaagcacttttgtttccctgtggtaattttatctgtcgtaaataatttttgatcagcaaagaatgaagtttcaaggatcaaatggtaagctgcaaagacagtgaaatgaaggacacgcttaatcttcttaagttcttctcttgttgctcctttcagcaatattgtacatcccagaggtcttggaaaaccctctagaaac

SEQ ID NO: 13828 - DNA, 695 bp, Setaria italica
  Peptide Sequence Number=SeqID_79802
agggtcattaggtgacttgctcagtgtggcttcaaaaccttgtagtgcacccttaaattttgcttcttcctcttgagaaagcttttgtttaacaactgcactttctttgctaggactaacacttccataaggaaggaaatccccaaaagcgaagactagtccaaagacaacaactgcaacaccaattccgacccttgtaccaaagccaattgtacttttatctgactcaattggagcatcataatcaatagcttgataatctttgttctcttcagctttctttttctcaagtgcagaccttttaactgcttccactttttccagaaatttcttatccaaaacttgtttaccagatctgttttcgcttccagttcttaattctgggacccattggtccatattctttggatttccagatattaccttacttggttccactccaacatctttaggcctcttcttgcttttaatttttctcttattagtcgaatccgcgccaaagccacgcccattggtagcaaagcatcgaaaacagaatgccttgtaggttctatggagagccatatttgaaccaaacattttgatatcagcactatgcccgaactgttgcaccacccatcccggtgccgggagaccggcggcgcccatcggcttcaggaagcggtagtttttttaccccggaaaaaaattgaggc

SEQ ID NO: 13829 - DNA, 1041 bp, Setaria italica
  Peptide Sequence Number=SeqID_79803
cacagggaatgcaactgtactttaacagcagccgtgaaattacaagcccctagttactattcaaggaaagacgccacaggcataaaattgaacgcaggaccgtaatttgttccaacatatttaaatgtttatccaaggtgttctttttctactttttgcttcaaacaacttagcaataatacaatacaaaacgtcccagattcctttatattgctatgatacaagaagtccctaacatgctgttggtcgtccgtgccaatacgaccgcgatctatttgctgacaaatatattcgctttgtcccatttggctgtgtctacgggttggcacgcagtgggtatcactcagagtttcctacatttgcacctacaaatggaccgaatgatttcaatgatccaaaactgaccattacatatctcctcaactatctttgtgcataacgatcaacgagcgcctttgctgcctctggggcaaagaatttggcctgaataaacattctttctgcatcaccttctttaccattttccttcaatataattcccttcgctaaataaccacggaagtcttcaggatgctcagtgatcaacttatcgtagacggaaacagcatcactgatatggccccaatcagaataagccttccctaaaagcaagtcaacttggatcgggtcaatatcttgaggcttctggccaccattgtcatttgcagcctccaaatcagcaagtcgtgtttgactcttttcacttaatttttgacggcatgacagaattacatcaactgcctgatctggcttcttagcagcaagtaatgcatttgtcagcccacggagaacttcaaagtcaatattatctgatgaagataaagcgcttctgtatgacgatgaactcccttcataatccttcagctcaaactttacttcacctagtaaacggtatgcttctgctttatcagggattaccttaactagcttctcaagaaacgttgatgccttttcatgttagtactaattaaacgtaattactaaacgtaagtacgtacctta

SEQ ID NO: 13830 - DNA, 1757 bp, Setaria italica
  Peptide Sequence Number=SeqID_79804
tttagttcatctccatttgagcttgacaatgattgtgttgatgttgaatctgaattgccactagtctgtggtggactttgattagaatcttgctgcatccatgatgcacaattaggagaatcggctgccttaaagggaggtggaggtgaaccttcttgcccatcctcaaagccttccgtatcatggcaagtgtcattcagatcaaaatccttaagcttgcatgatgtaggctctggagttaccactatggtagccttcgattgtactggcacagcagacgatgatgcctgtccacgatgactaccattcacgaaaggcaactgagagttagatggccctgcagcctcttcagcagcattagctgttccagaggttccagcatttgatccattttgcaggctttggtatgcctccaggagtttacatagttcttttggctccagtgatttggcaacagaccctaggttcttcaaaagagtggatagcagctcctggctgtttgaatgctgaacactgtcagagttcaaattagcacaaattccaataagactcagcaataaataattgctgactttgtcctcaattgaagcagccccgccaattgtgatatcagggcgagttttcctcctacgtctattgtggcctgctaagcgtcgccggcaacttctcttcccttcatcaaattcttgaagaaggtgaaatctactgcattgctggcagaacctctggacagtgttcccgaccacagcagtgctggccttagcatgcatctcgcagaccttgtgccggcggtggtaatccttcgctgcagtcagatccgccccacagccctcaacctggcatgacggcccacttgagctgccaccttgcaccctgatcttctttccatttctctcatcctcatttacatcaccaccctccatcgctccggcaccaacagcattacccccaattctcaagctcagtgacccaccaccattcacaatggcgtcctgatcctctctgtcatcatcatcaatgaccaccacccttttcctcttatcagaatcgcctccaaggccattcctagccacctctgcctcggcttcctcggatgatgatggcgagctgttcaatcctgagccatgcgccgcagcagtgggcaccggtgtggcaacaaagccctcactgtcccagctccaatcgttgaggtcccagccaaacactctgctctcacgcctgttcaggtcaagctcacccagcccgccgccgtacaagtggctgctctgcgcaccgagcctggcggcctccatgtcccctcacctcccaaaactctacacgaaccttcgatcacagctagcctccccgactcttcgaaggagcgcagcaaccgcgggagccgagagatctagtcggctcccctcccactctgaaaatcgacgaaagtgacgcccacgcagtcccggatccacaccagagaaacccacatgacctcgcgcctccacatccggcaagcaggaatcagaaacaccgccgccaatccgagctcatacggcgcgaatcaccgaaacattgcaggggagaaaaatactgaggcgaatcagcgagacaccaaaccgagcaaattggcggcccaggccgcagcttcgggaacgaatcgagctccggagttgacgaactgggcgaatcccgctggagatggaggaatttgcgaggaagttttggtgggaaggcagcaacggagtcgaggtggggagcagaggtggaggggaaagagc

SEQ ID NO: 13831 - DNA, 391 bp, Setaria italica
  Peptide Sequence Number=SeqID_79805
tggggtatagtaatactcggcgtgtacacagtttctacgcgtttgaccccaaaatttccggaaaatacgaggggcccaggctgtgcacagtatactactgctggtagctggtagacgaggcatcgagagtataaaaacacactttggggagcactgaactgggctaggcggcgtgtacaattttaagacccggatggagatgcttgatcttgatggaccaaggacggtgaccaaaatacacacacgtccttgtcatggatgcagaaaataacgctcgcgcgtgctaccaataatcttgaaaccgggcactggtttgacttgccaatactttttgactaaagaattatgctcctcatccatcgcacatcgtcacacgttactgcgacgaaaa

SEQ ID NO: 13832 - DNA, 309 bp, Setaria italica
  Peptide Sequence Number=SeqID_79806
ctaaattaatttcttaatacttctttttcatcaagtgtacaagaatattctgcttctaccctgttggatatcacaaaacctttaaacatccttaatgattactacagtgctcccacatttttcttggactatgtatgcttagagtgtatttttattattttgtgttggggttgattgccatcttccaatcttgagatttcttcttggtctcctatgaatatgaatctactcatttggttggcagacccttaccttgttggtcagtgactcagtgtcaccctaagttgatttgtctgactatggaatcac

SEQ ID NO: 13833 - DNA, 1720 bp, Setaria italica
  Peptide Sequence Number=SeqID_79807
agaatggagaggatgcttcaacaattcggttagatgaactaattgttgtttctgaaaaggatctaaatcaagctgaaggtgaaagttgaatagaatgtgaccaaaaagaagcaacaaaaacaccttcctggaaagtaaccagagagcttaagccaccacttgttcttgaggctttggctgcttctgggttgagatctctccggtatgcccgtgaagtcgatggcttaggaaaggtagttgctttggacaatgataaagcttctgtcgaatcttgcaagcgaaacataaaattcaatggtgcttccgctactaataaggtggaagctcacttggctgatgctcgagtttatatgctcacgcatccaaaagaatttgatgtggttgatcttgacccttatgggtcgccatctatattcctcgactcagctgtacaggctgttgcagatggtgggctattgatgtgcactgccactgatatggcagttctttgtggtaccaatggagaagtttgttactccaagtatggttcgtacccaaccaagggcaaatattgccatgaaatggctttgagaatcctccttgccagtattgagagccatgcaaatcggtacaagcgatatattgtgcctgttctctctgtgttcatggatttttatgttcgtgtttttgttcgagtatacacttctgcaagtgaaataaagaatacacctcttaaactttcttatatatatcaatgtgttggctgtgattctttccatcttcagtgtcttgggaggactgtttctaagaataacagtgtgaagcatgcacctgctattgggcctgctgtctcccaagagtgtagtgattgtggaaagaaatttaatgtgggcggaccgatatggtctgctcctattcatgatcaagactgggtagtttctactttgacaggtgttaagtcaatgaaggatagatatcctgcatactataaaattacttcagttttaactactgtatcagaggagttacatgacattccattgtttttcagtctccataacatagctggcactgttaagtgcacttctccatctttggttatgtttcggtctgcggttctaaatgcaggctatcgaatctcaagcacccatgttaatccacttggggtaaagtctgatgccccttgggacgtaatttgggacatcatgcgctgctgggtgaagaatcatcctatcaaggaacagccccgtgactctccaggcacggcgatcctttcaaagccaccaacactagaagcgaacttctctagggcagtagctgccctcagcaaggctcaggcgaagaaggtgaagcggttccttccaaacccagaacggcactggggtccaaaggtcagagcaggccggaagatcacgagcaaacatgtctctctgttgggccctgaggctatcaatgctgctctgaatggagctgtcagacacgaagatggaaatggagcagcgccagataaggcagctccagaatccgaagggctcaaagatgtgccctcgaccaaacgccaaaaaatcagtgatgacgaacaagcaaatgaaccttgatcgaccaaatcaacattaacttttgtttgctttatctttttgcttgcgagctgtgtgttatttgtatctcctgttgcctggacaacgatgaattttgatcggacaaagttttgagctaggtttgccaaagctttgcttttatg

SEQ ID NO: 13834 - DNA, 542 bp, Setaria italica
  Peptide Sequence Number=SeqID_79808
tatgcagttcacaagcaatgtttcctgggaatgaagttgctgagatataccatgaaatggccaaaaagttttcttttgtctcaggatggcattagcttgatggagaatgctcacggtgtcaaggagttttcaattaccagcatgaaaggaggttaccgtcgagtgttccagcggccaattgactttcaatgggagctcatgacttacacagatgacagttcatctttagcagaaactgatttggatgttctttccagaatcaagcctaaagaagcaaatgagcttgtaactaccgaccagtcacaggataagttggagaaggattcagatacctccacgccaactaatgggagtgactccctagaaaataagcctactggcagcccagatacagcaccaagaaaaatggccataaaattagtatttactttaccagcatcatgttatgctacaatggctatcagggagcttctaaagaacttactaaacctaacaaagttaagaacaaataaaataaacaaaagaaaaaaacaaactaacaa

SEQ ID NO: 13835 - DNA, 1844 bp, Setaria italica
  Peptide Sequence Number=SeqID_79809
acttcaagttccttgttacggacacagtggaacacagtgatggtatccagaggtgcatcagggtgcggttggggtcaggagctggtggtggaaggggcggtggtggtggtggtcgtgggaaaggaaggaagcggaagaacatgggtggttctgattggagagatgaccggccatttgatagtagagggtctagtaattggtctgatagtgttgggaagttcctgaggtttcacctgtacaaagagaataaggacactcaagaagcattaggaataataggaaaaatgttaggacttcagccacgttcatttgggtttgcaggtacaaaggataaacgtgctgtcactttgcagcaggtaaccgttttcaaggtgcaagccaatagattggctactctcaataatcggctatttgggattaaagttggaaacttttgttatgtgaaggagggacttgttcttggtcaactcatgggaaatcaatttacaattactctgaggggcgtcattgcagaatccgaagatgtaataaaagctgctgctgatggcttaggaaagaatggatttatcaactactatggtttgcagcgctttggaagtggttcgattccaacacaccttgttggggctgctttgcttagaggagagtggaaagctgctgtaaacttgattcttgatccaagggaaggagagcgtgatgacataaatgaggtccgcaaacattacaaggaacatggtgacattgataaagcactgaggaacttccctcgacacctcgtagctgagagggctatactacagtgtctgaagaaatgccctggtaactatctacaggcactaaagggtataccaagaacactaagaatgatgtatgtacatagttaccaaagttacctttggaatcatgctgccagcatgagagtggaaaagtatggcatgtcacaggttgtagaaggtgacttggtttataacaaagaaagccctcctgaagaatctacttctgtagatattgcagaaactgatgatggccatacaaattcatctgagattgatctatgttctgaagcacaaccagaggaaaccatccagtctgtgaagatagttgattctggagatttgttaaaggggatgtacacatttgatgatgttgtccttcctttgcctggttcacaagcaatgtttcctgggaatgaagttgctgagatataccatgaaatggccaaaaaggatggcattagcttgatggagaatgctcacggtgtcaaggagttttcaattaccagcatgaaaggaggttaccgtcgagtgttccagcggccaattgactttcaatgggagctcatgacttacacagatgacagttcatctttagcagaaactgatttggatgttctttccagaatcaagcctaaagaagcaaatgagcttgtaactaccgaccagtcacaggataagttggagaaggattcagatacctccacgccaactaatgggagtgactccctagaaaataagcctactggcagcccagatacagcaccaagaaaaatggccataaaattagtatttactttaccagcatcatgttatgctacaatggctatcagggagcttctaaagacttctacctcagttgcatatcagaaaacactcagctgctaaattttggtaccaacatgggttatttacctgatcagtgatctcagctttcaggtggtggccatgttaacccctgaagtgtcatagctaggtgttatttcggagacaacttcatgtagctcttgattagtgccgctgcttgttgtcttccttaaactttcgtttttcaataatcagagtggttat

SEQ ID NO: 13836 - DNA, 1349 bp, Setaria italica
  Peptide Sequence Number=SeqID_79810
ggggggcaaaatacagctgatctactcatctctagggcaacaaaaaagcaccatatataaagcacatacaatatacagggctatcgattagtatattctatcagttgttcatgagatgaagaacacagtggacactgtcagtaacagcaacgggtaagagctagcgaggagcttctgtaggttcgtcgttgcgctggagggcggagccgtgcctgcgaccgcaggcgtcactgccggcgaagtctgctgctcgttcgacggcaacgggtcctctgggctgttgtgctgcgatgggcccagaggcacagtcgtgctgttgtcaacgtcacggcattcagagcggtaccagcccagcttcatgttttctcggtcgaagactacatggtatccaacaaggaaattctgggcgataattccaataggttctggtgatggcagcaccgctaagcaaaacccggcgagcgctccctgtttgtcattaaatggaaggataggactaacagcctggaagctcttgttcgcagcaaaagtcagtgttatagttggcacatcaggcatctcaagaggactagcactatagcaatacttccaagtactgtcttcaaaaggcactcttgaagcattcatttgtttgtcaaactccactgtgacagccttataaacgtcgggaggaagagaagtaaatgatgttccgctatcaactaaagcctcgaagccagtatcctcaagacatttatgtccaatacaagatttatcaacgttaacagcataagtttgaagtttgccatacagaggaacaaatggtgtagactgttgagtggacactccttgatctccaaagaaaattctcccagaattatcttccttaaagcacatcgagaaggaattacgaactagtccagctcttgcaaggaaactaggaactgatatatctgccattccaaggccaaggagtccatccggcgcaataccatccaaaatatcaccactttgctttctaccacaacctataataactgaagcgttcaccggtacatgaccctgcctggaggccaagtgcagtgtatcctcaatcagcaaaccagagctggtagtattttcagaaaagtactcaatattgtatgggcaaggctgctttgggtttgtacagcctgaacccagtaggcatagctcatggctgcaaggaagatgccgacttgttgttgattcagcaggcttgtatattccaagatctctatccagatttccacggtagccagacagaggagcacactggatacagtcacagggtacccaaaacagatcactcccagtatccaatgcaaccagaaatgaggtgtttggcgtcc

SEQ ID NO: 13837 - DNA, 288 bp, Setaria italica
  Peptide Sequence Number=SeqID_79811
atctcactttctgggccaccgaaaccaacgacgcaaggcttctacccacacggaatctcatcaccatgcataattttctcaggggtggtgtcttctaggtccaaagtgttttccaagatcttgcaaatcaacaatccggttcttaaattctcgaagcagattggagccatctgattcctgcttgaatcgacacccggacttgaagaggagcttgtcaatccagtcctcaatatcacaggcgagcttgcggagctgcttcatccaatggtggtccagcgcgttcgtcac

SEQ ID NO: 13838 - DNA, 532 bp, Setaria italica
  Peptide Sequence Number=SeqID_79812
cggagattccccctccctcccctcaccgtaccagacaaggaataggacggagaaccaagagcggcggcggccggcggcagcgaaggagaaggcgagccaaggaaaagatgcggactcccgcgatgcgcgctgcctaaaattttcatttcgacggtgaccgccgatgcactatcctggcgccggcggcgacaacagaaagccaccgccttttattggagacaagacaagagatcctattcctaatcctcctccacctccatctccgattgcttctgcgtgtgggcaaggcgaggtgaggtgaggcgaggccaacggaaaccagcatagcgagattcgctcggccgacggggtggccgggcggaccatgcagcaggccgccgccccatgggcgatgaagaccctgcccgtcctaaggacccacctctgcgaccccacgcgcctcgccgcctcctcctcgtccttccactccacgcccgcctccttcgccaagtggaagaacaaatgggactgtcccaagagcgaaaaaggagcg

SEQ ID NO: 13839 - DNA, 353 bp, Setaria italica
  Peptide Sequence Number=SeqID_79813
ttgtttatttactttagttaggttatttatttcttaaagtaggaatttggaagatatataatcatctttctgccactagatcatgatatctgaccatcttctaatcggcagctggggtgtgatatgacctgcttcaatcggcaaaaagaggtgtctctgcaaacctcttcaagtgccgagatacctgcagtgttttgaggtaggatcaatgatgaccaagttcctaggaagcgatgggctatttacataaatgatgtcctcctcatctggctcgtctgcatcccagtcaccttcttcttcttctgatacatatgaaccttctgcatcttcctccccgtcttttccttcttgct

SEQ ID NO: 13840 - DNA, 181 bp, Setaria italica
  Peptide Sequence Number=SeqID_79814
gaagaggtttgcagagtacacctctttttgccgattgaagcaggtcatatcacacccctgctgccgattagaagatggtcagatatcatgatctagtggcagaaagatgattatatatcttccaaattcctctttagaataatcctaaaactaaaaagtaaaaaaataacaaaacaaaaaa

SEQ ID NO: 13841 - DNA, 1729 bp, Setaria italica
  Peptide Sequence Number=SeqID_79815
actgatagcttctgtagacactctttcctccagatcagttgagttacttgtgcttgtaacaagacttcatcctctttagatgtgtgttcagcagattgcttgaaccagatgagccgttagcatcagcaatttcacgatggcaaaatgtgttgttcagtatttgtaatgcctgcccaaaataagtaggcacatgcaggagattggatcaccagttcaccacagtactcttcagctttcacaatcctcttctagctaatgaaaattttcgctggtgaaaagttgaaactaaatagaattgctgcagcgcataaaattaagagctgaaaaggcaagtcatgcttctcatgatggtcacctgaataaccatagctgtactagaacagcagatcaattcaattaaagcacaaaccaccttaggaactgaaggactactaatttccagaagcagctcagctggagggtacatttgtaactttgtccagatcattttttgactagctcagatgacaaagtgctcttttatcattaaactgatgttactctattacataatgatgagaaagaagtaaagactgtacccaaaccatagaagaaaatggaaactgaaacacagcaagataactaggcaaacattcttagaaaaaagaactaggaaagatacacattgaacaagtactagttaacataagacaggaatgaacatcagtcaaaactgtcttgcaccgatggtcagatatcatgatctagtggcagaaagatgattatatatcttccaaattcctctttagaatatcctctgtatcgacgagccatgaagaaaggatatgaccagcttctaatcggcagcaggggtgtgatatgacctgcttcaatcggcaaaaagaggtgtctctgcaaacctcttcaagtgccgagataccttggagcccttcggcaagcagatgagcagtgagttatgaacttcactggattagactccaaagagaactgcagtgttttgaggtaggatcaatgatgaccaagttcctaggaagcgatgggctattttacataaatgatgtcctcctcatctggctcgtctgcatcccagtcaccttcttcttcttctgatacatatgaaccttctgcatcttcctccccgtcttttccttcttgctgttccctttcctcctttagtttgtcgagtatagcaaggatcctgcttccgcgctccatggactcatcctcgatgaaccgtatctctggcgtgaggcgcagcttcatccgcttgcctatctggctcctaacatacttggtcttggccttgagcccctcaatggcaaccttcttccccctctcgtctccaaacacggacacgtacaccttgcacacctgggaggtcgttggagagctcgacgtcggcgatggttgtgagcgacgaaaggtaccggtcggcgccgagcgcggcctcggggaggaccgcgcgctgcaggacggggtcgcgggtgagcatgtcggcgagctcccgctggatctgcttcgccaccatccgcacccgccgctccttcgccatgcaccgcaccacgcgcagcgacgagggcggcggccgcagcgacgacggcgggagccgcacgaaggtaagagcacgcggcaggggcggcggcgccagcgggcggcacggcaacatcgcggccggaagcttcgatcggtggagagcgcgcgtgggagagggagcggcgaaggggatagt

SEQ ID NO: 13842 - DNA, 760 bp, Setaria italica
  misc_feature (15)..(15): n is a, c, g, or t
  Peptide Sequence Number=SeqID_79816
ttttttttttaaaanaacaataacaaggaaagaattaatagaatactgtaataaaaaaaaatgtgctcactttaagtaccgtacaattagcagtatgaaaaaacataatagtttcacactgaatggctatgttgcccaacaatttgcactattgggcaataattcatcacaatttcacaagatattgttcgactaactgatgacttggcggtttgaacgcacaacacaaaagttatagaagtaatacattgttaactcagcacataaaaagatcttaagataatacaactgagctagcacagaggtacatttcatatgaactactattagccaaaatatcttctgcaaactaaaggataaggcatctcatctctagttgctatgcgcaaactaacctagtaactacttaaaaaagttaaatcaacgatgcggatactaaattttttgagatttggtcactttctcctcctcccacatatccacaaggacagaagggcatgcccttttcaggtgcagatacccttggcttgccaccacctcatttattctatctgaagagttgatatactcaatgcaagcatctttgagctttctgcagttatgctggtctgctagacataggatgattgcaacagtttcaacatcaagacttacgcaaagaattccctcacaaatcagcttgagcctctccatggcatatctatctgcagccacaagcaggtgtttcatcatttccttgtcatcgctgccaagatcctcc

SEQ ID NO: 13843 - DNA, 1743 bp, Setaria italica
  Peptide Sequence Number=SeqID_79817
aagcccttctgcggaggaacaagcggcggcggcggcagcgcaggagcagagcgcgggggcggaggccgccgctaacgggaggaagaggcggttgtatggcttctccgcctccctcgtcgtcgcgtcgtgggtcgccgtgctcctcctccactccctcgtcggacatggcgacggtcaacgagatggaggaggctctgctgtcgctcttactgtcgtcgagcctaccgtgaatgaaggttctgttgatcctgttgtacagggggagcatggggagaatttggccgtgcctggtgatacttgtgttagtactgacgaaaatgtcgtgctttcagaggagacactgatgcaagcagatcagctgtgctccaatgatgaggtgcagagtgagaacactgaagctctaaccaaagatagtcggattgagctttcaggagatgagggtgggagtcttcctcagacagatcttggttctggagttcaatcaggggcaaaggcagagagcgaagatttgccgagaccagcaagattaccacgggttgtccctcctggcctcgatgaattcaagacgagagcaattgctgaaaggggacctggtgtttccagtcaacctggaaatgtcatccaccggagggaacctagtgggaagttgtataattatgccgcagcatctaaaggggctaaggtcctagaattcaataaggaggctaagggtgcctcaaacatcttagacaaagacaaagacaagtatctccgcaatccttgctcagcagaggggaaatttgtcatcatagagctttctgaagaaaccttagtagatacaattgcaattgcaaattttgagcactattcttctaatccgaaagaatttgaattgctgagcagcctgacatatcccacagagaactgggaaacacttggaagattcactgtcgcaaatgccaaacatgctcagaatttcacttttcctcagccaaagtgggctagatatttgaagctgaacttactaagccattatggttctgagttctactgtactctcagtatgcttgaagtgtatggaatggatgctgtagagaagatgttggagaacttgattccagttgagaacaagaaaactgaacctgaggacaaaaccaaggatccagtggagcaaatacctttgaaggagcctagcgggggaaaggaatctgctgaggagccccttgatgaagacgaatttgaactggaagatgataaacaaaatggtgatgcactgaagaatggtgctaatgatcaagtttcagagacaaggacacttcaggctggcaggattcctggagatacagttcttaaggtgctaatggagaaagttcaatctcttgatgtgagcttctctgtcttggagaggtacctagaggagttgaacagcagatatgggcaaatatttaaggattttgatgctgatattgataacaaagatgttttgttagagaagatcaaacaggagttgaaaaaccttgagagcagcaaagatagcattgcgaatgaaattgaagggatcctctcatggaagcaagttgcttcctcgcaactaaatcagctggtcctggataatgctttactcagatcggaatttgaaatatttcggcaaaagcagactgacatggagaacaggagccttgctgtttattattttcttctagtttttgtttttcgtctttgtctttagtcttcttgctaagctgtctataggcctgatgtcca

SEQ ID NO: 13844 - DNA, 461 bp, Setaria italica
  misc_feature (20)..(20): n is a, c, g, or t
  Peptide Sequence Number=SeqID_79818
cagttgcggagatacacgcnttaacctgcggatgtggagtggcttcatttgttttttctaccaaagcagggcatgaaagtcccggtatgcattggttttttggtcgctctgatattggaggccaggaagggaatggtgttggcattggaggcaagctaggagcacaggatggaatgaaagcttctaggagtggggacaacttcaagtccctaattctgccaaaaattaaggtattgaggccaaggttccttgaactccattctgtgatgatttgggctagctgtttgagcctataaggttgtagaaaattgctgcgatctattggggcaatggaaacttggaccgtaactggtgctgcaaccgttgaaccatttgtatttgttaacttgacaaataattcctcatctggtgtctgctgcaatcttattgcaagctcattcttcatctccttaagaaattcc

SEQ ID NO: 13845 - DNA, 309 bp, Setaria italica
  Peptide Sequence Number=SeqID_79819
atccgggtctaagctggagagcattacaatcaactgatggcattttccttttacgcaaaaacaggcaagcgtcctcctctgctgaagaaggaggaggaggagccagtcccagtccgggatgggaagcccaaagcaggagcgacttcgcctaccaagatccacgtccaccggtgccgcagcctgggagtggtggaactagctcgagggcgctgccggcaccggctcgaaacaaaaaggagccaagacgagtaactcacatccctggcatttccaaggtgaaggacaaagtgcaggatgcgtggcaccacc

SEQ ID NO: 13846 - DNA, 629 bp, Setaria italica
  Peptide Sequence Number=SeqID_79820
gtcgtactgcaggggtcgtgacgggggcggaggtagtagttgttggcgatgtcgtcggtcccggcgcagacaaggaagaggctctcggtaacgatcccctcggcggcctcgtctccgacgaccccggcgagcttctccttgtactcggcgaacatattgagctcctcctgcatcggcaggacagccactagagtggaggtgagagggtcgtagccggtgccccctgaagcgaagctgacgccggtgcggaggtcgtagtcggtgaggtcagtgccaaggtacgccggaaccaggtccttcaggccgagacgtgacgctagcaagtcggtggggatccggccattggagaagcggcccgtggggacgccgccgttgaggtcgtggccgtacggcctgaagttggacttggtgagcgtgaggacggcgttgttgttgcccgtgtcgacgatggagtcgccgaacaccaggacggccggcacccgcggtccgccaccgcccgccaccgtcaagttgcccgccgcaacttgccatggcgacatgacgacgacgacgaggaggacgagtagccgcaacagcgacagcgcggtaccggcgcgacccatgagctgtatcctaaccactgcggtttg

SEQ ID NO: 13847 - DNA, 462 bp, Setaria italica
  Peptide Sequence Number=SeqID_79821
ctcaatatatattgttcgtttatgaactgagcttggtcctacacagaaattgaaatgtagcttttggtattggaacttgtttattagaggcattgcctgcccatgctaggtcactccgatagaatatgctaacccaactgattatatggctatgttgtttggctattttctcaacactgtcctccatgctctatctgatgtctggttcctgtaggttccaatgttcactgcttctggtcttcgtgttcggttccttaaggtatgtgcaataagtgttgatatgaaaccttgcaacatcctggagatgaaaaccctcacgtgatacattttccaggtctgggagaagagtggttacaacaccgttgagtgggttcgctacatcacgagagcaggatcatacgagataaggtgttagcgacagattaaatctttcaagctccttttgtaactagtttattttct

SEQ ID NO: 13848 - DNA, 1981 bp, Setaria italica
  misc_feature (1950)..(1981): n is a, c, g, or t
  Peptide Sequence Number=SeqID_79822
accgaccgaaagctcccggacgggaagacgacttggtgctcgtgctgccgcgagatctaaccaaaacccgcgccctcctcaccgtccggtgagccccggaccccggcacctcgcggatcaccggcgctcgggtggtacccagaggcgcgcggtggaacccgcgaagagataagggcggcgccagacgctcgggccgcgggcgcgtgggcgggcgacgatgccggtggcggcgtcggccatctacttcctcaacctccgcggggacgtcctcatcaaccgcctctaccgcgacgatgtcgggggaaatatggttgatgcgttcaggatgcatattatgcaaacaaaagaacttggtacatgccctgttcggcaaataggaggctgttccttcctttacatgaggatcagtaatgtttatattgtgattgtggttagcagcaatgctaatgttgcttgcgctttcaagtttgttgttgaggcagtggctctcttcaagtcctactttggtggagcatttgatgaagatgccatcaggaataactttgttttaatatacgaacttcttgatgagattatggattttggttatccccaaaatctgtcacctgaaatcttgaagttgtatataactcaagaaggcgtccggtcaccattttcctccaaggcctcggacaagcctgttccaaatgcgacccttcaagtaaccggtgctgttggttggagaagagagggtcttatgtacaagaagaatgaggttttcttggacatagttgagagtgtaaaccttcttatgtcttcgaaagggagtgttctgcgatgtgatgtgacaggaaaaattctgatgaagtgcttcctttctggaatgcctgatctgaagctgggactaaatgacaagattgggcttgaaaaggaagcccaactgaagtccaggcctacaaagagtgggaagaccattgaacttgatgatgtcacattccaccagtgtgttaacttaacaagatttaactcggaaaagacagtcagctttgtgccaccagatggtgaatttgaattgatgaagtaccgaatcacggagggtgtcaaccttccattccgtgttcttccgacaatcaaggaattgggccgaacgcggatggagattaatgtgaaagtcaagagtgttttcggtgccaagatgtttgcactaggtgttgttgtcaaagtacctgttccaaagcagacagcgaagactagtttccaaacaacgtcaggcaaagcaaaatacaatgcttcgatcgattcactggtgtggaagatcaggaaattccctggacagactgaggcaactatgagtgcagaagttgagttgatatctacaatgggtgagaagaaatcatggaacagaccaccgattcagatggaattccaggttccaatgttcactgcttctggtcttcgtgttcggttccttaaggtctgggagaagagtggttacaacaccgttgagtgggttcgctacatcacgagagcaggatcatacgagataaggtgttagcgacagattaaatctttcaagctcctttgaacagttatttcgaggatccacagaggtctctctgtacggcgtcatgcatgattataaagcacggatattgtgacagaactatctgaaaaccttgtacttcagcagagggggcagggcagggcagaccaggcaattttccttcatgttcttctattcattgtagtctgggatatctattcgcccccctcgtgtcttgtttgtttggtagaaagtatttttgtttgtatatttggcggtagcattccttgttgatcaatatacaccagttgtcagtttgtattgtttttcgccttaaatggatgagtggattcacctggcataacagtgtacaaacatttgaagcataagatttggtataattgcagattagcagtgttttgatgtgnnnnnnnnnnnnnnnnnnnnnnnnnnnnnnnn

SEQ ID NO: 13849 - DNA, 762 bp, Setaria italica
  misc_feature (721)..(721): n is a, c, g, or t
  misc_feature (740)..(762): n is a, c, g, or t
  Peptide Sequence Number=SeqID_79823
cctgcagcagcaaggttactctcggggataaatagtgacagctcatcctgatgtagccaatgagctcacatgccaagttattgaccaatcaaagattgtgattgacgggaatttgattactgggaaggggattgggacagctgttgattttgccctagctatcatcaggaaattttttggccatggacgagccaaaagtgtggcgaatggaatagtttttgagtaccctaagagctgaaacaccaagaattgctgaaactatgacatatgcaacacatttatggttgtaatcgaagacctggctatctgtgctccttaaaaaagtgacctgacgcttttgggacagcaagagagtcctctattgttgcctttctggacagctggactgaaatttccagatccactatatatgttgggattgaccaaatttacactgggaagcttcagtggaagtcatttgttggtggataaatgacagagtgattactaactgattatgcgcatccagaggaaacttaactgtcttcagtgcgcctgtattggtttggaggaaatttcctgcggtttgaagcccttaaatgttgctttgtacaatccgcgcattcgtctgagaagcttatctaactctgcacgttcccaaatactggatttttatgagtgcaagctaacaaaagaatcagtatttgcttaaattggaacttgcgcatcgcgtttttttaangataagttgttttgacctnnnnnnnnnnnnnnnnnnnnnnn

SEQ ID NO: 13850 - DNA, 940 bp, Setaria italica
  Peptide Sequence Number=SeqID_79824
cgtttgttgatgcattagaagcacggaagataactgtcagtgttcgacagacccgggggctagatgctaacgcagcctgtggtcagcatctagcccccgggcctgtcgatgatgacagcaaaggctcttctaggctcactgcctgtgtttcatcacaggttggctgccccttgcgttgctcattctgtgccacgggcaagggaggcttcgccaggaaccttcgaccacatgagattgttgaacaggtgttggccatcgaggagatgttcaaacacagggtcacaaatgttgttttcatggggatgggcgagcccatgttgaacctcaagaggaaactacaaaattgggcaaaggatgatgacaatctccacagtaggtgttcccaacacaataaaaatgctagcatctcacaagcttcagtcaacactggcagtgaggtacatcatcattaagaatctaaacctgacttcgcattcgccacacttcattgtttcccagctaacattttcgaaactctgaagccaattgtatttgactgaaagttttggcaccacaaagttttagctgaacaatgttttctcaaacgcataggagataggactaggaaacacatgctgctctgtttctgtaatttcttgctgaccagtctgtcatatcgtaaatcagcctgcatgccccgaaccagaagctgcgcgaaacaattgttcctagcgcaaagtcttaccccttgggagcactaatggatgactgcaagagttacttccttgaaactggacgcagggtatccttcgagtacactctgctaggtactctgaccgtgccttcactgtacccatctgttttttggagaaaatattgttgaactgtgtttattgtctatctattctgtaccttcttttcgtgctaatatggattgaagttgtactttttgttgtaccta

SEQ ID NO: 13851 - DNA, 639 bp, Setaria italica
  Peptide Sequence Number=SeqID_79825
cttttgattccctgcaacaaaacaaccccactgttttgtttttgctgcctttccgcagtgcccaaggcgttccgggaggcgctgctcggcgctggctggaccgttggccgctcgccggtgcaccatgccgtcactgcctcggatggcactaccaagatacttctcaagttggaggataaccgcttgatcgagacagtagggattcctgtcgatgatgacagcaaaggctcttctaggctcactgcctgtgtttcatcacaggttggctgccccttgcgttgctcattctgtgccacgggcaagggaggcttcgccaggaaccttcgaccacatgagattgttgaacaggtgttggccatcgaggagatgttcaaacacagggtcacaaatgttgttttcatggggatgggcgagcccatgttgaacctcaagtcagttctagaagcacacaggtgtttcaataaggaactcaaaattgggcaaaggatgatgacaatctccacagtaggtgttcccaacacaataaaaatgctagcatctcacaagcttcagtcaacactggcagtgagcctgcatgccccgaaccagaagctgcgcgaaacaattgttcctagcgcaaagtcttaccccttgggagca

SEQ ID NO: 13852 - DNA, 1602 bp, Setaria italica
  Peptide Sequence Number=SeqID_79826
cagagcctgagctccgccagctcgccctcgacctcggccagcaaagctacagggggaagcagctgcacgacctcctctacaagtccagggccagccaaatccaagacttcaactacgtgcccaaggcgttccgggaggcgctgctcggcgctggctggaccgttggccgctcgccggtgcaccatgccgtcactgcctcggatggcactaccaagatacttctcaagttggaggataaccgcttgatcgagacagtagggattcctgtcgatgatgacagcaaaggctcttctaggctcactgcctgtgtttcatcacaggttggctgccccttgcgttgctcattctgtgccacgggcaagggaggcttaccaaggaaccttcgacccacatgagattgttgaacaggtgttggccatcgaggagatgttcaaacacagggtcacaaatgttgttttcatggggatgggcgagcccatgttgaacctcaagtcagttctagaagcacacaggtgtttcaataaggtctgctgacaagtaactaggctgtcttccttctgctctgtatcgccaacatgagcttttctactttcaggaactcaaaattgggcaaaggatgatgacaatctccacagtaggtgttcccaacacaataaaaatgctagcatctcacaagcttcagtcaacactggcagtgagcctgcatgccccgaaccagaagctgcgcgaaacaattgttcctagcgcaaagtcttaccccttgggagcactaatggatgactgcaagagttacttccttgaaactggacgcagggtatccttcgagtacactctgctagctgggatcaatgatgaaaaggagcacgccgaagaacttgcagaactgcttcatacatgtggaggtggttatcatgtgaacctaattccctataatccaattgaaggctctgaatacaagaggccatacagaaaagtggttcaagcgtttgttgatgcattagaagcacggaagataactgtcagtgttcgacagacccgggggctagatgctaacgcagcctgtggtcagctgagaaatgaattccagaagaatccgcttcttgaatcttcgccctcagagcccagcctcgtacctgcttgatggcaggactggagtacgtgtagatcatcacaacattttttaaagccgtttcaggaatgcgaggtttctgtttcaatgagaaaataggtgttgtaagtttgcaactattaagtcaagcaaattatgtagacagacagctatggaattttgaaacactgttgtgcctcactaaatcatgtagacagagcttacattggatgtcatgaattgcaattctcagtagccatgcttgtctcagatcttgccaaaaaaaagggtcgtttttacaacaggacgttgtatccacccccaggcagcttacattagatgtcacgaattacaattctcaatagatcttacaaaaacatgtctttttttttacaagaagacattgtatcgcctccctgggagatattcacgaccaatttcttcaatgatgatttgttttgtgctacttcttattaccctttggtctaattttt

SEQ ID NO: 13853 - DNA, 464 bp, Setaria italica
  Peptide Sequence Number=SeqID_79827
ttttgaattaaaagccaactaaacaaaaagaaagacttggtagtagcaacacttgagcgtaatgagcagaatagtgttatgttaaaacaataaatgttttatataattccaacaaaaaaagccatatcatagccatttccagcctgtttggaagggaaatgcttgttgaattataagcacccaattgtctaaaccctaagggtttaaatcctgaaacacccctttcgaacagaacagactatctttgatggatatcaatagaaacaaaataaatcacctcataggggtcctgttgtgctcagggaattttaagcattcacaaaacatgcgttcatcccaagtatatggataataggacccccttgacaaacaggcagatacaatcaatggttccctccaacagaacatctagaattgaacagattaaactacacctacaacagaaaaagttgaccctccgcatt

SEQ ID NO: 13854 - DNA, 322 bp, Setaria italica
  Peptide Sequence Number=SeqID_79828
cggcccatcccggcacgagtcgcgcgccgccgcatccgcttgtcgcgccgtcgtcgacctacctgctcggccgcgccgctcgctgcccaggtccgctcgccacgacctcggccgccacgcactcgccgtcgccgcggccttgctcctgcgcctcctcacgggccagccgctctcggcccgctaccaggcgcgcgcttggggggatccggcccctaaaccctagagctcgccggctcggctcgctcccccgcgctggcagcggcaatggaggacgaggagatggagaagaaggtgcagcagtacctgcagcgcaaggggttcc

SEQ ID NO: 13855 - DNA, 646 bp, Setaria italica
  Peptide Sequence Number=SeqID_79829
attccttccaccaggtcttcgacaccaatgtctatggtgcaatgaggatgattcaagctgttattcctcacatgatggagacaagaaaaggtacaattgtgaatgttggaagtattgctgctatggcacctggaccatgggctggtgtgtattcagcatcaaaagctgctcttcatgcattgagtgactcactaagggttgaactaaaaagcttcggcataaatgtgatgattgttgcccctggaggaacaaagtcgaatcttggggataagtctgcagcgaagtatgatcaaatgcatgagtggaagtactacaagaagtatgaggaatcactccgagccaggactgacgtctcccagggccctgggtctactccagcatcagagcttgcaaagaaggtggttgcattggctctgaagaagaatcctccagctttcttcgcttacggccagttcactgctgttctgtccacgttgtattacgcgccactttgccttagagattacttctacaggctggtcatgaaatgctagtgcctggaagtataggatggttgtacttgtacattgcggctcaggcccggttcagttcgtagtactcgtattagttaccatatttatagttaattgtaacgttacgttactta

SEQ ID NO: 13856 - DNA, 1416 bp, Setaria italica
  Peptide Sequence Number=SeqID_79830
atctttacctgaaggtgtgaacctattgatgtaggtgcactggtgaagtgttaccttgccagcatccctgaaccgcttactacattttgcacttttatgatgagctttagagatgcgagggtttagcattcctgatcttagaaacatatttgaagaagcttccaaatgttaactacatgacgctagagtttgttacagcgctgctacttagagtaagccgcaaatcatcacttaacaggtaaatctgatccctaattttgttctttttctctgtgctgcatttgccagttgttattctttttggttgctggacactatcgaagggactaggtagtaaatctaaactgaatatagaaatacaaatcaattaacatggtcactgtgacattttttaagaacaccttttaacaatcagattcagcacatatctggagccactgaatttggaattgtatgcctaacattgtaattgttttgtatttttctctttagctttgacaattgtcacaaatggtaggaaattgcaatttgacttcacaccgcttggctgactgtttgggtgtctgaaagacttcggcaactcttttgaataatatgaagcagtgctagaaatcagcaaaactgttcataacatccttagaacacttaatccatagactgcccagttgttcaaggataaggtgggaatgcaacatctatctattggtttgatttgccctagatgtttctgtgaaaaagcccagttaccattgaacatagtaacaaactttagataaagtttatagaatttaaacattagacttttgaagcattgaccaccacagtgttttgtattaccaaagttaaagagcttacatatgaaaaatctcaatcacaggtttcactgcttctcttccattcaaattcagaaaaagaaactcttaaagaaaggaaccgctatggtttgctgaatcatctgtagtttgaatcgcaatttgatagccatttctatctgatataggcaatattcatgagcaatgtggttaacagaagcggccgattcaaatttgcacccgcttagctgtcttacttaacagggttgagacagctgcgagcacaaatggattgtctagatgattgtcttctgttatttctgtaaattgataaactgcgttgtatactttttcacagtaaagcattttataatttagtaagttacatatgcgaagcatgctgatttaaatttttgagttggtctcttctgtcctaactaatataagtgaatcaccttttgggtggtattttacaagtttttgtgacacattatgcagatggactctcgtagcctcgctgtggaatttgcgcctttgatcatgtggcagcaaggcgatgctggcacagatttgcgtaaccacctcagttaccttgtaaccacct

SEQ ID NO: 13857 - DNA, 520 bp, Setaria italica
  Peptide Sequence Number=SeqID_79831
ttcagagacaaaggagaaggttgctgtagtacaggtcaaagtcgaagaggctgctaaaaagactgcggataagagcaagactattttgaacaatattgaacgctggcagaaggtctgtgatttagaattctgttaccttgtaacacaatttcacttttttggtgtacaatgctgattcttatttctgattatttgccccagggagtcgcaagcactgatggtatgctcgtaactcagttgtcttatccacgatgcatatctatcataattgtcaaagcaattaaatatttttgtagcatccaagcagctaaattttcttgtaacatctgagcagctaatgtagcgtagtgatagttctacatttgttgtaagccttaggttgtatctgcatgattagtatttctgttccgtctattggtgaatagtgatcagtgagaaatgatcctctgattacaaaatggaaatagttgttgaagccattgtacagcaagagcagtaacaaaaacgagaaatgacctcc

SEQ ID NO: 13858 - DNA, 1629 bp, Setaria italica
  misc_feature (1621)..(1629): n is a, c, g, or t
  Peptide Sequence Number=SeqID_79832
gagcgccccaaacaaaaacccaactcgttttcagctcgcggaacgggcggcagagtcccagtcctctcgctttctcccccgcgattcgcctcgcttccatccggttcgattcgggagccggagccagagagggagaggtagcgatgccgctggcggagtcgccccagtggcgccggaaggccaccgatttcttctcaacgtccagtttcaagctgaagcaggcagggcaatcggctggggataatatagctgatgttgctgggaaggttgggtccgtggtgaagactcgctgggctgtcttccaggaggctaggcagcagcagcagcagcgtccaccgggtgagacagtgcaggagcgtttcatcacagctgctgcctccactgggttgcttttcaggaagggcatttcagagacaaaggagaaggttgctgtgggaaaggtcaaagtcgaagaggctgctaaaaagactgcggataagagcaagactattttgaacaatattgaacgctggcagaagggagtcgcaagcactgatgtatttggtgttcctattgaggccactgtacaacgagagcagtctggtaaagctgtgcccttgatgctagtgaggtgtgcagactacctggttatatcaggtttgagtaatgagtacttattcaaatctgaaggtgaccgaaaagttcttcagcagttagtttctctttacaatgaagactcgggtgcatctttacctgaaggtgtgaaccctattgatgtaggtgcactggtgaagtgttaccttgccagcatccctgaaccgcttactacatttgcactttatgatgagcttagagatgcgagggttagcattcctgatcttagaaacatattgaagaagcttccaaatgttaactacatgacgctagagtttgttacagcgctgctacttagagtaagccgcaaatcatcacttaacaagatggactctcgtagcctcgctgtggaatttgcgcctttgatcatgtggcagcaaggcgatgctggcacagatttgcgtaaccacctcaagtttaccttgaaaccacctcctaaaattgtggacacgacatcaaataccgctgcatgggacctgttagatgaggatgatgaggacgcctcatcccagatccccttggatgacgcttcgcccccagactacagctccatcgaggtcatccagtgtctgatcgagcatcacaatgccattttcaccgacgcgaatgaaaccgtatggagatgattggaatctcctctgtagatctctccggtgttagctcgtgctatgtacaagttccaggtaggagggtgtattaccgcacgctattgttagggataagcattttggccggaacatttttggggtaggtttgtatatacgctagtattaattcttaacgggaagaaatcttgtaggatctggtcatgcttcatcaataataatgtacttggatgtaaaccacatggccgtggtgtgctgttttgacgcatttgctgaattctctgttgataaggtgctgcatgggatgcttttgttgttgtgtattaaacacaaaaaactggtatacgtgttgaattggtgatagctttcctgtctttagaacnnnnnnnnn

SEQ ID NO: 13859 - DNA, 659 bp, Setaria italica
  Peptide Sequence Number=SeqID_79833
agcgacgtcgccgtcgaggagaaggagagctgcgggtccaacgacgtgtccgtcgtcagcttcgacggctccagcctcggcggccggagcgggctcagctgccacaagccgggcaggagccggctcaagggcgcccggagcctgccgcgccgcaaggtggcgtcgtcggaccaccgcctccaggcaagatcacacaaggtgagcaagaaagggcacaaggagcaggcgccgccgcacaaggaccaagccgaggccgacggctacgacgccgcttgccagccgccgacggattactgaggcggacaccggagctctgcgaccatctgctgtgcatacactacgatttggatttgcaacctcaagtagctgacgatttgtttgggtttgcaacagtctgaaagactgccacatgtaaagttcttcgctaaatgttgcatcagatgtcgctgtctctaactttgctcctcccaaacaaaatctgccgtgcaatgcccttgctgcttcaccgacatgacgccgccgcagccgacgagtaaacggcccggcgaaggctacacggtaggacaaaggaggagcaacgagaaaccatacaaacacacgggggtgatactgtgaatctgtttccattccatatcaactgcatccgatctacaccgcac

SEQ ID NO: 13860 - DNA, 495 bp, Setaria italica
  Peptide Sequence Number=SeqID_79834
gaaaaatattgccaccaaacaatatccttactgttgaatgactgtttcatgcagcctcatttagtatgcatcacaaattctggaaccttaacagttctgattggttcagcgcataatcccatttactcatctaactatagcttcgcatacttgtcgacataccccattactaattttgtcaccttcctttgagaggattgcacataatgtttaatcttggcaggtgtttttggaatatgactgctagggactgaattagaaaccttatcaactgttttcctgacaatagttttgaaagcctctttgctcatgtttccctgcctccacgatggcttaagaacttccttaacaaaatctgcaatagcaaccttaaaaagcttcattgatcgggaatccttacccttcttatttttgtgcaatgtttggtcattgtctaattattctacctaggtaattatttctttggtttagtttttccttttagttttctttttt

SEQ ID NO: 13861 - DNA, 2793 bp, Setaria italica
  misc_feature (17)..(17): n is a, c, g, or t
  Peptide Sequence Number=SeqID_79835
gttcaagtcatccagcntcagcatgtacatttaccatccagaacaaagtctttcagcagctgtttgcggaaatagcgcacactgcataggtctcatcctattatcccatgttggggggaagaaaatggaaataccatatgaacagaacagctaaggacatgccttacaaggtacaagagatcaggctgcaaattatcaaaactggaagaaaacctagatgcgtgatattccaaaaaatacagcatttcctgcagaactagagcgaagtaccttactgttgaatgactgtttcatgcagcctcatttagtatgcatcacaaattctggaaccttaacagttctgattggttcagcgcataatcccatttactcatctaactatagcttcgcatacttgtcgacataccccattactaattttgtcaccttcctttgagaggattgcacataatgtttaatcttggcaggtgtttttggaatatgactgctagggactgaattagaaaccttatcaactgttttcctgacaatagtttttgaaagcctctttgctcatgtttccctgcctccacgatggcttaagaacttccttaacaaaatctgcaatagcaaccttaaaaagcttcattgatcgggaatccttacccttcttatttttgtgcaatgtttggtcattgtcaatatcaccaggaatatctgagttccagtctttagcacccaggaattcaggacttgcattctccaccacacctgcttcggtatctgctgccacctctccaagtccctcaacttctgactcagcaacaacccccaatccgtacatattttcactgtccacttctatattcataagttttgacacatcacgactatcagcactccggtttttctctttactaggatctaccttgttgattgaactgcttgatggttcaatactgtcaagcaatggatcatatggagcaccggaagcaaagtcctgacggagtggcttttgtttattgggcacagcttctgcagaactttcgtgggcatgtgttctggattcaggaaatgattgaccaaaaggagacagggcattcatgtgttctgcttttgtggaaatagagtcaactgcatttgggcttacaacaggaccaatatctagacttggatctgtttgttcaaaggtagatgcaaatgggttgtagtggggtttgatagatgatttaggcaaaccaacatcagataaaggaccaagatcgctacttccaggtagatttgatggaaatctctggaaagaaggataaaccaagttagttcctgaatccagattccctggaggctggtgctgaccatatggcggatgatgagatgaataagatagacctacaccaccagaatactcagaccatctgtctggaggaggtactggagcattttcaacagaaatggcagaaggctgctggtgagaaggaactgctggcgggcgcgtatgatgatggaaatccaatggtctaggatgagacggatctggtggaggatagcttctcatctggttctgcatgaattcattggctggtgcgataacattatgctggaactgcgtttgagggaattctgaagttgcaaataatgactgtcctggtagccgaaccatattcgaggatggcatgtgttcaggagggtacaaactctgaggatgaggctggagatgatcacatgccacggagttcttggtagtctgtactgatgcaaacggggcacttccagcagattggcccacagggatttcagccactggttgtgaaggctcagaaattaaattgtcaccatgacaattgtatccaagggcaccatcaggtgcgcccttatctcccactttgccaattaaatcatttgaagaactatcaaatttctctgtcagcaccaggcccttttgctgagcaattctatctcctgaattaccttctacagaaggatgaatccgcttagcaaatggtggcctgctttgctttccaggtgaggaactttgggatggactgtccttgtttgaccccagtggactacgacttctatcctgaggcgactggctccaggttcgtttcttttgtctcctctcatgccttttactcatttgccctccattaaattcactgtcacttaaatcttctttggctagatgcccgagcacatctgtgccatgcttcactggatttctttcatccttgagatgatactttccagcctcaacatgttcctcagtgccaggaggggaattcacatttctttttgcattaggatgtttgtcataaccaatttcagtatttctatcaattggatgattgagcttgttatcttcaggtaatacaacgagggtgctggcaccatcaggaccagcagcaacctcatttgcactgtcatcggaggcataaccttgtattagtttgaatgggctcccaccatccacagttacatgtgcagttttagcattttcaccactgccaggtggcaaatgcttgcccaggcttgaaacatcactgacagactttgacacattaacatctccagtacattcagcagtcacaagggaagaattatctggggtaagaggttgccttgatggagagtcctcatccccatccatatccatgtctgagtcatcagacacaattagctgagtagctgctttcagagttttggcatcaccaccaccaccaccatcaccacattcttcttttcctcctgcctctgcaccccatgattgtgcaactacaggagcgggaggtgcagacagcaatggaggcggaggag
